(19) United States
(12) Patent Application Publication
(10) Pub. No.: US 2009/0191541 A1
(43) Pub. Date: Jul. 30, 2009

(54) Nucleic Acid Molecules and Other Molecules Associated with Plants

(76) Inventor: Joseph Byrum, West Des Moines, IA (US)

Correspondence Address: MONSANTO COMPANY (A&P), 800 N. LINDBERGH BOULEVARD, MAILZONE E2NA, ST. LOUIS, MO, 63167, UNITED STATES, 314-694-1000, NANCY.M.HUELSKAMP@MONSANTO.COM

(21) Appl. No.: 09/552,087

(22) Filed: Apr. 21, 2000

Related U.S. Application Data
Application No. 09/552,087 is a continuation-in-part of application No. 09/521,640, filed on Mar. 10, 2000, now abandoned.
Application No. 09/521,640 is a continuation-in-part of application No. 09/421,106, filed on Oct. 15, 1999, now abandoned.
(60) Provisional application No. 60/130,465, filed on Apr. 22, 1999.

(51) Int. Cl. C12Q 1/68; C07H 21/04

(52) U.S. Cl. 435/6; 536/24.3

(57) ABSTRACT

The present invention is in the field of plant genetics. More specifically the invention relates to nucleic acid molecules and nucleic acid molecules that contain markers, in particular, single nucleotide polymorphism (SNP) and repetitive element markers. In addition, the present invention provides nucleic acid molecules having regulatory elements or encoding proteins or fragments thereof. The invention also relates to proteins and fragments of proteins so encoded and antibodies capable of binding the proteins. The invention also relates to methods of using the nucleic acid molecules, markers, repetitive elements and fragments of repetitive elements, regulatory elements, proteins and fragments of proteins.

### FIELD OF THE INVENTION

[0001] The present invention is in the field of plant genetics. More specifically the invention relates to nucleic acid molecules and nucleic acid molecules that contain markers, in particular, single nucleotide polymorphism (SNP) and repetitive element markers. In addition, the present invention provides nucleic acid molecules having regulatory elements or encoding proteins or fragments thereof and nucleic acid molecules present in non-coding regions. The invention also relates to proteins and fragments of proteins so encoded and antibodies capable of binding the proteins. The invention also relates to methods of using the nucleic acid molecules, for example, for gene identification and analysis, markers, repetitive elements and fragments of repetitive elements, regulatory elements, proteins and fragments of proteins.

### BACKGROUND OF THE INVENTION

### I. Sequence Tagged Connector Nucleic Acid Molecules and the Bacterial Artificial Chromosomes (BACS) Containing these Sequences

[0002] Sequence tagged connectors, or STCs, are sequences of insert data generated from both ends (at the vector-insert point) of a BAC clone in a genomic library. These sequences, and BACs containing these STC sequences, can be used, for example, for marker development, genetic mapping or linkage analysis, marker assisted breeding, and physical genome mapping (Venter, et al., Nature, 381:364-366 (1996), the entirety of which is herein incorporated by reference; Choi and Wing, http:www.genome.clemson.edu/protocols2-nj.html July, 1998). STCs can represent a copy of up to a full length of a mRNA transcript, a promoter element or part of a promoter, can contain simple sequence repeats (also called microsatellites) repetitive elements or fragments of repetitive elements, other DNA markers, or any combination thereof.

[0003] Markers have been used in genetic mapping which can be a step in isolating a gene. Genetic mapping or linkage analysis is based on the level at which markers and genes are co-inherited (Rothwell, Understanding Genetics. 4^{th} Ed., Oxford University Press, New York, p. 703 (1988). Statistical tests like chi-square analysis can be used to test the randomness of segregation or linkage (Kochert, The Rockefeller Foundation International Program on Rice Biotechnology, University of Georgia, Athens, Ga., pp 1-14 (1989), the entirety of which is herein incorporated by reference. In linkage mapping, the proportion of recombinant individuals out of the total mapping population provides the information for determining the genetic distance between the loci (Young, Encyclopedia of Agricultural Science, Vol. 3, pp 275-282 (1994), the entirety of which is herein incorporated by reference).

[0004] Classical mapping studies utilize easily observable, visible traits instead of molecular markers. These visible traits are also known as naked eye polymorphisms. These traits can be morphological like plant height, fruit size, shape and color or physiological like disease response, photoperiod sensitivity or crop maturity. Visible traits are useful and are still in use because they represent actual phenotypes and are easy to score without any specialized lab equipment. By contrast, the other types of genetic markers are arbitrary loci for use in linkage mapping and often not associated to specific plant phenotypes (Young, Encyclopedia of Agricultural Science, Vol. 3, pp. 275-282 (1994). Many morphological markers cause such large effects on phenotype that they are undesirable in breeding programs. Many other visible traits have the disadvantage of being developmentally regulated (i.e., expressed only at certain stages; or in specific tissues and organs). Often times, visible traits mask the effects of linked minor genes making it nearly impossible to identify desirable linkages for selection (Tanksely, et al., Biotech. 7:257-264 (1989), the entirety of which is herein incorporated by reference).

[0005] Although a number of important agronomic characters are controlled by loci having major effects on phenotype, many economically important traits, such as yield and some forms of disease resistance, are quantitative in nature. This type of phenotypic variation in a trait is characterized by continuous, normal distribution of phenotypic values in a particular population (Beckmann and Soller, Oxford Surveys of Plant Molecular Biology, Miffen. (ed.), Vol. 3, Oxford University Press, UK., pp. 196-250 (1986), the entirety of which is herein incorporated by reference). Such traits are governed by a large number of loci, Quantitative Trait Loci (QTL), each of which can make a small positive or negative effect to the final phenotype value of the trait (Beckmann and Soller, Oxford Surveys of Plant Molecular Biology, Miffen. (ed.), Vol. 3, Oxford University Press, U.K., pp. 196-250 (1986). Loci contributing to such genetic variation are often termed minor genes as opposed to major genes with large effects that follow a Mendelian pattern of inheritance. Polygenic traits are also predicted to follow a Mendelian type of inheritance, however the contribution of each locus is expressed as an increase or decrease in the final trait value.

[0006] Markers have been used in physical mapping studies with BAC libraries made from plant genomes. Such mapping studies have been carried out in rice (Kim et al., Genomics 34:213-218 (1996), herein incorporated by reference; Hang, Plant Mol. Biol. 35:129-133 (1997), herein incorporated by reference; Zhang and Wing., Plant Mol. Bio. 35:115-127 (1997) herein incorporated by reference; Chen et al., Proc. Acad. Sci. (U.S.A.) 94:3431-3435 (1997) herein incorporated by reference; Wang et al., Plant J. 7:525-533 (1995) herein incorporated by reference) sorghum (Zwick et al., Genetics 148:1983-1992 (1998) herein incorporated by reference; Zhang, et al., Molecular Breeding 2:11-24 (1996) the entirety of which is herein incorporated by reference) maize, (Chen, et al., Proc. Acad. Sci. (U.S.A.) 94:3431-3435 (1997), and Arabidopsis (Kim, et al., Genomics 34:213-218 (1996) the entirety of which is herein incorporated by reference.

[0007] Repetitive elements have been used in physical mapping in cereals (Ananiev, et al., Proc. Acad. Sci. (U.S.A.) 95:13073-8 (1998), the entirety of which is herein incorporated by reference; McLean et al., Mol Gen Genet. 253:687-694 (1997), the entirety of which is herein incorporated by reference).

### II. Sequence Comparisons

[0008] STCs and sequenced BACs can be compared, for example, to sequences that encode promoters or proteins. These homologies can be determined by similarity searches (Adams, et al., Science 252:1651-1656 (1991), herein incorporated by reference).

[0009] A characteristic feature of a DNA sequence is that it can be compared with other DNA sequences. Sequence comparisons can be undertaken by determining the similarity of the test or query sequence with sequences in publicly available or propriety databases (“similarity analysis”) or by searching for certain motifs (“intrinsic sequence analysis”)(e.g., cis elements)(Coulson, Trends in Biotechnology, 12:76-80 (1994), the entirety of which is herein incorporated by reference; Birren, et al., Genome Analysis, 1:543-559 (1997), the entirety of which is herein incorporated by reference).

[0010] Similarity analysis includes database search and alignment. Examples of public databases include the DNA Database of Japan (DDBJ)(http://www.ddbj.nig.ac.jp/); Genebank (http://www.ncbi.nlm.nih.gov/web/Genbank/Index.htlm); and the European Molecular Biology Laboratory Nucleic Acid Sequence Database (EMBL) (http://www.ebi.ac.uk/ebi_docs/embl_db.html). A number of different search algorithms have been developed, one example of which are the suite of programs referred to as BLAST programs. There are five implementations of BLAST, three designed for nucleotide sequences queries (BLASTN, BLASTX, and TBLASTX) and two designed for protein sequence queries (BLASTP and TBLASTN) (Coulson, Trends in Biotechnology, 12:76-80 (1994); Birren, et al., Genome Analysis, 1:543-559 (1997)).

[0011] BLASTN takes a nucleotide sequence (the query sequence) and its reverse complement and searches them against a nucleotide sequence database. BLASTN was designed for speed, not maximum sensitivity, and may not find distantly related coding sequences. BLASTX takes a nucleotide sequence, translates it in three forward reading frames and three reverse complement reading frames, and then compares the six translations against a protein sequence database. BLASTX is useful for sensitive analysis of preliminary (single-pass) sequence data and is tolerant of sequencing errors (Gish and States, Nature Genetics, 3:266-272 (1993), the entirety of which is herein incorporated by reference). BLASTN and BLASTX may be used in concert for analyzing STC data (Coulson, Trends in Biotechnology, 12:76-80 (1994); Birren, et al., Genome Analysis, 1:543-559 (1997).

[0012] Given a coding nucleotide sequence and the protein it encodes, it is often preferable to use the protein as the query sequence to search a database because of the greatly increased sensitivity to detect more subtle relationships. This is due to the larger alphabet of proteins (20 amino acids) compared with the alphabet of nucleic acid sequences (4 bases), where it is far easier to obtain a match by chance. In addition, with nucleotide alignments, only a match (positive score) or a mismatch (negative score) is obtained, but with proteins, the presence of conservative amino acid substitutions can be taken into account. Here, a mismatch may yield a positive score if the non-identical residue has physical/chemical properties similar to the one it replaced. Various scoring matrices are used to supply the substitution scores of all possible amino acid pairs. A general purpose scoring system is the BLOSUM62 matrix (Henikoff and Henikoff, Proteins, 17:49-61 (1993), the entirety of which is herein incorporated by reference), which is currently the default choice for BLAST programs. BLOSUM62 is tailored for alignments of moderately diverged sequences and thus may not yield the best results under all conditions. Altschul, J. Mol. Biol. 36:290-300 (1993), the entirety of which is herein incorporated by reference, uses a combination of three matrices to cover all contingencies. This may improve sensitivity, but at the expense of slower searches. In practice, a single BLOSUM62 matrix is often used but others (PAM40 and PAM250) may be attempted when additional analysis is necessary. Low PAM matrices are directed at detecting very strong but localized sequence similarities, whereas high PAM matrices are directed at detecting long but weak alignments between very distantly related sequences.

[0013] Homologues in other organisms are available that can be used for comparative sequence analysis. Multiple alignments are performed to study similarities and differences in a group of related sequences. CLUSTAL W is a multiple sequence alignment package available that performs progressive multiple sequence alignments based on the method of Feng and Doolittle, J. Mol. Evol. 25:351-360 (1987), the entirety of which is herein incorporated by reference. Each pair of sequences is aligned and the distance between each pair is calculated; from this distance matrix, a guide tree is calculated, and all of the sequences are progressively aligned based on this tree. A feature of the program is its sensitivity to the effect of gaps on the alignment; gap penalties are varied to encourage the insertion of gaps in probable loop regions instead of in the middle of structured regions. Users can specify gap penalties, choose between a number of scoring matrices, or supply their own scoring matrix for both the pairwise alignments and the multiple alignments. CLUSTAL W for UNIX and VMS systems is available at: ftp.ebi.ac.uk. Another program is MACAW (Schuler et al., Proteins, Struct. Func. Genet, 9:180-190 (1991), the entirety of which is herein incorporated by reference, for which both Macintosh and Microsoft Windows versions are available. MACAW uses a graphical interface, provides a choice of several alignment algorithms, and is available by anonymous ftp at: ncbi.nlm.nih.gov (directory/pub/macaw).

[0014] Sequence motifs are derived from multiple alignments and can be used to examine individual sequences or an entire database for subtle patterns. With motifs, it is sometimes possible to detect distant relationships that may not be demonstrable based on comparisons of primary sequences alone. Currently, the largest collection of sequence motifs in the world is PROSITE (Bairoch and Bucher, Nucleic Acid Research, 22:3583-3589 (1994), the entirety of which is herein incorporated by reference). PROSITE may be accessed via either the ExPASy server on the World Wide Web or anonymous ftp site. Many commercial sequence analysis packages also provide search programs that use PROSITE data.

[0015] A resource for searching protein motifs is the BLOCKS E-mail server developed by S. Henikoff, Trends Biochem Sci., 18:267-268 (1993), the entirety of which is herein incorporated by reference; Henikoff and Henikoff, Nucleic Acid Research, 19:6565-6572 (1991), the entirety of which is herein incorporated by reference; Henikoff and Henikoff, Proteins, 17:49-61 (1993). BLOCKS searches a protein or nucleotide sequence against a database of protein motifs or “blocks.” Blocks are defined as short, ungapped multiple alignments that represent highly conserved protein patterns. The blocks themselves are derived from entries in PROSITE as well as other sources. Either a protein or nucleotide query can be submitted to the BLOCKS server; if a nucleotide sequence is submitted, the sequence is translated in all six reading frames and motifs are sought in these conceptual translations. Once the search is completed, the server will return a ranked list of significant matches, along with an alignment of the query sequence to the matched BLOCKS entries.

[0016] Conserved protein domains can be represented by two-dimensional matrices, which measure either the frequency or probability of the occurrences of each amino acid residue and deletions or insertions in each position of the domain. This type of model, when used to search against protein databases, is sensitive and usually yields more accurate results than simple motif searches. Two popular implementations of this approach are profile searches (such as GCG program ProfileSearch) and Hidden Markov Models (HMMs) (Krough, et al., J. Mol. Biol. 235:1501-1531 (1994); Eddy, Current Opinion in Structural Biology 6:361-365 (1996), both of which are herein incorporated by reference in their entirety). In both cases, a large number of common protein domains have been converted into profiles, as present in the PROSITE library, or HHM models, as in the Pfam protein domain library (Sonnhammer, et al., Proteins 28:405-420 (1997), the entirety of which is herein incorporated by reference). Pfam contains more than 500 HHM models for enzymes, transcription factors, signal transduction molecules, and structural proteins. Protein databases can be queried with these profiles or HMM models, which will identify proteins containing the domain of interest. For example, HMMSW or HMMFS, two programs in a public domain package called HMMER (Sonnhammer, et al., Proteins 28:405-420 (1997)) can be used.

[0017] PROSITE and BLOCKS represent collected families of protein motifs. Thus, searching these databases entails submitting a single sequence to determine whether or not that sequence is similar to the members of an established family. Programs working in the opposite direction compare a collection of sequences with individual entries in the protein databases. An example of such a program is the Motif Search Tool, or MoST (Tatusov, et al., Proc. Natl. Acad. Sci. 91:12091-12095 (1994), the entirety of which is herein incorporated by reference). On the basis of an aligned set of input sequences, a weight matrix is calculated by using one of four methods (selected by the user); a weight matrix is simply a representation, position by position in an alignment, of how likely a particular amino acid will appear. The calculated weight matrix is then used to search the databases. To increase sensitivity, newly found sequences are added to the original data set, the weight matrix is recalculated, and the search is performed again. This procedure continues until no new sequences are found.

### SUMMARY OF THE INVENTION

[0018] The present invention provides a substantially purified nucleic acid molecule having a nucleic acid sequence selected from the group consisting of SEQ ID NO: 1 through SEQ ID NO: 20082 or complements thereof.

[0019] The present invention also provides a substantially purified nucleic acid molecule, the nucleic acid molecule capable of specifically hybridizing to a second nucleic acid molecule having a nucleic acid sequence selected from the group consisting of SEQ ID NO: 1 through SEQ ID NO: 20082 or complements thereof.

[0020] The present invention also provides a substantially purified nucleic acid molecule encoding a protein or fragment thereof, wherein the protein or fragment thereof is selected from the group consisting a Glycine max protein or fragment thereof from Table 1.

[0021] The present invention also provides a substantially purified nucleic acid molecule encoding a Glycine max protein or fragment thereof, wherein the Glycine max protein or fragment thereof is encoded by a nucleic acid sequence selected from the group consisting of SEQ ID NO: 1 through SEQ ID NO: 20082 or complements thereof or fragments of either.

[0022] The present invention also provides a substantially purified protein or fragment thereof encoded by a nucleic acid sequence selected from the group that encodes a Glycine max protein or fragment thereof from Table 1.

[0023] The present invention also provides a substantially purified protein or fragment thereof encoded by a first nucleic acid molecule which specifically hybridizes to a second nucleic acid molecule, the second nucleic acid molecule selected from the group that encodes a Glycine max protein or fragments thereof from Table 1.

[0024] The present invention also provides a substantially purified protein or fragment thereof encoded by a nucleic acid molecule comprising a nucleic acid sequence selected from the group consisting of SEQ ID NO: 1 through SEQ ID NO: 20082 or complements thereof or fragments of either.

[0025] The present invention also provides a transformed cell having a nucleic acid molecule which comprises: (A) an exogenous promoter region which functions in the cell to cause the production of a mRNA molecule; which is linked to (B) a structural nucleic acid molecule, wherein the structural nucleic acid molecule encodes a protein or fragment thereof selected from the group consisting of a Glycine max protein or fragment thereof in Table 1; which is linked to (C) a 3′ non-translated sequence that functions in the cell to cause termination of transcription and addition of polyadenylated ribonucleotides to a 3′ end of the mRNA molecule.

[0026] The present invention also provides a plant cell, a mammalian cell, a bacterial cell, an insect cell and a fungal cell transformed with a nucleic acid molecule of the present invention.

[0027] The present invention also provides a computer readable medium having recorded thereon one or more of the nucleotide sequences depicted in SEQ ID NO: 1 through SEQ ID NO: 20082 or complements thereof.

[0028] The present invention also provides a computer readable medium having recorded thereon one or more of the nucleotide sequences encoding a protein or fragment thereof, wherein the protein or fragment thereof is selected from the group consisting of a Glycine max protein or fragment thereof in Table 1.

[0029] The present invention provides a computer readable medium having recorded thereon one or more of the nucleotide sequences depicted in SEQ ID NO: 1 through SEQ ID NO: 20082.

[0030] The present invention provides a method of introgressing a trait into a plant comprising using a nucleic acid marker for marker assisted selection of the plant, the nucleic acid marker complementary to a nucleic acid sequence selected from the group consisting of SEQ ID NO: 1 through SEQ ID NO: 20082 or complements thereof, and introgressing the trait into a plant.

[0031] The present invention provides a method for screening for a trait comprising interrogating genomic DNA for the presence or absence of a marker molecule that is genetically linked to a nucleic acid sequence complementary to a nucleic acid sequence selected from the group consisting of SEQ ID NO: 1 through SEQ ID NO: 20082 or complements thereof; and detecting the presence or absence of the marker.

[0032] The present invention provides a method for determining the likelihood of the level, presence or absence of a trait in a plant comprising the steps of: (A) obtaining genomic DNA from the plant; (B) detecting a marker nucleic acid molecule; the marker nucleic acid molecule wherein the marker nucleic acid molecule specifically hybridizes with a nucleic acid sequence that is genetically linked to a nucleic acid sequence complementary to a nucleic acid sequence selected from the group consisting of SEQ ID NO: 1 through SEQ ID NO: 20082 or complements thereof; (C) and determining the level, presence or absence of the marker nucleic acid molecule, wherein the level, presence or absence of the marker nucleic acid molecule is indicative of the likely presence in the plant of the trait.

[0033] The present invention provides a method for determining a genomic polymorphism in a plant that is predictive of a trait comprising the steps: (A) incubating a marker nucleic acid molecule, under conditions permitting nucleic acid hybridization, and a complementary nucleic acid molecule obtained from the plant, the marker nucleic acid molecule having a nucleic acid sequence selected from the group consisting of SEQ ID NO: 1 through SEQ ID NO: 20082 or complements thereof; (B) permitting hybridization between the marker nucleic acid molecule and the complementary nucleic acid molecule obtained from the plant; and (C) detecting the presence of the polymorphism.

[0034] The present invention provides a method of determining an association between a polymorphism and a plant trait comprising: (A) hybridizing a nucleic acid molecule specific for the polymorphism to genetic material of a plant, wherein the nucleic acid molecule comprises a nucleic acid sequence selected from the group consisting of SEQ ID NO: 1 through SEQ ID NO: 20082 or complements thereof; and (B) calculating the degree of association between the polymorphism and the plant trait.

### DETAILED DESCRIPTION OF THE INVENTION

### Agents of the Invention

[0035] (a) Nucleic Acid Molecules

[0036] Agents of the present invention include nucleic acid molecules and more specifically BACs and STC nucleic acid molecules or nucleic acid fragment molecules thereof.

[0037] A subset of the nucleic acid molecules of the present invention includes nucleic acid molecules that are marker molecules. Another subset of the nucleic molecules of the present invention include nucleic acid molecules that are promoters and/or regulatory elements. Another subset of the nucleic acid molecules of the present invention include nucleic acid molecules that encode proteins or fragments of proteins. In a preferred embodiment the nucleic acid molecules Of the present invention are derived from Glycine max (soybean) and more preferably Glycine max, genotype A3244 (Asgrow, Des Moines, Iowa).

[0038] Fragment STC nucleic acid molecules and fragments of BACs may encode significant portion(s) of, or indeed most of, the STC or BAC nucleic acid molecule. In addition, a fragment nucleic acid molecule can encode a Glycine max protein or fragment thereof. Alternatively, the fragments may comprise smaller oligonucleotides (having from about 15 to about 250 nucleotide residues, and more preferably, about 15 to about 30 nucleotide residues).

[0039] The term “substantially purified”, as used herein, refers to a molecule separated from substantially all other molecules normally associated with it in its native state. More preferably a substantially purified molecule is the predominant species present in a preparation. A substantially purified molecule may be greater than 60% free, preferably 75% free, more preferably 90% free, and most preferably 95% free from the other molecules (exclusive of solvent) present in the natural mixture. The term “substantially purified” is not intended to encompass molecules present in their native state.

[0040] The agents of the present invention will preferably be “biologically active” with respect to either a structural attribute, such as the capacity of a nucleic acid to hybridize to another nucleic acid molecule, or the ability of a protein to be bound by an antibody (or to compete with another molecule for such binding). Alternatively, such an attribute may be catalytic, and thus involve the capacity of the agent to mediate a chemical reaction or response.

[0041] The agents of the present invention may also be recombinant. As used herein, the term recombinant means any agent (e.g., DNA, peptide etc.), that is, or results, however indirect, from human manipulation of a nucleic acid molecule.

[0042] It is understood that the agents of the present invention may be labeled with reagents that facilitate detection of the agent (e.g., fluorescent labels (Prober, et al., Science 238:336-340 (1987); Albarella et al., EP 144914, chemical labels (Sheldon et al., U.S. Pat. No. 4,582,789; Albarella et al., U.S. Pat. No. 4,563,417, modified bases (Miyoshi et al., EP 119448, all of which are hereby incorporated by reference in their entirety).

[0043] It is further understood, that the present invention provides bacterial, viral, microbial, insect, fungal and plant cells comprising the agents of the present invention.

[0044] The genetic variability resulting from transposable elements ranges from changes in the size and arrangement of whole genomes to changes in single nucleotides. They may produce major effects on phenotypic traits or small silent changes detectable only at the DNA sequence level. Transposable elements may also produce variation when they excise, leaving small footprints of their previous presence (Kidwell and Lisch, Proc. Natl. Acad. Sci. (U.S.A.) 94:7704-7711 (1997)).

[0045] In addition, other markers such as AFLP markers, RFLP markers, RAPD markers, phenotypic markers or isozyme markers can be utilized (Walton, Seed World 22-29 (July, 1993), the entirety of which is herein incorporated by reference; Burow and Blake, Molecular Dissection of Complex Traits, 13-29, Eds. Paterson, CRC Press, New York (1988), the entirety of which is herein incorporated by reference). DNA markers can be developed from nucleic acid molecules using restriction endonucleases, the PCR and/or DNA sequence information. RFLP markers result from single base changes or insertions/deletions. These codominant markers are highly abundant in plant genomes, have a medium level of polymorphism and are developed by a combination of restriction endonuclease digestion and Southern blotting hybridization. CAPS are similarly developed from restriction nuclease digestion but only of specific PCR products. These markers are also codominant, have a medium level of polymorphism and are highly abundant in the genome. The CAPS result from single base changes and insertions/deletions. Another marker type, RAPDs, are developed from DNA amplification with random primers and result from single base changes and insertions/deletions in plant genomes. They are dominant markers with a medium level of polymorphisms and are highly abundant. AFLP markers require using the PCR on a subset of restriction fragments from extended adapter primers. These markers are both dominant and codominant, are highly abundant in genomes and exhibit a medium level of polymorphism. SSRs require DNA sequence information. These codominant markers result from repeat length changes, are highly polymorphic, and do not exhibit as high a degree of abundance in the genome as CAPS, AFLPs and RAPDs. SNPs also require DNA sequence information. These codominant markers result from single base substitutions. They are highly abundant and exhibit a medium of polymorphism (Rafalski, et al., In: Nonmammalian Genomic Analysis, ed. Birren and Lai, Academic Press, San Diego, Calif., pp. 75-134 (1996), the entirety of which is herein incorporated by reference). Methods to isolate such markers are known in the art.

[0046] Long Terminal repeat retrotransposons and MITEs have been found to be associated with the genes of many plants where some of the transposable elements contribute regulatory sequences. MITEs such as the Tourist element in maize and the Stowaway element in Sorghum are found frequently in the 5′ and 3′ noncoding regions of genes and are frequently associated with the regulatory regions of genes of diverse flowering plants (Kidwell and Lisch, Proc. Natl. Acad. Sci. (U.S.A.) 94:7704-7711 (1997)). It is understood that one or more of the Long Terminal repeat retrotransposons and/or MITES may be a marker, and even more preferably a marker for a gene.

[0047] (ii) Nucleic Acid Molecules Comprising Regulatory Elements

[0048] Another class of agents of the present invention are nucleic acid molecules having promoter regions or partial promoter regions, including those located within SEQ ID NO: 1 through SEQ ID NO:20082. Such promoter regions are typically found upstream of the trinucleotide ATG sequence at the start site of a protein coding region.

[0049] As used herein, a promoter region is a region of a nucleic acid molecule that is capable, when located in cis to a nucleic acid sequence that encodes for a protein or fragment thereof to function in a way that directs expression of one or more mRNA molecules that encodes for the protein or fragment thereof.

[0050] Promoters of the present invention can include between about 300 bp upstream and about 10 kb upstream of the trinucleotide ATG sequence at the start site of a protein coding region. Promoters of the present invention can preferably include between about 300 bp upstream and about 5 kb upstream of the trinucleotide ATG sequence at the start site of a protein coding region. Promoters of the present invention can more preferably include between about 300 bp upstream and about 2 kb upstream of the trinucleotide ATG sequence at the start site of a protein coding region. Promoters of the present invention can include between about 300 bp upstream and about 1 kb upstream of the trinucleotide ATG sequence at the start site of a protein coding region. While in many circumstances a 300 bp promoter may be sufficient for expression, additional sequences may act to further regulate expression, for example, in response to biochemical, developmental or environmental signals.

[0051] It is also preferred that the promoters of the present invention contain a CAAT and a TATA cis element. Moreover, the promoters of the present invention can contain one or more cis elements in addition to a CAAT and a TATA box.

[0052] By “regulatory element” it is intended a series of nucleotides that determines if, when, and at what level a particular gene is expressed. The regulatory DNA sequences specifically interact with regulatory or other proteins. Many regulatory elements act in cis (“cis elements”) and are believed to affect DNA topology, producing local conformations that selectively allow or restrict access of RNA polymerase to the DNA template or that facilitate selective opening of the double helix at the site of transcriptional initiation. Cis elements occur within, but are not limited to promoters, and promoter modulating sequences (inducible elements). Cis elements can be identified using known cis elements as a target sequence or target motif in the BLAST programs of the present invention.

[0053] Promoters of the present invention include homologues of cis elements known to effect gene regulation that show homology with the nucleic acid molecules of the present invention. These cis elements include, but are not limited to, oxygen responsive cis elements (Cowen, et al., J. Biol. Chem. 268(36):26904-26910 (1993) the entirety of which is herein incorporated by reference), light regulatory elements (Bruce and Quaill, Plant Cell 2 (11):1081-1089 (1990) the entirety of which is herein incorporated by reference; Bruce, et al., EMBO J. 10:3015-3024 (1991), the entirety of which is herein incorporated by reference; Rocholl, et al., Plant Sci. 97:189-198 (1994), the entirety of which is herein incorporated by reference; Block, et al., Proc. Natl. Acad. Sci. (U.S.A.) 87:5387-5391 (1990), the entirety of which is herein incorporated by reference; Giuliano, et al., Proc. Natl. Acad. Sci. (U.S.A.) 85:7089-7093 (1988), the entirety of which is herein incorporated by reference; Staiger, et al., Proc. Natl. Acad. Sci. (U.S.A.) 86:6930-6934 (1989), the entirety of which is herein incorporated by reference; Izawa, et al., Plant Cell 6:1277-1287 (1994), the entirety of which is herein incorporated by reference; Menkens, et al., Trends in Biochemistry 20:506-510 (1995), the entirety of which is herein incorporated by reference; Foster, et al., FASEB J. 8:192-200 (1994), the entirety of which is herein incorporated by reference; Plesse, et al., Mol Gen Gene 254:258-266 (1997), the entirety of which is herein incorporated by reference; Green, et al., EMBO J. 6:2543-2549 (1987), the entirety of which is herein incorporated by reference; Kuhlemeier et al., Ann. Rev Plant Physiol. 38:221-257 (1987), the entirety of which is herein incorporated by reference; Villain et al., J. Biol. Chem. 271:32593-32598 (1996), the entirety of which is herein incorporated by reference; Lam et al., Plant Cell 2:857-866 (1990), the entirety of which is herein incorporated by reference; Gilmartin, et al., Plant Cell 2:369-378 (1990), the entirety of which is herein incorporated by reference; Datta, et al., Plant Cell 1:1069-1077 (1989) the entirety of which is herein incorporated by reference; Gilmartin, et al., Plant Cell 2:369-378 (1990), the entirety of which is herein incorporated by reference; Castresana, et al., EMBO J. 7:1929-1936 (1988), the entirety of which is herein incorporated by reference; Ueda, et al., Plant Cell 1:217-227 (1989), the entirety of which is herein incorporated by reference; Terzaghi, et al., Annu. Rev. Plant Physiol. Plant Mol. Biol. 46:445-474 (1995), the entirety of which is herein incorporated by reference; Green et al., EMBO J. 6:2543-2549 (1987), the entirety of which is herein incorporated by reference; Villain, et al., J. Biol. Chem. 271:32593-32598 (1996), the entirety of which is herein incorporated by reference; Tjaden, et al., Plant Cell 6: 107-118 (1994), the entirety of which is herein incorporated by reference; Tjaden, et al., Plant Physiol. 108:1109-1117 (1995), the entirety of which is herein incorporated by reference; Ngai, et al., Plant J. 12:1021-1234 (1997), the entirety of which is herein incorporated by reference; Bruce, et al., EMBO J. 10:3015-3024 (1991), the entirety of which is herein incorporated by reference; Ngai, et al., Plant J. 12:1021-1034 (1997), the entirety of which is herein incorporated by reference), elements responsive to gibberellin, (Muller, et al., J. Plant Physiol. 145:606-613 (1995), the entirety of which is herein incorporated by reference; Croissant, et al., Plant Science 116:27-35 (1996), the entirety of which is herein incorporated by reference; Lohmer, et al., EMBO J. 10:617-624 (1991), the entirety of which is herein incorporated by reference; Rogers, et al., Plant Cell 4:1443-1451 (1992), the entirety of which is herein incorporated by reference; Lanahan et al., Plant Cell 4:203-211 (1992) the entirety of which is herein incorporated by reference; Skriver et al., Proc. Natl. Acad. Sci. (U.S.A.) 88:7266-7270 (1991) the entirety of which is herein incorporated by reference; Gilmartin, et al., Plant Cell 2:369-378 (1990), the entirety of which is herein incorporated by reference; Huang, et al., Plant Mol. Biol. 14:655-668 (1990), the entirety of which is herein incorporated by reference, Gubler, et al., Plant Cell 7:1879-1891 (1995), the entirety of which is herein incorporated by reference), elements responsive to abscisic acid, (Busk, et al., Plant Cell 9:2261-2270 (1997), the entirety of which is herein incorporated by reference; Guiltinan, et al., Science 250:267-270 (1990), the entirety of which is herein incorporated by reference; Shen, et al., Plant Cell 7:295-307 (1995) the entirety of which is herein incorporated by reference; Shen et al., Plant Cell 8:1107-1119 (1996), the entirety of which is herein incorporated by reference; Seo et al., Plant Mol. Biol. 27:1119-1131 (1995), the entirety of which is herein incorporated by reference; Marcotte et al., Plant Cell 1:969-976 (1989) the entirety of which is herein incorporated by reference; Shen et al., Plant Cell 7:295-307 (1995), the entirety of which is herein incorporated by reference; Iwasaki et al., Mol Gen Genet. 247:391-398 (1995), the entirety of which is herein incorporated by reference; Hattori et al., Genes Dev. 6:609-618 (1992), the entirety of which is herein incorporated by reference; Thomas et al., Plant Cell 5:1401-1410 (1993), the entirety of which is herein incorporated by reference), elements similar to abscisic acid responsive elements, (Ellerstrom et al., Plant Mol. Biol. 32:1019-1027 (1996), the entirety of which is herein incorporated by reference), auxin responsive elements (Liu et al., Plant Cell 6:645-657 (1994) the entirety of which is herein incorporated by reference; Liu et al., Plant Physiol. 115:397-407 (1997), the entirety of which is herein incorporated by reference; Kosugi et al., Plant J. 7:877-886 (1995), the entirety of which is herein incorporated by reference; Kosugi et al., Plant Cell 9:1607-1619 (1997), the entirety of which is herein incorporated by reference; Ballas et al., J. Mol. Biol. 233:580-596 (1993), the entirety of which is herein incorporated by reference), a cis element responsive to methyl jasmonate treatment (Beaudoin and Rothstein, Plant Mol. Biol. 33:835-846 (1997), the entirety of which is herein incorporated by reference), a cis element responsive to abscisic acid and stress response (Straub et al., Plant Mol. Biol. 26:617-630 (1994), the entirety of which is herein incorporated by reference), ethylene responsive cis elements (Itzhaki et al., Proc. Natl. Acad. Sci. (U.S.A.) 91:8925-8929 (1994), the entirety of which is herein incorporated by reference; Montgomery et al., Proc. Acad. Sci. (U.S.A.) 90:5939-5943 (1993), the entirety of which is herein incorporated by reference; Sessa et al., Plant Mol. Biol. 28:145-153 (1995), the entirety of which is herein incorporated by reference; Shinshi et al., Plant Mol. Biol. 27:923-932 (1995), the entirety of which is herein incorporated by reference), salicylic acid cis responsive elements, (Strange et al., Plant J. 11:1315-1324 (1997), the entirety of which is herein incorporated by reference; Qin et al., Plant Cell 6:863-874 (1994), the entirety of which is herein incorporated by reference), a cis element that responds to water stress and abscisic acid (Lam et al., J. Biol. Chem. 266:17131-17135 (1991), the entirety of which is herein incorporated by reference; Thomas et al., Plant Cell 5:1401-1410 (1993), the entirety of which is herein incorporated by reference; Pla et al., Plant Mol Biol 21:259-266 (1993), the entirety of which is herein incorporated by reference), a cis element essential for M phase-specific expression (Ito et al., Plant Cell 10:331-341 (1998), the entirety of which is herein incorporated by reference), sucrose responsive elements (Huang et al., Plant Mol. Biol. 14:655-668 (1990), the entirety of which is herein incorporated by reference; Hwang et al., Plant Mol Biol 36:331-341 (1998), the entirety of which is herein incorporated by reference; Grierson et al., Plant J. 5:815-826 (1994), the entirety of which is herein incorporated by reference), heat shock response elements (Pelham et al., Trends Genet. 1:31-35 (1985), the entirety of which is herein incorporated by reference), elements responsive to auxin and/or salicylic acid and also reported for light regulation (Lam et al., Proc. Natl. Acad. Sci. (U.S.A.) 86:7890-7897 (1989), the entirety of which is herein incorporated by reference; Benfey et al., Science 250:959-966 (1990), the entirety of which is herein incorporated by reference), elements responsive to ethylene and salicylic acid (Ohme-Takagi et al., Plant Mol. Biol. 15:941-946 (1990), the entirety of which is herein incorporated by reference), elements responsive to wounding and abiotic stress (Loake et al., Proc. Natl. Acad. Sci. (U.S.A.) 89:9230-9234 (1992), the entirety of which is herein incorporated by reference; Mhiri et al., Plant Mol. Biol. 33:257-266 (1997), the entirety of which is herein incorporated by reference), antoxidant response elements (Rushmore et al., J. Biol. Chem. 266:11632-11639, the entirety of which is herein incorporated by reference; Dalton et al., Nucleic Acids Res. 22:5016-5023 (1994), the entirety of which is herein incorporated by reference), Sph elements (Suzuki et al., Plant Cell 9:799-807 1997), the entirety of which is herein incorporated reference), Elicitor responsive elements, (Fukuda et al., Plant Mol. Biol. 34:81-87 (1997), the entirety of which is herein incorporated by reference; Rushton et al., EMBO J. 15:5690-5700 (1996), the entirety of which is herein incorporated by reference), metal responsive elements (Stuart et al., Nature 317:828-831 (1985), the entirety of which is herein incorporated by reference; Westin et al., EMBO J. 7:3763-3770 (1988), the entirety of which is herein incorporated by reference; Thiele et al., Nucleic Acids Res. 20:1183-1191 (1992), the entirety of which is herein incorporated by reference; Faisst et al., Nucleic Acids Res. 20:3-26 (1992), the entirety of which is herein incorporated by reference), low temperature responsive elements, (Baker et al., Plant Mol. Biol. 24:701-713 (1994), the entirety of which is herein incorporated by reference; Jiang et al., Plant Mol. Biol. 30:679-684 (1996), the entirety of which is herein incorporated by reference; Nordin et al., Plant Mol. Biol. 21:641-653 (1993), the entirety of which is herein incorporated by reference; Zhou et al., J. Biol. Chem. 267:23515-23519 (1992), the entirety of which is herein incorporated by reference), drought responsive elements, (Yamaguchi et al., Plant Cell 6:251-264 (1994), the entirety of which is herein incorporated by reference; Wang et al., Plant Mol. Biol. 28:605-617 (1995), the entirety of which is herein incorporated by reference; Bray E A, Trends in Plant Science 2:48-54 (1997), the entirety of which is herein incorporated by reference) enhancer elements for glutenin, (Colot et al., EMBO J. 6:3559-3564 (1987), the entirety of which is herein incorporated by reference; Thomas et al., Plant Cell 2:1171-1180 (1990), the entirety of which is incorporated by reference; Kreis et al., Philos. Trans. R. Soc. Lond., B314:355-365 (1986), the entirety of which is herein incorporated by reference), light-independent regulatory elements, (Lagrange et al., Plant Cell 9:1469-1479 (1997), the entirety of which is herein incorporated by reference; Villain et al., J. Biol. Chem. 271:32593-32598 (1996), the entirety of which is herein incorporated by reference), OCS enhancer elements, (Bouchez et al., EMBO J. 8:4197-4204 (1989), the entirety of which is herein incorporated by reference; Foley et al., Plant J. 3:669-679 (1993), the entirety of which is herein incorporated by reference), ACGT elements, (Foster et al., FASEB J. 8:192-200 (1994), the entirety of which is herein incorporated by reference; Izawa et al., Plant Cell 6:1277-1287 (1994), the entirety of which is herein incorporated by reference; Izawa et al., J. Mol. Biol. 230:1131-1144 (1993) the entirety of which is herein incorporated by reference), negative cis elements in plastid related genes, (Zhou et al., J. Biol. Chem. 267:23515-23519 (1992), the entirety of which is herein incorporated by reference; Lagrange et al., Mol. Cell Biol. 13:2614-2622 (1993), the entirety of which is herein incorporated by reference; Lagrange et al., Plant Cell 921469-1479 (1997), the entirety of which is herein incorporated by reference; Zhou et al., J. Biol. Chem. 267:23515-23519 (1992), the entirety of which is herein incorporated by reference), prolamin box elements, (Forde et al., Nucleic Acids Res. 13:7327-7339 (1985), the entirety of which is herein incorporated by reference; Colot et al., EMBO J. 6:3559-3564 (1987), the entirety of which is herein incorporated by reference; Thomas et al., Plant Cell 2:1171-1180 (1990), the entirety of which is herein incorporated by reference; Thompson et al., Plant Mol. Biol. 15:755-764 (1990), the entirety of which is herein incorporated by reference; Vicente et al., Proc. Natl. Acad. Sci. (U.S.A.) 94:7685-7690 (1997), the entirety of which is herein incorporated by reference), elements in enhancers from the IgM heavy chain gene (Gillies et al., Cell 33:717-728 (1983), the entirety of which is herein incorporated by reference; Whittier et al., Nucleic Acids Res. 15:2515-2535 (1987), the entirety of which is herein incorporated by reference.

[0054] (iii) Nucleic Acid Molecules Comprising Genes or Fragments Thereof

[0055] Nucleic acid molecules of the present invention can comprise one or more genes or fragments thereof. Such genes or fragments thereof include homologues of known genes or protein coding regions in other organisms or genes or fragments thereof that elicit only limited or no matches with known genes or protein coding regions. Table 1 sets forth a list of nucleic acid molecules that encode Glycine max proteins or fragments thereof which are homologues of known proteins.

[0056] Genomic sequences can be screened for the presence of proteins or genes utilizing one or a number of different search algorithms have that been developed, one example of which are the suite of programs referred to as BLAST programs. Other examples of suitable programs that can be utilized are known in the art, several of which are described above in the Background and under the section titled “Uses of the Agents of the Invention.” In addition, unidentified reading frames may be screened for protein coding regions by prediction software such as GenScan, which is located at http://gnomic.standford.edu/GENSCANR.html.

[0057] In a preferred embodiment of the present invention, the Glycine max protein or fragment thereof of the present invention is a homologue of another plant protein. In another preferred embodiment of the present invention, the Glycine max protein or fragment thereof of the present invention is a homologue of a fungal protein. In another preferred embodiment of the present invention, the Glycine max protein or fragment thereof of the present invention is a homologue of a mammalian protein. In another preferred embodiment of the present invention, the Glycine max protein or fragment thereof of the present invention is a homologue of a bacterial protein.

[0058] In a preferred embodiment of the present invention, the Glycine max protein or fragments thereof or nucleic acid molecule or fragment thereof has a BLAST score of more than 200, preferably a BLAST score of more than 300, even more preferably a BLAST score of more than 400.

[0059] In another preferred embodiment of the present invention, the nucleic acid molecule encoding the Glycine max protein or fragment thereof and/or nucleic acid molecule or fragment thereof exhibits a % identity with its homologue of between about 25% and about 40%, more preferably of between about 40 and about 70%, even more preferably of between about 70% and about 90%, and even more preferably between about 90% and 99%. In another preferred embodiment, of the present invention, the Glycine max the nucleic acid molecule encoding the Glycine max protein or fragment thereof exhibits a % identity with its homologue of 100%.

[0060] In a preferred embodiment of the present invention, the Glycine max protein or fragment thereof or nucleic acid molecule or fragment thereof exhibits a % coverage of between about 0% and about 33%, more preferably of between about 34% and about 66%, and even more preferably of between about 67% and about 100%.

[0061] Genomic sequences can be screened for the presence of proteins utilizing one or a number of different search algorithms have that been developed, one example of which are the suite of programs referred to as BLAST programs. Other examples of suitable programs that can be utilized are known in the art, several of which are described above in the Background. Nucleic acid molecules of the present invention also include non-Glycine max homologues. Preferred non-Glycine max homologues are selected from the group consisting of alfalfa, Arabidopsis barley, Brassica, broccoli, cabbage, citrus, cotton, garlic, oat, oilseed rape, onion, canola, flax, an ornamental plant, maize, pea, peanut, pepper, potato, rice, rye, sorghum, strawberry, sugarcane, sugarbeet, tomato, wheat, poplar, pine, fir, eucalyptus, apple, lettuce, lentils, grape, banana, tea, turf grasses, sunflower, oil palm, and Phaseolus.

[0062] In a preferred embodiment, nucleic acid molecules having SEQ ID NO: 1 through SEQ ID NO: 20082 or complements and fragments of either can be utilized to obtain such homologues.

[0063] The degeneracy of the genetic code, which allows different nucleic acid sequences to code for the same protein or peptide, is known in the literature. (U.S. Pat. No. 4,757,006, the entirety of which is herein incorporated by reference).

[0064] In an aspect of the present invention, one or more of the nucleic acid molecules of the present invention differ in nucleic acid sequence from those encoding a soybean protein or fragment thereof in SEQ ID NO: 1 through SEQ ID NO: 20082 due to the degeneracy in the genetic code in that they encode the same protein but differ in nucleic acid sequence.

[0065] In another further aspect of the present invention, one or more of the nucleic acid molecules of the present invention differ in nucleic acid sequence from those encoding a soybean protein or fragment thereof in SEQ ID NO: 1 through SEQ ID NO:20082 due to the fact that the different nucleic acid sequences encode a protein having one or more conservative amino acid residues.

[0066] It is understood that codons capable of coding for such conservative amino acid substitutions are known in the art.

[0067] It is well known in the art that one or more amino acids in a native sequence can be substituted with another amino acid(s), the charge and polarity of which are similar to that of the native amino acid, i.e., a conservative amino acid substitution, resulting in a silent change. Conserved substitutes for an amino acid within the native polypeptide sequence can be selected from other members of the class to which the naturally occurring amino acid belongs. Amino acids can be divided into the following four groups: (1) acidic amino acids, (2) basic amino acids, (3) neutral polar amino acids, and (4) neutral nonpolar amino acids. Representative amino acids within these various groups include, but are not limited to, (1) acidic (negatively charged) amino acids such as aspartic acid and glutamic acid; (2) basic (positively charged) amino acids such as arginine, histidine, and lysine; (3) neutral polar amino acids such as glycine, serine, threonine, cysteine, cystine, tyrosine, asparagine, and glutamine; and (4) neutral nonpolar (hydrophobic) amino acids such as alanine, leucine, isoleucine, valine, proline, phenylalanine, tryptophan, and methionine.

[0068] Conservative amino acid changes within the native polypeptides sequence can be made by substituting one amino acid within one of these groups with another amino acid within the same group. Biologically functional equivalents of the proteins or fragments thereof of the present invention can have 10 or fewer conservative amino acid changes, more preferably seven or fewer conservative amino acid changes, and most preferably five or fewer conservative amino acid changes. The encoding nucleotide sequence will thus have corresponding base substitutions, permitting it to encode biologically functional equivalent forms of the proteins or fragments of the present invention.

[0069] It is understood that certain amino acids may be substituted for other amino acids in a protein structure without appreciable loss of interactive binding capacity with structures such as, for example, antigent-binding regions of antibodies or binding sites on substrate molecules. Because it is the interactive capacity and nature of a protein that defines that protein's biological functional activity, certain amino acid sequence substitutions can be made in a protein sequence and, of course, its underlying DNA coding sequence and, nevertheless, obtain a protein with like properties. It is thus contemplated by the inventors that various changes may be made in the peptide sequences of the proteins or fragments of the present invention, or corresponding DNA sequences that encode said peptides, without appreciable loss of their biological utility or activity. It is understood that codons capable of coding for such amino acid changes are known in the art.

[0070] In making such changes, the hydropathic index of amino acids may be considered. The importance of the hydropathic amino acid index in conferring interactive biological function on a protein is generally understood in the art (Kyte and Doolittle, J. Mol. Biol. 157, 105-132 (1982), herein incorporated by reference in its entirety). It is accepted that the relative hydropathic character of the amino acid contributes to the secondary structure of the resultant protein, which in turn defines the interaction of the protein with other molecules, for example, enzymes, substrates, receptors, DNA, antibodies, antigens, and the like.

[0071] Each amino acid has been assigned a hydropathic index on the basis of its hydrophobicity and charge characteristics (Kyte and Doolittle, 1982); these are isoleucine (+4.5), valine (+4.2), leucine (+3.8), phenylalanine (+2.8), cysteine/cystine (+2.5), methionine (+1.9), alanine (+1.8), glycine (−0.4), threonine (−0.7), serine (−0.8), tryptophan (−0.9), tyrosine (−1.3), proline (−1.6), histidine (−3.2), glutamate (−3.5), glutamine (−3.5), aspartate (−3.5), asparagine (−3.5), lysine (−3.9), and arginine (−4.5).

[0072] In making such changes, the substitution of amino acids whose hydropathic indices are within ±2 is preferred, those which are within ±1 are particularly preferred, and those within ±0.5 are even more particularly preferred.

[0073] It is also understood in the art that the substitution of like amino acids can be made effectively on the basis of hydrophilicity. U.S. Pat. No. 4,554,101, incorporated herein by reference in its entirety, states that the greatest local average hydrophilicity of a protein, as govern by the hydrophilicity of its adjacent amino acids, correlates with a biological property of the protein

[0074] As detailed in U.S. Pat. No. 4,554,101, the following hydrophilicity values have been assigned to amino acid residues: arginine (+3.0), lysine (+3.0), aspartate (+3.0±1), glutamate (+3.0±1), serine (+0.3), asparagine (+0.2), glutamine (+0.2), glycine (0), threonine (−0.4), proline (−0.5±1), alanine (−0.5), histidine (−0.5), cysteine (−1.0), methionine (−1.3), valine (−1.5), leucine (−1.8), isoleucine (−1.8), tyrosine (−2.3), phenylalanine (−2.5), and tryptophan (−3.4). In making such changes, the substitution of amino acids whose hydrophilicity values are within ±2 is preferred, those which are within ±1 are particularly preferred, and those within ±0.5 are even more particularly preferred.

[0075] In a further aspect of the present invention, one or more of the nucleic acid molecules of the present invention differ in nucleic acid sequence from those encoding a protein or fragment thereof set forth in SEQ ID NO: 1 through SEQ ID NO: 20082 or fragment thereof due to the fact that one or more codons encoding an amino acid has been substituted for a codon that encodes a nonessential substitution of the amino acid originally encoded.

[0076] (iv) Nucleic Acid Molecules Comprising Introns and/or Intron/Exon Junctions

[0077] Nucleic acid molecules of the present invention can comprise an intron and/or one or more intron/exon junction. Sequences of the present invention can be screened for introns and intron/exon junctions utilizing one or a number of different search algorithms that have that been developed, one example of which are the suite of programs referred to as BLAST programs. Other examples of suitable programs that can be utilized are known in the art, several of which are described above in the Background and in the section entitled “Uses of the Agents of the Present Invention”.

[0078] (b) Protein and Peptide Molecules

[0079] A class of agents comprises one or more of the protein or peptide molecules encoded by SEQ ID NO: 1 through SEQ ID NO:20082, fragments thereof or complements thereof or one or more of the proteins encoded by a nucleic acid molecule or fragment thereof or peptide molecules encoded by other nucleic acid agents of the present invention. Protein and peptide molecules can be identified using known protein or peptide molecules as a target sequence or target motif in the BLAST programs of the present invention. In a preferred embodiment, the protein or peptide molecules of the present invention are derived from Glycine max (soybean) and more preferably Glycine max, genotype A3244.

[0080] As used herein, the term “protein molecule” or “peptide molecule” includes any molecule that comprises five or more amino acids. It is well known in the art that proteins or peptides may undergo modification, including post-translational modifications, such as, but not limited to, disulfide bond formation, glycosylation, phosphorylation, or oligomerization. Thus, as used herein, the term “protein molecule” or “peptide molecule” includes any protein molecule that is modified by any biological or non-biological process. The terms “amino acid” and “amino acids” refer to all naturally occurring L-amino acids. This definition is meant to include norleucine, ornithine, homocysteine, and homoserine.

[0081] One or more of the protein or fragments of peptide molecules may be produced via chemical synthesis, or more preferably, by expression in a suitable bacterial or eukaryotic host. Suitable methods for expression are described by Sambrook, et al., Molecular Cloning, A Laboratory Manual, 2nd Edition, Cold Spring Harbor Press, Cold Spring Harbor, N.Y. (1989), or similar texts.

[0082] A “protein fragment” is a peptide or polypeptide molecule whose amino acid sequence comprises a subset of the amino acid sequence of that protein. A protein or fragment thereof that comprises one or more additional peptide regions not derived from that protein is a “fusion” protein. Such molecules may be derivatized to contain carbohydrate or other moieties (such as keyhole limpet hemocyanin, etc.). Fusion protein or peptide molecules of the present invention are preferably produced via recombinant means.

[0083] Another class of agents comprises protein or peptide molecules encoded by SEQ ID NO: 1 through SEQ ID NO:20082 or complements thereof or, fragments or fusions thereof in which conservative, non-essential, or not relevant, amino acid residues have been added, replaced, or deleted. An example of such a homologue is the homologue protein of all non-Glycine max plant species, including but not limited to alfalfa, barley, Brassica, broccoli, cabbage, citrus, cotton, garlic, oat, oilseed rape, onion, canola, flax, maize, an ornamental plant, pea, peanut, pepper, potato, rice, rye, sorghum, strawberry, sugarcane, sugarbeet, tomato, wheat, poplar, pine, fir, eukalyptus, apple, lettuce, peas, lentils, grape, banana, tea, turf grasses, etc. Particularly preferred non-Glycine max plants to utilize for the isolation of homologues would include alfalfa, barley, cotton, corn, oat, oilseed rape, rice, corn, canola, ornamentals, sugarcane, sugarbeet, tomato, potato, wheat, and turf grasses. Such a homologue can be obtained by any of a variety of methods. Most preferably, as indicated above, one or more of the disclosed sequences (SEQ ID NO: 1 through SEQ ID NO:20082 or complements thereof) will be used to define a pair of primers that may be used to isolate the homologue-encoding nucleic acid molecules from any desired species. Such molecules can be expressed to yield homologues by recombinant means.

[0084] (c) Antibodies

[0085] One aspect of the present invention concerns antibodies, single-chain antigen binding molecules, or other proteins that specifically bind to one or more of the protein or peptide molecules of the present invention and their homologues, fusions or fragments. Such antibodies may be used to quantitatively or qualitatively detect the protein or peptide molecules of the present invention. As used herein, an antibody or peptide is said to “specifically bind” to a protein or peptide molecule of the present invention if such binding is not competitively inhibited by the presence of non-related molecules. In a preferred embodiment the antibodies of the present invention bind to proteins derived from Glycine max (soybean) and more preferably bind to proteins or fragments thereof of Glycine max, genotype A3244.

[0086] Nucleic acid molecules that encode all or part of the protein of the present invention can be expressed, via recombinant means, to yield protein or peptides that can in turn be used to elicit antibodies that are capable of binding the expressed protein or peptide. Such antibodies may be used in immunoassays for that protein. Such protein-encoding molecules, or their fragments may be a “fusion” molecule (i.e., a part of a larger nucleic acid molecule) such that, upon expression, a fusion protein is produced. It is understood that any of the nucleic acid molecules of the present invention may be expressed, via recombinant means, to yield proteins or peptides encoded by these nucleic acid molecules.

[0087] The antibodies that specifically bind proteins and protein fragments of the present invention may be polyclonal or monoclonal, and may comprise intact immunoglobulins, or antigen binding portions of immunoglobulins (such as (F(ab′), F(ab′)₂ fragments), or single-chain immunoglobulins producible, for example, via recombinant means). It is understood that practitioners are familiar with the standard resource materials which describe specific conditions and procedures for the construction, manipulation and isolation of antibodies (see, for example, Harlow and Lane, Antibodies: A Laboratory Manual, Cold Spring Harbor Press, Cold Spring Harbor, N.Y. (1988), the entirety of which is herein incorporated by reference).

[0088] Murine monoclonal antibodies are particularly preferred. BALB/c mice are preferred for this purpose, however, equivalent strains may also be used. The animals are preferably immunized with approximately 25 μg of purified protein (or fragment thereof) that has been emulsified in a suitable adjuvant (such as TiterMax adjuvant (Vaxcel, Norcross, Ga.)). Immunization is preferably conducted at two intramuscular sites, one intraperitoneal site, and one subcutaneous site at the base of the tail. An additional i.v. injection of approximately 25 μg of antigen is preferably given in normal saline three weeks later. After approximately 11 days following the second injection, the mice may be bled and the blood screened for the presence of anti-protein or peptide antibodies. Preferably, a direct binding Enzyme-Linked Immunoassay (ELISA) is employed for this purpose.

[0089] More preferably, the mouse having the highest antibody titer is given a third i.v. injection of approximately 25 μg of the same protein or fragment. The splenic leukocytes from this animal may be recovered 3 days later, and are then permitted to fuse, most preferably, using polyethylene glycol, with cells of a suitable myeloma cell line (such as, for example, the P3X63Ag8.653 myeloma cell line). Hybridoma cells are selected by culturing the cells under “HAT” (hypoxanthine-aminopterin-thymine) selection for about one week. The resulting clones may then be screened for their capacity to produce monoclonal antibodies (“mAbs”), preferably by direct ELISA.

[0090] In one embodiment, anti-protein or peptide monoclonal antibodies are isolated using a fusion of a protein, protein fragment, or peptide of the present invention, or conjugate of a protein, protein fragment, or peptide of the present invention, as immunogens. Thus, for example, a group of mice can be immunized using a fusion protein emulsified in Freund's complete adjuvant (e.g., approximately 50 μg of antigen per immunization). At three week intervals, an identical amount of antigen is emulsified in Freund's incomplete adjuvant and used to immunize the animals. Ten days following the third immunization, serum samples are taken and evaluated for the presence of antibody. If antibody titers are too low, a fourth booster can be employed. Polysera capable of binding the protein or peptide can also be obtained using this method.

[0091] In a preferred procedure for obtaining monoclonal antibodies, the spleens of the above-described immunized mice are removed, disrupted, and immune splenocytes are isolated over a ficoll gradient. The isolated splenocytes are fused, using polyethylene glycol with BALB/c-derived HGPRT (hypoxanthine guanine phosphoribosyl transferase) deficient P3×63×Ag8.653 plasmacytoma cells. The fused cells are plated into 96-well microtiter plates and screened for hybridoma fusion cells by their capacity to grow in culture medium supplemented with hypothanthine, aminopterin and thymidine for approximately 2-3 weeks.

[0092] Hybridoma cells that arise from such incubation are preferably screened for their capacity to produce an immunoglobulin that binds to a protein of interest. An indirect ELISA may be used for this purpose. In brief, the supernatants of hybridomas are incubated in microtiter wells that contain immobilized protein. After washing, the titer of bound immunoglobulin can be determined using, for example, a goat anti-mouse antibody conjugated to horseradish peroxidase. After additional washing, the amount of immobilized enzyme is determined (for example through the use of a chromogenic substrate). Such screening is performed as quickly as possible after the identification of the hybridoma in order to ensure that a desired clone is not overgrown by non-secreting neighbors. Desirably, the fusion plates are screened several times since the rates of hybridoma growth vary. In a preferred sub-embodiment, a different antigenic form of immunogen may be used to screen the hybridoma. Thus, for example, the splenocytes may be immunized with one immunogen, but the resulting hybridomas can be screened using a different immunogen. It is understood that any of the protein or peptide molecules of the present invention may be used to raise antibodies.

[0093] As discussed below, such antibody molecules or their fragments may be used for diagnostic purposes. Where the antibodies are intended for diagnostic purposes, it may be desirable to derivatize them, for example with a ligand group (such as biotin) or a detectable marker group (such as a fluorescent group, a radioisotope or an enzyme).

[0094] The ability to produce antibodies that bind the protein or peptide molecules of the present invention permits the identification of mimetic compounds of those molecules. A “Mimetic compound” is a compound that is not that compound, or a fragment of that compound, but which nonetheless exhibits an ability to specifically bind to antibodies directed against that compound.

[0095] It is understood that any of the agents of the present invention can be substantially purified and/or be biologically active and/or recombinant.

[0096] Uses of the Agents of the Invention

[0097] Nucleic acid molecules and fragments thereof of the present invention may be employed for genetic mapping studies using linkage analysis (genetic markers). A genetic linkage map shows the relative locations of specific DNA markers along a chromosome. Maps are used for the identification of genes associated with genetic diseases or phenotypic traits, comparative genomics, and as a guide for physical mapping. Through genetic mapping, a fine scale linkage map can be developed using DNA markers, and, then, a genomic DNA library of large-sized fragments can be screened with molecular markers linked to the desired trait. In a preferred embodiment of the present invention, the genomic library screened with the nucleic acid molecules of the present invention is a genomic library of Glycine max.

[0098] Mapping marker locations is based on the observation that two markers located near each other on the same chromosome will tend to be passed together from parent to offspring. During gamete production, DNA strands occasionally break and rejoin in different places on the same chromosome or on the homologous chromosome. The closer the markers are to each other, the more tightly linked and the less likely a recombination event will fall between and separate them. Recombination frequency thus provides an estimate of the distance between two markers.

[0099] In segregating populations, target genes have been reported to have been placed within an interval of 5-10 cM with a high degree of certainty (Tanksley et al., Trends in Genetics 11(2):63-68 (1995), the entirety of which is herein incorporated by reference). The markers defining this interval are used to screen a larger segregating population to identify individuals derived from one or more gametes containing a crossover in the given interval. Such individuals are useful in orienting other markers closer to the target gene. Once identified, these individuals can be analyzed in relation to all molecular markers within the region to identify those closest to the target.

[0100] Markers of the present invention can be employed to construct linkage maps and to locate genes with qualitative and quantitative effects. The genetic linkage of additional marker molecules can be established by a genetic mapping model such as, without limitation, the flanking marker model reported by Lander and Botstein, Genetics, 121:185-199 (1989), and the interval mapping, based on maximum likelihood methods described by Lander and Botstein, Genetics, 121:185-199 (1989), the entirety of which is herein incorporated by reference and implemented in the software package MAPMAKER/QTL (Lincoln and Lander, Mapping Genes Controlling Quantitative Traits Using MAPMAKER/QTL, Whitehead Institute for Biomedical Research, Massachusetts, (1990)). Additional software includes Qgene, Version 2.23 (1996), Department of Plant Breeding and Biometry, 266 Emerson Hall, Cornell University, Ithaca, N.Y., the manual of which is herein incorporated by reference in its entirety). Use of the Qgene software is a particularly preferred approach.

[0101] A maximum likelihood estimate (MLE) for the presence of a marker is calculated, together with an MLE assuming no QTL effect, to avoid false positives. A log₁₀ of an odds ratio (LOD) is then calculated as: LOD=log₁₀ (MLE for the presence of a QTL/MLE given no linked QTL).

[0102] The LOD score essentially indicates how much more likely the data are to have arisen assuming the presence of a QTL than in its absence. The LOD threshold value for avoiding a false positive with a given confidence, say 95%, depends on the number of markers and the length of the genome. Graphs indicating LOD thresholds are set forth in Lander and Botstein, Genetics, 121:185-199 (1989), the entirety of which is herein incorporated by reference and further described by Arús and Moreno-González, Plant Breeding, Hayward, Bosemark, Romagosa (eds.) Chapman & Hall, London, pp. 314-331 (1993).

[0103] Additional models can be used. Many modifications and alternative approaches to interval mapping have been reported, including the use of non-parametric methods (Kruglyak and Lander, Genetics, 139:1421-1428 (1995), the entirety of which is herein incorporated by reference). Multiple regression methods or models can be also be used, in which the trait is regressed on a large number of markers (Jansen, Biometrics in Plant Breed, van Oijen, Jansen (eds.) Proceedings of the Ninth Meeting of the Eucarpia Section Biometrics in Plant Breeding, The Netherlands, pp. 116-124 (1994); Weber and Wricke, Advances in Plant Breeding, Blackwell, Berlin, 16 (1994). Procedures combining interval mapping with regression analysis, whereby the phenotype is regressed onto a single putative QTL at a given marker interval, and at the same time onto a number of markers that serve as ‘cofactors,’ have been reported by Jansen and Stam, Genetics, 136:1447-1455 (1994) and Zeng, Genetics, 136:1457-1468 (1994). Generally, the use of cofactors reduces the bias and sampling error of the estimated QTL positions (Utz and Melchinger, Biometrics in Plant Breeding, van Oijen, Jansen (eds.) Proceedings of the Ninth Meeting of the Eucarpia Section Biometrics in Plant Breeding, The Netherlands, pp. 195-204 (1994), thereby improving the precision and efficiency of QTL mapping (Zeng, Genetics, 136:1457-1468 (1994). These models can be extended to multi-environment experiments to analysis genotype-environment interactions (Jansen et al., Theo. Appl. Genet. 91:33-37 (1995).

[0104] Selection of an appropriate mapping population is important to map construction. The choice of appropriate mapping population depends on the type of marker systems employed (Tanksley et al., J. P. Gustafson and R. Appels (eds.), Plenum Press, New York, pp. 157-173 (1988), the entirety of which is herein incorporated by reference). Consideration must be given to the source of parents (adapted vs. exotic) used in the mapping population. Chromosome pairing and recombination rates can be severely disturbed (suppressed) in wide crosses (adapted×exotic) and generally yield greatly reduced linkage distances. Wide crosses will usually provide segregating populations with a relatively large array of polymorphisms when compared to progeny in a narrow cross (adapted x adapted).

[0105] An F₂ population is the first generation of selfing after the hybrid seed is produced. Usually a single F₁ plant is selfed to generate a population segregating for all the genes in Mendelian (1:2:1) fashion. Maximum genetic information is obtained from a completely classified F₂ population using a codominant marker system (Mather, Measurement of Linkage in Heredity: Methuen and Co., (1938), the entirety of which is herein incorporated by reference). In the case of dominant markers, progeny tests (e.g., F₃, BCF₂) are required to identify the heterozygotes, thus making it equivalent to a completely classified F₂ population. However, this procedure is often prohibitive because of the cost and time involved in progeny testing. Progeny testing of F₂ individuals is often used in map construction where phenotypes do not consistently reflect genotype (e.g., disease resistance) or where trait expression is controlled by a QTL. Segregation data from progeny test populations (e.g., F₃ or BCF₂) can be used in map construction. Marker-assisted selection can then be applied to cross progeny based on marker-trait map associations (F₂, F₃), where linkage groups have not been completely disassociated by recombination events (i.e., maximum disequilibrium).

[0106] Recombinant inbred lines (RIL) (genetically related lines; usually >F₅, developed from continuously selfing F₂ lines towards homozygosity) can be used as a mapping population. Information obtained from dominant markers can be maximized by using RIL because all loci are homozygous or nearly so. Under conditions of tight linkage (i.e., about <10% recombination), dominant and co-dominant markers evaluated in RIL populations provide more information per individual than either marker type in backcross populations (Reiter, Proc. Natl. Acad. Sci. (U.S.A.) 89:1477-1481 (1992). However, as the distance between markers becomes larger (i.e., loci become more independent), the information in RIL populations decreases dramatically when compared to codominant markers.

[0107] Backcross populations (e.g., generated from a cross between a successful variety (recurrent parent) and another variety (donor parent) carrying a trait not present in the former) can be utilized as a mapping population. A series of backcrosses to the recurrent parent can be made to recover most of its desirable traits. Thus a population is created consisting of individuals nearly like the recurrent parent but each individual carries varying amounts or mosaic of genomic regions from the donor parent. Backcross populations can be useful for mapping dominant markers if all loci in the recurrent parent are homozygous and the donor and recurrent parent have contrasting polymorphic marker alleles (Reiter et al., Proc. Natl. Acad. Sci. (U.S.A.) 89:1477-1481 (1992). Information obtained from backcross populations using either codominant or dominant makers is less than that obtained from F₂ populations because one, rather than two, recombinant gametes are sampled per plant. Backcross populations, however, are more informative (at low marker saturation) when compared to RILs as the distance between linked loci increases in RIL populations (i.e., about 0.15% recombination). Increased recombination can be beneficial for resolution of tight linkages, but may be undesirable in the construction of maps with low marker saturation.

[0108] Near-isogenic lines (NIL)(created by many backcrosses to produce an array of individuals that are nearly identical in genetic composition except for the trait or genomic region under interrogation) can be used as a mapping population. In mapping with NILs, only a portion of the polymorphic loci are expected to map to a selected region.

[0109] Bulk segregant analysis (BSA) is a method developed for the rapid identification of linkage between markers and traits of interest (Michelmore, et al., Proc. Natl. Acad. Sci. (U.S.A.) 88:9828-9832 (1991). In BSA, two bulked DNA samples are drawn from a segregating population originating from a single cross. These bulks contain individuals that are identical for a particular trait (resistant or susceptible to particular disease) or genomic region but arbitrary at unlinked regions (i.e., heterozygous). Regions unlinked to the target region will not differ between the bulked samples of many individuals in BSA.

[0110] Applications for markers in plant breeding include: Quantitative Trait Loci (QTL) mapping (Edwards et al, Genetics 116:113-115 (1987), the entirety of which is herein incorporated by reference); Nienhuis et al, Crop Sci. 27:797-803 (1987); Osborn et al, Theor. Appl. Genet. 73:350-356 (1987); Romero-Severson et al, Use of RFLPs In Analysis of Quantitative Trait Loci In Maize, In Helentjaris and Burr (eds.) pp. 97-102 (1989), the entirety of which is herein incorporated by reference; Young et al, Genetics 120:570-585 (1988), the entirety of which is herein incorporated by reference; Martin et al, Science 243:1725-1728 (1989), the entirety of which is herein incorporated by reference): Sarfatti et al., Theor. Appl Genet. 78:22-26 (1989), the entirety of which is herein incorporated by reference; Tanksley, et al., Biotech. 7:257-264 (1989); Barone et al, Mol. Gen. Genet. 224:177-182 (1990), the entirety of which is herein incorporated by reference); Jung et al, Theor, Appl. Genet. 79:663-672 (1990), the entirety of which is herein incorporated by reference; Keim et al, Genetics 126:735-742 (1990), the entirety of which is herein incorporated by reference, Theor. Appl. Genet. 79:465-369 (1990), the entirety of which is herein incorporated by reference; Paterson et al., Genetics 124:735-742 (1990), the entirety of which is herein incorporated by reference; Martin et al, Proc. Natl. Acad. Sci. (U.S.A.) 88:2336-2340 (1991), the entirety of which is herein incorporated by reference; Messeguer et al, Theor. Appl. Genet. 82:529-536 (1991), the entirety of which is herein incorporated by reference; Michelmore et al, Proc Natl. Acad. Sci. (U.S.A.) 88:9828-9832 (1991), the entirety of which is herein incorporated by reference; Ottaviano et al, Theor. Appl. Genet. 81:713-719 (1991), the entirety of which is herein incorporated by reference; Yu et al, Theor. Appl. Genet. 81:471-476 (1991), the entirety of which is herein incorporated by reference; Diers et al, Crop Sci. 32:77-383 (1992), the entirety of which is herein incorporated by reference, Theor. Appl. Genet. 83:608-612 (1992), the entirety of which is herein incorporated by reference, J. Plant Nut. 15:2127-2136 (1992), the entirety of which is herein incorporated by reference; Doebley et al, Proc. Natl. Acad. Sci. (U.S.A.) 87:9888-9892 (1990), the entirety of which is herein incorporated by reference), screening genetic resource strains for useful quantitative trait alleles and introgression of these alleles into commercial varieties (Beckmann and Soller, Theor. Appl. Genet. 67:35-43 (1983), the entirety of which is herein incorporated by reference; Tanksley et al, (1989) the entirety of which is incorporated by reference), or the mapping of mutations (Rafalski, et al., In: Nonmammalian Genomic Analysis, ed. Birren and Lai, Academic Press, San Diego, Calif., pp. 75-134 (1996). Additionally, markers can be used to characterize transformants or germplasm, as a genetic diagnostic test for plant breeding or to identify individuals or varieties (Soller and Beckmann, Theor. Appl. Genet. 67:25-33 (1983), the entirety of which is herein incorporated by reference; Tanksley et al, 1989). Markers also can be used to obtain information about: (1) the number, effect, and chromosomal location of each gene affecting a trait; (2) effects of multiple copies of individual genes (gene dosage); (3) interaction between/among genes controlling a trait (epistasis); (4) whether individual genes affect more than one trait (pleiotropy); and (5) stability of gene function across environments (G×E interactions).

[0111] It is understood that one or more of the nucleic acid molecules of the present invention may in one embodiment be used as markers in genetic mapping. In a preferred embodiment, nucleic acid molecules of the present invention may in one embodiment be used as markers with Glycine max.

[0112] The nucleic acid molecules of the present invention may be used for physical mapping. Physical mapping, in conjunction with linkage analysis, can enable the isolation of genes. Physical mapping has been reported to identify the markers closest in terms of genetic recombination to a gene target for cloning. Once a DNA marker is linked to a gene of interest, the chromosome walking technique can be used to find the genes via overlapping clones. For chromosome walking, random molecular markers or established molecular linkage maps are used to conduct a search to localize the gene adjacent to one or more markers. A chromosome walk (Bukanov and Berg, Mo. Microbiol, 11:509-523 (1994), the entirety of which is herein incorporated by referencei; Birkenbihl and Vielmetter Nucleic Acids Res. 17:5057-5069 (1989), the entirety of which is herein incorporated by reference; Wenzel and Herrmann, Nucleic Acids Res. 16:8323-8336, (1988), the entirety of which is herein incorporated by reference) is then initiated from the closest linked marker. Starting from the selected clones, labeled probes specific for the ends of the insert DNA are synthesized and used as probes in hybridizations against a representative library. Clones hybridizing with one of the probes are picked and serve as templates for the synthesis of new probes; by subsequent analysis, contigs are produced.

[0113] The degree of overlap of the hybridizing clones used to produce a contig can be determined by comparative restriction analysis. Comparative restriction analysis can be carried out in different ways all of which exploit the same principle; two clones of a library are very likely to overlap if they contain a limited number of restriction sites for one or more restriction endonucleases located at the same distance from each other. The most frequently used procedures are, fingerprinting (Coulson et al, Proc. Natl. Acad. Sci. (U.S.A.) 83:7821-7821, (1986), the entirety of which is herein incorporated by reference); Knott et al., Nucleic Acids Res. 16:2601-2612 (1988), the entirety of which is herein incorporated by reference; Eiglmeier et al., Mol. Microbiol. 7(2):: 197-206 (1993), the entirety of which is herein incorporated by reference, 1993), restriction fragment mapping (Smith and Birnstiel, Nucleic Acids Res. 3:2387-2398 (1976), the entirety of which is herein incorporated by reference, or the “landmarking” technique (Charlebois et al., J. Mol. Biol. 222:509-524 (1991), the entirety of which is herein incorporated by reference

[0114] To generate a physical map of a genome with BACs using the fingerprinting technique, a BAC library containing a number of clones equivalent to 4×-20× haploid genome can be used. (Zhang and Wing., Plant Mol. Bio. 35:115-127 (1997)). For example, BAC DNA can be purified with the conventional alkaline lysis procedure as used for plasmid DNA purification, digested with the restriction enzyme used for construction of the BAC libraries and end-labeled with ³²P-dATP, digested with Sau3AI and fractionated on a denaturing polyacrylamide gel. The gel is dried to chromatography paper and exposed to X-ray film. Fingerprints are scanned and then converted into database records, according to the positions of each band relative to the bands of the closest molecular-weight marker on a gel. The incoming database of fingerprints are first compared against each other to assemble contigs if overlapped, and then compared against all existing databases to place the incoming BACs and BAC contigs in established contigs if overlapped. The physical length of a contig in kb is estimated according to the number of restriction sites of the enzyme used for the first digestion prior to fragment end labeling

[0115] Restriction analysis of a certain clone can be carried out, for example, according to a method originally described by Smith and Berstiel, Nucleic Acids Res. 3:2387-2398 (1976), First, the number and size of cloned restriction fragments to be mapped are determined by complete digestion and agarose gel electrophoresis. Then, the clone is linearized at a unique restriction site outside of the cloned DNA. Aliquots of the linearized molecules are digested to different extents with the enzyme selected for mapping. These partially cut samples are separated on agarose gels, blotted, and hybridized to a labeled fragment of vector DNA. This probe is derived entirely from one side or the other of the unique site used to linearize the clone.

[0116] The results show a ladder of DNA fragments that have the same unique end. By repeating these analyses in pairs with all the neighboring intermediate DNA fragments, the correct order of restriction fragments as well as the orientation of the cloned insert can be deduced. The order of restriction fragments produced by restriction enzymes other than the cloning enzyme can be determined similarly. Fragment data from different enzymes are then combined by a computer program and compared with the alignments of other clones of the library (Kohara et al., Cell 50:495-508 (1987), the entirety of which is herein incorporated by reference).

[0117] The landmarking technique can be carried out without any labeling and relies on agarose gel analysis. Clones are first digested preferably with a 6 bp specific endonuclease A, if possible with the original clone enzyme. Clones are then digested with a second endonuclease B. Endonuclease B is chosen based on its ability to cut rarely in the genome, for example, on average only once in 30 kbp. Of the fragments generated by digestion of one clone with enzyme A, statistically only a small number (between zero and three fragments) will also be cut by enzyme B. The very specific pattern of those fragments which are produced by double digestion are easily recognized. Any of these fragments which have a restriction site for the rarely cutting endonuclease is called a “landmark” Generally one common landmark is sufficient for defining two overlapping clones.

[0118] Alternatively to chromosome walking and the associated comparative restriction analyses methods, chromosome landing also has been reported to be used to locate a gene of interest (Tanksley et al. Trends in Genetics 11(2):63-68 (1995), the entirety of which is herein incorporated by reference. For chromosome landing, a DNA marker is isolated at a physical distance from the targeted gene. High resolution linkage analysis is used to identify such a marker that cosegregates with the gene. The marker is isolated at a distance that is less than the average insert size of the genomic library used for clone isolation. The DNA marker is then used to screen the library and isolate (or “land” on) the clone containing the gene without chromosome walking. Genome coverage of a library can also be determined by cross-hybridization of individual large insert clones by screening a BAC library with single copy RFLP markers distributed randomly across the genome by hybridization. To assure accuracy of the physical map, the markers should be single-copy or of single-locus origin, if multiple-copy.

[0119] Chromosome landing of large-insert clones using chromosome-specific DNA markers such as STSs microsatellites, RFLPs, or other markers can correlate physical and genetic maps (Zwick et al., Genetics 148:1983-1992 (1998), the entirety of which is herein incorporated by reference in its entirety). These strategies include chromosome landing of BACs containing markers or BAC contigs by BAC-FISH (Fluorescent In Situ Hybridization), a technique that involves tagging the DNA marker with an observable label. BAC clones giving positive hybridization signals are individually analyzed by FISH to metaphase chromosome spreads. The location of the labeled probe can be detected after it binds to its complementary DNA strand in an intact chromosome. The FISH of a BAC selected from a BAC contig will directly place the BAC contig to a specific chromosome region and establish a linkage relationships of the BAC contig to another BAC contig.

[0120] Likewise, BACs and STCs of the present invention can be used for contig mapping (Venter, et al., Nature, 381:364-366 (1996), the entirety of which is herein incorporated by reference). A “seed” BAC insert can be sequenced and then STCs and the corresponding BAC of each STC can be placed on the sequenced insert using the BLASTN program. Marker or gene containing STCs can be determined by the BLASTN program and their corresponding BACs can be hybridized to specific chromosomes using BAC-FISH (Zwick et al., Genetics 148:1983-1992 (1998)).

[0121] STCs can be used to identify a minimum tiling path of BACs by computational procedures. Any nucleation sequence (the sequence of an entire BAC, for example) can be electronically compared to a database of STCs to identify the next clones to be sequenced to maximally extend a contig. Chosen STCs need to occupy correct positions in the tiling path. Several factors can contribute to errors in the positioning and selection of these clones. An STC that contains all or part of a repetitive element can appear to align at any part of the growing mosaic which contains that element. One method of selecting the appropriate BAC is to mask out all sections of DNA sequence which are known to be repetitive elements. The sequence symbols of these section are replaced with Ns. These sections of DNA are not used to align the STC. STCs which are completely comprised of Ns are discarded. In this way, the unmasked sections of DNA may be aligned against the growing mosaic without misplacing them due to redundant sequence. A program publicly available, PowerBLAST includes a number of options for masking repetitive elements and low complexity subsequences (Zhang and Madden, Genome Res. 7:649-56 (1997), the entirety of which is herein incorporated by reference. cDNA and genomic libraries also can be used as probe sources, thus directly combining the ordering of the genomic DNA with the localization of transcribed sequences. By a simultaneous hybridization to the genomic and back to the transcriptional libraries, results are produced on sequence homologies between transcribed sequences.

[0122] It is understood that the nucleic acid molecules of the present invention may in one embodiment be used in physical mapping. In a preferred embodiment, nucleic acid molecules of the present invention may in one embodiment be used in the physical mapping of Glycine max.

[0123] Nucleic acid molecules of the present invention can be used in comparative mapping (physical and genetic). Comparative mapping within families provides a method to the degree of sequence conservation, gene order, ploidy of species, ancestral relationships and the rates at which individual genomes are evolving. Comparative mapping has been carried out by cross-hybridizing molecular markers across species within a given family. As in genetic mapping, molecular markers are needed but instead of direct hybridization to mapping filters, the markers are used to select large insert clones from a total genomic DNA library of a related species. The selected clones, each a representative of a single marker, can then be used to physically map the region in the target species. The advantage of this method for comparative mapping is that no mapping population or linkage map of the target species is needed and the clones may also be used in other closely related species. By comparing the results obtained by genetic mapping in model plants, with those from other species, similarities of genomic structure among plants species can be established. Cross-hybridization of RFLP markers have been reported and conserved gene order has been established in many studies. Such macroscopic synteny is utilized for the estimation of correspondence of loci among these crops. These loci include not only Mendelian genes but also Quantitative Trait Loci (QTL) (Mohan et al., Molecular Breeding 3:87-103 (1997), the entirety of which is herein incorporated by reference.

[0124] It is understood that markers of the present invention may in another embodiment be used in comparative mapping. In a preferred embodiment the markers of present invention may be used in the comparative mapping of Glycine clandestina, Glycine gracilis, Glycine soja, Glycine tomentella, and Glycine tabaina

[0125] The nucleic acid molecules of the present invention can be used to identify polymorphisms. In one embodiment, one or more of the STC nucleic acid molecules or a BAC nucleic acid molecule (or a sub-fragment of either) may be employed as a marker nucleic acid molecule to identify such polymorphism(s). Alternatively, such polymorphisms can be detected through the use of a marker nucleic acid molecule or a marker protein that is genetically linked to (i.e., a polynucleotide that co-segregates with) such polymorphism(s).

[0126] In an alternative embodiment, such polymorphisms can be detected through the use of a marker nucleic acid molecule that is physically linked to such polymorphism(s). For this purpose, marker nucleic acid molecules comprising a nucleotide sequence of a polynucleotide located within 1 mb of the polymorphism(s), and more preferably within 100 kb of the polymorphism(s), and most preferably within 10 kb of the polymorphism(s) can be employed.

[0127] The genomes of animals and plants naturally undergo spontaneous mutation in the course of their continuing evolution (Gusella, Ann. Rev. Biochem. 55:831-854 (1986)). A “polymorphism” is a variation or difference in the sequence of the gene or its flanking regions that arises in some of the members of a species. The variant sequence and the “original” sequence co-exist in the species' population. In some instances, such co-existence is in stable or quasi-stable equilibrium.

[0128] A polymorphism is thus said to be “allelic,” in that, due to the existence of the polymorphism, some members of a species may have the original sequence (i.e., the original “allele”) whereas other members may have the variant sequence (i.e., the variant “allele”). In the simplest case, only one variant sequence may exist, and the polymorphism is thus said to be di-allelic. In other cases, the species' population may contain multiple alleles, and the polymorphism is termed tri-allelic, etc. A single gene may have multiple different unrelated polymorphisms. For example, it may have a di-allelic polymorphism at one site, and a multi-allelic polymorphism at another site.

[0129] The variation that defines the polymorphism may range from a single nucleotide variation to the insertion or deletion of extended regions within a gene. In some cases, the DNA sequence variations are in regions of the genome that are characterized by short tandem repeats (STRs) that include tandem di- or tri-nucleotide repeated motifs of nucleotides. Polymorphisms characterized by such tandem repeats are referred to as “variable number tandem repeat” (“VNTR”) polymorphisms. VNTRs have been used in identity analysis (Weber, U.S. Pat. No. 5,075,217; Armour, et al., FEBS Lett. 307:113-115 (1992); Jones, et al., Eur. J. Haematol. 39:144-147 (1987); Horn, et al., PCT Application WO91/14003; Jeffreys, European Patent Application 370,719; Jeffreys, U.S. Pat. No. 5,175,082; Jeffreys et al., Amer. J. Hum. Genet. 39:11-24 (1986); Jeffreys et al., Nature 316:76-79 (1985); Gray, et al., Proc. R. Acad. Soc. Lond. 243:241-253 (1991); Moore, et al., Genomics 10:654-660 (1991); Jeffreys, et al., Anim. Genet. 18:1-15 (1987); Hillel, et al., Anim. Genet. 20:145-155 (1989); Hillel, et al., Genet. 124:783-789 (1990), all of which are herein incorporated by reference in their entirety).

[0130] The detection of polymorphic sites in a sample of DNA may be facilitated through the use of nucleic acid amplification methods. Such methods specifically increase the concentration of polynucleotides that span the polymorphic site, or include that site and sequences located either distal or proximal to it. Such amplified molecules can be readily detected by gel electrophoresis or other means.

[0131] The most preferred method of achieving such amplification employs the polymerase chain reaction (“PCR”) (Mullis, et al., Cold Spring Harbor Symp. Quant. Biol. 51:263-273 (1986); Erlich, et al., European Patent Appln. 50,424; European Patent Appln. 84,796, European Patent Application 258,017, European Patent Appln. 237,362; Mullis, European Patent Appln. 201,184; Mullis, et al., U.S. Pat. No. 4,683,202; Erlich., U.S. Pat. No. 4,582,788; and Saiki, et al., U.S. Pat. No. 4,683,194, all of which are herein incorporated by reference), using primer pairs that are capable of hybridizing to the proximal sequences that define a polymorphism in its double-stranded form.

[0132] In lieu of PCR, alternative methods, such as the “Ligase Chain Reaction” (“LCR”) may be used (Barany, Proc. Natl. Acad. Sci.(U.S.A.) 88:189-193 (1991), the entirety of which is herein incorporated by reference. LCR uses two pairs of oligonucleotide probes to exponentially amplify a specific target. The sequences of each pair of oligonucleotides is selected to permit the pair to hybridize to abutting sequences of the same strand of the target. Such hybridization forms a substrate for a template-dependent ligase. As with PCR, the resulting products thus serve as a template in subsequent cycles and an exponential amplification of the desired sequence is obtained.

[0133] LCR can be performed with oligonucleotides having the proximal and distal sequences of the same strand of a polymorphic site. In one embodiment, either oligonucleotide will be designed to include the actual polymorphic site of the polymorphism. In such an embodiment, the reaction conditions are selected such that the oligonucleotides can be ligated together only if the target molecule either contains or lacks the specific nucleotide that is complementary to the polymorphic site present on the oligonucleotide. Alternatively, the oligonucleotides may be selected such that they do not include the polymorphic site (see, Segev, PCT Application WO 90/01069, the entirety of which is herein incorporated by reference).

[0134] The “Oligonucleotide Ligation Assay” (“OLA”) may alternatively be employed (Landegren, et al., Science 241:1077-1080 (1988), the entirety of which is herein incorporated by reference). The OLA protocol uses two oligonucleotides which are designed to be capable of hybridizing to abutting sequences of a single strand of a target. OLA, like LCR, is particularly suited for the detection of point mutations. Unlike LCR, however, OLA results in “linear” rather than exponential amplification of the target sequence.

[0135] Nickerson, et al. have described a nucleic acid detection assay that combines attributes of PCR and OLA (Nickerson, et al., Proc. Natl. Acad. Sci. (U.S.A.) 87:8923-8927 (1990), the entirety of which is herein incorporated by reference). In this method, PCR is used to achieve the exponential amplification of target DNA, which is then detected using OLA. In addition to requiring multiple, and separate, processing steps, one problem associated with such combinations is that they inherit all of the problems associated with PCR and OLA.

[0136] Schemes based on ligation of two (or more) oligonucleotides in the presence of nucleic acid having the sequence of the resulting “di-oligonucleotide”, thereby amplifying the di-oligonucleotide, are also known (Wu, et al., Genomics 4:560 (1989), the entirety of which is herein incorporated by reference), and may be readily adapted to the purposes of the present invention.

[0137] Other known nucleic acid amplification procedures, such as allele-specific oligomers, branched DNA technology, transcription-based amplification systems, or isothermal amplification methods may also be used to amplify and analyze such polymorphisms (Malek, et al., U.S. Pat. No. 5,130,238; Davey, et al., European Patent Application 329,822; Schuster et al., U.S. Pat. No. 5,169,766; Miller, et al., PCT Application WO 89/06700; Kwoh, et al., Proc. Natl. Acad. Sci. (U.S.A.) 86:1173-1177 (1989); Gingeras, et al., PCT Application WO 88/10315; Walker, et al., Proc. Natl. Acad. Sci. (U.S.A.) 89:392-396 (1992), all of which are herein incorporated by reference in their entirety).

[0138] The identification of a polymorphism can be determined in a variety of ways. By correlating the presence or absence of it in an plant with the presence or absence of a phenotype, it is possible to predict the phenotype of that plant. If a polymorphism creates or destroys a restriction endonuclease cleavage site, or if it results in the loss or insertion of DNA (e.g., a VNTR polymorphism), it will alter the size or profile of the DNA fragments that are generated by digestion with that restriction endonuclease. As such, individuals that possess a variant sequence can be distinguished from those having the original sequence by restriction fragment analysis. Polymorphisms that can be identified in this manner are termed “restriction fragment length polymorphisms” (“RFLPs”). RFLPs have been widely used in human and plant genetic analyses (Glassberg, UK Patent Application 2135774; Skolnick, et al., Cytogen. Cell Genet. 32:58-67 (1982); Botstein, et al., Ann. J. Hum. Genet. 32:314-331 (1980); Fischer, et al. (PCT Application WO90/13668); Uhlen, PCT Application WO90/11369).

[0139] Polymorphisms can also be identified by Single Strand Conformation Polymorphism (SSCP) analysis. The SSCP technique is a method capable of identifying most sequence variations in a single strand of DNA, typically between 150 and 250 nucleotides in length (Elles, Methods in Molecular Medicine: Molecular Diagnosis of Genetic Diseases, Humana Press (1996), the entirety of which is herein incorporated by reference); Orita et al., Genomics 5:874-879 (1989), the entirety of which is herein incorporated by reference). Under denaturing conditions a single strand of DNA will adopt a conformation that is uniquely dependent on its sequence conformation. This conformation usually will be different, even if only a single base is changed. Most conformations have been reported to alter the physical configuration or size sufficiently to be detectable by electrophoresis. A number of protocols have been described for SSCP including, but not limited to Lee et al., Anal. Biochem. 205:289-293 (1992), the entirety of which is herein incorporated by reference; Suzuki et al., Anal. Biochem. 192:82-84 (1991), the entirety of which is herein incorporated by reference; Lo et al., Nucleic Acids Research 20: 1005-1009 (1992), the entirety of which is herein incorporated by reference; Sarkar et al., Genomics 13:441-443 (1992), the entirety of which is herein incorporated by reference). It is understood that one or more of the nucleic acids of the present invention, may be utilized as markers or probes to detect polymorphisms by SSCP analysis.

[0140] Polymorphisms may also be found using a DNA fingerprinting technique called amplified fragment length polymorphism (AFLP), which is based on the selective PCR amplification of restriction fragments from a total digest of genomic DNA to profile that DNA. Vos, et al., Nucleic Acids Res. 23:4407-4414 (1995), the entirety of which is herein incorporated by reference. This method allows for the specific co-amplification of high numbers of restriction fragments, which can be visualized by PCR without knowledge of the nucleic acid sequence.

[0141] AFLP employs basically three steps. Initially, a sample of genomic DNA is cut with restriction enzymes and oligonucleotide adapters are ligated to the restriction fragments of the DNA. The restriction fragments are then amplified using PCR by using the adapter and restriction sequence as target sites for primer annealing. The selective amplification is achieved by the use of primers that extend into the restriction fragments, amplifying only those fragments in which the primer extensions match the nucleotide flanking the restriction sites. These amplified fragments are then visualized on a denaturing polyacrylamide gel.

[0142] AFLP analysis has been performed on Salix (Beismann, et al., Mol. Ecol. 6:989-993 (1997), the entirety of which is herein incorporated by reference); Acinetobacter (Janssen, et al., Int. J. Syst. Bacteriol 47:1179-1187 (1997), the entirety of which is herein incorporated by reference), Aeromonas popoffi (Huys, et al., Int. J. Syst. Bacteriol. 47:1165-1171 (1997), the entirety of which is herein incorporated by reference), rice (McCouch, et al., Plant Mol. Biol. 35:89-99 (1997), the entirety of which is herein incorporated by reference); Nandi, et al., Mol. Gen. Genet. 255:1-8 (1997); Cho, et al., Genome 39:373-378 (1996), herein incorporated by reference), barley (Hordeum vulgare) (Simons, et al., Genomics 44:61-70 (1997), the entirety of which is herein incorporated by reference; Waugh, et al., Mol. Gen. Genet. 255:311-321 (1997), the entirety of which is herein incorporated by reference; Qi, et al., Mol. Gen. Genet. 254:330-336 (1997), the entirety of which is herein incorporated by reference; Becker, et al., Mol. Gen. Genet. 249:65-73 (1995), the entirety of which is herein incorporated by reference), potato (Van der Voort, et al., Mol. Gen. Genet. 255:438-447 (1997), the entirety of which is herein incorporated by reference; Meksem, et al., Mol. Gen. Genet. 249:74-81 (1995), the entirety of which is herein incorporated by reference), Phytophthora infestans (Van der Lee, et al., Fungal Genet. Biol. 21:278-291 (1997), the entirety of which is herein incorporated by reference), Bacillus anthracis (Keim, et al., J. Bacteriol. 179:818-824 (1997)), Astragalus cremnophylax (Travis, et al., Mol. Ecol. 5:735-745 (1996), the entirety of which is herein incorporated by reference), Arabidopsis (Cnops, et al., Mol. Gen. Genet. 253:32-41 (1996), the entirety of which is herein incorporated by reference), Escherichia coli (Lin, et al., Nucleic Acids Res. 24:3649-3650 (1996), the entirety of which is herein incorporated by reference), Aeromonas (Huys, et al., Int. J. Syst Bacteriol. 46:572-580 (1996), the entirety of which is herein incorporated by reference), nematode (Folkertsma, et al., Mol. Plant Microbe Interact. 9:47-54 (1996), the entirety of which is herein incorporated by reference), tomato (Thomas, et al., Plant J. 8:785-794 (1995), the entirety of which is herein incorporated by reference), and human (Latorra, et al., PCR Methods Appl. 3:351-358 (1994) the entirety of which is herein incorporated by reference). AFLP analysis has also been used for fingerprinting mRNA (Money, et al., Nucleic Acids Res. 24:2616-2617 (1996), the entirety of which is herein incorporated by reference; Bachem, et al., Plant J. 9:745-753 (1996), the entirety of which is herein incorporated by reference). It is understood that one or more of the nucleic acid molecules of the present invention, may be utilized as markers or probes to detect polymorphisms by AFLP analysis for fingerprinting mRNA.

[0143] Polymorphisms may also be found using random amplified polymorphic DNA (RAPD) (Williams et al., Nucl. Acids Res. 18:6531-6535 (1990), the entirety of which is herein incorporated by reference) and cleavable amplified polymorphic sequences (CAPS) (Lyamichev et al., Science 260:778-783 (1993), the entirety of which is herein incorporated by reference). It is understood that one or more of the nucleic acid molecules of the present invention, may be utilized as markers or probes to detect polymorphisms by RAPD or CAPS analysis.

[0144] Nucleic acid molecules of the present invention can be used to monitor expression. A microarray-based method for high-throughput monitoring of plant gene expression may be utilized to measure gene-specific hybridization targets. This ‘chip’-based approach involves using microarrays of nucleic acid molecules as gene-specific hybridization targets to quantitatively measure expression of the corresponding plant genes (Schena et al., Science 270:467-470 (1995), the entirety of which is herein incorporated by reference; Shalon, Ph.D. Thesis. Stanford University (1996), the entirety of which is herein incorporated by reference). Every nucleotide in a large sequence can be queried at the same time. Hybridization can be used to efficiently analyze nucleotide sequences.

[0145] Several microarray methods have been described. One method compares the sequences to be analyzed by hybridization to a set of oligonucleotides or cDNA molecules representing all possible subsequences (Bains and Smith, J. Theor. Biol. 135:303 (1989), the entirety of which is herein incorporated by reference). A second method hybridizes the sample to an array of oligonucleotide or cDNA probes. An array consisting of oligonucleotides or cDNA molecules complementary to subsequences of a target sequence can be used to determine the identity of a target sequence, measure its amount, and detect differences between the target and a reference sequence. Nucleic acid molecule microarrays may also be screened with protein molecules or fragments thereof to determine nucleic acid molecules that specifically bind protein molecules or fragments thereof.

[0146] Additionally, microarrays of BACs may be prepared to sufficiently cover 3× of an entire genome. Such microarrays can be used in a variety of genomics experiments including gene mapping, DNA fingerprinting and promoter identification. Microarrays of genomic DNA can also be used for parallel analysis of genomes at single gene resolution (Lemieux et al., Molecular Breeding 277-289 (1988), the entirety of which is herein incorporated by reference). It is understood that one or more of the molecules of the present invention, preferably one or more of the nucleic acid molecules or protein molecules or fragments thereof of the present invention may be utilized in a genomic microarray based method. In a preferred embodiment of the present invention, one or more of the Glycine max nucleic acid molecules or protein molecules or fragments thereof of the present invention may be utilized in a genomic microarray based method. For example, Genomic Mismatch Scanning (GMS), a hybridization-based method of linkage analysis that allows rapid identification of regions of identity-by-descent between two related individuals, can be carried out with microarrays. GMS is reported to have been used to identify genetically common chromosomal segments based on the ability of these DNA sequences to form extensive regions of mismatch-free heteroduplexes. A series of enzymatic steps, coupled with filter binding, is used to selectively remove heteroduplexes that contain mismatches (i.e., chromosomal regions that do not share identity-by descent.). Fragments of chromosomal DNA representing inherited regions are hybridized to a microarray of ordered genomic clones and positive hybridization signals pinpoint regions of identity-by-descent at high resolution (Lemieux et al., Molecular Breeding 277-289 (1988))

[0147] It is understood that one or more of the molecules of the present invention, preferably one or more of the nucleic acid molecules or protein molecules or fragments thereof of the present invention may be utilized in a GMS microarray based method to locate regions of identity-by-descent between related individuals. In a preferred embodiment of the present invention, one or more of the Glycine max nucleic acid molecules or protein molecules or fragments thereof of the present invention may be utilized in a GMS microarray based method to locate regions of identity-by-descent between related individuals. The GMS microarray approach can also be used as a tool to map mutigenic traits. For example, in yeast, the entire genomic sequence is known and it has been reported that the genes responsible for growth at elevated temperature, a trait required for the pathogenicity of certain yeast strains, may be determined using GMS (Lemieux et al, Molecular Breeding 277-289 (1988)). By analyzing the inheritance of large numbers of tetrads derived from crosses of pathogenic and wild type strains, all the genes responsible for a yeast strain's ability to grow at 42° C., for example, could be identified.

[0148] It is understood that one or more of the molecules of the present invention, preferably one or more of the nucleic acid molecules or protein molecules or fragments thereof of the present invention may be utilized in a GMS microarray based method to map multigenic traits. In a preferred embodiment of the present invention, one or more of the Glycine max nucleic acid molecules or protein molecules or fragments thereof of the present invention may be utilized in a GMS microarray based method to map multigenic traits.

[0149] Plant repeat elements may be used with GMS microarraying to identify species specific chromosomes in another species background. For example, the maize genome contains moderately repetitive DNA sequences (ZLRS) representing about 2500 copies per haploid genome; these sequences are present in the genus Zea and absent in other graminaceous species. Ananiev et al., (Proc. Natl. Acad. Sci. (U.S.A.) 94:3526-3529 (1997), all of which are herein incorporated by reference in their entirety) have reported unusual plants with individual maize chromosomes added to a complete oat genome generated by embryo rescue from oat (Avena sativa)×Zea mays crosses. By using highly repetitive maize-specific sequences as probes, Ananiev et al. (1997) were able to selectively isolate cosmid clones containing maize genomic DNA.

[0150] It is understood that one or more of the molecules of the present invention, preferably one or more of the nucleic acid molecules or protein molecules or fragments thereof of the present invention may be utilized in a GMS microarray based method using repeat elements to selectively isolate clones containing species specific DNA. In a preferred embodiment of the present invention, one or more of the Glycine max nucleic acid molecules or protein molecules or fragments thereof of the present invention may be utilized in a GMS microarray based method to selectively isolate clones containing species specific DNA. A particular preferred microarray embodiment of the present invention is a microarray comprising nucleic acid molecules encoding genes that are homologues of known genes or nucleic acid molecules that comprise genes or fragments thereof that elicit only limited or no matches to known genes. A further preferred microarray embodiment of the present invention is a microarray comprising nucleic acid molecules encoding genes or fragments thereof that are homologues of known genes and nucleic acid molecules that comprise genes or fragments thereof that elicit only limited or no matches to known genes. A further preferred microarray embodiment of the present invention is a microarray comprising nucleic acid molecules encoding genes or fragments thereof that elicit only limited or no matches to known genes.

[0151] It is understood that one or more of the molecules of the present invention, preferably one or more of the nucleic acid molecules or protein molecules or fragments thereof of the present invention may be utilized in a microarray based method. In a preferred embodiment of the present invention, one or more of the Glycine max nucleic acid molecules or protein molecules or fragments thereof of the present invention set forth in Table 1 may be utilized in a microarray based method.

[0152] Nucleic acid molecules of the present invention may be used in site directed mutagenesis. Site-directed mutagenesis may be utilized to modify nucleic acid sequences, particularly as it is a technique that allows one or more of the amino acids encoded by a nucleic acid molecule to be altered (e.g. a threonine to be replaced by a methionine). Three basic methods for site-directed mutagenesis are often employed. These are cassette mutagenesis (Wells et al., Gene 34:315-23 (1985), the entirety of which is herein incorporated by reference), primer extension (Gilliam et al., Gene 12:129-137 (1980), the entirety of which is herein incorporated by reference); Zoller and Smith, Methods Enzymol. 100:468-500 (1983), the entirety of which is herein incorporated by reference; and Dalbadie-McFarland et al., Proc. Natl. Acad. Sci. (U.S.A.) 79:6409-6413 (1982), the entirety of which is herein incorporated by reference) and methods based upon PCR (Scharf et al., Science 233:1076-1078 (1986), the entirety of which is herein incorporated by reference; Higuchi et al., Nucleic Acids Res. 16:7351-7367 (1988), the entirety of which is herein incorporated by reference). Site-directed mutagenesis approaches are also described in European Patent 0 385 962, the entirety of which is herein incorporated by reference, European Patent 0 359 472, the entirety of which is herein incorporated by reference, and PCT Patent Application WO 93/07278, the entirety of which is herein incorporated by reference.

[0153] Site-directed mutagenesis strategies have been applied to plants for both in vitro as well as in vivo site-directed mutagenesis (Lanz et al., J. Biol. Chem. 266:9971-6 (1991), the entirety of which is herein incorporated by reference; Kovgan and Zhdanov, Biotekhnologiya 5:148-154, No. 207160n, Chemical Abstracts 110:225 (1989), the entirety of which is herein incorporated by reference; Ge et al., Proc. Natl. Acad. Sci. (U.S.A.) 86:4037-4041 (1989), the entirety of which is herein incorporated by reference, Zhu et al., J. Biol. Chem. 271:18494-18498 (1996), Chu et al., Biochemistry 33:6150-6157 (1994), the entirety of which is herein incorporated by reference, Small et al., EMBO J. 11:1291-1296 (1992), the entirety of which is herein incorporated by reference, Cho et al., Mol. Biotechnol. 8:13-16 (1997), Kita et al., J. Biol. Chem. 271:26529-26535 (1996), the entirety of which is herein incorporated by reference, Jin et al., Mol. Microbiol. 7:555-562 (1993), the entirety of which is herein incorporated by reference, Hatfield and Vierstra, J. Biol. Chem. 267:14799-14803 (1992), the entirety of which is herein incorporated by reference, Zhao et al., Biochemistry 31:5093-5099 (1992), the entirety of which is herein incorporated by reference).

[0154] Any of the nucleic acid molecules of the present invention may either be modified by site-directed mutagenesis or used as, for example, nucleic acid molecules that are used to target other nucleic acid molecules for modification. It is understood that mutants with more than one altered nucleotide can be constructed using techniques that practitioners skilled in the art are familiar with such as isolating restriction fragments and ligating such fragments into an expression vector (see, for example, Sambrook et al., Molecular Cloning: A Laboratory Manual, Cold Spring Harbor Press (1989)). In a preferred embodiment of the present invention, one or more of the Glycine max nucleic acid molecules or fragments thereof of the present invention may be modified by site-directed mutagenesis.

[0155] Nucleic acid molecules of the present invention may be used in transformation. Exogenous genetic material may be transferred into a plant cell and the plant cell regenerated into a whole, fertile or sterile plant. Exogenous genetic material is any genetic material, whether naturally occurring or otherwise, from any source that is capable of being inserted into any organism. In a preferred embodiment of the present invention the exogenous genetic material can include Glycine max genetic material. In a preferred embodiment of the present invention, the exogenous genetic material comprises a nucleic acid molecule of the present invention. Such genetic material may be transferred into either monocotyledons and dicotyledons including but not limited to the plants, Zea mays and Arabidopsis thaliana and soybean (See specifically, Chistou, Particle Bombardment for Genetic Engineering of Plants, pp. 63-69 (Zea mays), pp 50-60 (soybean), Biotechnology Intelligence Unit, Academic Press, San Diego, Calif. (1996), the entirety of which is herein incorporated by reference and generally Chistou, Particle Bombardment for Genetic Engineering of Plants, Biotechnology Intelligence Unit, Academic Press, San Diego, Calif. (1996), the entirety of which is herein incorporated by reference).

[0156] Transfer of a nucleic acid that encodes for a protein can result in overexpression of that protein in a transformed cell or transgenic plant. One or more of the proteins or fragments thereof encoded by nucleic acid molecules of the present invention may be overexpressed in a transformed cell or transformed plant. Such overexpression may be the result of transient or stable transfer of the exogenous material.

[0157] Exogenous genetic material may be transferred into a plant cell by the use of a DNA vector or construct designed for such a purpose. Vectors have been engineered for transformation of large DNA inserts into plant genomes. Vectors have been designed to replicate in both E. coli and A. tumefaciens and have all of the features required for transferring large inserts of DNA into plant chromosomes (Choi and Wing, http://genome.clemson.edulprotocols2-nj.html July, 1998). ApBACwich system has been developed to achieve site-directed integration of DNA into the genome. A 150 kb cotton BAC DNA is reported to have been transferred into a specific lox site in tobacco by biolistic bombardment and Cre-lox site specific recombination.

[0158] A construct or vector may include a plant promoter to express the protein or protein fragment of choice. A number of promoters which are active in plant cells have been described in the literature. These include the nopaline synthase (NOS) promoter (Ebert et al., Proc. Natl. Acad. Sci. (U.S.A.) 84:5745-5749 (1987), the entirety of which is herein incorporated by reference), the octopine synthase (OCS) promoter (which are carried on tumor-inducing plasmids of Agrobacterium tumefaciens), the caulimovirus promoters such as the cauliflower mosaic virus (CaMV) 19S promoter (Lawton et al., Plant Mol. Biol. 9:315-324 (1987), the entirety of which is herein incorporated by reference) and the CAMV 35S promoter (Odell et al., Nature 313:810-812 (1985), the entirety of which is herein incorporated by reference), the figwort mosaic virus 35S-promoter, the light-inducible promoter from the small subunit of ribulose-1,5-bis-phosphate carboxylase (ssRUBISCO), the Adh promoter (Walker et al., Proc. Natl. Acad. Sci. (U.S.A.) 84:6624-6628 (1987), the entirety of which is herein incorporated by reference), the sucrose synthase promoter (Yang et al., Proc. Natl. Acad. Sci. (U.S.A.) 87:4144-4148 (1990), the entirety of which is herein incorporated by reference), the R gene complex promoter (Chandler et al., The Plant Cell 1: 1175-1183 (1989), the entirety of which is herein incorporated by reference), and the chlorophyll a/b binding protein gene promoter, etc. These promoters have been used to create DNA constructs which have been expressed in plants; see, e.g., PCT publication WO 84/02913, herein incorporated by reference in its entirety.

[0159] Promoters which are known or are found to cause transcription of DNA in plant cells can be used in the present invention. Such promoters may be obtained from a variety of sources such as plants and plant viruses. It is preferred that the particular promoter selected should be capable of causing sufficient expression to result in the production of an effective amount of protein to cause the desired phenotype. In addition to promoters which are known to cause transcription of DNA in plant cells, other promoters may be identified for use in the current invention by screening a plant cDNA library for genes which are selectively or preferably expressed in the target tissues or cells.

[0160] For the purpose of expression in source tissues of the plant, such as the leaf, seed, root or stem, it is preferred that the promoters utilized in the present invention have relatively high expression in these specific tissues. For this purpose, one may choose from a number of promoters for genes with tissue- or cell-specific or -enhanced expression. Examples of such promoters reported in the literature include the chloroplast glutamine synthetase GS2 promoter from pea (Edwards et al., Proc. Natl. Acad. Sci. (U.S.A.) 87:3459-3463 (1990), herein incorporated by reference in its entirety), the chloroplast fructose-1,6-biphosphatase (FBPase) promoter from wheat (Lloyd et al., Mol. Gen. Genet. 225:209-216 (1991), herein incorporated by reference in its entirety), the nuclear photosynthetic ST-LS1 promoter from potato (Stockhaus et al., EMBO J. 8:2445-2451 (1989), herein incorporated by reference in its entirety), the phenylalanine ammonia-lyase (PAL) promoter and the chalcone synthase (CHS) promoter from Arabidopsis thaliana. Also reported to be active in photosynthetically active tissues are the ribulose-1,5-bisphosphate carboxylase (RbcS) promoter from eastern larch (Larix laricina), the promoter for the cab gene, cab6, from pine (Yamamoto et al., Plant Cell Physiol. 35:773-778 (1994), herein incorporated by reference in its entirety), the promoter for the Cab-1 gene from wheat (Fejes et al., Plant Mol. Biol. 15:921-932 (1990), herein incorporated by reference in its entirety), the promoter for the CAB-1 gene from spinach (Lubberstedt et al., Plant Physiol. 104:997-1006 (1994), herein incorporated by reference in its entirety), the promoter for the cab1R gene from rice (Luan et al., Plant Cell. 4:971-981 (1992), the entirety of which is herein incorporated by reference), the pyruvate, orthophosphate dikinase (PPDK) promoter from Zea mays (Matsuoka et al., Proc. Natl. Acad. Sci. (U.S.A.) 90:9586-9590 (1993), herein incorporated by reference in its entirety), the promoter for the tobacco Lhcb1*2 gene (Cerdan et al., Plant Mol. Biol. 33:245-255. (1997), herein incorporated by reference in its entirety), the Arabidopsis thaliana SUC2 sucrose-H+ symporter promoter (Truernit et al., Planta. 196:564-570 (1995), herein incorporated by reference in its entirety), and the promoter for the thylacoid membrane proteins from spinach (psaD, psaF, psae, PC, FNR, atpC, atpD, cab, rbcS). Other promoters for the chlorophyll a/b-binding proteins may also be utilized in the present invention, such as the promoters for LhcB gene and PsbP gene from white mustard (Sinapis alba; Kretsch et al., Plant Mol. Biol. 28:219-229 (1995), the entirety of which is herein incorporated by reference).

[0161] For the purpose of expression in sink tissues of the plant, such as the tuber of the potato plant, the fruit of tomato, or the seed of Zea mays, wheat, rice, and barley, it is preferred that the promoters utilized in the present invention have relatively high expression in these specific tissues. A number of promoters for genes with tuber-specific or -enhanced expression are known, including the class I patatin promoter (Bevan et al., EMBO J. 8:1899-1906 (1986); Jefferson et al., Plant Mol. Biol. 14995-1006 (1990), both of which are herein incorporated by reference in its entirety), the promoter for the potato tuber ADPGPP genes, both the large and small subunits, the sucrose synthase promoter (Salanoubat and Belliard, Gene. 60:47-56 (1987), Salanoubat and Belliard, Gene. 84:181-185 (1989), both of which are incorporated by reference in their entirety), the promoter for the major tuber proteins including the 22 kd protein complexes and proteinase inhibitors (Hannapel, Plant Physiol. 101:703-704 (1993), herein incorporated by reference in its entirety), the promoter for the granule bound starch synthase gene (GBSS) (Visser et al., Plant Mol. Biol. 17:691-699 (1991), herein incorporated by reference in its entirety), and other class I and II patatins promoters (Koster-Topfer et al., Mol. Gen. Genet. 219:390-396 (1989); Mignery et al., Gene. 62:27-44 (1988), both of which are herein incorporated by reference in their entirety).

[0162] Other promoters can also be used to express a fructose 1,6 bisphosphate aldolase gene in specific tissues, such as seeds or fruits. The promoter for β-conglycinin (Chen et al., Dev. Genet. 10:112-122 (1989), herein incorporated by reference in its entirety) or other seed-specific promoters such as the napin and phaseolin promoters, can be used. The zeins are a group of storage proteins found in Zea mays endosperm. Genomic clones for zein genes have been isolated (Pedersen et al., Cell 29:1015-1026 (1982), herein incorporated by reference in its entirety), and the promoters from these clones, including the 15 kD, 16 kD, 19 k), 22 kD, 27 kD, and gamma genes, could also be used. Other promoters known to function, for example, in Zea mays, include the promoters for the following genes: waxy, Brittle, Shrunken 2, Branching enzymes I and II, starch synthases, debranching enzymes, oleosins, glutelins, and sucrose synthases. A particularly preferred promoter for Zea mays endosperm expression is the promoter for the glutelin gene from rice, more particularly the Osgt-1 promoter (Zheng et al., Mol. Cell. Biol. 13:5829-5842 (1993), herein incorporated by reference in its entirety). Examples of promoters suitable for expression in wheat include those promoters for the ADPglucose pyrophosphorylase (ADPGPP) subunits, the granule bound and other starch synthases, the branching and debranching enzymes, the embryogenesis-abundant proteins, the gliadins, and the glutenins. Examples of such promoters in rice include those promoters for the ADPGPP subunits, the granule bound and other starch synthases, the branching enzymes, the debranching enzymes, sucrose synthases, and the glutelins. A particularly preferred promoter is the promoter for rice glutelin, Osgt-1. Examples of such promoters for barley include those for the ADPGPP subunits, the granule bound and other starch synthases, the branching enzymes, the debranching enzymes, sucrose synthases, the hordeins, the embryo globulins, and the aleurone specific proteins.

[0163] Root specific promoters may also be used. An example of such a promoter is the promoter for the acid chitinase gene (Samac et al., Plant Mol. Biol. 25:587-596 (1994), the entirety of which is herein incorporated by reference). Expression in root tissue could also be accomplished by utilizing the root specific subdomains of the CaMV35S promoter that have been identified (Lam et al., Proc. Natl. Acad. Sci.(U.S.A.) 86:7890-7894 (1989), herein incorporated by reference in its entirety). Other root cell specific promoters include those reported by Conkling et al. (Conkling et al., Plant Physiol. 93:1203-1211 (1990), the entirety of which is herein incorporated by reference).

[0164] Additional promoters that may be utilized are described, for example, in U.S. Pat. Nos. 5,378,619, 5,391,725, 5,428,147, 5,447,858, 5,608,144, 5,608,144, 5,614,399, 5,633,441, 5,633,435, and 4,633,436, all of which are herein incorporated in their entirety. In addition, a tissue specific enhancer may be used (Fromm et al., The Plant Cell 1:977-984 (1989), the entirety of which is herein incorporated by reference).

[0165] Constructs or vectors may also include, with the coding region of interest, a nucleic acid sequence that acts, in whole or in part, to terminate transcription of that region. For example, such sequences have been isolated including the Tr7 3′ sequence and the nos 3′ sequence (Ingelbrecht et al., The Plant Cell 1:671-680 (1989), the entirety of which is herein incorporated by reference; Bevan et al., Nucleic Acids Res. 11:369-385 (1983), the entirety of which is herein incorporated by reference), or the like.

[0166] A vector or construct may also include regulatory elements. Examples of such include the Adh intron 1 (Callis et al., Genes and Develop. 1:1183-1200 (1987), the entirety of which is herein incorporated by reference), the sucrose synthase intron (Vasil et al., Plant Physiol. 91:1575-1579 (1989), the entirety of which is herein incorporated by reference) and the TMV omega element (Gallie et al., The Plant Cell 1:301-311 (1989), the entirety of which is herein incorporated by reference). These and other regulatory elements may be included when appropriate.

[0167] A vector or construct may also include a selectable marker. Selectable markers may also be used to select for plants or plant cells that contain the exogenous genetic material. Examples of such include, but are not limited to, a neo gene (Potrykus et al., Mol. Gen. Genet. 199:183-188 (1985), the entirety of which is herein incorporated by reference) which codes for kanamycin resistance and can be selected for using kanamycin, G418, etc.; a bar gene which codes for bialaphos resistance; a mutant EPSP synthase gene (Hinchee et al., Bio/Technology 6:915-922 (1988), the entirety of which is herein incorporated by reference) which encodes glyphosate resistance; a nitrilase gene which confers resistance to bromoxynil (Stalker et al., J. Biol. Chem. 263:6310-6314 (1988), the entirety of which is herein incorporated by reference); a mutant acetolactate synthase gene (ALS) which confers imidazolinone or sulphonylurea resistance (European Patent Application 154,204 (Sep. 11, 1985), the entirety of which is herein incorporated by reference); and a methotrexate resistant DHFR gene (Thillet et al., J. Biol. Chem. 263:12500-12508 (1988), the entirety of which is herein incorporated by reference).

[0168] A vector or construct may also include a transit peptide. Incorporation of a suitable chloroplast transit peptide may also be employed (European Patent Application Publication Number 0218571, the entirety of which is herein incorporated by reference). Translational enhancers may also be incorporated as part of the vector DNA. DNA constructs could contain one or more 5′ non-translated leader sequences which may serve to enhance expression of the gene products from the resulting mRNA transcripts. Such sequences may be derived from the promoter selected to express the gene or can be specifically modified to increase translation of the mRNA. Such regions may also be obtained from viral RNAs, from suitable eukaryotic genes, or from a synthetic gene sequence. For a review of optimizing expression of transgenes, see Koziel et al., Plant Mol. Biol. 32:393-405 (1996), the entirety of which is herein incorporated by reference.

[0169] A vector or construct may also include a screenable marker. Screenable markers may be used to monitor expression. Exemplary screenable markers include a β-glucuronidase or uidA gene (GUS) which encodes an enzyme for which various chromogenic substrates are known (Jefferson, Plant Mol. Biol, Rep. 5:387-405 (1987), the entirety of which is herein incorporated by reference; Jefferson et al., EMBO J. 6:3901-3907 (1987), the entirety of which is herein incorporated by reference); an R-locus gene, which encodes a product that regulates the production of anthocyanin pigments (red color) in plant tissues ((Dellaporta et al., Stadler Symposium 11:263-282 (1988), the entirety of which is herein incorporated by reference); a β-lactamase gene (Sutcliffe et al., Proc. Natl. Acad. Sci. (U.S.A.) 75:3737-3741 (1978), the entirety of which is herein incorporated by reference), a gene which encodes an enzyme for which various chromogenic substrates are known (e.g., PADAC, a chromogenic cephalosporin); a luciferase gene (Ow et al., Science 234:856-859 (1986), the entirety of which is herein incorporated by reference) a xylE gene (Zukowsky et al., Proc. Natl. Acad. Sci. (U.S.A.) 80:1101-1105 (1983), the entirety of which is herein incorporated by reference) which encodes a catechol diozygenase that can convert chromogenic catechols; an α-amylase gene (Ikatu et al., Bio/Technol. 8:241-242 (1990), the entirety of which is herein incorporated by reference); a tyrosinase gene (Katz et al., J. Gen. Microbiol. 129:2703-2714 (1983), the entirety of which is herein incorporated by reference) which encodes an enzyme capable of oxidizing tyrosine to DOPA and dopaquinone which in turn condenses to melanin; an α-galactosidase, which will turn a chromogenic α-galactose substrate.

[0170] Included within the terms “selectable or screenable marker genes” are also genes which encode a secretable marker whose secretion can be detected as a means of identifying or selecting for transformed cells. Examples include markers which encode a secretable antigen that can be identified by antibody interaction, or even secretable enzymes which can be detected catalytically. Secretable proteins fall into a number of classes, including small, diffusible proteins detectable, e.g., by ELISA, small active enzymes detectable in extracellular solution (e.g., α-amylase, β-lactamase, phosphinothricin transferase), or proteins which are inserted or trapped in the cell wall (such as proteins which include a leader sequence such as that found in the expression unit of extension or tobacco PR-S). Other possible selectable and/or screenable marker genes will be apparent to those of skill in the art.

[0171] Methods and compositions for transforming a bacteria and other microorganisms are known in the art (see for example Sambrook et al., Molecular Cloning: A Laboratory Manual, Second Edition, Cold Spring Harbor Laboratory Press, Cold Spring Harbor, N.Y., (1989), the entirety of which is herein incorporated by reference).

[0172] There are many methods for introducing transforming nucleic acid molecules into plant cells. Suitable methods are believed to include virtually any method by which nucleic acid molecules may be introduced into a cell, such as by Agrobacterium infection or direct delivery of nucleic acid molecules such as, for example, by PEG-mediated transformation, by electroporation or by acceleration of DNA coated particles, etc. (Pottykus, Ann. Rev. Plant Physiol. Plant Mol. Biol. 42:205-225 (1991), the entirety of which is herein incorporated by reference; Vasil, Plant Mol. Biol. 25:925-937 (1994), the entirety of which is herein incorporated by reference. For example, electroporation has been used to transform Zea mays protoplasts (Fromm et al., Nature 312:791-793 (1986), the entirety of which is herein incorporated by reference).

[0173] Technology for introduction of DNA into cells is well known to those of skill in the art. Four general methods for delivering a gene into cells have been described: (1) chemical methods (Graham and van der Eb, Virology, 54:536-539 (1973), the entirety of which is herein incorporated by reference); (2) physical methods such as microinjection (Capecchi, Cell 22:479-488 (1980), electroporation (Wong and Neumann, Biochem. Biophys. Res. Commun., 107:584-587 (1982); Fromm et al., Proc. Natl. Acad. Sci. (U.S.A.), 82:5824-5828 (1985); U.S. Pat. No. 5,384,253; and the gene gun (Johnston and Tang, Methods Cell Biol. 43:353-365 (1994), all of which the entirety is herein incorporated by reference; (3) viral vectors (Clapp, Clin. Perinatol., 20:155-168 (1993); Lu et al., J. Exp. Med., 178:2089-2096 (1993); Eglitis and Anderson, Biotechniques, 6:608-614 (1988), all of which the entirety is herein incorporated by reference); and (4) receptor-mediated mechanisms (Curiel et al., Hum. Gen. Ther., 3:147-154 (1992); Wagner et al., Proc. Natl. Acad. Sci. U.S.A., 89:6099-6103 (1992), all of which the entirety is herein incorporated by reference).

[0174] Acceleration methods that may be used include, for example, microprojectile bombardment and the like. One example of a method for delivering transforming nucleic acid molecules to plant cells is microprojectile bombardment. This method has been reviewed by Yang and Christou, eds., Particle Bombardment Technology for Gene Transfer, Oxford Press, Oxford, England (1994), the entirety of which is herein incorporated by reference). Non-biological particles (microprojectiles) that may be coated with nucleic acids and delivered into cells by a propelling force. Exemplary particles include those comprised of tungsten, gold, platinum, and the like.

[0175] A particular advantage of microprojectile bombardment, in addition to it being an effective means of reproducibly, and stably transforming monocotyledons, is that neither the isolation of protoplasts (Cristou et al., Plant Physiol. 87:671-674 (1988), the entirety of which is herein incorporated by reference) nor the susceptibility of Agrobacterium infection is required. An illustrative embodiment of a method for delivering DNA into maize cells by acceleration is a biolistics-particle delivery system, which can be used to propel particles coated with DNA through a screen, such as a stainless steel or Nytex screen, onto a filter surface covered with corn cells cultured in suspension. Gordon-Kamm et al., describes the basic procedure for coating tungsten particles with DNA (Gordon-Kamm et al., Plant Cell 2:603-618 (1990), the entirety of which is herein incorporated by reference). The screen disperses the tungsten nucleic acid particles so that they are not delivered to the recipient cells in large aggregates. A particle delivery system suitable for use with the present invention is the helium acceleration PDS-1000/He gun which is available from Bio-Rad Laboratories (Bio-Rad, Hercules, Calif.)(Sanford et al., Technique 3:3-16 (1991), the entirety of which is herein incorporated by reference).

[0176] For the bombardment, cells in suspension may be concentrated on filters. Filters containing the cells to be bombarded are positioned at an appropriate distance below the microprojectile stopping plate. If desired, one or more screens are also positioned between the gun and the cells to be bombarded.

[0177] Alternatively, immature embryos or other target cells may be arranged on solid culture medium. The cells to be bombarded are positioned at an appropriate distance below the macroprojectile stopping plate. If desired, one or more screens are also positioned between the acceleration device and the cells to be bombarded. Through the use of techniques set forth herein one may obtain up to 1000 or more foci of cells transiently expressing a marker gene. The number of cells in a focus which express the exogenous gene product 48 hours post-bombardment often range from one to ten and average one to three.

[0178] In bombardment transformation, one may optimize the prebombardment culturing conditions and the bombardment parameters to yield the maximum numbers of stable transformants. Both the physical and biological parameters for bombardment are important in this technology. Physical factors are those that involve manipulating the DNA/microprojectile precipitate or those that affect the flight and velocity of either the macro- or microprojectiles. Biological factors include all steps involved in manipulation of cells before and immediately after bombardment, the osmotic adjustment of target cells to help alleviate the trauma associated with bombardment, and also the nature of the transforming DNA, such as linearized DNA or intact supercoiled plasmids. It is believed that pre-bombardment manipulations are especially important for successful transformation of immature embryos.

[0179] In another alternative embodiment, plastids can be stably transformed. Methods disclosed for plastid transformation in higher plants include particle gun delivery of DNA containing a selectable marker and targeting of the DNA to the plastid genome through homologous recombination (Svab et al. Proc. Natl. Acad. Sci. (U.S.A.) 87:8526-8530 (1990): Svab and Maliga Proc. Natl. Acad. Sci. (U.S.A.) 90:913-917 (1993)); (Staub, J. M. and Maliga, P. EMBO J. 12:601-606 (1993), U.S. Pat. Nos. 5,451,513 and 5,545,818 all of which are herein incorporated by reference in their entirety).

[0180] Accordingly, it is contemplated that one may wish to adjust various aspects of the bombardment parameters in small scale studies to fully optimize the conditions. One may particularly wish to adjust physical parameters such as gap distance, flight distance, tissue distance, and helium pressure. One may also minimize the trauma reduction factors by modifying conditions which influence the physiological state of the recipient cells and which may therefore influence transformation and integration efficiencies. For example, the osmotic state, tissue hydration and the subculture stage or cell cycle of the recipient cells may be adjusted for optimum transformation. The execution of other routine adjustments will be known to those of skill in the art in light of the present disclosure.

[0181] Agrobacterium-mediated transfer is a widely applicable system for introducing genes into plant cells because the DNA can be introduced into whole plant tissues, thereby bypassing the need for regeneration of an intact plant from a protoplast. The use of Agrobacterium-mediated plant integrating vectors to introduce DNA into plant cells is well known in the art. See, for example the methods described (Fraley et al., Biotechnology 3:629-635 (1985); Rogers et al., Meth. In Enzymol, 153:253-277 (1987), both of which are herein incorporated by reference in their entirety. Further, the integration of the Ti-DNA is a relatively precise process resulting in few rearrangements. The region of DNA to be transferred is defined by the border sequences, and intervening DNA is usually inserted into the plant genome as described (Spielmann et al., Mol. Gen. Genet., 205:34 (1986), the entirety of which is herein incorporated by reference).

[0182] Modern Agrobacterium transformation vectors are capable of replication in E. coli as well as Agrobacterium, allowing for convenient manipulations as described (Klee et al., In: Plant DNA Infectious Agents, T. Hohn and J. Schell, eds., Springer-Verlag, New York, pp. 179-203 (1985), the entirety of which is herein incorporated by reference. Moreover, recent technological advances in vectors for Agrobacterium-mediated gene transfer have improved the arrangement of genes and restriction sites in the vectors to facilitate construction of vectors capable of expressing various polypeptide coding genes. The vectors described have convenient multi-linker regions flanked by a promoter and a polyadenylation site for direct expression of inserted polypeptide coding genes and are suitable for present purposes (Rogers et al., Meth. In Enzymol., 153:253-277 (1987), the entirety of which is herein incorporated by reference). In addition, Agrobacterium containing both armed and disarmed Ti genes can be used for the transformations. In those plant strains where Agrobacterium-mediated transformation is efficient, it is the method of choice because of the facile and defined nature of the gene transfer.

[0183] A transgenic plant formed using Agrobacterium transformation methods typically contains a single gene on one chromosome. Such transgenic plants can be referred to as being heterozygous for the added gene. More preferred is a transgenic plant that is homozygous for the added structural gene; i.e., a transgenic plant that contains two added genes, one gene at the same locus on each chromosome of a chromosome pair. A homozygous transgenic plant can be obtained by sexually mating (selfing) an independent segregant transgenic plant that contains a single added gene, germinating some of the seed produced and analyzing the resulting plants produced for the gene of interest.

[0184] It is also to be understood that two different transgenic plants can also be mated to produce offspring that contain two independently segregating added, exogenous genes. Selfing of appropriate progeny can produce plants that are homozygous for both added, exogenous genes that encode a polypeptide of interest. Back-crossing to a parental plant and out-crossing with a non-transgenic plant are also contemplated, as is vegetative propagation.

[0185] Transformation of plant protoplasts can be achieved using methods based on calcium phosphate precipitation, polyethylene glycol treatment, electroporation, and combinations of these treatments. See for example (Potrykus et al., Mol. Gen. Genet., 205:193-200 (1986); Lorz et al., Mol. Gen. Genet., 199:178, (1985); Fromm et al., Nature, 319:791,(1986); Uchimiya et al., Mol. Gen. Genet.:204:204, (1986); Callis et al., Genes and Development, 1183,(1987); Marcotte et al., Nature, 335:454, (1988), all of which the entirety is herein incorporated by reference).

[0186] Application of these systems to different plant strains depends upon the ability to regenerate that particular plant strain from protoplasts. Illustrative methods for the regeneration of cereals from protoplasts are described (Fujimura et al., Plant Tissue Culture Letters, 2:74,(1985); Toriyama et al., Theor Appl. Genet. 205:34. (1986); Yamada et al., Plant Cell Rep., 4:85, (1986); Abdullah et al., Biotechnology, 4:1087, (1986), all of which the entirety is herein incorporated by reference).

[0187] To transform plant strains that cannot be successfully regenerated from protoplasts, other ways to introduce DNA into intact cells or tissues can be utilized. For example, regeneration of cereals from immature embryos or explants can be effected as described (Vasil, Biotechnology, 6:397,(1988), the entirety of which is herein incorporated by reference). In addition, “particle gun” or high-velocity microprojectile technology can be utilized (Vasil et al., Bio/Technology 10:667, (1992), the entirety of which is herein incorporated by reference).

[0188] Using the latter technology, DNA is carried through the cell wall and into the cytoplasm on the surface of small metal particles as described (Klein et al., Nature, 328:70, (1987); Klein et al., Proc. Natl. Acad. Sci. (U.S.A.), 85:8502-8505, (1988); McCabe et al., Biotechnology, 6:923, (1988), all of which the entirety is herein incorporated by reference). The metal particles penetrate through several layers of cells and thus allow the transformation of cells within tissue explants.

[0189] Other methods of cell transformation can also be used and include but are not limited to introduction of DNA into plants by direct DNA transfer into pollen (Zhou et al., Methods in Enzymology, 101:433, (1983); Hess et al., Intern Rev. Cytol., 107:367, (1987); Luo et al., Plant Mol. Biol. Reporter, 6:165, (1988), all of which the entirety is herein incorporated by reference), by direct injection of DNA into reproductive organs of a plant (Pena et al., Nature, 325:274, (1987), the entirety of which is herein incorporated by reference), or by direct injection of DNA into the cells of immature embryos followed by the rehydration of dessicated embryos (Neuhaus et al., Theor. Appl. Genet., 75:30, (1987), the entirety of which is herein incorporated by reference).

[0190] The regeneration, development, and cultivation of plants from single plant protoplast transformants or from various transformed explants is well known in the art (Weissbach and Weissbach, In: Methods for Plant Molecular Biology, (Eds.), Academic Press, Inc., San Diego, Calif., (1988), the entirety of which is herein incorporated by reference). This regeneration and growth process typically includes the steps of selection of transformed cells, culturing those individualized cells through the usual stages of embryonic development through the rooted plantlet stage. Transgenic embryos and seeds are similarly regenerated. The resulting transgenic rooted shoots are thereafter planted in an appropriate plant growth medium such as soil.

[0191] The development or regeneration of plants containing the foreign, exogenous gene that encodes a protein of interest is well known in the art. Preferably, the regenerated plants are self-pollinated to provide homozygous transgenic plants, as discussed before. Otherwise, pollen obtained from the regenerated plants is crossed to seed-grown plants of agronomically important lines. Conversely, pollen from plants of these important lines is used to pollinate regenerated plants. A transgenic plant of the present invention containing a desired polypeptide is cultivated using methods well known to one skilled in the art.

[0192] There are a variety of methods for the regeneration of plants from plant tissue. The particular method of regeneration will depend on the starting plant tissue and the particular plant species to be regenerated.

[0193] Methods for transforming dicots, primarily by use of Agrobacterium tumefaciens, and obtaining transgenic plants have been published for cotton (U.S. Pat. No. 5,004,863, U.S. Pat. No. 5,159,135, U.S. Pat. No. 5,518,908, all of which the entirety is herein incorporated by reference); soybean (U.S. Pat. No. 5,569,834, U.S. Pat. No. 5,416,011, McCabe et al., Biotechnology 6:923, (1988), Christou et al., Plant Physiol., 87:671-674 (1988), all of which the entirety is herein incorporated by reference); Brassica (U.S. Pat. No. 5,463,174, the entirety of which is herein incorporated by reference); peanut (Cheng et al., Plant Cell Rep. 15:653-657 (1996), McKently et al., Plant Cell Rep. 14:699-703 (1995), all of which the entirety is herein incorporated by reference); papaya (Yang et al., (1996), the entirety of which is herein incorporated by reference); pea (Grant et al., Plant Cell Rep. 15:254-258, (1995), the entirety of which is herein incorporated by reference).

[0194] Transformation of monocotyledons using electroporation, particle bombardment, and Agrobacterium have also been reported. Transformation and plant regeneration have been achieved in asparagus (Bytebier et al., Proc. Natl. Acad. Sci. (U.S.A.) 84:5345, (1987), the entirety of which is herein incorporated by reference); barley (Wan and Lemaux, Plant Physiol 104:37, (1994), the entirety of which is herein incorporated by reference); maize (Rhodes et al., Science 240:204, (1988), Gordon-Kamm et al., Plant Cell, 2:603, (1990), Fromm et al., Bio/Technology 8:833, (1990), Koziel et al., Bio/Technology 11:194, (1993), Armstrong et al., Crop Science 35:550-557, (1995), all of which the entirety is herein incorporated by reference); oat (Somers et al., Bio/Technology, 10:1589, (1992), the entirety of which is herein incorporated by reference); orchardgrass (Horn et al., Plant Cell Rep. 7:469, (1988), the entirety of which is herein incorporated by reference); rice (Toriyama et al., Theor Appl. Genet. 205:34, (1986); Park et al., Plant Mol. Biol., 32:1135-1148, (1996); Abedinia et al., Aust. J. Plant Physiol. 1.24:133-141, (1997); Zhang and Wu, Theor. Appl. Genet. 76:835, (1988); Zhang et al., Plant Cell Rep. 7:379, (1988); Battraw and Hall, Plant Sci. 86:191-202, (1992); Christou et al., Bio/Technology 9:957, (1991), all of which the entirety is herein incorporated by reference); sugarcane (Bower and Birch, Plant J. 2:409, (1992), the entirety of which is herein incorporated by reference); tall fescue (Wang et al., Bio/Technology 10:691, (1992), the entirety of which is herein incorporated by reference), and wheat (Vasil et al., Bio/Technology 10:667, (1992), the entirety of which is herein incorporated by reference; U.S. Pat. No. 5,631,152, the entirety of which is herein incorporated by reference.

[0195] Assays for gene expression based on the transient expression of cloned nucleic acid constructs have been developed by introducing the nucleic acid molecules into plant cells by polyethylene glycol treatment, electroporation, or particle bombardment (Marcotte, et al., Nature, 335:454-457 (1988), the entirety of which is herein incorporated by reference; Marcotte, et al., Plant Cell, 1:523-532 (1989), the entirety of which is herein incorporated by reference; McCarty, et al., Cell 66:895-905 (1991), the entirety of which is herein incorporated by reference; Hattori, et al., Genes Dev. 6:609-618 (1992), the entirety of which is herein incorporated by reference; Goff, et al., EMBO J. 9:2517-2522 (1990), the entirety of which is herein incorporated by reference). Transient expression systems may be used to functionally dissect gene constructs (See generally, Mailga et al., Methods in Plant Molecular Biology, Cold Spring Harbor Press (1995)).

[0196] Any of the nucleic acid molecules of the present invention may be introduced into a plant cell in a permanent or transient manner in combination with other genetic elements such as vectors, promoters enhancers etc. Further any of the nucleic acid molecules of the present invention may be introduced into a plant cell in a manner that allows for over expression of the protein or fragment thereof encoded by the nucleic acid molecule.

[0197] Nucleic acid molecules of the present invention may be used in cosuppression. Cosuppression is the reduction in expression levels, usually at the level of RNA, of a particular endogenous gene or gene family by the expression of a homologous sense construct that is capable of transcribing mRNA of the same strandedness as the transcript of the endogenous gene (Napoli et al., Plant Cell 2:279-289 (1990), the entirety of which is herein incorporated by reference; van der Krol et al., Plant Cell 2:291-299 (1990), the entirety of which is herein incorporated by reference). Cosuppression may result from stable transformation with a single copy nucleic acid molecule that is homologous to a nucleic acid sequence found with the cell (Prolls and Meyer, Plant J. 2:465-475 (1992), the entirety of which is herein incorporated by reference) or with multiple copies of a nucleic acid molecule that is homologous to a nucleic acid sequence found with the cell (Mittlesten et al., Mol. Gen. Genet. 244: 325-330 (1994), the entirety of which is herein incorporated by reference). Genes, even though different, linked to homologous promoters may result in the cosuppression of the linked genes (Vaucheret, C. R. Acad. Sci. III 316: 1471-1483 (1993), the entirety of which is herein incorporated by reference).

[0198] This technique has, for example been applied to generate white flowers from red petunia and tomatoes that do not ripen on the vine. Up to 50% of petunia transformants that contained a sense copy of the chalcone synthase (CHS) gene produced white flowers or floral sectors; this was as a result of the post-transcriptional loss of mRNA encoding CHS (Flavell, Proc. Natl. Acad. Sci. (U.S.A.) 91:3490-3496 (1994)), the entirety of which is herein incorporated by reference). Cosuppression may require the coordinate transcription of the transgene and the endogenous gene, and can be reset by a developmental control mechanism (Jorgensen, Trends Biotechnol, 8:340344 (1990), the entirety of which is herein incorporated by reference; Meins and Kunz, In: Gene Inactivation and Homologous Recombination in Plants (Paszkowski, J., ed.), pp. 335-348. Kluwer Academic, Netherlands (1994), the entirety of which is herein incorporated by reference).

[0199] It is understood that one or more of the nucleic acids of the present invention, including nucleic acid molecules having a nucleic acid sequence selected from the group consisting of SEQ ID NO: 1 or complement thereof through SEQ ID NO:20082 or complement thereof or fragments thereof, may be introduced into a plant cell and transcribed using an appropriate promoter with such transcription resulting in the co-suppression of an endogenous protein.

[0200] Nucleic acid molecules of the present invention may be used to reduce gene function. Antisense approaches are a way of preventing or reducing gene function by targeting the genetic material (Mol et al., FEBS Lett. 268:427-430 (1990), the entirety of which is herein incorporated by reference). The objective of the antisense approach is to use a sequence complementary to the target gene to block its expression and create a mutant cell line or organism in which the level of a single chosen protein is selectively reduced or abolished. Antisense techniques have several advantages over other ‘reverse genetic’ approaches. The site of inactivation and its developmental effect can be manipulated by the choice of promoter for antisense genes or by the timing of external application or microinjection. Antisense can manipulate its specificity by selecting either unique regions of the target gene or regions where it shares homology to other related genes (Hiatt et al., In Genetic Engineering, Setlow (ed.), Vol. 11, New York: Plenum 49-63 (1989), the entirety of which is herein incorporated by reference).

[0201] The principle of regulation by antisense RNA is that RNA that is complementary to the target mRNA is introduced into cells, resulting in specific RNA:RNA duplexes being formed by base pairing between the antisense substrate and the target mRNA (Green et al., Annu. Rev. Biochem. 55:569-597 (1986), the entirety of which is herein incorporated by reference). Under one embodiment, the process involves the introduction and expression of an antisense gene sequence. Such a sequence is one in which part or all of the normal gene sequences are placed under a promoter in inverted orientation so that the ‘wrong’ or complementary strand is transcribed into a noncoding antisense RNA that hybridizes with the target mRNA and interferes with its expression (Takayama and Inouye, Crit. Rev. Biochem. Mol. Biol. 25: 155-184 (1990), the entirety of which is herein incorporated by reference). An antisense vector is constructed by standard procedures and introduced into cells by transformation, transfection, electroporation, microinjection, or by infection, etc. The type of transformation and choice of vector will determine whether expression is transient or stable. The promoter used for the antisense gene may influence the level, timing, tissue, specificity, or inducibility of the antisense inhibition.

[0202] It is understood that protein synthesis activity in a plant cell may be reduced or depressed by growing a transformed plant cell containing a nucleic acid molecule of the present invention.

[0203] Antibodies have been expressed in plants (Hiatt et al., Nature 342:76-78 (1989), the entirety of which is herein incorporated by reference; Conrad and Fielder, Plant Mol. Biol. 26:1023-1030 (1994), the entirety of which is herein incorporated by reference). Cytoplasmic expression of a scFv (single-chain Fv antibodies) has been reported to delay infection by artichoke mottled crinkle virus. Transgenic plants that express antibodies directed against endogenous proteins may exhibit a physiological effect (Philips et al., EMBO J. 16:4489-4496 (1997), the entirety of which is herein incorporated by reference; Marion-Poll, Trends in Plant Science 2:447-448 (1997), the entirety of which is herein incorporated by reference). For example, expressed anti-abscisic antibodies reportedly result in a general perturbation of seed development (Philips et al., EMBO J. 16:4489-4496 (1997)).

[0204] Nucleic acid molecules of the present invention may be used as antibodies. Antibodies that are catalytic may also be expressed in plants (abzymes). The principle behind abzymes is that since antibodies may be raised against many molecules, this recognition ability can be directed toward generating antibodies that bind transition states to force a chemical reaction forward (Persidas, Nature Biotechnology 15:1313-1315 (1997), the entirety of which is herein incorporated by reference; Baca et al., Ann. Rev. Biophys. Biomol. Struct. 26:461-493 (1997), the entirety of which is herein incorporated by reference). The catalytic abilities of abzymes may be enhanced by site directed mutagenesis. Examples of abzymes are, for example, set forth in U.S. Pat. No. 5,658,753; U.S. Pat. No. 5,632,990; U.S. Pat. No. 5,631,137; U.S. Pat. No. 5,602,015; U.S. Pat. No. 5,559,538; U.S. Pat. No. 5,576,174; U.S. Pat. No. 5,500,358; U.S. Pat. No. 5,318,897; U.S. Pat. No. 5,298,409; U.S. Pat. No. 5,258,289 and U.S. Pat. No. 5,194,585, all of which are herein incorporated in their entirety.

[0205] It is understood that any of the antibodies of the present invention may be expressed in plants and that such expression can result in a physiological effect. It is also understood that any of the expressed antibodies may be catalytic.

[0206] In addition to the above discussed procedures, practitioners are familiar with the standard resource materials which describe specific conditions and procedures for the construction, manipulation and isolation of macromolecules (e.g., DNA molecules, plasmids, etc.), generation of recombinant organisms and the screening and isolating of clones, (see for example, Sambrook et al., Molecular Cloning: A Laboratory Manual, Cold Spring Harbor Press (1989); Mailga et al., Methods in Plant Molecular Biology, Cold Spring Harbor Press (1995), the entirety of which is herein incorporated by reference; Birren et al., Genome Analysis: Analyzing DNA, 1, Cold Spring Harbor, N.Y., the entirety of which is herein incorporated by reference).

[0207] The nucleotide sequence provided in SEQ ID NO:1, through SEQ ID NO:20082 or fragment thereof, or complement thereof, or a nucleotide sequence at least 90% identical, preferably 95%, identical even more preferably 99% or 100% identical to the sequence provided in SEQ ID NO: 1 through SEQ ID NO:20082 or fragment thereof, or complement thereof, can be “provided” in a variety of mediums to facilitate use fragment thereof. Such a medium can also provide a subset thereof in a form that allows a skilled artisan to examine the sequences.

[0208] In one application of this embodiment, a nucleotide sequence of the present invention can be recorded on computer readable media. As used herein, “computer readable media” refers to any medium that can be read and accessed directly by a computer. Such media include, but are not limited to: magnetic storage media, such as floppy discs, hard disc, storage medium, and magnetic tape: optical storage media such as CD-ROM; electrical storage media such as RAM and ROM; and hybrids of these categories such as magnetic/optical storage media. A skilled artisan can readily appreciate how any of the presently known computer readable mediums can be used to create a manufacture comprising computer readable medium having recorded thereon a nucleotide sequence of the present invention.

[0209] As used herein, “recorded” refers to a process for storing information on computer readable medium. A skilled artisan can readily adopt any of the presently known methods for recording information on computer readable medium to generate media comprising the nucleotide sequence information of the present invention. A variety of data storage structures are available to a skilled artisan for creating a computer readable medium having recorded thereon a nucleotide sequence of the present invention. The choice of the data storage structure will generally be based on the means chosen to access the stored information. In addition, a variety of data processor programs and formats can be used to store the nucleotide sequence information of the present invention on computer readable medium. The sequence information can be represented in a word processing text file, formatted in commercially-available software such as WordPerfect and Microsoft Word, or represented in the form of an ASCII file, stored in a database application, such as DB2, Sybase, Oracle, or the like. A skilled artisan can readily adapt any number of data processor structuring formats (e.g., text file or database) in order to obtain computer readable medium having recorded thereon the nucleotide sequence information of the present invention.

[0210] By providing one or more of nucleotide sequences of the present invention, a skilled artisan can routinely access the sequence information for a variety of purposes. Computer software is publicly available which allows a skilled artisan to access sequence information provided in a computer readable medium. The examples which follow demonstrate how software which implements the BLAST (Altschul et al., J. Mol. Biol. 215:403-410 (1990)) and BLAZE (Brutlag et al., Comp. Chem. 17.203-207 (1993), the entirety of which is herein incorporated by reference) search algorithms on a Sybase system can be used to identify open reading frames (ORFs) within the genome that contain homology to ORFs or proteins from other organisms. Such ORFs are protein-encoding fragments within the sequences of the present invention and are useful in producing commercially important proteins such as enzymes used in amino acid biosynthesis, metabolism, transcription, translation, RNA processing, nucleic acid and a protein degradation, protein modification, and DNA replication, restriction, modification, recombination, and repair.

[0211] The present invention further provides systems, particularly computer-based systems, which contain the sequence information described herein. Such systems are designed to identify commercially important fragments of the nucleic acid molecule of the present invention. As used herein, “a computer-based system” refers to the hardware means, software means, and data storage means used to analyze the nucleotide sequence information of the present invention. The minimum hardware means of the computer-based systems of the present invention comprises a central processing unit (CPU), input means, output means, and data storage means. A skilled artisan can readily appreciate that any one of the currently available computer-based system are suitable for use in the present invention.

[0212] As indicated above, the computer-based systems of the present invention comprise a data storage means having stored therein a nucleotide sequence of the present invention and the necessary hardware means and software means for supporting and implementing a search means. As used herein, “data storage means” refers to memory that can store nucleotide sequence information of the present invention, or a memory access means which can access manufactures having recorded thereon the nucleotide sequence information of the present invention. As used herein, “search means” refers to one or more programs which are implemented on the computer-based system to compare a target sequence or target structural motif with the sequence information stored within the data storage means. Search means are used to identify fragments or regions of the sequence of the present invention that match a particular target sequence or target motif. A variety of known algorithms are disclosed publicly and a variety of commercially available software for conducting search means are available and can be used in the computer-based systems of the present invention. Examples of such software include, but are not limited to, MacPattern (EMBL), BLASTIN and BLASTIX (NCBIA). One of the available algorithms or implementing software packages for conducting homology searches can be adapted for use in the present computer-based systems.

[0213] The most preferred sequence length of a target sequence is from about 10 to 100 amino acids or from about 30 to 300 nucleotide residues. However, it is well recognized that during searches for commercially important fragments of the nucleic acid molecules of the present invention, such as sequence fragments involved in gene expression and protein processing, may be of shorter length.

[0214] As used herein, “a target structural motif,” or “target motif,” refers to any rationally selected sequence or combination of sequences in which the sequence(s) are chosen based on a three-dimensional configuration which is formed upon the folding of the target motif. There are a variety of target motifs known in the art. Protein target motifs include, but are not limited to, enzymatic active sites and signal sequences. Nucleic acid target motifs include, but are not limited to, promoter sequences, cis elements, hairpin structures and inducible expression elements (protein binding sequences).

[0215] Thus, the present invention further provides an input means for receiving a target sequence, a data storage means for storing the target sequences of the present invention sequence identified using a search means as described above, and an output means for outputting the identified homologous sequences. A variety of structural formats for the input and output means can be used to input and output information in the computer-based systems of the present invention. A preferred format for an output means ranks fragments of the sequence of the present invention by varying degrees of homology to the target sequence or target motif. Such presentation provides a skilled artisan with a ranking of sequences which contain various amounts of the target sequence or target motif and identifies the degree of homology contained in the identified fragment.

[0216] A variety of comparing means can be used to compare a target sequence or target motif with the data storage means to identify sequence fragments sequence of the present invention. For example, implementing software which implement the BLAST and BLAZE algorithms (Altschul et al., J. Mol. Biol. 215:403-410 (1990)) can be used to identify open frames within the nucleic acid molecules of the present invention. A skilled artisan can readily recognize that any one of the publicly available homology search programs can be used as the search means for the computer-based systems of the present invention.

[0217] Having now generally described the invention, the same will be more readily understood through reference to the following examples which are provided by way of illustration, and are not intended to be limiting of the present invention, unless specified.

### Example 1

[0218] BACs are stable, non-chimeric cloning systems having genomic fragment inserts (100-300 kb) and their DNA can be prepared for most types of experiments including DNA sequencing. BAC vector, pBeloBAC11, is derived from the endogenous E. coli F-factor plasmid, which contains genes for strict copy number control and unidirectional origin of DNA replication. Additionally, pBeloBAC11 has three unique restriction enzyme sites (Hind III, Bam H and Sph I) located within the LacZ gene which can be used as cloning sites for megabase-size plant DNA. Indigo, another BAC vector contains Hind III and Eco RI cloning sites. This vector also contains a random mutation in the LacZ gene that allows for darker blue colonies.

[0219] As an alternative, the P1-derived artificial chromosome (PAC) can be used as a large DNA fragment cloning vector (Ioannou, et al., Nature Genet. 6:84-89 (1994), the entirety of which is herein incorporated by reference; Suzuki, et al., Gene 199:133-137 (1997), the entirety of which is herein incorporated by reference). The PAC vector has most of the features of the BAC system, but also contains some of the elements of the bacteriophage P1 cloning system.

[0220] BAC libraries are generated by ligating size-selected restriction digested DNA with pBeloBAC11 followed by electroporation into E. coli. BAC library construction and characterization is extremely efficient when compared to YAC (yeast artificial chromosome) library construction and analysis, particularly because of the chimerism associated with YACs and difficulties associated with extracting YAC DNA.

[0221] There are two general methods for preparing megabase-size DNA from plants. The protoplast method yields megabase-size DNA of high quality with minimal breakage. The process involves preparing young leaves which are manually feathered with a razor-blade before being incubated for four to five hours with cell-wall-degrading enzymes. The second method developed by Zhange et al., Plant J. 7:175-184 (1995) the entirety of which is herein incorporated by reference is a universal nuclei method that works well for several divergent plant taxa. Fresh or frozen tissue is homogenized with a blender or mortar and pestle. Nuclei are then isolated and embedded. DNA is prepared by the nucleic method often more concentrated and is reported to contain lower amounts of chloroplast DNA than the protoplast method.

[0222] Once protoplasts or nuclei are produced, they are embedded in an agarose matrix as plugs or microbeads. The agarose provides a support matrix to prevent shearing of the DNA while allowing enzymes and buffers to diffuse into the DNA. The DNA is purified and manipulated in the agarose and is stable for more than one year at 4° C.

[0223] Once high molecular weight DNA has been prepared, it is fragmented to the desired size range. In general, DNA fragmentation utilizes two general approaches, 1) physical shearing and 2) partial digestion with a restriction enzyme that cuts relatively frequently within the genome. Since physical shearing is not dependent upon the frequency and distribution of particular restriction enzymes sites, this method should yield the most random distribution of DNA fragments. However, the ends of the sheared DNA fragments must be repaired and cloned directly or restriction enzyme sites added by the addition of synthetic linkers. Because of the subsequent steps required to clone DNA fragmented by shearing, most protocols fragment DNA by partial restriction enzyme digestion. The advantage of partial restriction enzyme digestion is that no further enzymatic modification of the ends of the restriction fragments are necessary. Four common techniques that can be used to achieve reproducible partial digestion of megabase-size DNA are 1) varying the concentration of the restriction enzyme, 2) varying the time of incubation with the restriction enzyme 3) varying the concentration of an enzyme cofactor (e.g., Mg 2⁺) and 4) varying the ratio of endonuclease to methylase.

[0224] There are three cloning sites in pBeloBAC11, but only Hind III and Bam HI produce 5′ overhangs for easy vector dephosphorylation. These two restriction enzymes are primarily used to construct BAC libraries. The optimal partial digestion conditions for megabase-size DNA are determined by wide and narrow window digestions. To optimize the optimum amount of Hind III, 1, 2, 3, 10, and 5-units of enzyme are each added to 50 ml aliquots of microbeads and incubated at 37° C. for 20 minutes

[0225] After partial digestion of megabase-size DNA, the DNA is run on a pulsed-field gel, and DNA in a size range of 100-500 kb is excised from the gel. This DNA is ligated to the BAC vector or subjected to a second size selection on a pulsed field gel under different running conditions. Studies have previously reported that two rounds of size selection can eliminate small DNA fragments co-migrating with the selected range in the first pulse-field fractionation. Such a strategy results in an increase in insert sizes and a more uniform insert size distribution. A practical approach to performing size selections is to first test for the number of clones/microliter of ligation and insert size from the first size selected material. If the numbers are good (500 to 2000 white colony/microliter of ligation) and the size range is also good (50 to 300 kb) then a second size selection is practical. When performing a second size selection one expects a 80 to 95% decrease in the number of recombinant clones per transformation.

[0226] Twenty to two hundred nanograms of the size-selected DNA is ligated to dephosphorylated BAC vector (molar ratio of 10 to 1 in BAC vector excess). Most BAC libraries use a molar ratio of 5 to 15:1 (size selected DNA:BAC vector).

[0227] Transformation is carried out by electroporation and the transformation efficiency for BACs is about 40 to 1,500 transformants from one microliter of ligation product or 20 to 1000 transformants/ng DNA.

[0228] Several tests can be carried out to determine the quality of a BAC library. Three basic tests to evaluate the quality include: the genome coverage of a BAC library-average insert size, average number of clones hybridizing with single copy probes and chloroplast DNA content.

[0229] The determination of the average insert size of the library is assessed in two ways. First, during library construction every ligation is tested to determine the average insert size by assaying 20-50 BAC clones per ligation. DNA is isolated from recombinant clones using a standard mini preparation protocol, digested with Not I to free the insert from the BAC vector and then sized using pulsed field gel electrophoresis (Maule, Molecular Biotechnology 9:107-126 (1998), the entirety of which is herein incorporated by reference).

[0230] To determine the genome coverage of the library, it is screened with single copy RFLP markers distributed randomly across the genome by hybridization. Microtiter plates containing BAC clones are spotted onto Hybond membranes. Bacteria from 48 or 72 plates are spotted twice onto one membrane resulting in 18,000 to 27,648 unique clones on each membrane in either a 4×4 or 5×5 orientation. Since each clone is present twice, false positives are easily eliminated and true positives are easily recognized and identified.

[0231] Finally, the chloroplast DNA content in the BAC library is estimated by hybridizing three chloroplast genes spaced evenly across the chloroplast genome to the library on high density hybridization filters.

[0232] There are strategies for isolating rare sequences within the genome. For example, higher plant genomes can range in size from 100 Mb/1C (Arabidopsis) to 15,966 Mb/C (Triticum aestivum), (Arumuganathan and Earle, Plant Mol Bio Rep. 9:208-219 (1991), the entirety of which is herein incorporated by reference). The number of clones required to achieve a given probability that any DNA sequence will be represented in a genomic library is N=(ln(1−P))/(ln(1−L/G)) where N is the number of clones required, P is the probability desired to get the target sequence, L is the length of the average clone insert in base pairs and G is the haploid genome length in base pairs (Clarke et al., Cell 9:91-100 (1976) the entirety of which is herein incorporated by reference).

[0233] The soybean BAC library of the present invention is constructed in the pBeloBAC11 or similar vector. Inserts are generated by partial Eco RI or other enzymatic digestion of DNA from the cultivar A3244. The library provides approximately twenty fold coverage of the soybean genome.

### Example 2

[0234] Nucleic acid sequences are identified using a cascade of BLASTX, followed by BLASTN if no BLASTX hit is found. Default BLAST parameters are used. BLASTX compares the six-frame conceptual translation products of a nucleotide query sequence (both strands) against a protein sequence database. BLASTN compares a nucleotide query sequence against a nucleotide sequence database. Matches found with BLAST P-values equal or less than 1E-8 (probability) are classified as hits.

### Example 3

[0235] Two basic methods can be used for DNA sequencing, the chain termination method of Sanger et al., Proc. Natl. Acad. Sci. (U.S.A.) 74:5463-5467 (1977), the entirety of which is herein incorporated by reference and the chemical degradation method of Maxam and Gilbert, Proc. Natl. Acad. Sci. (U.S.A.) 74:560-564 (1977), the entirety of which is herein incorporated by reference. Automation and advances in technology such as the replacement of radioisotopes with fluorescence-based sequencing have reduced the effort required to sequence DNA (Craxton, Methods, 2:20-26 (1991), the entirety of which is herein incorporated by reference; Ju et al., Proc. Natl. Acad. Sci. (U.S.A.) 92:4347-4351 (1995), the entirety of which is herein incorporated by reference; Tabor and Richardson, Proc. Natl. Acad. Sci. (U.S.A.) 92:6339-6343 (1995), the entirety of which is herein incorporated by reference). Automated sequencers are available from, for example, Pharmacia Biotech, Inc., Piscataway, N.J. (Pharmacia ALF), LI-COR, Inc., Lincoln, Nebr. (LI-COR 4,000) and Millipore, Bedford, Mass. (Millipore BaseStation).

[0236] In addition, advances in capillary gel electrophoresis have also reduced the effort required to sequence DNA and such advances provide a rapid high resolution approach for sequencing DNA samples (Swerdlow and Gesteland, Nucleic Acids Res. 18:1415-1419 (1990); Smith, Nature 349:812-813 (1991); Luckey et al., Methods Enzymol. 218:154-172 (1993); Lu et al., J. Chromatog. A. 680:497-501 (1994); Carson et al., Anal. Chem. 65:3219-3226 (1993); Huang et al., Anal. Chem. 64:2149-2154 (1992); Kheterpal et al., Electrophoresis 17:1852-1859 (1996); Quesada and Zhang, Electrophoresis 17:1841-1851 (1996); Baba, Yakugaku Zasshi 117:265-281 (1997), all of which are herein incorporated by reference in their entirety).

[0237] A number of sequencing techniques are known in the art, including fluorescence-based sequencing methodologies. These methods have the detection, automation and instrumentation capability necessary for the analysis of large volumes of sequence data. Currently, the 377 DNA Sequencer (Perkin-Elmer Corp., Applied Biosystems Div., Foster City, Calif.) allows the most rapid electrophoresis and data collection. With these types of automated systems, fluorescent dye-labeled sequence reaction products are detected and data entered directly into the computer, producing a chromatogram that is subsequently viewed, stored, and analyzed using the corresponding software programs. These methods are known to those of skill in the art and have been described and reviewed (Birren et al., Genome Analysis: Analyzing DNA, 1, Cold Spring Harbor, N.Y., the entirety of which is herein incorporated by reference).

### Example 4

[0238] To identify sequences containing microsatellites or simple sequence repeats (SSR), a SSR repeat pattern library is generated by using a Perl program, SSR_generator.pl, developed at Monsanto. The library contains repeat patterns of di-, tri-, tetra-, penta- and hexa-nucleotide repeats, a total of 5421 patterns. The length of di-, tri-, tetra-, penta- and hexa- nucleotide repeat units were 18, 12, 9, 5 and 4, respectively. These repeat patterns are used to search against the BAC-end sequence databases by the BLASTN program. If the search is performed on both strands, complementary and replicated patterns of an SSR library are removed from the library to avoid redundancy of SSRs. For di-nucleotide repeats, there are four unique patterns, i.e. (CA)n, (CT)n, (CG)n and (AT)n. Product scores are used as a criteria to extract potential SSRs from BAC-ends. If a product score is equal or greater than 90, the sequences are further examined.

[0239] The SSR-containing sequences identified from BAC ends are searched against each other as well as the existing SSR collections by using BLASTN, and clustering of the sequences is performed by using CLUSTER2, a tool developed at Monsanto. The minimal match-length is set to 100 base pairs. Any redundant sequences are removed and the unique ones are then passed through a visible inspection to further remove those with not enough flanking sequences for primer design and those with substantial ambiguous nucleotides.

[0240] Primers are designed from good quality unique sequences. A public available primer design software program, PRIMER 3, (Cambridge, Mass.) is used. PRIMER 3 can be accessed though the internet at (http://www.gnome.wi.mit.edu/cgi-bin/primer/primer3.cgi). Default parameters are used except those for product size and primer size are changed. Product Size is Min: 80, Opt: 100, Max: 120, while Primer Size is Min: 18, Opt: 22 and Max: 27. Oligos are synthesized by Genosis Biotechnologies, Inc (Houston, Tex.).

[0241] The above protocols are used to develop primers from Sequence id GM_M02_A2_B07_MR_MR containing the following nucleotide composition: AGGCGTTTTNCCTTGATACCTTCGNAGGTCCANCCTTTTNCTTGCTGTATCGACTCAT TAACACCAAGCTCGGTGAGCACTCTGAAGATTATGACAACTTTCGNTGATCTTTTTG TCATCGATATTNTAGNAGAGACCAATCTTTCTTCTTCAAATGTCGCTCATGATATTTA TTGTAATTATCTTCAATGTATGTCCAAAAAGTTAACCTTTTTTGGACCCCCACAATAG AAATCTTTGAAATATATTTAGCCATGTGTTGGCAAGCCATTCATATTTCTTTGCGGAGAA ACATGATCTATTGTGTCTTTCGGATGCTTCTTCTATGTCTTCTTCTTCTTCTTCTTCTTC TTCTTCTTCTTCATTGACCACAATATTATCCAACTCAACTTAGGTGCAAAATGGTGGA ATTTGAGACTTTGACGCANAGTCAGATGGTGCGTCATGCTCTTTCATTACATTGGAC ATCATNTACTACCCTTTGAAGACCCTCGATCCATGGAAGGGTTAATTGGTG

[0242] This sequence contains CTT dinucleotide repeats with a repeat unit of 11. Using the Primer 3 program, two primers are selected: SER157F GTGTCTTTCGGATGCTTCTTCT and SER157R CACCATTTTGCACCTAAGTTGA. When these two primers are used to amplify genomic DNAs from eight different varieties, Minsoy, Noir, PIC, HS-1, A3244, H6686, A0868 and H5088, three alleles are detected. Sizes of these alleles ranged from 80 to 110 bp The size variation in the PCR products result from repeat numbers in different varieties.

PCR Reaction Conditions

[0243] Genomic DNA is isolated from young leaves of Glycine max or Glycine soja plants. Two leaf discs are collected (approximately 40 mg) from a healthy leaf and stored on wet ice or at 4° C. Tissue samples are then freeze-dried and stored at −20° C. or −80° C. The frozen samples are kept as dry as possible and sealed from contact with the atmosphere. The freeze-dried samples from −20° C. or −80° C., are allowed to warm up to room temperature prior to unsealing or opening. One leaflet (or 2 leaf discs) is inserted into an 1.5 ml Eppendorf tube, placed on dry ice, and crushed with a wooden dowel. Approximately 200 μl of microprep buffer (25 ml extraction buffer (350 mM sorbitol, 100 mM Tris-base, 5 mM EDTA-Na₂), 25 ml nuclei lysis buffer (1M Tris/HCl, 0.5 M EDTA, 5 M NaCl, 2% CTAB), 10 ml 5% sarkosyl, 0.1 g Na bisulfite) is added to each sample. The sample is then homogenized. An additional 550 μl of microprep buffer is added, vortexed for about 30-60 seconds, and incubated at 65° C. for about 60 minutes. About 700 μl chloroform/isoamyl (24:1) is added, mixed well for about 10-30 seconds. Centrifugation of the tubes is performed at approximately 10,000 rpm for 5 minutes in a microcentrifuge. The aqueous phase is transferred into a new tube and RNA is removed from the extract by the addition of 30 μl of RNase (10 mg/ml) to the aqueous phase and incubated for 1 hour at room temperature. Approximately 500%1 ice-cold isopropanol is added to the aqueous extract, and the tubes inverted until the DNA precipitated. The precipitated solution is kept at 4° C. for about 1 hour or overnight. Centrifugation of the tubes is performed at approximately 10,000 rpm for 5 minutes in a microcentrifuge. The supernatant is discarded and the pellet washed 1-3 times with 200 μl 70% ethanol. The ethanol is removed using a micropipette and pellet dried at 37° C. for 10 minutes. The DNA is dissolved in 50 μl TE (10 mM Tris-HCl pH8.0, 0.1 mM EDTA), then kept overnight at 4° C. Centrifugation of the tubes is performed at approximately 10,000 rpm for 5 minutes and then the supernatant is transferred into new tubes. Using this method, approximately 2 μg of DNA per mg of fresh leaf tissue is extracted.

[0244] DNA concentration is measured by a Spectrometry (Molecular Devices, Sunnyvale, Calif.) and adjusted to proper concentration for use as template. The total volume for PCR reaction is 20 ul. The reaction mixture contains: Template DNA at a concentration of 15 ng, 0.15 uM of primer, 0.03 unit of Taq DNA polymerase (Perkin Elmer), 50 uM of dNTP, the Reaction buffer contains, 10 mM Tris.HCl pH8.5, 1.5 mM MgCl2, 50 mM KCl and water is added to a total volume of 20 ul.

[0245] The PCR is performed on a Perkin Elmer DNA Thermal Cycler 9700 using the following cycle profile: hold at 94° C. for 3 min, 32 cycles of 94° C. for 25 second, 47° C. for 25 second and 72° C. for 25 second, and 72° C. for 3 min of final extension.

[0246] An acrylamide gel is prepared using 56.5 ml water, 3.5 ml 10× TAE buffer, 10.5 ml 40 acrylamide stock solution, 50 μl TEMED, 0.06 g ammonium persulfate. To each PCR, sample 20 μl of formamide loading dye is added to each sample and the samples are denatured at 90° C. for 3 minutes with a 4° C. hold in a thermocycler. 1.5 μl of each sample is loaded onto the gel. Gels are run at constant wattage to give a constant heat development during electrophoresis at 40 to 50 Volt/cm of the gel length. Gels should be run at approximately 50° C. during electrophoresis. Electrophoresis is stopped when the Bromophenol blue dye is at the bottom of the gel. After electrophoresis, the gel is stained in 1×SYBR solution for 15 to 20 minutes with vigorous shaking. A Gel image is recorded using an Alpha-InnoTech imager.

### Example 5

[0247] In order to create a file containing complex repeats, the GCG (Madison, Wis.) REPEAT program is used to determine initial internal repeats. Stringency is defined as 19 matched bases out of every contiguous 20 bases in the repeated diagonals part of the REPEAT program algorithm. After the REPEAT program is run on the STCs, a REPEAT output filed is processed with the UNIX utilities grep, sort, uniq and sed to produce a GCG pattern file. The GCG pattern file is broken into size groups: <20, 20-39, 40-59, 60-79, 80-89, 100-119, 120-139, 140-159, 160-179, 180-199, 200-219, and >220. Each pattern group is compared against the entire STC library using the GCG FINDPATTERNS program. Sequences of size 1-19 are allowed no mismatches. The 20-39 group are allowed one mismatch. A pattern of size n is allowed floor (n/20) mismatches. Patterns that occurred in at least 100 STCs are selected in this step. The results of the FINDPATTERNS program is post-processed with the UNIX utilities grep, sort and uniq and with the GCG REFORMAT program to produce GCG sequence files. Each sequence file is derived from a selected pattern and placed in a subdirectory that corresponds to its size group. GELSTART, GELENTER, GELMERGE and GELASSEMBLE are used to coalesce similar sequences of each size group. Patterns are 90% similar before they are aligned and the patterns overlap by at least two thirds of the modal length in their length group. The GELSTART program creates a subdirectory which contains the individual and the coalesced consensus sequences. The consensus sequences are placed into a single directory and a FASTA style sequence library is constructed from it. The REPEAT-MASKER program is used to mask the original STCs. The unmasked sequences that remain afterward are concatenated into 100 KB pseudo-sequences. The pseudo-sequences are fed back into this algorithm and the new repeat patterns that result are added to the repeat library. The algorithm is iterated 3 times.

[0248] The repeat library is compared to the STCs using NCBI BLASTN version 2.0. HSPs are reported if they satisfied the criteria of:

[0249] “observed fractional match”>=“allowed fractional match”

[0250] where “observed fractional match” is defined as:

[0251] “fraction of HSP similarity”×“fraction of query sequence in HSP”

[0252] and “allowed fractional match” is defined as:

[0253] (“repeat length”−“floor (repeat length/20)”)/“repeat length”

LENGTHY TABLE REFERENCED HERE
US20090191541A1-20090730-T00001
Please refer to the end of the specification for access instructions.

Table Heading
Seq no.

[0254] Provides the SEQ ID NO. for the listed sequences.

Clone ID

[0255] The clone ID number refers to the particular clone in the PhytoSeq database.

NCBI gi

[0256] Each sequence in the GenBank public database is arbitrarily assigned a unique NCBI gi (National Center for Biotechnology Information GenBank Identifier) number. In this table, the NCBI gi number which is associated (in the same row) with a given clone refers to the particular GenBank sequence which is used in the sequence comparison.

Method

[0257] The entry in the “Method” column of the table refers to the type of BLAST search that is used for the sequence comparison.

Score

[0258] Each entry in the “Score” column of the table refers to the BLAST score that is generated by sequence comparison of the designated clone with the designated GenBank sequence using the designated BLAST method.

P-Value

[0259] The entries in the P-Value column refer to the probability that such matches occur by chance.

% Ident

[0260] The entries in the “% Ident” column of the table refer to the percentage of identically matched nucleotides (or residues) that exist along the length of that portion of the sequences which is aligned by the BLAST comparison to generate the statistical scores presented.

### DESCRIPTION

[0261] A description of the database entry referenced in the “NCBI gi” column. Sequences were analyzed by BLASTX against the non-redundant protein database maintained by NCBI, and a description of the top hit is provided.

LENGTHY TABLE
The patent application contains a lengthy table section. A copy of the table is available in electronic form from the USPTO web site (http://seqdata.uspto.gov/?pageRequest=docDetail&DocID=US20090191541A1). An electronic copy of the table will also be available from the USPTO upon request and payment of the fee set forth in 37 CFR 1.19(b)(3).

We claim:

1. A substantially purified nucleic acid molecule, said nucleic acid molecule capable of specifically hybridizing to a second nucleic acid molecule having a nucleic acid sequence selected from the group consisting of SEQ ID NO: 1 through SEQ ID NO: 20082 or complements thereof.

2. The substantially purified nucleic acid molecule according to claim 1, wherein said nucleic acid molecule comprises a region having a single nucleotide polymorphism.

3. A transformed cell having a nucleic acid molecule which comprises:
(A) an exogenous promoter region which functions in said cell to cause the production of a mRNA molecule; which is linked to
(B) a structural nucleic acid molecule, wherein said structural nucleic acid molecule encodes a protein or fragment thereof selected from the group consisting of a Glycine max protein or fragment thereof in Table 1; which is linked to
(C) a 3′ non-translated sequence that functions in said cell to cause termination of transcription and addition of polyadenylated ribonucleotides to a 3′ end of said mRNA molecule.

4. The transformed plant according to claim 3, wherein said structural nucleic acid molecule is in the antisense orientation.

5. The transformed plant according to claim 3, wherein said plant is a dicot.

6. The transformed plant according to claim 3, wherein said plant is a monocot.

7. A transformed plant having a nucleic acid molecule which comprises:
(A) an exogenous promoter region which functions in a plant cell to cause the production of a mRNA molecule wherein said promoter nucleic acid molecule is selected from the group consisting of SEQ ID NO: 1 through SEQ ID NO:20082 or complements thereof or fragment of either; which is linked to
(B) a structural nucleic acid molecule encoding a protein or peptide; which is linked to
(C) a 3′ non-translated sequence that functions in a plant cell to cause termination of transcription and addition of polyadenylated ribonucleotides to a 3′ end of said mRNA molecule.

8. The transformed plant according to claim 7, wherein said structural nucleic acid molecule is in the antisense orientation.

9. The transformed plant according to claim 7, wherein said plant is a dicot.

10. The transformed plant according to claim 7, wherein said plant is a monocot.

11. A method for determining a genomic polymorphism in a plant that is predictive of a trait comprising the steps:
(A) incubating a marker nucleic acid molecule, under conditions permitting nucleic acid hybridization, and a complementary nucleic acid molecule obtained from said plant, said marker nucleic acid molecule having a nucleic acid sequence selected from the group consisting of SEQ ID NO: 1 through SEQ ID NO: 20082 or complements thereof;
(B) permitting hybridization between said marker nucleic acid molecule and said complementary nucleic acid molecule obtained from said plant; and
(C) detecting the presence of said polymorphism.

The application's sequence listing, which the Patent Office published only in electronic form, follows.

SEQUENCE LISTING (20082 sequences)

SEQ ID NO: 1 - DNA, 394 bp, Glycine max
  unsure at all n locations
agctttccctctttgaacaaatacccctcagccaaatagaatccatcttgggcctttttcccacaactctcataaatgggagagaaatgttcatctaaagcatacaagtccctaatattatcaaatcctaaaatttgagctcctagggagcaaaacaatgtgtgtctcctagagagggcatcagctaccacatttgtttttccctttttgtatttgataacatatggaaattgctctaggtactctacccattttgcatgcctcttggttaacttgctttgccctctaatgtacttaagtgattgatgatcactatgaatgacaaattccttggaaacaaggtgtcgcaacctacccttcngcgggagggcgacgcgtgactcgcgggatgcgt

SEQ ID NO: 2 - DNA, 462 bp, Glycine max
tgaaggcaaactggacgttggtcaacttggtaacccagctggccttgaatcagaaatctgtacctgtcgcaagggtttgtggtttgtgctcctctgctgaccaccatacagacctttgcccttccatgcagcaacctggagcaattgagcagcctgaagcttatgctgcaaatatttacaatagacctcctcaacctcagcagcaaaatcaaccacagtagagcaattatgacctttccagcaacagatacaaccctggatggaggaatcaccctaacctcagatggtccagccctcagcaacaacaacagcagcctgctccttccttccaaaatgctgctggcccaagcagaccatacattcctccaccaatccaacaacagcaacaaccccagaaacagccaacagctgaggcccctccacaaccttccctcgaagaacttgtgaggcaaatgactatgc

SEQ ID NO: 3 - DNA, 284 bp, Glycine max
agctttccaagatattaagttcttcctcagaactgtcgtaagcgaagatgccaatgtgctattaacaactttcgtttgcccatctgcttgtgggagacatgtggctgaaaataacaatttagtgcccaacttgacccacacaggactacgcaaatggcttatgaacttacagtccttatcactaacaatgctgcttggtaaaccatggatgctcacaatctccttgaggaacaaattagccacatgggaagcatcatctacttctttacatggaataaaatgag

SEQ ID NO: 4 - DNA, 395 bp, Glycine max
ttggatgcctataagattattaaggctgaagtcgagaaactatgtggatagcaaattaagatcgtgagatctgattgaggtggagagtactatggtagatacacggagaatggacaagcacctagtctgtttgcgaagtttgttcaggaacatgggattattgcccagtacactatgcttggttctccggatcagaatgatgtggcagaaagaagaaaccgaactttaatggacatgataaaaagtatgagaagtaataaaaaacttcctcaattcttgtggattgaagcattaaagacggttgtatatatattaaaccgggttccaaccaaggctgtcttaaagacacctttctagttattcaaaggttggaaaccgagtttgcgacatatatg

SEQ ID NO: 5 - DNA, 423 bp, Glycine max
  unsure at all n locations
tcatgtttaatcatacattcaatcttattatagcaganaactcaaataaaaattctattaaaaggtagcactcgtggcatgagtccttataaatatctactacaaaagttttaaatactctgtccatgaggaaagcagtccagtatcttccaatactctatccattgatccatatttgaccttttcccataccctccatatccaatgccaatggttcatctccttcgggagcatcaaaataagtctgcgcagtttacggattgacttcatcagttntcaacctagtggtatttttttcagtctaagttaggacattactatgcaagatgaccttgtgccatgtcaatggttgagttctttgaacaactattgctgactgcaccacgcaacactatagatatcatttggagaggcaacattcat

SEQ ID NO: 6 - DNA, 464 bp, Glycine max
  unsure at all n locations
tagactaagttcagcctaccatcctcagactgatggccaaactgaacggaccatttagtcattggaggaccttttgaaggcgtgtgtcttagagcaaaaaggaagttgggagagttttcttccattaatagagttcacttataacaacaattttcactctacgattcatatggctccttatgaagctttgtatggtagaaggtgtaggacacccctatgttggttaaagcccggagaaggccttaccttaggaccggaagtggtacaacaaaccaccgagaaagtcaagttaatccaggaaaggatgaggactgctcagagtangcaaaaaagttatcatgataagaggaggaaagatctgaaatttgaggttggtgatcatgtattcttgagaatcactccgtggactggggttggtcgagcattgaaatcccgaaagctcacacctcactttatcgatcctt

SEQ ID NO: 7 - DNA, 460 bp, Glycine max
  unsure at all n locations
ntntattgattnnttttatgtcttgaccaagaattagagactaattctttgaaatattgagatttatttaaaagataatatctcccaaaaaaatgttattatattcaaactgattaatatgaacatgaaaaataaacaaaacgccttataaaatttagatttaggaaattatttttaattactttaggaaatgttattgatgtcacattcaaaaagtatgtgaaaggatgagtgataaatcataaaatttggctgctataagttatatcgataagattaaatttaatttttaactcaagaattaaggaaagctttcataaaaagagaaaaatcaaattttcatttgacatgataatggttagagcctaaaaataaaatataaattaaaaatatacatatcaaaatacatctaaattaattaaataaaaagtactaaattcattggaaactagaaaatgga

SEQ ID NO: 8 - DNA, 450 bp, Glycine max
tggatttccttttagtagggaatctatccttcctaagatagagccaaacctagtcaccctcattaagaactagctcttttcttcctctattgcctttagttgaatacacctttgtttgattctctatttggttcttaaccctctcatgcatcttctttacaaattctgacctagattccccttctttatgtataaaagaagtgtccagtgggaggggaatgaggtctaacggtgttaggggattgaacccatagacaacctcaaaaggggactgcttggtggttctatgaacccccctgttgtaggcaaattctacatgaggaagatactcatcccaagacttatggttgcctttcagaagagcccttaagagggtggataaagacctattcactacctctgtttgcccatcagtttgtggatgacatgtggtagagaacagaagtttag

SEQ ID NO: 9 - DNA, 442 bp, Glycine max
  unsure at all n locations
taccatcctcagactgagggccgagatgacatgaccatttagccactgcacgacctttagaacgcgcgtgtcttatagcctataggaggctgagagaggattcttccattaatagagttgacttataacaacaattctcactctacgattcatatggctccttatgaagctttgtatggtagaaggtgtaggacacccctatgttggataaagcccggagaaggccttaccttacgaccggaagtggtacaacaaaccaccgagaaagtcaagttaatccaggacaggatgatgactgctcatagtaggcaaaaaagttatcatgataagaggaggaaagatctgaaatttgagggtggtgatcatgtattcttgagaatcactccgtggactggggttggtcgagcatngaaatcccgaaagctacaccttactttatcga

SEQ ID NO: 10 - DNA, 247 bp, Glycine max
  unsure at all n locations
agctttgtgaatctcctgatctagcgccacccgatgatactcaaccattcgaagntgaatgtgatgctagtggaattggcattggagctgtcttgatacacaacataatgcctatagcttatttctcggagaaagtgggaagagccttgctgaattattgcacctatgacatagagatctatgccattgcgagagctcttgatcattggaatcattattttgcggctaatcactttatattggattc

SEQ ID NO: 11 - DNA, 418 bp, Glycine max
  unsure at all n locations
agcttatactcaataagaggatcccgctgcgcatatccccgtaaccccacggcttgctgaacaaattttagtgcctgcagatgttctttccacaggcgatcgatattgcttaagattaggaaccgctctgcttctttcatcaagcctgctgcttgttgctccacaatatcctatggggcagcattggttgtaataaaaaggtaaatttaaaaagaaataaatggtaaagaaaattatgtgaaaagacaaggccactgaaccaattcaagacgactcaatttttagacatgacacatgatggtaaaagtccaaccttatatagcacaaagttattacaagttgcactgaggtttgataaatccctctccccctttcccganaatgtataatcaattacttgatttaaatcacttatctc

SEQ ID NO: 12 - DNA, 461 bp, Glycine max
  unsure at all n locations
tgataaagagattntgatagaagactntgaggccaaactattccaatataaaatgagattcttttaacaatttaactaagtccttatttgtgattttcttgatcttatttgttgacttggaacaatgtgtgctttcatcaagtaaattcttttggcatcatcaaaacctgcacgattcacatttatgtcactcaacctctaggttttgagatcaaaaggaaggaattaatggtgtacaagttgaataaggccttgtatggtcttaaacaagcacctagagcctggaatagaaggattgactcatttttcatttagaatgaattcaccaagtacacaatggaatatgatgtatatgtgaaaaggaaaactaagggaatacttttgatttgcctatatgctgatgatttgcttgtgactggcagcaatagtgaagaaatagagaaattcaaagttgagatgat

SEQ ID NO: 13 - DNA, 451 bp, Glycine max
  unsure at all n locations
tgtaatcgattacacacatactgtaatcgattaccataggagttnttcagaanacattctcaatagtcacatctttttgtgtggttcttgaatggctatcataggcctatatatatgtgacttgagacacgaatttgaaaagagtttttcagaacaaaaaggtctgatcctcttataaagcaaaatcgcgttatcctcttacaaattccttggccaaattacttgtgattcaataaggaattatttgagtgctcaaattgttcaatctatctctttcaagagagattacttcttttcttcttctttattctgaagagggattaagagaccgagggtctcttgttgtgaaagaattctaaacacaaaggaagggtagtccttgtgtgtttagaactcgtacaagaaatttacaagatagtggaactctcaagcgggttgcttggggactgga

SEQ ID NO: 14 - DNA, 407 bp, Glycine max
  unsure at all n locations
agcttctatcagtgcaacaaagaccttagtttgttgatatggcaaatttcaaggctgtaggagtaattttgaaggaatgaattggcactagaagaagaaattctttaaggatgctaatcattatgtgcgggataatcctcacttgctcaagattagagcaaataaattgatataagatgtgtcattttggagcattctttggcattatcacaattcaccttatggnggccattttaatggagaaagaagtgctgccaaggttctccaagcangaattttgtggcccatgctatataaagatgcacatttgtatgtgacacaatatgacaaatgccacagaaaatgaggaatttcaagaacgaatgagatggccttgaacaacattcttgaagntgaagttttgactg

SEQ ID NO: 15 - DNA, 432 bp, Glycine max
  unsure at all n locations
tgtaatcgattgcacacatactgtaatcgattaccagaggagttnttcagaaaatattctcaacagtcacatctttttgtgtggttcttgaatggctatcataggcctatatatatgtgacttgagacatgaatttgataagagtttttcagaacaaaaaggtcttatcctcttataaagcaaaatcgttttatcctcttacaaattccttggccaaattacttgtgattcaataaggaattatttgagtgctcaaattgttcaatctatctctttcaagagagatttcttcttttcttcttcttcattctaaaaagggattaagagaccgagggtctcttgttgtgaaagaattctaaacacacaggaagggttgtccttgtgtgtttagaacttgtaaaaggaatttacaagatagtggaactctcaagc

SEQ ID NO: 16 - DNA, 432 bp, Glycine max
  unsure at all n locations
tatcaaccaaatacccacgttntcaaactcaaagtatattacaattacaaaacataaataagaaagatcttcacatctataaaaagacttaatgaacattaacagaaataaaacctaccagaacctgtaagtgaaagaaaatatacagacccatgtaaactatagaacatagatctaaccttttaagtggaaaataacataaacgtagaagtatgcaaatgaagatttaccaaatgaattcagtaatagcaactttacctgaaagtgtaaactgttaatgcagcacccaatccgccaaaacaatgggaccatgatcctctggaactctaccatgttaataacttccaaaatttcttccagttcacccagaaacatcacctctttctgactatttgttgctggccaatatttcaacaagccgcttatcacaat

SEQ ID NO: 17 - DNA, 349 bp, Glycine max
agcttctataaaggttcttatggactgcttgtctcatcattccagtaataccttcacccacaatattgaaaagcaagggagctaggggatccccttgcctcaaacccctagaaggattaaactccttagaagggctaccatttatcaaaattgatatcgatgctgagtggaggcaagctgatatccaagatctccattttggacaaaaacccattctgcacagcatgtaatccagaaaagaccaagaaactgaatcgtaggccttttcaaagtccaccttaagaatcatcacaggtttcttatttctccttgcttcctcaaccacttcattaaggatcagaataccatg

SEQ ID NO: 18 - DNA, 451 bp, Glycine max
  unsure at all n locations
tntaaggccctcaaatgactggatggcaacaccccacttaaatgattatgaaagagggataaatatgtgagattcttggacaaattaaaagaaggaagtggacctgtaaagttattggaagacaagtctagataaacaagttggctgagttctgagaatgaactaggaagtgttccattaaattggcagtaagctagatcaattgtagataactgcttcatattggaaattgcacctggaagctttcctgagaaatttgtatagctaagattcatgtgatgaagagaaccatgttgtgggaagtttggcaaagaacccccaagatcttggttgtctgagatgtcaaggaccttcaacgttgatatttggaatatatcttttggaaaagaaccattcaagccacaacttcttaactctagtgtgactaaattggagaaattacaaaggattc

SEQ ID NO: 19 - DNA, 406 bp, Glycine max
  unsure at all n locations
agcttgtcaaggccctaagcatggacaagtgttgttcagtgttgagagtggtagccttgacaagtgttgtccgggttgcttctgtcaagttgtctggggtggacaccctttttgatgcaagaggctccaagaggattgggctagagctgctgaagaaggtcctaaggttctcatgaactttaggatagatttttgagcccatgggccaaggttgggtccaattatctttgtacgtattagattacgatgtcactatatttggttcttgtaattagggctccataatgtaggtagggtaccctagaaatataggatttttcagcccttgtattttagggcacctagactagttnttgtattaagggtagttttgtaatttcacatgcactaagtgaatatttaatgt

SEQ ID NO: 20 - DNA, 460 bp, Glycine max
  unsure at all n locations
tgataaagaaattntgatagaagactttgaggccaaactattccaataaaaaatgagattcttttaacaatttaactaagtccttatttgtgattttcttgatcttatttgttgacttggaacaatgtgtgctttcatcaagtaaattcttttggcatcatcaaaacctgcacgattcacatttatgtcactcaacctctaggttttgagatcaaaaggaaggaattaatggtgtacaagttgaataaggccttgtatggtcttaaacaagcacctagagcctggaatagaaggattgactcatttttcatttagaatgaattcaccaagtacacaatggaatatgatgtatatgtgaaaaggaaaactaagggaatacttttgatttgcctatatgctgatgatttgcttgtgactggcagcaatagtgaagaaatagagaaattcaaagttgagatga

SEQ ID NO: 21 - DNA, 407 bp, Glycine max
  unsure at all n locations
atgatataagactttgaggccaaactatatccaatatcanaatgaggaatcttttaacaatttaactaagtccttatttgtgattttcttgatcttatttggtgacttggaacaatgtgtgctttcatcacgtaaattcttttggcctcatcagaacctgcacgattcacatttatgtcactcctcctctaggttgtgagatcacaaggagggatttaaaggcgtacacgtcgaataaagccttgtatggtcttagaccagcacctacagcctggaatataaggattgactcagtttacattgacaatgacttcaccaactacacagtggaatatgatgtgtatgagaaaaggataactacgggaatacttttgatctgcctatatgcttatgatttgcttgtgact

SEQ ID NO: 22 - DNA, 427 bp, Glycine max
  unsure at all n locations
tctctgcctcggntgaaacattggcggtgacatgtgacctcatgtggccacccaaggatcttccacaagggaagctcttgctgcagaacttgcacatgtgtttcacttcttgatcttcttccattggattgatttttcaagatcacacacacgcacggatcagcaaagaaagcaaaattaaccacactttcttgatcaccaccaacacaagagaaatcgatcacaagggaaaaacagcaacaccccagatcagcatcacatcttgaaagtggttggagagaagaataataccgagaagaagaagaagagaaaccccatgtctgaaaattgcaaggtggtgagtgcaagatctaacgcagaaaacaagaggaaaagaaaagggacaagagaacgtgtagtagtagcacaaactattatatatactata

SEQ ID NO: 23 - DNA, 427 bp, Glycine max
taaacattcaatttcgagcgtctccatatattacgcgactcaatcagacatctgagtaaaaagttattgtcgtttgaattggctcagaggttcaacattcaattttgagcatctcgatatattacgggactcaatcagacatccgagtaaaaagttattgtcgtttgaaatggctcagagcttcaacattcaatttcgagcgtctcgatatattacgggactcaatcagacatccgagtaaaaagatattgtcgtttgaattggctcagaggttcaacatataatttggagcgtctcgatatattatgggactaaatcagacatccgagtaaaaagttattgtcgtgtgaattggctcataggttgaacattcaatttcgagcgtctcgatatattatgggactcaatcagacatccgagtaaaaag

SEQ ID NO: 24 - DNA, 397 bp, Glycine max
  unsure at all n locations
agctttaagccaattcatacgacaataactttntactcggatgtctgattgagtcccgtaatataacgaaacgctcgaaattgaatgttgaagctctaaccctattcaaacaacaataacgttttactcggatgtctgaatgagtctcgtaatatatcgacacgctcgaaattgaatgttgaagctctaagcctattcaaacaacaataacgttttactcggatgtccgattgagtgacgtaatatatcgagacggtcgaaattgaatggtgaacctatgagccaatttaaacgacaataactttttactcggatgtctgattgagtcccgtatatatcgagacgctcaaaatgaatgttgacctctgagccattcaagacaatacttttactcgat

SEQ ID NO: 25 - DNA, 405 bp, Glycine max
agcttcttagtttcagatgatccagatgggtttgtagctacctcatgcactcctctaatgactatggcatcatttctggcgctaaactgctgggagttggaggccatcttctcaattaaatttctggcttcagcaggagtcatgtctccaagggctccaccactggcagcatctatcatacttctctccatattactgagtccttcataaaaatattggagaagaagctgttctgaaatctgatggtgggggcaactggcacatagtttcttatatctctcccagtactcatacaggctctctccactgagttgtctaatacctgagatattcttcctgatggctgtggtcctggaagcagggaaatttttttctaagaatactctcttaaggtcatcccagctc

SEQ ID NO: 26 - DNA, 312 bp, Glycine max
  unsure at all n locations
agcttgtatgggtgagttataaattataatacctcagcttggttcaaaagatcatgtttactccgtcgcacgttgagcaagttttgcacagcttgcccctctatggacatcctcacccgactagctcttactctggcctgaactcgaaccaatgcctgcatgcaccttaatgtccncgctgtctgcttcctcacctgtctccccccgaacaagtgcttgaatcctcaccactggcttcaatgccctcaaagcccttcttgcctgcaatcaccacacaagtgatgtcgaaatataatgttggtctaatggtaa

SEQ ID NO: 27 - DNA, 394 bp, Glycine max
  unsure at all n locations
agcttcttgatatactgcagcacgattatattaatgcttcatagtattttttgacatatatattaatattgtcaagctaaaggcacaatttttgttatgctaattgataacaatgatagaaatgatcttagatacaccaagctgccttggatatgatgtttgattcgatgatgattgggtagtcagagtaaatgttagtttagagaggaagaattaactaagttaattatattaaagattaataatttgaaatgagactattaaaacatatagataataaattgtcataatgaaaagtttacgatctgtttggaatatgataaaataggataagatataccattatgataaactttaggtttatttaatatttgatgcacactanataatatta

SEQ ID NO: 28 - DNA, 340 bp, Glycine max
agctttcagctatgtatctcattagtaatactttttcgtgctgttggatgggcaacaattgcctccttggtggtgatagtaatcactgtgctttgcaatactccactcgcaaagttacagcacaagtttcaaagcaaacttatggtgacacaagatgatagattgaaggcttgttctgaggctcttgtgaatatgaaggtgttgaagttgtatgcgtgggaaaccaattttagaagttctatagagagattaaggaatgaggagctcaaatggttgtctgcagtgcaattaagaaaggcatacaacacctttctcttttggcctctcctgagttggctct

SEQ ID NO: 29 - DNA, 376 bp, Glycine max
ctgaatgctctattcaatggagttgacaagaataccttcagactgatcaacacttgcacagtggccaaagatgcgtgggagatcctgaaaaccactcatgaaggaacctccaaagtgaagatgtccagattgcaactattggccacaaaattcgaaaatctgaagatgaaggaggaagaatgtattcatgacttccacatgaacattcttgaaattgccaatgcttgcactgccttgggagagagaatgacagatgaaaagctggtgagaaagatcctcacatccttgcctaagagatttgacatgaaagtcactgcaatagaggaggcccaagacatttgcaacatgagagtagatgaactcattggttcccttc

SEQ ID NO: 30 - DNA, 396 bp, Glycine max
  unsure at all n locations
agcttcatgcttaactatgtatggaaaaacttcattactgttgttcaagacatacaagtgagcttgtaacaaatcttctacacttggagtgatcacctgcagtcctcttgaacccttaccacccactctgtcatcatgccgacactcaggaagcccaacagctttagccttctctaagtattctgaacaaaattcaatggcttcttctgcaatgtacctctcaacaatagatgcttccggacgatatagattctttgtatacccttttaagatcttcatttatcgctcaaccgggtacatccaccgtagataaacaggaccacagcatttgatttctctgaccagatgcacaatcaagtgaatcatgatgtcaaagaaagcangggaaaatacatc

SEQ ID NO: 31 - DNA, 403 bp, Glycine max
agcttaacaatccttttgatctatttcaaaatatttctatccctatcatataacttgcctcactcatatccttcattttaaagttacaagagagaaactttttcgttgagcatttttctaaattggaaattgtgatgttgagcatttttccatcttaaatctctctagtactttattgatatatgctttttgagacaagcttaacaatcctatgatctatttcagaatatttctatccctatcacaaaacttgcctcacccatatccttcatttcaaagttattagagagaaacttcttagtctcatgaagaagatcaagatcattagttgcaagcaatatatcatcaatatacaggattagaaaaataaccttactcctactgaccttcagatatatacatt

SEQ ID NO: 32 - DNA, 387 bp, Glycine max
tcttatccaaggctcatcttggaggcgaagctacttcttccatggcttattccctaatggaaggcgcctactctcagctcttctactttgtcttccgctgcatctacatggtggaaaatcactattaaaggacctcattgaagctcacagatccaacctgcatagagaccccacaggcaagcttccatcataaccactctatttgccctaccagggatatccaacttggacactgcactcgccaagtacatacacgacatacatcattacaatgacactatcaacatccacagcatctaagtctgatgacactatgatcatctacctgatcccgtctcgatgtcattctcaacatcaacagtatctgatctcaatgacataatcaac

SEQ ID NO: 33 - DNA, 377 bp, Glycine max
tgaaggatgtaagattctgtgattcttcaatgtccaccacaatgtgatcaaactttgatgtcagtgttctgagcaccttctcaatcaccagttgttccttaatttgttctccacagcacttcatctaattggtgagtgtgagaatcttggtgaaatactcagctactgattcagtctcctccattgcaagaagctcatactgtcttctcaatgtctgaagctttaccttctttatcttttctccaaagataatccaatatttatttagatcaagatatctaaatatatattttagtaaagtaaaagatagatacaattgctttaatatattatattgttattcttattctcgaaagatgttattatcataatatatt

SEQ ID NO: 34 - DNA, 381 bp, Glycine max
  unsure at all n locations
ngccgccacggagttntccgactatgctcttgtgtgttggaacaagctacaaaaggagagagcaagaaatgaagagccaatggttgatacatggacggagatgaaaaagatcatgaggaagcggtatgttccggctagttactcaagggacttgaaattcaagctccaaaaactaacccaaggcaacaagggggttgaggagtatttcaaggaaatggatgtgctcatgattcaagcaaatattgaagaagatgaggaggtaactatggctcgatttcttaatggtttgactaatgatatccgcgatattgttgagctgcaggagtttgttgaaatggatgatttgcttcacaaagcaatccaagtggagcaacaattaaa

SEQ ID NO: 35 - DNA, 324 bp, Glycine max
  unsure at all n locations
agcttgaaattgaacaacggaagctctcgagaaaatcgagtggtcataaattttcacacagatgtccgattcggggaaataatatatcgagacgcacgaaattgaacaacggaagctctcgagaaatttgaatggtcataacatttcactcggatgttcgatccggggacataatttatcgagacgctcgaaattgaacaaccgaagctctcgacanattagaatggtcgtaacttttcacgcgaatgttcgattcgnggacataactcatctagacgctcgaaattgaacaacggaagctctcgagaaatttgaatggtcata

SEQ ID NO: 36 - DNA, 439 bp, Glycine max
gtctccactaagttgcctaatgcctgaaatgtcttttctgatggcagaggtcctagatgcagggaagaatttctccaagaacaccctcttaaggtcatcccagttgaaaatggacctgggagcaaggtagtatagccaatcttttgccactccctccagagaatgaggaaaagcctttagaaagatatgatcttcttgaacatcacggggcttcatggtgtaacaaacaatatggaactccttaagatgcttataaggatcttcacctgcaagaccatgaaacttgtgcagcaaatgtattagtccagccttgagaacataaggaacaccttcatcaggatattgaatgcacaagctttcataagtgaaatcaggtgcagccatctccctaagagtcctctcacgaagtggaggtagagccatgttctcagtatgaaaa

SEQ ID NO: 37 - DNA, 455 bp, Glycine max
  unsure at all n locations
tcaagcttgacaagcccaaatgtattgggttggttcaattagacctagccttatcaaatcttgtcattcttgtttagttgcttgtaaatctgaaggtgacattccaggatgcgttgcctttgttgggctgatatcttcatttaatcaaaatgacagatcaacaaagtattctttatttttgcataaaggatatagatgtttgaaatcttcatgaccatctgcacataaagaagaaatttcttgtttaaattctccaacttctggtgggacttttgctaaagaaaaaaagcctaatcatttcttaaaaaggcttgaaatttcttttaaatttgatccctgtagaatgtaattgaagtttactggcagtagtatagacatccattcctatgaggagatctctgtcgggcagtttacttccaatgaccttggtccanatgatacaatcagggaaaaac

SEQ ID NO: 38 - DNA, 318 bp, Glycine max
  unsure at all n locations
cacccgacgaagagactgacaaaaacttattctcttctttttggacaaagtattgcaagctgggggcaagttaattttcttaccatcaaaccttggatgcaactgtgaacgtatgcccatattagctaaatgttgacgggtattcaagccatccttcgtctctgcctgaatgttaaggagcagtccaatcacactggcacaaacattnttcttcacatgcataacatcaatacaatgtctaacgtcaggatcagaccagttcggaaaacaaagaatatagacctcttctttcatatgcaactcttacttttatacttc

SEQ ID NO: 39 - DNA, 461 bp, Glycine max
  unsure at all n locations
tgtggttnttagcgatactcaccaaaattgtgtaacacaagcntacatcaagtttatcatgtcctagaagatccagttgaacaacatcaaacacaaaatgttgagcaactttttgaacaacatcaaacacaagatgttgaacaacctgttgaacaacaaccaaaaggtgtggatgtaacattgagaagatcaactagaataaagaaacctgtaattcctagtgattatcatgtgtattcacaagagtctcaatatgactttggagttgaaaatgatcctgagtcatttttgcaagcaattaacagttgtgattctaagctatggtatgatgctatgaaagatgaattggaatctatggtaaataataaagtatgggatcttgtagagtttcctaatgggataaagcctattggatgtaaatgggttttcanaaccaagaaggattcattaggtaacattga

SEQ ID NO: 40 - DNA, 441 bp, Glycine max
actcagctaaccatgatggaaagtactgaccaaatagaatctttttatctttaggattagaacatatgatcaagccagcattaatgtttgggacgtgtatggtgatcaagaatcatttcatctcttaattcaatcatcttacaatatgatttatcaacaattaacaactatgataaaaactaagaccatttcaatataattaaacgtaaaatacttaattattcacagtaataattaagaataaaacttaatagattgatttatttattactccatccttgactttctttctagagaatagtagcttttatgtatctgtcattacaaagttcagaagatcatattaagtatgtttgatatcacatatacccttagatatttctctatctataatcaaatcttacatgtaaatgatgtaattaccatggagtggagagagag

SEQ ID NO: 41 - DNA, 457 bp, Glycine max
  unsure at all n locations
tgaagaaatngctaaggaaaatgtgaaattatgaagtgatcttttcttttatattatgagtatgnggctttaagcaatgaagagtcatcctcaaatgaaaggaatgttggtggcataaactctgtaactgtccatgtgcctaatacatctgctatgactaggtttgatcaattaatgagccttatgcatgacaaggaaataattccaccaatgaaatcagaactagatgcttatcttgagaagaaaaatacttatattcctaataatggaaactcctcttttattgccttggagtggtggaggaataacaacttcaaatataagattttatcaaagatggcaagagatacactagttgttccagtatcaatcgttgcatcacaatctacatttagggctggaggtagagtaattgatgagtatcgttctagattgaatgaagaatctattgaagctc

SEQ ID NO: 42 - DNA, 461 bp, Glycine max
  unsure at all n locations
gggagaaccaagatgcactggcccagatgtcaaggagttcattatttttgtgaattgagaaacgatctttgattgtaatagaattcaaggccctgtaatccacacacatgcgtcaagttccatccttctttttcacgagtaacactggagaggagaatgggcttcgactgtgttgcattaaactggaattgagtaattccataactgtcgttcaatttccgacttctggaagtatggatatttgtagggtctaacatatgttttgccttcaaaaaaaattatttgctgattaacagaaaatgagaaacgagcaactcattatataaagggaaataacgttttgaagatgatttaattatgaaaaaaggacaaattaaccggatatatttttacctctcttttcttctttgtggtttgaggatttttttggatggtggctnttgtcgccctcaccaacatta

SEQ ID NO: 43 - DNA, 156 bp, Glycine max
  unsure at all n locations
tcttggatggctactcggngtataattagatagcagtagatcctaaagaccaagaaaaaaatggctttacatgccctttcggtgtctttacttacagaagggatgccattgngttatgtaatggccttgccaccttccaaagatgtatgctagcta

SEQ ID NO: 44 - DNA, 442 bp, Glycine max
  unsure at all n locations
taataaatctatatatggtttaaaacaagcctcctgtagtgtttccttaagtttcatgggataatttcttcatttgattttgatgaanaccccatggattaatgcatataccacaaggtaagtgggaagtaaaatatgtttcttgttttatatgttgatgatattttacttgacaccaatgatcgaggtttgctacatgaagtgaaacaatttcaatctaagaattttgacatgaaagatatggatgatgcatcttatgtcatcgacattaagattaatagagataaacctcgaggtattttgggtctatcacaggaaacctatattaacaaaactctagagagatttcggatganagattgttcacgaagggttgctcccattgtgaagggtgataggtttagtttgaaccagtgcccanagaatgactttgagagggaac

SEQ ID NO: 45 - DNA, 436 bp, Glycine max
  unsure at all n locations
ntggaatattattttcgggcgctcgagcgaaacccattcttactccaagcttttaataatatggccgggatctgtcattacgtgcgactatctccactatagaaagaaaaaagaaaagaacaagctaatccacaaatactaatataataaatactagaaataaaggctttctacatatacatatatcgtccaaaacaacgattnttatcagctgtagcaaagaatgaaacttcatagaagtcaaaatatgaagaaatcaatatgtctagatacccccttttctatggataaaagatctaattgataaaggaagcatcgtaaggatccattaacgcggttntgaaccgatacaataaaaactgcttacttatctcatgatagaaaagtcaggaatccacttatgtaatacagtagaatccccgatattntgagcagc

SEQ ID NO: 46 - DNA, 220 bp, Glycine max
  unsure at all n locations
tcgtcttattcanaaccncaaccaattatganatccnctatctcccacttcacacctcggaacgcaccgttcttatagagagaggcgctntcacatcnttcttaggctgggagaggaaatgttcccatnttttatgatactccggngaacagatatccagtggagatgacggngtggngcctgtagctcagaggattagagcacgtggctacgaaccacg

SEQ ID NO: 47 - DNA, 405 bp, Glycine max
  unsure at all n locations
tatgctgcatacattgataatagacctcctcagctgcaaatcttatctcagtagaataattatgacctttcaagcaatagatactattctcctnggaggaataatacaaatgtgagatggacaagtaactccacaagaacaatagcctgttcttcatttttagaatgttgctggtccaagcaagccatatgttccttctccaatacagcagcagttacaataaagacaacaagcagtttcaacctttcttataagagttagtgagacaaatgaccttccagaatatgcgatttctagaagagacaagagccttcattcatagtctgacaaatcagatggcgcagatgggtactcatatgaaccaagcttagtcccaaaattttgacaaattgtttcacaagctgt

SEQ ID NO: 48 - DNA, 259 bp, Glycine max
  unsure at all n locations
gtaatattatagccgatgctctntctcggcgtcatgcattactttctatgcttgaaacannaatgattggtcttgaatgtttgaanaacatgtatgaaaatgatgaaactnttggagaaattttttaaaattatgatattttttcagaanatggtttctttagacatgaaggctttcttttcaaagaaaacannatgtgtgtgcctaaattntctactagaaatttgcttgttttgtgaagcacatgaaggaggttaat

SEQ ID NO: 49 - DNA, 338 bp, Glycine max
  unsure at all n locations
acatctaactcagactaccgattcatgccaataatatatcgagacgcttganattgaacaacggaagctctcgagagattcaaatggtcataactnttcacatggatgtccaattcaagtgcataatattctgagatgctctaaatttaacatggaagcacaagggaaattanaacggccataacctataacaaggatgtccgattcaggccaataatatattgagacgctcgatattgaacacttatgctctcaagagattcanatngtcatacattntcactcggatgtccgattcagacgcataatataccaacatgctcgatattaaacatcac

SEQ ID NO: 50 - DNA, 446 bp, Glycine max
  unsure at all n locations
tccnctcccnctcttttaagataaaagaaaataatttatcaatttattgataatcatcataaagaattaaatattntaaaaaattaacaactaanagattgagtgtttcgattggatatcgagttggagtttatattttcgttgctcatttgacttctgcttatttattctttgactgttgtgtgaattgaggtgttgtttatctaagattaattcttattaaatttcttctgttggaggattaagtaattaaaatcaatgaattntaccattttgaagttagtaaagtggaaatttttatacactgatgaataatgaagaaaacaaatttataatttattatacacttacgtatattcacatgtctaaccgatgaatttaaatcagagacgatattttcttaattaaaacattttanagaaatgaaacttanaactgattaatca

SEQ ID NO: 51 - DNA, 239 bp, Glycine max
  unsure at all n locations
atggtgtcttggagcgtgcttgtgattntntctttcgccatgctgcacaactntcaggtgttcccttgagaatggtggagagaagcagaaggcagttccctcttagaanagcccgtgatgctgcagaagacatgctctctgggctactcanagccaagggtgatggattcatgacattgatcgaaaatggtaaatggatgtgtgacgaggcacctcacagtggaaatgaatatgtaaac

SEQ ID NO: 52 - DNA, 458 bp, Glycine max
  unsure at all n locations
tcaagaattatggcctcatcaaactacttgtttcccgagggattttctataaatagacctcccatctttaatggagtgggttaccactactggaaaacccgcatgcaaatctttatagaggcaatagatttaaatatttgggaagccatagaacaaggaccttatgttcccactataatggccggaagtgcaacaatagaaaaacctagagcagattggattgaggaagaaagaagattagtacaatataatttaaaggccaaaaatattattacatctgccctaggaatagatgaatactttagggtttcaaattgtaaaagtgctaaggaaatgtgggatacactacaggtaacacatgaaggcactacagatgttaaaagctctaggataaacactntaactcgtgaatatgaactgttcanaatgaatgtaaatgaaagtatacaagacatgca

SEQ ID NO: 53 - DNA, 224 bp, Glycine max
  unsure at all n locations
catctacaacagacctccttaacctcagcagtatattcatccacaacagaataattatgacctctccagcaacaggtacaatcccgagtggagaatcatcccaaccttagatggtcgaatccttcacaacaacagcagcaacaacaacaaccttaatttcanaatgctgctggcccaagcagaccatacgttcctccaccaatccagcaacaacaacagcaaca

SEQ ID NO: 54 - DNA, 290 bp, Glycine max
  unsure at all n locations
gtttaagtcttctaaactgcctatctatattccatagcctataacaacttccgtgtgcccatcggcttgtgggtgacaagccggtgacaataacaatttaatgcccaacttgctccacaaagtcctccananatggcttaagaacttagagtccctatcactaacaatgctccttggcataccatggagtctcacaatctccttgaataacacatcagccacatgggaagcatcatcaactttcttacatggaatataatgagccattntagaacacctatcaacaacca

SEQ ID NO: 55 - DNA, 272 bp, Glycine max
  unsure at all n locations
gctcttaactgcacaaggctcttaatatgtgaagagtatccttgtgtaaccttcacncgacgaagacactgacanagacttatcttcttcttattggacacagtatggcaggctggcggcaagtaaatattcatcccatcagaccttggatgcaactgtgatcgtatgcccatatcagctagatcttaacgggtattcaagccatccttcgtcttgccttgaatggtaaggagcgtaccaatcacactgtcacaaacattgttctccacatg

SEQ ID NO: 56 - DNA, 423 bp, Glycine max
  unsure at all n locations
ttatgcagggaagctaagtgtgaagtatgcaatcctgcatatgtttggcgctgcaaactgggtacccaccaatcacacttccactgttgccacaggtttgggtaaatttctgtatgctgttggaaccaagtccaaatttaattttggaaactatatttttgatcaaactgttaagcattcagaatcttttgctgtcaaattacccattgccttcccaactgtattgtgtggcattatgttgagtcaacatcccaatatcttaaacaacattgactctgtgatgaagagagaatctcctctatccctgcattacaaactgtntgaggggacacatgtcccagacattgtctcgacatcagggaaagctgctgcttcaggtgctgtgtccaaggatgcttttgatgctgaactcaaggacacatg

SEQ ID NO: 57 - DNA, 449 bp, Glycine max
  unsure at all n locations
ntaatgtgttctcccttgtagaactactaactgcagtaacagttgcagtccatctatccggtagtgatgacaatagaatcaattccttcacctcatcctcaaatttaatttgcactgactccaactgggcaagaatagtattaagttcattaatatgattagttatagagttagcttctcccatcttgaggttgaacaaccgacgcatcaagtatactttcttggctgcagatggcttctcgtacatatctganaacgccttcattaagtctgcagtagtcttctcgtttatgatgttgaatgcgacgttcttggctaatgtgaatctaatcacgccaagagcttgtcgatctagcaagttccattcttcttgcctcatgtcatctggcttatcccctgatcagggttgatacaacttcttctgatatagataatcctctatctgcatc

SEQ ID NO: 58 - DNA, 373 bp, Glycine max
gttgtcgctgagaaactggttcccagaagattttttgagtgattattgctgaaaaccctagccctgcaacgagtcctacggaagtagacacggagatggacaagaaaatacggtgtattgtgagtagctttttgaaagacgcctctgtacctgaagctgatgaagatgtcccaacatcgtccaacccaaatgtttctgtgcctgatgtctagatagatgttctaacatcttccggcccaaatgctgaagtactctctttccccagcacagagagatcaacagaggaagatgatcaagcctcagaggagactcctgcaccaagggcaccagaacctgctccaggtaacctcattgaccttgaagaagtagaatc

SEQ ID NO: 59 - DNA, 402 bp, Glycine max
  unsure at all n locations
gctagagcttagctacacatacctctctaatagctaagctcacctccttgagatgagaagctagagcttagctacacacccnctataatagctaagctcacccncatgacananaaaacatganaatacaaaanaaagtccttactacaaagactactcanaatgccccgaaatacaaggctaaaaccctatactattagaatggccaaaatacaaggcccaaacgaagaanaaacctattctaatatttacaaagataagcgggtcatgcttagcccatgggctcgaaatctaccctaaggctcatgagaaccttanggccttcctttgatctctagcccaatctacttggagtcttctacccaatgcccttgcaggataggattgcatcacatgtcatga

SEQ ID NO: 60 - DNA, 219 bp, Glycine max
  unsure at all n locations
tattgtagccgatgctctttctcggcgtcatgcattactttctatgcttgaaacaaaattgattggtcttgaatgtttgaaaagcatgtatgaaaatgatgaaactnttggagaaatctttagaaattgtgagaaattttcagagnatggtttctttagacatgaaggctttcttttcanagaaaacaaattgtgtgtgcctaaatgttctactagaaa

SEQ ID NO: 61 - DNA, 353 bp, Glycine max
  unsure at all n locations
cgacacataactcccaccgcatatagaatatcgggccttgtattggttagataccttatactccccacaagactcttgaagaccgtggaatctaccttctctccttcatcaaactttgatagcttcaagccaccttccatatgtgtgttcacgggattgcaatcaagcatattatatatcttcaacacttcttttgtgtagctttcttgtgagacacagataccattctcccgttgttcacttncattcccaagtatatgacatgagtccatatttgcatatcaattcacagacatgactcttgagtctcaacaatttggtattgcgataaataggcatccctaaacaataat

SEQ ID NO: 62 - DNA, 365 bp, Glycine max
  unsure at all n locations
ctctacaattgcatcacctctcaatgatctggtgaagaagaatgtggcatttacctgtggtgaaaaaaaggagcaagcctttgctttgctcaaagaaaagcttactaaggctncagttctagctcttcctgactnttctaanactttngagctagaatgtgatgcctctggagtgggagttagagctgtattngtacaaggtgggcactctattgcttattttagtgaanaacttcatagtgccaccctcaactaccccacctatgataaagagctntatgccttaataagagccctccanacttgnngaatataccttngttccangggaattgcattcatagtgatcatcaatcacttaagta

SEQ ID NO: 63 - DNA, 301 bp, Glycine max
  unsure at all n locations
agagacatgaaagaccggatgagntttactgtgagatggaagatctaacttataagcaacaacacccaccttatntaacacctggaaaggaccataaaatcgangggagagnttttcattaatccttntagccaaggatcttctcttgtagggtgcatcttcaagaacacccaatcaccgactgtgtattctatgtcctgacgaacgtttgtggcattngctcgcatgatatcttgagacttcaacangatttctcttatagtagccaataattaatctaagcaannttgtagttattgac

SEQ ID NO: 64 - DNA, 341 bp, Glycine max
  unsure at all n locations
tctacacctgttgcaagagtctgtggtctatgttcttctacagatcaccatacagatctcggtccttctttgtagcaatctggagtcaatgagcaacctgaagcttatgctgcatacatttataatagacctcctcagcagcaaaaccaacaacagaaaaataattatgacctttcaagcaatagatacaatctaggttggaggaatcatccaaatctgagatggacaagtccttcacaacaacaacagcttatcgcttctttctagaatgctgctggtccaagcaagccatatgtntcttctncaatacagcaacaacagtcacaaanaagacaacaagc

SEQ ID NO: 65 - DNA, 488 bp, Glycine max
  unsure at all n locations
atctccttcttcactacatcaagaatcaccgngttgagtcttctctgtggctgtcttactgggttagctccatcttctanatntattcgatgcatacatgtggatgggctaataccaggaatgtccgccagggtccagcctatagccttcttatgcttcttgagaactgacaacaacttctcctcttgctcatcagcaagggaggcagatataatcactggagaactcttgctatcatccaagtaagcgtattntaaatntgatggcagaggcttcaattctggtgtggtcggctggacagtggtagaaggagatggtttctcagcctttacctcataaagaaagtcagaggtatgtgtacttcctgaaacatggttagtcctatctgactctatnaaatcaatctcaagaggtanaacaccaccaccaggcatgcantcaatatcactctcagaatcactctcagcatcanattcagacatatgatc

SEQ ID NO: 66 - DNA, 396 bp, Glycine max
  unsure at all n locations
cacacatgtagtgaacatctatgataacctgcttcgtgtaagcattgtgttagctataatntatgaagaaccacttctagttctataattgtacaacatattagcatatgccanactatgtgtatcatttggatcaccagaataagaatattacctcaataaaatctccttttggcattagtgctctgcatgcatctctantcctttggtatggtgatattaaactagtgatgcaaataacaccagcatctgcaaagaagttagccacctcacctgaanatntaaatcgtgatgtctaantattaataaaacaataaaatataatcggaagatatcaggganagcatttagaaagcaacataagaaaaaacagaataactcaccaatccttctaat

SEQ ID NO: 67 - DNA, 358 bp, Glycine max
  unsure at all n locations
gtatgtgtatgcagaagatgataggatgaagctaacttacaataattccatgtgctcctctatagtaactgcttgntatagtcctgaatcgctcctgtccagctgtatcccactaaacaaaacacaacanatgaatccaagcttggcatgcatgtggcaataatcatgaatatgatcaagtgaaatgatgatntcgctntgattctcattacccaacaccgacagaggtgaatgcagaaattatggtaaattacaccanacaaactanaaacacaataatatagaatcggggcattatanatgaagtagtcgggtaaagacattgattcgtgtcagtgaagtgtgatactcacaatct

SEQ ID NO: 68 - DNA, 431 bp, Glycine max
  unsure at all n locations
tatcgagacgctcganatcatcaacggaagctctcgatanattcgaatggtcataacatttcactcggatgtccgattcngngacataatatatcgagacactcgaaagtgaacaacggaagctctcatgatattcgaatgctcataacatttcacacggatgtccgattcggggacataactcatctagacgctcgaaattgaacaacggaagctctcgagagattcgaatggtcataagaattcacacgaatgttcgattcggngacataatatatcgatacgctcgannatgaacaaccgaagctctctagaaattcgaatggtcataacatttcactcggatcggtcgattcgngacataatatatcgagacgctcganattgaacaacggaagctctcgacanattcgaatggcataactttcaca

SEQ ID NO: 69 - DNA, 173 bp, Glycine max
tatattgagacacacaatttcgtgctccttctcttcctctccctccactcatgttctccttactttaagctcttatccatgagcttctatggtggtgagcttcttcttgactcatcttctgctagaagggcatctccatcatctttcttctttttattcactgccttaaacta

SEQ ID NO: 70 - DNA, 380 bp, Glycine max
  unsure at all n locations
gctgaatatatagctgcaggaagttgatgtgctcanagtctttggatgaagcaataactntaacactctggagtanaccttgatcacattcctctaaaatgtgacagcacaagtgcgatcaatctaacanaaaaaatcttgtcatgcattctagaactaaacacatagaaataaggcatcattntctcaaagatcatatgttaaaagttgattggtgcattgagttcatagatagtgagcatcaactaacagacgttntcactanaccacttgctagagatagattctntttcgttagaaatgaactagacatattagatgcatctagtatagaatgacattctatttgcatagtgtgtgatgcacattcttactcatat

SEQ ID NO: 71 - DNA, 393 bp, Glycine max
  unsure at all n locations
tcagctgaatcacttccctcttcanacactagaatagatattatatnnggtctttataacacaagtcatacctaattcngattggtctgactaaacaatgtanaagtatttatactagtgatttatgaaaaataaattcattntanatntgtgtttaattntaatttattgctggtgtaaataattttaccccatcaactaattaanaatcttaatgtaattataagaatttaattatttagcacccacaatataatatataggaaccagtacaaaaaattctttttaacattagttgnntttaacattntatatatgttttgtaatgtatgctaataagttgatatagaaacactacaagaaaaacacttaaacatgtttgatatatttttt

SEQ ID NO: 72 - DNA, 269 bp, Glycine max
  unsure at all n locations
accatacagaacctttgccttccatgcagcaacctggagcaattgagcaacctgaagcttatgttgcanatatttacaatagacctnctcaacctcaacagcaaaatcaaccacagcagaacaattatgacctctctagcaacagatacaaccctagatggaggaatcaccctaatctcagatggtccagccctcagcaacaacaacagggggtacggaaagtacccccttgaattgtatattcaagacatttgagaataaacaaacac

SEQ ID NO: 73 - DNA, 365 bp, Glycine max
  unsure at all n locations
cactcacacaccgcactctccaatccttagctcanacctatggtcctttgatgctacttcactttggaaaaatgccagttcttggtgtctcaactgctgangctgcacgtgagggtatgaaaacacatgacctcgttntctccaacagaccacatcgtaagatgtttgatatcctcttgtatggttccaaagatgtggcatcttctccatatggcaactattggaggcagataaggagtatatgtgtcttgcatcttctcagtgccaaanaggttcaatcttttggtgcagtgagagaagaagaaatctccataatgatggagaagatanngcagtgtgtcttcttgatgctgtgaattatctga

SEQ ID NO: 74 - DNA, 192 bp, Glycine max
  unsure at all n locations
caaccaaagatatgaagatgtgagatgtntggttctctgccatcgaataattcatatgaagtnttctntaaaatgggtcttattaaagccctatctaaaatgtagcatgcagtgttaacggcttcagcccataagtattctggaagaggagtatcattcaataaagntctagcaatctcgtccaaagatcta

SEQ ID NO: 75 - DNA, 487 bp, Glycine max
  unsure at all n locations
atgtataataaaataggtaatgtgatacatagaaggatgacaagcaataaaatcgaacataagaaagtattacaaaaagtacgaataatattaagataacctcacataatggagaaacagcattcttgataacaattcacttccatcacaagaaanaagatctgataccgtggactgatcaaacgcatattnganaaagatatagaatagttatatctttgattcagtgtatggccaaaaattgacggtacagaatgtatgaagagagtttagtctaattaactaaacagaatataccaatattgtaaactntagtatggtgttcagctagtacggataangaaacaatacaaaatttgatctaaataatatagctcttatgtcaaagcacaatangatgatttttaacaaatgactgaatcaacacgcatatatttatcaatctccacaaagatagagatcatataaacatctcttatatttatat

SEQ ID NO: 76 - DNA, 384 bp, Glycine max
  unsure at all n locations
taatcaagataagtatgaaaagggttnttcataaactaagtagcacatggattnttctcanaacatgtttaccaaagagtttttactctctggtaatcgattaccagattattgtaatcgattaccagtagcaaaatggatttgaaaaagttttcaaactgaatttacaacgttccaatttatttcaaaaagctgtaatcgattacaatgttttggtaatagattaccagtgcctttgaatgttgaaattcaaattcaaatgtgaagagtcacatcctttcacataaaagctttgagtaatcgattacattgatttggtaatcgattaccagtgattgtttctaaataaatcaaaagatgtaactcttcaaaatgggttttgac

SEQ ID NO: 77 - DNA, 401 bp, Glycine max
  unsure at all n locations
tggatttccttntagtagggaatctatccttcctaagatggagccaaacccagtcaccctcattaagaactagctcttttcttcctctattgcctttagttgaatacacctttgtttggttctctattttgttcttaaccctctcatgcaacttctttacaaattttgacctagattccccttctttatgtataaaagaagtgtccagtgggaggggaatgaggtctaacagtgttaggggattgaacccatagacaacctcaaaaggggactgcttggtggttctatgaacccccctgttgtaggcaaattctacatgaggaagatactcatcccaagacttatggttgcctttcagaagagcccttataatggtggattaaaacctattcactacctct

SEQ ID NO: 78 - DNA, 453 bp, Glycine max
  unsure at all n locations
tctttcctaaatcaaagtataaatgattntatattataagtataaacctattaaaaaattccgttcaaaataataagataattttacctgaaattttgaaccactccacttgtttttaatgagccaattccaatcttctggagatacgtattttggtctatcattttctttaagataagcttgatgtaaatgataaagcttattcttgtattgagattgaattttcttcattgcatattctctttcctcgccagataaactaaaagcatccttatatcaaacgttttcaccagcaaaagtaaaaattaaatactatcaagatacattatcaaaccaatttgaagatataactaatattcaaatatataaataaattagatataattaacctaattatatactaacattcatatgtcgccacatttcatctacaccatccttactaatttcact

SEQ ID NO: 79 - DNA, 442 bp, Glycine max
  unsure at all n locations
tgttcttagtaagatcgatcagacgatgcttttgttccttggagagcaacccgtcttggccccagaaagtgttgccaatgctctagtggaagtgatgaacgatcctttctcacacttaatcgcctgttgataaaattctgcaccaaatatccaaacaccattaaataaactaaaattcaaataattaattgtatggatggattagtcaaataaaaatttctattagccaagatattataggaatttgtcaagtctatcacgtgagcagtgggcttagtgttcctttcattaggagattcatgaaaattntgtcggccacanaattgtgagacttcttaatcaattaaattaaaaaaaacctagtaaaataaaagttgaccagcatanactaatagtgggaatataattagtatttgaatgccaaaatcaaccacatattttt

SEQ ID NO: 80 - DNA, 479 bp, Glycine max
  unsure at all n locations
ctattaggactcttgcaactcagctcgtacatatagtttcaatccgaggtccttcaagagacctagtaaaagtatcagcctattgttcattggaaccaacaaagtcagtcatgatttcccctgacaacacctttactcttgcaaagtgacaatctatctatgtgtgtttagtttgttcatggaagaccatattagatgcaatgtgaagagcggtttgattgtcacaaataagcttagtgtcctgagtgcctaagtcttgtaatttcgcatgtagctgctaccatggcacaatgttaagctttgatgctgaatctagcaactatattttgcttcttgtttctccatgagatcaaattccctcaaagcaaaacacaataaccagaggtagatctcccgtccatggntatcgaattgaaagattcgaattgtgaatcagaaaagctatattacgaatcgtgaatcgaatcatatatgaatcg

SEQ ID NO: 81 - DNA, 456 bp, Glycine max
  unsure at all n locations
tgtcaaataaatcactgcatattgtgcagtccctatcatccttcagaggaatgtagaagagagtaggcttgcaaacaaggttccaatttggataaaagtgtaaaactacttattaattagaattttatgaatcattgtttggaatattgaagaaaaaagacaacctgacaaccagctgccctgaaggaactaaaatcatggcatccaacaagaactctgcatgcttcctgcatggatatcatcaataacttgaatagctgcaagattgagaatctagtaagtataaggagctgttaactaacttgcatagctggaagactaagctcctcaggtacatgccatgctcgatctttctcgaaggttgacaaaggctctggcccagaaagcaaccgatagaagtatctgaatagtagttccaaataactatcaattactgcanatggtcataaacaaaac

SEQ ID NO: 82 - DNA, 454 bp, Glycine max
  unsure at all n locations
cttggagtttccaagtgccaattcgtcttcttctttagtccagtcttcttctggcttcaattcatcagtgggctttccttctgtgtccagcatcttgggatgttcccagcctttgatgacagctttccaggttctgctatccagtgatttgagaaaggccaccatccttgctttccagtattcatagttggtcccatccagaattggtggtctgttcactggtccgccttctttctccatgttcatcagaatttatctccctagatctcactcagtgatttcgagtgcctgctctgataccaattgaaattctgatactgnggacagatgtcgtacaggatgtcacgacatcacgcttcagaacatgcagattatatttgacagtgtgaacaaattaaacaagttaataacacaagagaattgtaacccagttcggtgaacctcactacatctg

SEQ ID NO: 83 - DNA, 453 bp, Glycine max
  unsure at all n locations
gttgaatgcattaaaggtaaacaaaccaaaagcaagaaattgtgtgcatatagagctacagacgtcttggaattgagacatacaaacatttgtgggccatttcatacactttcatggaatggtcaacaatattttatatcattcatagacgattactccagatatgcatacttgtttcttatacatgaaaagtcacaatctttggatgtattcaaaacatttaaagttgaagttgaaaatcaactccacaaaagaataaagtgtgtcagatctaaccatggtggtgaatactatggcagatatgacggttcaggtgaacaacatccggngccttttgccaggtacctagaggaatgtggaatcgtcccacagtacaccatgtcggngtcacctagcatgaatggtgtggctgaaagatgaaatagaactcttaacgatatggtaagaagcatg

SEQ ID NO: 84 - DNA, 432 bp, Glycine max
  unsure at all n locations
ntgagcaaattcaaacgaacaataacttttactcggatgtcagattgagtcccgtaatatatcgaaaagctcgaaattgaatgttgaagctctaagcaaattcaaacgacaaaaactttttactcggatgtctgattgagtcccgtaatatatcgaaaagctcgaatgtgaatgtagaagctctgagcatattcaaacgacaataactttttactcggatgtctgattgagtcccgtaatatatcgagatgctcgaaatggaataccgaagctctgagcaaattcaaacaataataactttntactcggatgtccgattgagtcccgtaatatatctgaacgctcganattgaatgtcgaagctctgagcaaattcaaacgacaataacattttactcggatgtctgattgagtcccgtatatatcttgacg

SEQ ID NO: 85 - DNA, 368 bp, Glycine max
  unsure at all n locations
tccaccggttgtgattgcgagataatattcgtggagggagaataaggaatcgtatgaagacagtacaagtggaggtttcaatctcttctccgtctctctgacttttgggaattctatcggagtagtcggatgaataattgaaagaatttctgggaaccgctagagatgttgttatcgctggctgaagacacgtgagcccgcttagaggtaagggatgagtttatcgcaaatgggattagaatgaacatgtgtanggatccttagagaactaaatttgggttaatttgcgatggttattgaaatataatttctctttatgattataaatataatattaatggggtctatgtaccaatgatgttctgatg

SEQ ID NO: 86 - DNA, 449 bp, Glycine max
  unsure at all n locations
tctataaaaggttcgttcctaatttctctacaattgcatcacctctcaatgagctggtgaagaagaatgtggcatttacctgnggtgaaaaacaagagcaagcctttgctttgctccaagaaaagcttactaaggcacctgttctagctcttcctgatttttctaaaacttttgataatattagggacttgtatgctttagatgaacatttctctcccatttacgaaagttgtgggaaaaaggcccaaaatggattctatttggctaaggggtatttgttcaaagagggaaagctttgcataccccaaggatccattaggaaattacttgttaaagatagccatgagggtgggctcatgggccactttgggatagacaagacgctcgtcttactcaaagaanagttttattggccccatatgaagaaaaatgtccttaagcattgcact

SEQ ID NO: 87 - DNA, 382 bp, Glycine max
  unsure at all n locations
tcattgatcaattctgaagttcacaattgtcataagttcatgaaaggagcaaaatgttggatcaagtggcctcagaataattaagaaggggggttgaattaattattaatgagcctttactaatcaaaaacttatccttcttaatgttactagattcaattaggcttttactactaagttaagaaagtaaagaacagaaatagaaacttaatcaaatgtaaaagcaataattaaagtgcacagcggaaattaaagagtatagggaagaacaagacaaacgcaagaattntatactggttcggcaaaactcatgcctacatccaatccccaagcaacctgcggttcttgagatttctttcaaccttgtaaaatcctttacaag

SEQ ID NO: 88 - DNA, 399 bp, Glycine max
  unsure at all n locations
nttggtcttagaattaatcatcaaaagtctcatttcattgtgtctaagaatattccgagaaggaaaactcanaaatttgctatattttgggtttccaatatatactcatgatattggtaaatatttgggtttacctataattagtggaagagttaaaaaaaaccacttctcgtttattctggataaagtaaatgatcgctgagctggttggaaatcgaagcttctcaatagacttggtcgggttacactttgcaaatatgtcctcaattttatccttacatatgtcatgcaaaacatgtggctccttcaaggcatttgtgattcccttgatattgctactagacaattcatctgcggatcaacttcatctcattgggtgagttggaagactnatcattc

SEQ ID NO: 89 - DNA, 396 bp, Glycine max
  unsure at all n locations
tcttggcaatcctcattccagcgatcagtttggttnttgcgtaagagtttgaacaacggctcacaaatggcggtgagctgcgatatgaatctggcaatataattcaagcgtcccaggaaacctcggacttgcctctctgtacggngttctggcatctcaaggatagccttcaccttttcggggtctacctctatccctttctggcttacaacgaaaccaagcaatttccctgatttgaccccaaaggtacacttagcggggttcaaccttaattgatatttcttaagcctttcgaacaacttccgctggttgacaaggtgttcttcctcggatttagatttagcaattatgtcgtccacgtagacctcgatctcttgatgcatcatatcatggaac

SEQ ID NO: 90 - DNA, 391 bp, Glycine max
  unsure at all n locations
tgaaggtaaaaggtttacacagtttcatgttaaaagttactgacatcctgctgctaatagacattagacgtagctntactcttagtaagaatattagaacaacacagcaaacaaaacactttctatgcattgagcaaatgtattcaaaaaataattatggattagaactaagttttcacaaatcttaagcaagcatcagtaacatctttacctgcagcactagaaagaacccaattgtcatcataaggaacttgccacacagcatagccaagtaacttattttcccttgcataagaaaccttcattntgacaacctcaacatcatcataacctatccaagtcgatccattggagaagtaattaactacataagtagcattgtacttgacat

SEQ ID NO: 91 - DNA, 463 bp, Glycine max
  unsure at all n locations
tattggccgttggatgaaactccacacagtgcagttctatgttcacttgtagaggatctgaatcccagtttaccagttggttgttgccgttaaccaacaaatcttattttatgttctctntaatatttctttntaattgaagatgcttcttttacccacagaaattgtatatttttcatgcaagtataacagttaaatgaatagtagttagtttaattgtatttcgaatttttttttataattaaattataagtgattttttagtttctatggaaaaaattaagttggttaagttttttattttaaaaattaactaaatttattcattntgtcaaattnttacttaaaaattntcaaatttttaattttatctacatatttaggagtttatgaataaattgagttagaaaataattntaaaaattatangtaactttattagaaaaattagtaaatattaatg

SEQ ID NO: 92 - DNA, 363 bp, Glycine max
  unsure at all n locations
tattggaatcagccaattgctcagtgactgttcttaattctgtcatcttgaaggtgtatagttgttgcttcaagcataaccgatttgcaagagactttgtcatatacaaggattccagtttcaaccacattgaggttggtgtcctttctcttgcaacttctcttatagctttatttccaaggcatagtatgattgcacttctggctctatccatcatttcttatttctcctttgaacttagagattcagacatcctttcttcttctttaagagcttctacacagccatgctgaatcaagattgcttncatcttgatcctccataacccgaagtcattttccctgagaactctcatatcatact

SEQ ID NO: 93 - DNA, 418 bp, Glycine max
  unsure at all n locations
tgattaccctggtgacactntacttccaggaatgaaaattggagtgaacttcaaaaccggtcaacatcgagctctaagatcatggagatcctttacggatcctactccaggtaatttttcacttggtgttgatactcgtggccttcctcaattagttattacaaatgagaatactaatagtaatgacatagcttatagaccagggtcatggaatggtcttagtatcacggngcttcctggagaaataactgaccaattaacaaaatccctttttgttatgaatcaagatgaggtcttctatgagattcagctcttgaatagttcaactaaactcatgagaagcagaatgcttccagaagggtatcaagtacgttttatatggtcagatgaaaaaaaatatgggattctcaaattccta

SEQ ID NO: 94 - DNA, 435 bp, Glycine max
  unsure at all n locations
tagaagcaaatgctggcatggtatcgcagattcgtgtagcaagaccacctgctgaaggacggngaaggaatcaattgcttccacgttattggcctaggattactgatcaagagttgcaacaaatatcaggagagtatccaacattgtaatctgtcctataaattattatgaatcactgacaggatacttactggttgatacacttattattattttgatagctaatctttaccttagtatttccttaaccatgattcatgatatgttcaagttcaaattctacaatcgtgccactctttgaaaagatgcttagtgcaagtgatgctggtcgaattggtcgcttggttttaccaaaagcatgtgctgaagtaatttatcttaactcatctgttgaactggcatttactgttgtcattttatattaactaacaattc

SEQ ID NO: 95 - DNA, 320 bp, Glycine max
  unsure at all n locations
cttgtgtgggacacccattgtgagtgtagtttccaaacccttatagaaaagttgacgatgactcctgtgttagttttgcttaacccaagagaaccctttgaggtgtattgtgatgcatcaaagatgggtttaggaggagtgttgatgcaaaatggacaagtagtggtttatgcttctagacaactcaagactcatgagaggaattatcctacccatgatctggagttagctgctgtnagttttgctcttaacgcgtggaggcattacctattcgactccagtttgaagtgtttagcgatcataaaagccttaagtatttg

SEQ ID NO: 96 - DNA, 392 bp, Glycine max
  unsure at all n locations
tctaaactntaaacaaaaatgaagctaaactntaaacaagaatgaagcttcgataccacttgttagacaagtggcctcagatatcttaagaaggggggttgaattaagatattacaaactattttcccaattaaaattctactttgattttaatgcaagttcaaagttcccttaaagattaatttctaaatgatgattcaaaataaccaaactgaatgtaaaagtaaagcaacaataaataaaagagtttaagggaagagagagtgcaaactcagttttatactggttcggccacacccttgtgcctacgtccagtccccaagcaacccacttgagagttccactaacttgcaaaaaccctttacaagttctgaaccacacaaggacaaccc

SEQ ID NO: 97 - DNA, 330 bp, Glycine max
  unsure at all n locations
tgttgcagacaaaaatctntggctagaatgccgcanaaatggtctacaaaacatccatcggttttcttggcctgaacactgccgcaactacctctcccatgttgagtatggcaggaaccgccactccacatcccgcttggaaattacaccaatgactgaagaatcaataagtgactcattgagagatgtagaagacatttcttttagattctccacagaaggagactccaagcagaatggagagatggacactgcagcaaggcagaagcaaattatggaagcaatcatgtgcagggtctcttccactggcaagtctaatgccagttactt

SEQ ID NO: 98 - DNA, 416 bp, Glycine max
  unsure at all n locations
aggatagacaaacagcgctagnccaatcaattgtggggctccaaactcgatggtggaggatgcatgaatgacaagcaattcatggggctccggataagatttgaaggtagaggatagatgaacagcactaggcaatcaattcgtggggctccagacttgatggtggatgatgcatgaatgacaagaaattcatggggctttggataatatttgagggtggaggatagacgaacagcgctaggcaatcaattcgtggggctccagactcgatggtggaggatgcatgaatgacaagcaattcatggngctccggataagatttgttggcaggactgaatggtccaccggtttttttcccaccctaaaggcgaacatgttttatcaaggaanaataaatcattcatgagagcactata

SEQ ID NO: 99 - DNA, 403 bp, Glycine max
tagacggcaatttcgagcgtctccatatattacgggactcaatcagacatccgagtaaaaagttattgtcgcttgaattggcctacaggttctacattcaatatcgagcgtcccgatatattacgtcactgaatcggacatccgagtaaaaagttattgtcgtttgaatttgctctgagcttcaacattcaatttcgagcgtctcgatatattacgggactcaatcagacatccgagtaaaaagttattgtcgttggaattggctcataagttcaacattcaatttcgagcgtctcgatatattacgggactcaatcagacatcgcgagaaaaagttattgtcgcttgaattggctaaaggttcaacatataatttcgagcgtctcgatatatttcgggactc

SEQ ID NO: 100 - DNA, 398 bp, Glycine max
ctgatgcaacatttggagaggttaatgaaacaacgagatgatgcacttcatgagaggttggatcaaatggagaatatagatcataatggagaagaaaggaggagaagagggaataatggtgttcatagacaaaaccgaattgatggtattaaactcaacattcctccctttaaaggaaagaatgatccggaggcctacttgtagtgggagatgaaaatagagcatgttttctcatgcaacaactatgaggaggaccaaaaggtgaagcttgtcgccgcggagttttccgactatgctcttgtgtggtgaaacaagctacaaaaggagagagcaagaaatgaagagccaatggttgatacatgggcggagatgaaaaggatcatgaggaagcggtatgt

SEQ ID NO: 101 - DNA, 405 bp, Glycine max
  unsure at all n locations
tcggctntcaatgtcgagcatctcgatatattacgggactcaatcaaacatccgagtaaaaatttattgttgtcagaatttgcactgagcttctgttttcaatttcgagtgtctcgatatattacgagactcaatcggacatctgagttaaaagctattgctctttgtatttgctacgagcttccgatttcaattacgagcgtctcgatacattatgggtctcaatcggacatccgactaaaaagttattgtcgttagaatttactcatagcctttattttaaattntcaacgtgtcgatatattacgggactcaatcggacatccgagtaaaaagttattatcatttgaatttgctcagagcttctgttttcaatttggagtggtgtcgataaatgtgggactc

SEQ ID NO: 102 - DNA, 452 bp, Glycine max
  unsure at all n locations
tgaagagcctcctcaatcaaactgaaaaacctatattcctcaatgaagttagcacccatcttttcataaaacttgatggtgagaatattccaatcaagcataacccacttgacccttttgcaccccatttttagggcttgctttgccaccacagagagcaacattctcccaagccccttcgtcttataacactccctcaagaacaagttctccatgtaaaaccctcgcttctctagaacgagagagaagttcggaaaaaacaagacaaacccaacaatggaaacacctttgagggttnttaaattgtagtttctcgagataactattacttaatgggaataataaatgaataattaataattatggactaaattataattgggttaaattggaagcagttttagagaaaactattatttgattggagtagtnggtataagggtcaatactca

SEQ ID NO: 103 - DNA, 298 bp, Glycine max
  unsure at all n locations
acccagtcaccctcattcagaagtagctctnttcttcctctattgcctntagttgaatacacctttgtttggttctcttattggttcttaaccctctcatgcaacttctttacaaactctgacctagattccccttctttatgtataaaagaagtgactagtgtgaggtgaatgaggtctaacggtgttaggggatngaacccatagacaacctcaaaaggggactgcttggtggttctatgaaccaccctgttgtaggcaaattctacatgaggaagatactcatcccaagacttat

SEQ ID NO: 104 - DNA, 428 bp, Glycine max
  unsure at all n locations
atgcaagcttgtatattagacaagtcataagtcatcatgttcatanaacaaatcatttgtctaagtcactggcatctagaagtcctaattctctcgtaatggtgtagaacgaatctttgtgtagtggttctgtgaagatatttgcgagttganttttggtatctacaaattctagaacacagtcaccttttaggacatgatctctaagaagatgatgcctaatttctatgtgctcggttctagagtggaaaactaggttcttagatatatttatggcgcttgtgttgtcacattntatggngatgtggtctaatacaatcctataatcagatagttgttatttcatccacagaatctgtgcacaacaactaccagcagagatgtattctgcttcggttgtggataatgctacaataattttgcttctt

SEQ ID NO: 105 - DNA, 273 bp, Glycine max
  unsure at all n locations
ctgatcaacacatgcacagtggccaaggatgcatgggagaatcctgaaaccactcatgaaggaacctccaaagtgaagatgtccagaatgcaactattggctacaaaattcgaanatctgaagatgaaggaggaagagtgtattcatgacttccacatgaacattcttgaaattgccaatgcttgcactgccttgtgagaaaggatgacagactgaaagctggtgagaaagatcctcagatctttgcctaagagaattgacatganagtcact

SEQ ID NO: 106 - DNA, 335 bp, Glycine max
  unsure at all n locations
tgtatggagatctgagcacttcttctctctatgtcttcacaatcatctcttaggcggaagttgcagaatcatcatgatgaagatactatattcngcacgttatcgttgatattttggacccttaccttgattgcattgcttaaatatgtattcatactattgtgtgctgatgacaacggtgaacgtatgctgctgataactttattctcttagataattgttcttatacataggttacgatctgtgtgagtgtgagctgagtatgatacttgtgtcatcaggtggaacatttgcctttattcgctgctgtggatgcatgccacgcttaaattact

SEQ ID NO: 107 - DNA, 314 bp, Glycine max
  unsure at all n locations
ggttgaattaagatatcacatactntntcttnaataanaaatctattttgattntaacccanatcccaagaattctttcanaatgaactcctaaataattatgcannataaacttactgaatagaagcaataagcaataaccaataaaagagtttaagggaataaagaatgcanactcagaattatactggttcgcccacatccttgtgcctaagtccagtccccaagcaacccgcttgagagtncactatcttgcnaaagcccttacagtctgaacacacaggacacccttctttggtcagattgttacacaa

SEQ ID NO: 108 - DNA, 340 bp, Glycine max
  unsure at all n locations
tgtgtcgtctgcatactgcaatatgctgactntgacttcatttctgcccacattgaaaccttgaaacaggttnttatccattgcttctttcnaccagcgcgttggtccttccacaagaatgttaaacaggaacggngatagagggtctccttgtcttaagcctctntggngaataaactcaggtgtaggacttccgttaaccaatatggatatggaagcagactttatgcagccttcaatccaagttacccacctgtcacanaaacccatcctcttcaacaaatatagtacaaactcccaagatactgaatcatangccattntataatctactttgata

SEQ ID NO: 109 - DNA, 240 bp, Glycine max
  unsure at all n locations
caattggaagtgatcatggaggtgaatntcataatgagtcttttgaacacttttgtgaagaacatggaattcaccacaattcttattccccaagaacacctcaacagaatggtgttgtggaaaggaaaaatatatccctataagaaggtgcaagaacccttctaaatgaaacaaggttaccgaagtacttttgggcagatgttgtacatactatntattacaccttgaacagagtactta

SEQ ID NO: 110 - DNA, 351 bp, Glycine max
  unsure at all n locations
tgcacaagactctttaatattgaagagtatccttgtggaaccttcttccgacgaagacactgacaaaaacttatcttctccttcttggacaaggtatgtgcaggctggggcaagtaaattttcttcccatcagaccttggatgcaattgtgatcgtatacccatatcagctagatcttgatgggtattcaagccatccttcgtcttgccttgaatgttaaggagcgtnccaatcacattgtcacaaacatntttcttcacatgcataacatcaatacaatgtctaacgtcaagatcacaccagtacagaagatcaaagaanatagacctcttcttcatatgcaactctgac

SEQ ID NO: 111 - DNA, 317 bp, Glycine max
  unsure at all n locations
atctagaggtatacctaggatctctatcagacactatgctagatggcacaccatgtaatatgacaatctcactaatatacagacaggtcaactnttccaaggaagatatgatattaatgggaataaagtgagcagacttggtcagcctgtcaacaataacccacatagaatcaaaacctcttggggttctaggtagtcctacgacaaaatccatagaaatatatgtccattgtcactgggtatcttcaaggggtgtaactatcctgaagggctctgatatcttatacttatgacagactaaacatgcatacacaaac

SEQ ID NO: 112 - DNA, 314 bp, Glycine max
  unsure at all n locations
gcttgaatcgatacacacatactgtaatcgattaccagagcagtatttcagattatattctcatcagtcacanntcttttattggttcttgaatggccatcanaggcttatatatatgtgacttgagacancgaattgctaagagattntcagaacannaaggtcttatcctcttanaaagcanaatcgtttcatcctcttaanaattccttggccaaaacacttgtgattcaataaggaattagttgagtgctcaaattgttcaatctatctctttcaagagagaatacttcttctcttcttctntattctga

SEQ ID NO: 113 - DNA, 451 bp, Glycine max
  unsure at all n locations
tattgtagccgatgctctgtctcggcgtcatgcattactttctatgcttgaaacannaatgattggtcttgaatgtttgaaaagcatgtatgataatgatgaaacttttggagaaattcttaaaaattgtgaagaattttcagacaatggtttctttagacatgaacgctttcttttcacagaaaacaaattgtgtgtgcctaaatgttctactagaaatttgcttgatcgtgaagcacatgangaggtttaatggtgcattntgtggtccaaaagactctatagacattacangaacatttnntattgcctcatatgaaaaaggatgtgcagacactctgtgaacatcgcattgtattgtaaaatgcaagtctaatggtaagcctcatggattgatactccattgcaataccgagtatcttgattgttatcatggatttgtttgggctgc

SEQ ID NO: 114 - DNA, 415 bp, Glycine max
  unsure at all n locations
gagggactcatggtcactatgaatgacaaattccgtgggataaaggtagtggtgccatgttcccacagcccgtactaaggcatacaactccttatnataagttgaatagttaagggtacgaccacttaacttttcactaaaataagcaattggatggccttcttgcatcaacacagccccaatcccaacatttgaagcatcacactcaatttcaaaagatttttgaaagtttggcaacgcaagtatggnggcattacgtagcttttgcttaagaacattgaaagcttcttcttgtttctctccccatttgaaaccaacattcttcttgagcacttcattgagaggtgctgccaatgtgctaaaatccttcacaaatcgtctatanaaacttgctaagccatgaaaactcctcacc

SEQ ID NO: 115 - DNA, 369 bp, Glycine max
  unsure at all n locations
tttctctacaatngcatcacctctcaatgagctggtgaagaagaaatgtggcattacctgnggtgaagaacaagagcaagcctttgctttgctcatagaaaagcttactaaggcacctgttctagctcttcctgactgttctaanacttttgagctagaatgtgatgcctctggagtgggagttggagctgtattgttacaaggtgggcaccctattgtcttatttagtgaanaacttcatagtgccaccctcaactaccccacctatgataaagagctttatgccttaataagagccctccaaactcgtgaacattaccgttgttcaaggaatatgcattcatagtgatcatcaatcacttaagtaca

SEQ ID NO: 116 - DNA, 273 bp, Glycine max
  unsure at all n locations
ctatatgatatagtgtattctctatattatgttcgtatgtggaggaggctaaattatcattctaattctcttatagttntaattgtgtaatcttgattgtataaattattaaatatataaacatttgttcttattttattatactatatagattgtctttacattattgtatatcatttaaatattatgaggatatgaaattataatttaacctttataaaaatagatgtaacgcaacatagagactgatgctactttgatattccaattgat

SEQ ID NO: 117 - DNA, 353 bp, Glycine max
  unsure at all n locations
gagatcatccnctcaacaacattatgggtgatatctcanatggggtaacatctagacactctcttaaagatntatgcaataatatggcttttgtatccatgattgaacactaaaatataaaagaagccataatagatgataattggatcattgccatgcaagaagaattaaaccaatttgaaagaaataatgtgtggaaattagtagaacaacctggaaattatcctatcatatgaacaaaatgtgtttttagaaataaattatatgaacatggtataattattagaaataaagccaggttagtagcacaaggggataatcaagaagaacgaatagactatgaagaaacatat

SEQ ID NO: 118 - DNA, 345 bp, Glycine max
  unsure at all n locations
cagtgtttatattgcggttccaatgtggccagagggttacccagaacatggaacggttcaagcaatgatggattggcagaggagaacaatggatatgatgtacaaggatgatgctggagcactaaaaggcaagggtaatgaggaagatcctctcaactattcgacattcttctgcctagntaatagggagctgaacaaagaatgagagtatgtgcccccagaaagaccagatcctcatacagattatatgagagcacaagtgtcccgacgctttatgatttatgttcatgccaagatgatgatacgcatgtctgttaattaagtttaccacatcttccaagatac

SEQ ID NO: 119 - DNA, 459 bp, Glycine max
  unsure at all n locations
ngcaagctntctaaatgtttctttgcccagtctcaggtagagtacttaggacatttggtttcgcatcggngagtggagcccttagcatcaaaggtcactgcaattcagcaatggccaattcctcgtacaacgaaggccgtaaggagcttcctgggccttgctggcttttatcgcaggttcattcagaattatgccattggtgtggccccattagtcaaagccacgaccaaagaacccctgcattggacatctgagacacatgaagcctttgacactttgaaacatgccttgtcaatagctccggtgttagctttaccagacttcaaccttcccttcacagtcgagacagatgcgtcaggagttggtatgggtgccattctttcacagcgaggccaccccatagcatttttcagcaaaccttttagtgccaagtactctgatcataacatacatgcgaga

SEQ ID NO: 120 - DNA, 328 bp, Glycine max
  unsure at all n locations
atagcccgaggactagagtacttgcataagggatgcaacactcgaantttacattntgacatanagccacaacattctttnggatgagaagttctgcctcaagatatctgattntgggctagcaaagccttgtcctagaaatgaaagtattatttccaggtctgatgccagaggaacattatggtatgtagctccagaaaatttggcagaatttcacacanatctgatgtaatcttccactttanatttaaaccacctaaaccttaatgggtaaaattaattctattatgcattanatgcatcttatctttgacttgaactctacaat

SEQ ID NO: 121 - DNA, 314 bp, Glycine max
gacgaagcgtgttgtgaatggcgtctcgcgtggctagcatggtatcgacagcatcattgcgtgatgaccacttgatgtaattggagatggccggaggaggcttaccatatgtgacctcgtatggagtgaagtcggtgccggagtgctgagacgtgttgtaagaccattcagctagggctaagaattaaaccagtatgccgggttgtggtgaacgaaggaacgaagatattgctcaatcgtaccgctcatcacttcggtttgcccatcggactggtgatgatacgccgtactcatgcgtatcgtcgtcccactga

SEQ ID NO: 122 - DNA, 393 bp, Glycine max
  unsure at all n locations
cagctccattgatatcatttatttaatgcaatgcacatgtttcgaataagatttcttgtatcacaggaaaagatctaatccaagttgaattacggatcatactgattgtggtgcgaaaactggcttgaagtagccatctgggtaatatccaaaccacgaagtttcctctggtattaaaacagtgtcgcgctcacactgttaatgtataaaataagactacaaatatataagctttcctcatgaaatcaattagcaatattctattcataatatcacaataatacatttagaggacttaccatgataagtaccanattctgcaagctactcaatcttttcttgtaagaagcatttctcttatctggtatttcattgccatgcactggaagaaat

SEQ ID NO: 123 - DNA, 416 bp, Glycine max
  unsure at all n locations
ctgcacaaggctcttaatatttgaagagtatccttgaggaaccttcacccgacgaagacactaacaaaaacttatcttctccttcttggacaaagtatggcaggctgggggcaagtaaattttcttcccatcagaccttgtatgcaactgtgatcgtatacccatatcagctagatcttgacgggtattcaagccatccttcgtcttgccttgaatgttaaggagcgtcccaatgactctatcacagacatttttctccacatgcataacatcaatacaatgtctaacgtcaagatcacaccaatacggaagatcaaagaatatggacctcttcttccatatgcaactntgactattatccttcttttgagtcttcccagatacagtattcacgtgttcaacccgataatatacct

SEQ ID NO: 124 - DNA, 234 bp, Glycine max
  unsure at all n locations
tttgagcgtctcgatatatgacgagactacatcatacatcttagtaanaagttatagtcgtttgaatatgctcagagcttcaacattcaattacgagcatctcgctatattacgggactcaatcagacatccgagtaaacagtttgttgtttgaattgtctgagagcactcacattcacattctagcgcctcgatatatatatggactctatcacacatccgagtataaagtta

SEQ ID NO: 125 - DNA, 375 bp, Glycine max
  unsure at all n locations
tttgagccgtcgacgaccngngatccttagagtcacctgaggctgctgcttacatcaacacttcaggggctgtactacttacatggattgatgggcctatgcagttgaaagcctggagaaagaggatgcctatngttgttgggatgaattctccagatttacctgggtaaactctatcagagagaatcaaaaccttgagtattcaagagctgagtctaagacttcaaagagagaaagactgtgtcatcaagagaatcaggagtgaccatggcagagaatttgaaacagcaggttcactgaatttgcacatctgaggcatactcatgagtttttgcagcattacacaaacagaatgggatagtgagaggaaaacag

SEQ ID NO: 126 - DNA, 354 bp, Glycine max
  unsure at all n locations
tagctacacacacccatctaanaactaagctcacctccttgagaaacttccttgagaagctagaagctagctacacanccctataatagctaagctcacccncatgacaaanaaacatganaatacanaaaanatcctactacaaagactactcanaatgccctgaaatacaaggctaanaccctatactactagaatggccaaaatacaaggcccagacgaagganatacctattctaatatntacaaagataagcgggctcatacttagcccatgggctcgaaatctaccctaaggctcatgagaacnctanggtcttcctttggatctctagcccaatctacttggagtct

SEQ ID NO: 127 - DNA, 420 bp, Glycine max
  unsure at all n locations
agtacaataagctntatgttctaaatctactggaagatgacatcccttgccatgcaccatctagaatggggaaagactggtaggggtcttataggctattctatacacccacaaagcatcatccaatttagcaaaccaatctttactagaattctctttatctttgtaaatgagacttcaacttgaccatttttttgagggtggtaaggcgatgcaaccttctgtctgacattatagtgctccaatgccttctgtagttgcacattgcaaaaatgggaacccccattactgatgagaactctaggagtttccaacccacgaaaaatattcctcttcacaaaccgaatgactatttttgcatcacctttctgtgtggcaatggcttacacccattttgatagaaactctttaaatgacaca

SEQ ID NO: 128 - DNA, 390 bp, Glycine max
  unsure at all n locations
agcttgtagggttatagtctcacgattgtcacgtgctcatgcaacaattgttagccgtggctatacgagacatcttgccaaacaaagtcaggttcacgataacttgcctgtgctttttcttacatgctatgtgtagcaaagtgattgatccagtaatgtttgatgagttggaaaacgagaccgcaattatactatgccagttggagatgtattttccccctgctttctttgacatcatgattcacttgattgtgcatctggtcagagaaatcaaatgtcgcggtcctgtttatctacggcggatgtacccggctgagcgatacatgaacatcttatnagagtatacaaagaatctatatcatccgaaagcatctattgttgagaggtaca

SEQ ID NO: 129 - DNA, 349 bp, Glycine max
aagcttctatagaatgttcgttcctaatttctctacaattgcatcacctctcaatgagctggtgaagaacgatgtggcatttacctgaggtgaaaaacaagagctagcctttggtttgatcaaagaaaagcttactaaggcacatgttctaactcttcttgacttttctaaaacttttgagctacaatgagatgcctttggagcgggagttggagctgtattgatacaaggcgggcaccttatttcttatattagtgaaagacttcatagtgccaccctcaactaccccacctatgataaagagctatatgccttaataagagccctccaaacttgggaacattacctt

SEQ ID NO: 130 - DNA, 455 bp, Glycine max
ttataccatggatgaataacagcggctcagctacatcaaaaactaccaaaagaaacttagagttgacaagtattgcagcttacaaagttcattggatactggaacaaacaaaggctcgactaaaggaaaaagagtcattttaccttcaacctttgttgggagcccatgttacatggatcaactttattttgatggtatggcaatatgtggtcatgttggtttcctaaatctttttataactctaacatgttatccaaattgtcctaaaattcgtagattactttcacctttgaatcttaaaccaacagacaggccagacattgtctcatgaattttcagattgaaatatgaacaaatgctttctgacttaccaaagcatcagctgctcagaaaagttgttgttgcgcgtaagtttagaatgatctttgctgttgaacgtagaaatcaattgatca

SEQ ID NO: 131 - DNA, 381 bp, Glycine max
  unsure at all n locations
catcangaaacaatntcactttaaaagtgggtcccaattggattcctaagtttcaacttacctttttggaagtgacatcatggcagttaggtcccagctttccatcgtggattcagtcacaaaacaaacttcaatatgttggactgtctaacacggngattttagattctattcccacttggttctgggaaccacactctcaggttttgtatttaaacctctctcataatcatatccatggtgagcttgtgactacaataaaaaatccaatatctatccaaactgttgatctaagcacacatcacttatgtggtaaataccctatctatcanatgatgtgtatgggttaaacctttcgaccaattcattctctgaatccat

SEQ ID NO: 132 - DNA, 420 bp, Glycine max
  unsure at all n locations
gcttcttcttggttctctccccattngaaaccatcatttttcttgagcacttcattgagaggtgctgccaatgtgctaaaatccttcacaaatcgtctataaaaacttgctaagccatgaaaactcctcacctcggacacagacttaggtgtaggccattcttgaatagccctaaccttctgctgatcaacttgcactccttttgaactcacaacaaaaccaagaaacacaacatggttagtacaaaagatgcatttttcaagattggcatacaattgttcttttctaagcacagtcaagacagattttaaatgatcaatatgcaaatcaagtgaagtgctatagataagaatatcatcaaagtacaccacaactacactttctatgaactctctcaagatatggttcattaatctcatg

SEQ ID NO: 133 - DNA, 381 bp, Glycine max
  unsure at all n locations
ttataagtgcgggtctgggagacgaangtcaagtggtcgcgatatgtgaagatgatacgtgctcatgcaacaattgttagccatggctatacgagacatcttgccaaacaaagttaggttagcgataactcgcatgtgctntttcttccatgctatatgtagcaaagtcattgatcctatcaagtttgatgagttggaaaatgacgccgcaattatactgtgccagttggagatgtattttccccctgctntatttgacatcatgattcacttgattgtgatctggacagagaaatcaaatgttgtggtcctatttatctaccgaggatgtacccggttgagcgatacatgaagatcgtaaaagggtatacgaagaatcta

SEQ ID NO: 134 - DNA, 447 bp, Glycine max
  unsure at all n locations
ggaaggtttgtacatgaccaaatctttagttaatcgtctttacctanaacagtctttgtatttgtttaagatgcatgaagatagatcactaggagaacaattggatttgtttaataaactgattctagatcttgaaaatatcgatgtcactatatgatgatgaggatcaagctttgttattgttgtgctctttgcctaagggttactctaatttcaaagagactntattgtttggaagagactttgtttctcttgatgaagtgcaggctgctctgaattcaaaggaattgaatgaaagaaaggaaaataagtcctttacaagtggtgaagggctgacagcaagaggcaagaccttcatgacaaatagtaaatctgataagaagaagcanaagccagaaaaccagaagaatggtgaaggaaatgtcttcanaatcagaggtcatcact

SEQ ID NO: 135 - DNA, 429 bp, Glycine max
  unsure at all n locations
atgatttggattatcctctanggcaatcagtattcagtattttaaattccctctcaaaaaattgcaggcttggtggcggtgccacaaagctgccatatattataagaggcttagtagaggtgcaatagttacacaatgcagatggagggggcgcatagccaggaaagaacttatgaaactgaaaatggtatgttttaccatgattcttatacattaagtagatccttcagaaatagatgacaaaagatgtaacacgtccatcctacaaaacttatggcacaaaaagcaaaagatactatttgatcaatttttaattgtaaaattgagtttcaaattatagatatatacaaacaatattcatattttttgtttcattattatcttcatgaagggaaaaacaatagaagaacttanaattctcttctgatc

SEQ ID NO: 136 - DNA, 470 bp, Glycine max
  unsure at all n locations
acactcttaggatttgcctagtttacatttcttgcttacattcataatagcttatttcctttaccttccattgtcaaaccgcctagatagctttccttttaccaattagttntttaccttatctttcacacctcttttagtgtttatttggctagnttcaaccatagtttcttttaccttttgttntcaaacctccaacaagaaagaaccacaacttaggaaccaatatgagtcatcattcatctagtggtaatggcaagggtactagtcataaagaccctttatctagaatcttagatgagttgagttccctcacgttatggaaagaanaacaagagagaaaagaanaaggaagaataagagtggaagaaataaatcatgatgaaagaaagacaatatgagaggaagaaagaagaacaataatgaaagaaatgaanagagaaaaacatgcctnctatagtagtcataac

SEQ ID NO: 137 - DNA, 451 bp, Glycine max
  unsure at all n locations
ggcttctacaatctcccnctntttgatgatgacaaccctgatatcaagaaacacatgcacatactttttcctagtcgattactcacttaattctccatattctacccctttggttttgagtttaagcttcacttgaaattaagttaattacttatgtgagttcttgatttaatccctatttctctccccctttggcatcaacaaaaaaccaaagtgcgtaacaaatataaaacatacacaaataactaatcatacacaagacattcattgaaaaatctaaaccaatcatgaagcaagaaacatgaatagatcaaatatataaaaaccacatagtcatataacataattcatatttgttcagtcatactatgcaaataaaagaaatactaaatgttcaaatgtcataataatatagccaaatacacggctagaaatcaaagtactaataata

SEQ ID NO: 138 - DNA, 315 bp, Glycine max
  unsure at all n locations
gcttcttatccaggcaattcttgggggngaagctccttcttccttggcttattccctagnggatggtgcctcccctatcctcttctcctttgccttccgctgcatctccatgatgaaaaatcaccattgaaggacctcattgaagatcaaagatccagcctccatagaagctccacaagcaagcttccatcaagttatgaccatttgaatttctcgagatcttccgtggntcaatttcgggcgtctccatatgtcatgtgcctgaatcggacctccgtaatataatttatgaccattcgaacttctctagagctt

SEQ ID NO: 139 - DNA, 432 bp, Glycine max
  unsure at all n locations
agctntggagtttccaagtgccaattcgtcttcttctttagtccagtcttcttctggcttcaatccatcagtgggctttccttctgtgtccagcatcttgggatgttcccagcctttgatgacagctttccaggttctgctatccagtgatttgaggaaggccaccatccttgctttccagtattcatagntggttccatccagaattggtggtctgttcactggtcctccttctttctccatgttcatcagaatttatctccctaggtctcactcagtgatttcgagtgcctgctctgataccaattgaaattctgataccaatgccagatgtcgtacaggatgtcacgacatcacgcttcagaacatgcagattatctctgagtggatgaacacgataaacaagtatataacacaagagaattgtttacc

SEQ ID NO: 140 - DNA, 442 bp, Glycine max
gagctgaacacacatacctctataatagctaagcacacctccttgagaagagaagctagagcttatctacacaccccctataatagctaagctcacccccatgacaaaaaacatgaaaataacagagaaaagtccttattacaaagacaactcaacatgccccgaagtacaaggctaaaaccctatactactagaatggccaaaatacaaggcctagacgaaggaataacctattctaatatttacaaagataagcgggctcatacttagcccatgggctcgaaatctaccctaaggctcatgagaaccctaaggcctttccttggatctctagcccaatctacttggagtcttctagccaatgcccttgcggggtaagagtgcatcattacttttcactcagatgtgcgattcaggcacatcagatatcgagacgctcgaa

SEQ ID NO: 141 - DNA, 456 bp, Glycine max
  unsure at all n locations
aacccatggaagctcctaatatctcccacactttgntgggtgggccattcttggatggccttgattttctcaaggtccacttggaccccatttctaccaactacaaaacctaagaagactatattatctacacaaaaggtacacttctctatatttgcatagagggtgtttttcctaaggactgaaagaacttgcctgagatgttctaagtgatcatctaggctcctactgtacactaaaatatcatcaaaataaacaactacaaatctacctatgaaatccattaagacatgatgcataagcctcataaaggtgcttggtgtgttagtgaagcccaaaagcatcactatccattcatacacaccatacttggtcttgaaagcgcgttccactcatcactctttttcatcctggattcgtgataaccacttttaagatcatattttgaagagatat

SEQ ID NO: 142 - DNA, 193 bp, Glycine max
  unsure at all n locations
atcagaccacttccagngtgctggaactacttcacactgatttgatggngcctattctagttgaaagccttggaggaaagaggtatgcctatgtcgatgaggatgatatcttcagaattacctgagtcaactttatcagagaaaaatcagacacctttgaagctttaattgagttgattcttatactttaaag

SEQ ID NO: 143 - DNA, 281 bp, Glycine max
tcacacttacaaaggatatatgggtccatgagggacctcgggctttctacagagggcttgttccatctcttcttggtatgattccttatgcagggattgatctcactgcatatgacaccttgaaagatctatccaagagatatattctttatgacagtggtatggtattactgcaaccacattatctcttgaacttaatggatttattttaccactctgaaatttttagtgacacataacacatgtaaactcaacctttgaacttaaatatgtaatttttt

SEQ ID NO: 144 - DNA, 115 bp, Glycine max
ctataaatctaagcttaacatcagacccctccaggtgtctgaactacttcacatttatttgatggtgcctatgcaggttgaaagccttggatgatagaggtatgcctatgttgtt

SEQ ID NO: 145 - DNA, 405 bp, Glycine max
  unsure at all n locations
agctncacggcacgactgttaggattaatgcaatgattgctgaactacaagctctacagtcgaatgagacctggaggctcactcttcttcctccacagaaaaccgccattggctgcaggtggatttacaagatcaagtatcgcgctgatggctcgattgaaagatataaagcacgtntagtggcatagggctacacgcagatggagggtcttgattatcttgatacgttctctcctgtagcatagttgactaccggtcgtcttcttcttgcccttgctgccgtgaatcaatggcatctgcggcaactggacgttaataatgctttcctccacagacaacttgatgaagaagtttatatgcaggttccaccgggattgaccgtttcacatcctcaactggtatgtc

SEQ ID NO: 146 - DNA, 377 bp, Glycine max
  unsure at all n locations
ggccgccacggagttntccgactatgctcttgtgtggtggaacaagctacaaaaggagagagcaagaaatgaagagccaatggttgatacatggacagagatgaaaaagatcatgaggaagcggtatgtgccggctagttactcaagggacttgaaattcaagctccaaaaactaacccaaggcaacaagggggttgaggagtatttcaaggaaatggatgtgctcatgattcaagcaaatattgaagaagatgaggaggtaactatggctcgatttcttaatggtttgactaatgatatccgtgatattgttgagctgcaggagtttgttgaaatggatgatttgcttcccaaagcaatccaagtggagcaacaat

SEQ ID NO: 147 - DNA, 451 bp, Glycine max
atcctcttagtcacctgccgcatgcaagcttgaaattgacaacggaagctctccagaatctcatatggtgataacttatcacacgaaagtctgattcaggcgcatagtatatctagaccctcgaaattaaacaacgaaagctatcgagaaactcatatggtcataaattgtcacacggaagtccgattcatgcgcataatatatcgagaaggttggatttgaaccaccaatgctctcgagaaattcagatggtcataacttttcaaacagaagtccgatatatgcgcataatatatcgagaacgttgaaattgaaccacgaatgctctcgagaaattcaaattgtcataactcgtcacacgaaagtccgattcaagcgcatactatatctacacgctctgaacttgacaacgaaagctctccagaaattcatatggccataacttgtcaca

SEQ ID NO: 148 - DNA, 361 bp, Glycine max
  unsure at all n locations
agctttgatatggaaattaagttganagtaaatgatggtatgtataagacatcaatcagtgtaatgaatgcagaaagttgtactgcgcctgagtgggtagcatagacaagatggccatttggtaatctaaccgtgatgggattaatttgatgatatgagtgaaagtttgttaaggaggaggaaacgtgatcagtggctcctgaatctaatatccaggaggtagagtttgctttttcgtaagataggattatacctgttgcatcgttattggaacaagataaaatggaagcgacctgtggtttggtggatgctgagtttccagcagatggctgttgtattaatgctagccatgccttgtact

SEQ ID NO: 149 - DNA, 501 bp, Glycine max
  unsure at all n locations
agtcacctgcggcatgcaagcttctggttgctgcgatgatcgaccagaactgttccctgaactcatccaagtcctcaaaggcttgagactcacagcagttaaagctgacatagccagtgttggtggcagaatcaaaagcatattggtgctttgttctaaggatagagaagacagtgtttgccttgccactctcaaacagtccctcaaatctgctgtcaccaaaattgcttcatcatccatggcttctagntgtcccgctagaagtaagaggcagagattcttcttgccttctcactgcctacagttaattatttattgcaaanaatatttttttccccactattcattgcagtatggggcaattatttgctctattntcaatatatatatatatatatatagactccccattaggaagataaaatcatgaaatattagttctgtgcaaccaattaaggcatagttaaattganaggaaaggacgcacagcatagtatgagt

SEQ ID NO: 150 - DNA, 412 bp, Glycine max
  unsure at all n locations
agtctcacgattgtcacgtgctcatgcaacatttgttagccgtggctatatgagacatcttgccaaacaaagtcaggttaacgataactcgcctgtgctttttcttccatgctatatgtagcaaagtcattgatccagtcatgtttgatgatttggaaaatgaggccgcaattatactgtgccagttggagatgtattttccccctgctttctttgacatcatgactcacttgattgtgcatctggtcagagaaatcaaatgttgtggtcctgtttatctacggtggatgtacccggttgagcgatacatgaagatcttaaaagggtatacaaagaatctatatcgttcagaaacatctanttgtgagaggtacattgcagaagaagccattgaattttgttcagaatactt

SEQ ID NO: 151 - DNA, 483 bp, Glycine max
  unsure at all n locations
gcttcacacttgataatggagacacatgaacagtgctatgtaatgacattcatggtgctccaaacaaaggtggagtatggaggattgccttgagggtccgcacttaggcaatcatgaaactcaactccaaactcgaaagtggaggacacatgaacagccctaagcaataacattcatgtggctccggaataggatgagaatggaggattgccttgagggtcctctcttaagcaatcatggaacacaactccaaactcgaaagtggaggacacatgaacagccctaagcaataacattcatgtggctccgaagcangatgagaatggaggattgcctcgagggtcctctcttatgaaatcatgaaactcaactccacactcgaaagtggagaacacatgaacagccctaagcaataacattcatgtggctctggaacaggatgagaatggaggaatgcctngagggtccctcttaagctatcat

SEQ ID NO: 152 - DNA, 479 bp, Glycine max
  unsure at all n locations
agctngaacacctattagtatttatatttcttaaataataaatgtatgacatcaactcgtcattggctcccaggttagtggattaagcaaaatagaccaatacaaactcacgggttaagtcacctaacccattgatccaaagtttacattgtcacctctacattagtgactntttgttgcctttgtttcctttaagctttntgtgtataaaaatatattttttcttgtgtgaaatatttgtttggaattcagttttaactatataataaaattgatggttaagtttaatatatatttaaacagtcttgatcatttgattatgaggacttggataaaatatatattcttcaaagttttgttaatataacttggtaaatataattctaattttataaactatganaaaatacaaaagttagatgaattcaagctcaacacaatagaacaagtaccaacanatactatcatacatttgacat

SEQ ID NO: 153 - DNA, 313 bp, Glycine max
tctcctaccactgccttacaatagtcatcaagcaatatgttggcagccttcacatctctatggattatctttggatcacactgctcatgaacgtatattagctcccttgctgctcctaaggcaatttgctttcttgtgccccagtccaacactggcttacctgcaaatatccatcactggtatatggatcagccactcaacttacatagcacatgcatgttcattctagttctggttacataaacttctctatatgcacctttgagaagaacataagaagttagaatcaatttatgtaccttagttattggag

SEQ ID NO: 154 - DNA, 402 bp, Glycine max
  unsure at all n locations
agctngcgaataattaacacagaatngtacaaaattcttatgatacatgatcaaatttatcaaaaaanataataatgacccctgaagctatcttggtgacagtgacaataagttgagccttgtgcagcaaaacttagtgttgagtgaaggatgacttgttgcttgtgaattgacttaaccagtttttgacagctttacctttggcaatgaagcagccattgttcttcctatcaaccttcaacggactccccattttgaccatcatcttctgaaccaacactctcaccggcgactctcctctgacactgctatgctttcccaacccacanaccaccgtaaattccgcaggaactccataattggaatcattcaaccttcttccatctcctcaaccaaagcaca

SEQ ID NO: 155 - DNA, 436 bp, Glycine max
  unsure at all n locations
tcttagatagcaacttgttntgtgctagtaatgcatcttgagaggaaagctccaggaagcttctttttgtgggaatatgagtccgatcacacaagatggcatgatcacttgcagccatgttctcaataagctccatggcttcttctggggtcttcaatttaatttttcccccagcagaagcatcaaataactgcttggactgtggccttaacccatctataaaaatgttgaactgaattggttctgaaaatccgtgagtcagtgttttccgcagcaagctatggaatcgttcaagtgcttcgcttagagactcatccagaaactggtgaaatgaaaagatggntgcttttccttctactgtcttagactcggngaaatatttcttcaaacatttctccaccaattcatcccatgtcttgagactgtntcccttaaa

SEQ ID NO: 156 - DNA, 455 bp, Glycine max
tctttgagaaaacttccttgagaagctagagcttagctacactcacccctctaataactaagctcacctccttgagaagccttcttgagaagattcctatagaagctagagcttaggtacacacacctctctaatagctaagctcacctccttgagatgaaaagctagagcttagctacacaacccctataatagctaagctcacccccatgacaaaatacatgaaaatacaaaaaattccctactacaaagactactcaaaatgtctcgaaatacaaggctaaaaccctatactactagaatggccaaaatacaaggcccaaacgaaggaaaaacctattctaatatttacaaagataagcgggctcatatttagcccatgggctcaaaatctaccctaaggctcatgagaaccctagggccttcccttggatctctggcccaatctacttgga

SEQ ID NO: 157 - DNA, 285 bp, Glycine max
gtataacccttcagtttcaatccagagtctccatatatgaggaatgggtctttagttcttcttaagtacttaagtatggtcttaactactttccaatgttcctcaccagggtttgcgtgatatcgactagttacacctagtgcataagcgacatcaggacgtgtacaagtcatggtgtacatgatagctcccactacactagcatatggtattctactcatgcgttctctttcttcaagagttgttggacaatgttccctactaagagttattgcaacgcctaca

SEQ ID NO: 158 - DNA, 460 bp, Glycine max
  unsure at all n locations
tactaaaaaagcccattattgtcgtatcttgctttcattgacaacctagnttntgttggtgaagctacaatggatcaagtagaaatgatgtttgaattccttaattacttgtattagatctgggcaagtaaacaacaaggacaagacgaaggtgttcttttataaaaacataggcgatatcatgagaatttagattaatggcaagttgggttttggtaggaccaatgacatcaacaagtatttaggagtcaatatcaatcatgggagggtttccaaaaaatccttgcatgggatcattgacaaagtctagaagtggctcagtgtttggaaaaagaggtcattttcctttacgaggaggttgacattaactaaggcagctctcaatgttcttccatcctacaccataagccatcgcacatcctttattcagctngtgatgagttagacanaatatgtcatg

SEQ ID NO: 159 - DNA, 408 bp, Glycine max
  unsure at all n locations
tcaacattcaatttcgagcgtctcgatatattacgagcctcaatcagacatgcgagtaaaaagttatggccctttgtattggatcagagcttcaacattcaatttcgagcgtctcgatatgttacaggacttcatcagacatcagagaaaaaagttatcgtccgttgagttggctcagagattcaacattcaatttcgagcgtctcgatatgttacgggactcaatcagacatccgagaaaaaagttattgtcgattgaattggctcagagcttcaacattcaatttcgagcgtctcgatatgttacgggactcaatcatacatccgagtaaaaagttattgtcgtttgaataggctcagagcttcancgttcaatttcgagcgtctcgatatgtacgggactcaatc

SEQ ID NO: 160 - DNA, 388 bp, Glycine max
aattctatcaatagaccttcaatctttaatggagagggttaccactactggaaaacccgaatgcaaattcttatcgaggcaattgatctaaatatctgggaagccattgaaatagggccttatatacccaccacagtagaaagagtttcaatagatggtagttcatcaagtgaaagcataaccatagaaaaacctagagatagatggtctgaagaggatagaaaacgagtacaatacaacctaaaagccaaaaacataataacatctgccctaggaatggatgaatatttcagagtttcaaattgcaagagtgctaaggaaatgtgggacactcttcgattaacacatgaaggaactacagatgttataagatctaggataaatgcac

SEQ ID NO: 161 - DNA, 392 bp, Glycine max
  unsure at all n locations
gtgttggatcgcatgcagaagagcctcgagcttgaggattggcacatggagccttctagaatgacactttacaggtttggcaacacgtcttctaactcggtctggtatgagttggcatattgtgaggccaacgggaggattaagaaaggtgatagggtttggcaaatggcgttcgggtccgggttcaagtgtaacactgctgtgtgggttgctttgaatacgatcgaaccagggtccatcaagagtccgtggagggatgagatacataattttcctgtcaaggctgatccacttccttgtgagagaacaaatgaatgaataatccaatcatgcacatttgggtttgggaatttctgangaaagtatgtggtctgaattgattattagtatta

SEQ ID NO: 162 - DNA, 324 bp, Glycine max
  unsure at all n locations
accacttccaggcgtgctggaactacttcacatggacttgatggngcctatgcaagttgaaagccttggaggaaagaggtatgcctatgttgttgtggatgatntctccagatttacctgtgtcaactttatcagagaaaaatcagacacctttgaagtattcaaggagttgagtctaacacttcanagagaaaaagactgtggcagagagtttgaaaacagcaggtttactgaattctgcacatctgaatgcatcactcatgagttttctgcagccattacaccacaacagaatggcctagttgagaggaaaaacaagacttt

SEQ ID NO: 163 - DNA, 393 bp, Glycine max
  unsure at all n locations
cagcttgtgcctttcatgtctggaatatgaatgtttatatagattcaaagaaccttatgtgctttgctgatggcttattcccgttccaaggcttcaatggtgtcttgtcttttacagacttagttggacatctgttgagtatgtaaacagcagtgtagactgcttcagcccagaatgtgttaggtagtcccttctccttgagccatcgatctaagccattntccataaattgcgcaattctttctctctgacacttcattttgttgaggagaatatgtgactataagttgtcgctcaatgcctncatcctcacaaaatctttcaaactcgcgagaggtgtactctttgccgtgatcacttcttagtacttttatctcgtttccactttgattt

SEQ ID NO: 164 - DNA, 461 bp, Glycine max
  unsure at all n locations
tataaggctntgagtgggaaatgatagtgagactcaacttgtataccaaccttgtgctacaacaattgtagcaagacctagtatccataatgagagaagaatttttgtttaaaaccttgcatcttgtatgaaagatgttctctctttaggtttgggttaggtcacaagattaacttgttggatcgagtggcctcagaacaattaagaagggggggttaaattaattattcttaaacctttactaattaaaaattactcttttaaggcttttactanattgttaagagaatgaggactagaagagaaacttaacagaaagtaaaagcagaaattaaatgcacaacggatagtaaaagagtagggaagaaggaaacaaacacacaagagttnttatactggttcggcaacaacccgtgcctacatccagtccccaagcgacctgcggtccttgagattctttc

SEQ ID NO: 165 - DNA, 431 bp, Glycine max
  unsure at all n locations
gagtttggagtgcacatttgaattacaaagatgtggagagccatgaaagaagcaaagcaactagtggaagggaatgagagggaacaatatgccaaagtatttgattatgcacatgaattgttgaggagcaatcctggatcaacagttaagatcaacacagtgccaagtccagaaggtccaccataatttcagaggctatgtatttgtcttcctggctgtaagaagtggtttgttgctggatgtagaccattcataggtctagatggatgtttcctaaagagtgcatttggaggaaacttgctctctactgttgggcttgatggcaataaccacatctttgttattgcttatgctgtggtggacattgagaacaaagacaattggaaatggtttctaacttctgtacatgaagatncttgggattatataca

SEQ ID NO: 166 - DNA, 406 bp, Glycine max
  unsure at all n locations
actttatacaagaatgaagctctgttaccacttgttagacaagtggcctcagatatcttaagaagggggggttgaattaagatattccaaactacttccccaattaaaaatctatttcactttttattcaagttataaattcccttaataatgaacttcttaaatattgattcaaataaaacaatttgaatatgaatataaaacaataataaacaaaggagattaagggaagagaaagtgcaaactcagatttatactggttcggccacacccttgtgcctacgtccagtccccaagcaacccgcttgagagtntcactatcttgtaaattccttttacaagttctaaacacacaaggacaatccttcctttatgtttagaattcctttacaacaagagacccacg

SEQ ID NO: 167 - DNA, 462 bp, Glycine max
  unsure at all n locations
ctcagcttgcagaatgtactctacttaattttgaagattgtttcaaggaagcatatatatattcatcaggaaaacatcatagtggaaggaaattgcagtgttgtgatccagaagatccttccacccaagcataaagatcctgggagtgtaacgattccttgttcaattggggaagtcaatgtgggaaaaactcttattgacctgngagccagtatcaatttgatgccactctccatgtgcaaaagattgggagagttggaaataatgcccactcgaatgactttacaattagctgaccgctccattaccaggccatatggagtaattgaagatgttttggttagagtaaaacattntatctttccggcatactttgtggtaatggatatctttgaagctactgacatccctgtaatattgggaaggccattcatgttgaccgcaagctgcatagttgatatg

SEQ ID NO: 168 - DNA, 442 bp, Glycine max
tctcacagataggacatgcatgatgccttttcacactatatccacttaaatttccatatgctggaaaatcattaatagtacaaaacaccattgcgtgtaatgtgaatgtctgctgcacatttgcatcccacacatctactccttcttcccacaatattttcaagtcttcgattaatggtgtaagatacacatcaatatcattccctggctgccttggacccgtgatcatcatacacaggataatgtatttacacaaaatgcacaactaggggggaagcttgtaaatcatcagtaaaacaggccacgaactatggttgctgcttaagttaccataaggattcattccatcagaagcaagagcaacccttaggttccttggctcgtccctaaactctggatacaaacaatcaattgtcttccattatggagaatcggtaggatg

SEQ ID NO: 169 - DNA, 262 bp, Glycine max
  unsure at all n locations
tactcagcttgctgattacatctncccctttctcaagcaaattcttcttgatatcatcaaaatcttcatgatcccgactcgttggtggaggatgcatgaatgacaatcaattcatggcgcttcgaataaaagtggagaatggaggatatgcgaatagcgctaggcaatcaatttgcggtctcccgactcgctggtggaggatgaatgaatgacaatctactcatggggctccgaataaaagttggaaatggaggatttgaga

SEQ ID NO: 170 - DNA, 405 bp, Glycine max
  unsure at all n locations
actcggatgtctgattgagtcccgtaatatatcgagacgctcgaaattgaatgttgaacctctgagccaattcaaacgacaacaactttttactcggatgtctgattgagtcccgcaatatatcgagacgctcggaattgaatgttgaagctttgagcaaattcaaacgacaataactttttactcggatgtctgattgagtcccgtaatatatcgagacgctcanaattgaatgttgaagctctgatccaattcaaacgacaataactttttactcggataattgattgagtcccgtaatataactagacgctcgaaattgaatgttgaagctctaagccaattcaaacgacaataactttttactcggatgtctgattgagttccgtcatatatcgagacgct

SEQ ID NO: 171 - DNA, 395 bp, Glycine max
cgagcgtctcgttatattataggactcagtcagacatccgagtaaaaagttattgacgtttgaatttgctcagagcttcaacattcaatttcgagcgtgttgctatattacggtactatatcagacatccgaataaaaagttattgtcgcttgaatttgctcagagcttcaacattcaatttcgagcgtctccatatattacgggactcaatcagacatccgagtaaaaagttattgtcgtttgaatttgctcaaagcttcaacattcaaattcgagcgtctcgctatattataggactcagtcagacatccgagaaaaaagttattgacgttggaatttgctcagagcttcaacattcaatttcgagcgtgtcgctatattacgggactatatc

SEQ ID NO: 172 - DNA, 447 bp, Glycine max
agatttgtgttgattatatatcccttaatatgttggcggtgccagacaaattcccaattccagtgattgagttactgggtgagttagggaaggctgttgttttttctaaacttgatttgaaatctgggtacagattttaaagatgccctcatacagaggttccaaccagcatccatggtaaactcatttgaatccttgttaacactcaaacaagatcaagctgttcacgaattcatgacacagtttgagaaatatgcaaggtctgtgaaggggttagatgagcagtatttgatgggaattttcatcaatgggctaaaagaagagatttctgctgaattatggttgtatgagcccaagaccttgtcagaagcaatgaacaaggcaggaaattaagaagaaatagaataactgatttattattgattataaagaaataagacaaacaat

SEQ ID NO: 173 - DNA, 333 bp, Glycine max
gaggcagcattatgcacaatttctaaaaactcttttattttttatctaaatggcaatcaaactgaagtgaacctttatgcctggacaccacctaaactgtttacatttgcttgatgttattatatggattgtttcactctccaggctgaggagaggcactgtgagaatctaggtcgacttttgtgcactgctaagctggttgcaaagcaagaaggtcctgatgatggcttcaggattgtaattaatgatggacgagacgggggtaagcattcttctccatgtcattgtagtaacattggccaatcagattttatttgattcataggttcttgc

SEQ ID NO: 174 - DNA, 392 bp, Glycine max
aacagaacaattatgacctctctagcaacagataaaccctggatggaggaatcaccctaatctcagatggtctagccctcaacaacaacaacagcagcctgctccttccttccaaaatgctgctggcccaagtagaccatacattcctccaccaatccaacaacaacaatagccccagaaatagccaacagttgaggctcctctgcaaccttccctcgaagaacttgtgaggaaatgaccatgcagaacatgcagtttcaacaagagaccagagcctccattcagagcttaaccaatcagatgggacaattgacaacacaattaaatcaacaacagtcccagaattctgaaaagctgcgttctcaatctgtcccaaatcccaaaaatgtcag

SEQ ID NO: 175 - DNA, 448 bp, Glycine max
cctgcacgcatgcaagctatacttcactgcttcaagtagcgcatgattgtcttccataggaaaaactttttctaaaggttactattacaccaagaagatactgtaccagatgggaatggagtatgaaaagattcatgctagcccaaatgattgtgtggaagaaatgtcttccaagattattttgatgatgccaaagaatcaagagtcaagcatgttccaaagaatcaagagtcaagccagtttcaagaatcatgatcaagatttatgattcgagaataatcatgatcaagattcaggtactgcatctagactcaagattcaagaatcaggagaagactcaatcaagataagtattacaagaattttttcacaacattgaatagtagaataatttttctaaaagaaaaatcttttaccaaagagttttactctcaggtaatcgattacc

SEQ ID NO: 176 - DNA, 467 bp, Glycine max
  unsure at all n locations
tgtcagcgtgtccaagaccgccacctctgtcattgtccttgctgcatgtcgaatttggaaatgcactcgtgccttagatttgaaaatacacttcacgctttagatctaaaaatgcactacacctcagattcataatgcatggccttgcacacaacagatttgtcgcgacaatctcccagagaaagtcccaatcggccttcttgttgtgcatcttgtcgtgattgatggtaatgccaacgacattggcgcaagagtgggttgtgatggtgcacatgggcctaccgacaccgtaacccacgtcgaggattctgttgtcgggcttggcctcgacactgtcaaggaggagtgtggaagacgtcggtgatggagctgctagaggtataagtaaatcggttatttcatcactttcatgacccaacccacaaaaggaaccttattntatttatnttggctctcctaattaatca

SEQ ID NO: 177 - DNA, 422 bp, Glycine max
  unsure at all n locations
agcttaacgaaaggcatgccaagtaggnggaattcctaaagctatttccttatgttatcaaacataaaaagggaaaaggtaatattgtagccgatactctttctcagcgtcatgcattactttctatgcttgaaacaaaattgattggtcttgaatgttcgaaaagcatgtatgatatggaagcaatgtcttccaaggttantttgatgatgccaaagaatcaagagttaagcaaagtttcaagcaaagattcaagattcaagaatcaagtttcaagtttcaagattcaagattcaagatttaagaatcaagattcaagaaaaatcaagatcaagattcaagaatcaagagaagactcaatcaagataagtactaaaaagtttttcacaacattgagtagcacatgaagttttctcataatc

SEQ ID NO: 178 - DNA, 476 bp, Glycine max
  unsure at all n locations
actcctcttatgtggagtggtgatggttgtttattccttttcattgngatagttgtatggattctggaacacaggataaatgatgagttcaggggtccacctaggcagcaaattataaccatgttgtggtcaattatttatttcattatcttactattgtacctagcataatagttgcacaccttttgcatattcaagctataaacgaaaactacaactagaagtagctttgctgtgggccatggaaaacaacattggcagcacctgtttgtttgttagcatcatatatacacaaggaggttatcatttgtcagtcatggtattggaaagattccaggatcatcatccataaggcattntgtagtcaagatatttgtgatgatagcttctcggttctcacaacatgaatttgctatattcaggaattctgttctgaagtatttatggaatatttgtttcagaaatttctaagatta

SEQ ID NO: 179 - DNA, 385 bp, Glycine max
tatgagcttataaattcagattaaaggagctgaatgctttggatgctggtagttctgacagaaatctgaatcaatcagaagtggagctcatgaagtctctgcaggagcaattgtggcatgctgctaatgcctatgaatctttgctgaggcaaaaggctatagtgaaatggttaaaggaaggggacaaaaattcagcttacttccacaagctgataaatcatagaagaagacataatgccattcaaggattgatcattgatggggaatgggttcacgaccctagtagggtcaaaactgaggctttcaatcatttcaaagatagaatttctgagcaagaatttaatagaccaaccctggatggtgtgcagctacctttcattggtca

SEQ ID NO: 180 - DNA, 425 bp, Glycine max
  unsure at all n locations
agcttgcttaagaccgtatattgatttctttaatttgcacaccatgtgttccttcccttcaactgagaatctcattggntggtccatataaacatcctcctctaaatcttcattcaaaaaggcagntttcacatccatctgatgtagctccaagtcataatgggctactaatgtcatgataattctgaaagaatcctttcatgagatgggtgaaaacttctctttataatcaatgccatctttctgagtaaatcccttatcaacaagtctagccttgtaacgttcaagggtgccatgagagtcatgtttagtcttgaagacccacttacaaccaactctcttacaaccctttggtaattctacaaggtcccaaacaccattatgttccatggaatctatcttttctttcatggcatttaaccact

SEQ ID NO: 181 - DNA, 350 bp, Glycine max
cagctgtagacactggctctccccacaagtacttgggcatactcttgcctttcaacatgcctcctaccatattcaatatggttctgtgttttctttctgcagctccattatgttgaggtgtgcttggaggagtcacttcatgaattatgccttcttgatcacaaaattcttgaaattctgcagaaacatattcaccaccaccatttgttctcaatatcttgatcaatgagccactttgcctttctgccatatttttgaactttcaaagacttcaaagacatcactcttccttcttattacggaaacccatactttcctagtccattcatcaataacggatatgaagtatc

SEQ ID NO: 182 - DNA, 221 bp, Glycine max
tctctacattgcatcaccttttaatgagctggtgaagaaaatgtggcatttacctggggtgaaaaacaagagcaagcctttgctttgctcataaaaaagcctactaaggcacctgttctagctcttcctgacttttctaaaacttttgagctagaatatgatgtctctggagtgtgagttgggagctgtatttgttacacaggtggcgccaccctatttgc

SEQ ID NO: 183 - DNA, 455 bp, Glycine max
  unsure at all n locations
taccctgatgaggatgtcccatatgttcttaatactggactgatccatntgcttccaaagtttcatggccttgcaggtgaagacccacacaagcatctgaaagaattccatattgtctgctccaccatgaaaccaccagatgtccaggaggatcacatatttctgaaggtctttcctcattctttagagggagtggcaaatgactggctatattaccttgctccaaggtccatcacgagctgggatgacctcaagagagtattcttagaaaaacaatttccctgcttccaggaccacagccatcagaaaagatatttcatgcattagacaactcagttgagagagcctatatgaatactgngagagaattaaaaaattatgtgttagttgccctcaccaccagatttcatagcaacttctcctccaaatattttatgaaggactcagcaacatgg

SEQ ID NO: 184 - DNA, 419 bp, Glycine max
  unsure at all n locations
cttgngaacattaccttgtttccaaggaatttgtcattcatagtgatcatgaatcacttaagtacattagagggcaaaacaagttaaacaaaaggcatgcaaaatgggtagagtacctagagcaattttcatatgttatcaaatacaaaaagggaaaaacaaacgtggtagttgatcccttctcttggagacacatattgttttactccctaagagctcanattntaggatttgataacattagggacttgtatgctttagatgaatatttctctcccatttatgagagttgtgggcaaaaggccccaganggattctaattggctgaggggtatttgttcanagagggaaaactttgcataccccaaggatccatcaggaaattacttgtgaaagagagccatgaatgtgggctcatg

SEQ ID NO: 185 - DNA, 261 bp, Glycine max
ctcacgctgtttcatgtaaacctcttcttcttatcaccattcacgaacgccgttttcacatccatttgatgcagctcaagatcaaaatgagctactaatgcccaaattactcgaagagagtctttcttatatacaggggaaaaggtctctctgtaatcgattccttctctttgagtgaatcctttagcaacaagtcttgccttatgtctctcaatgttggcttctgagtctttctttggtttgaagacccatctacattcg

SEQ ID NO: 186 - DNA, 354 bp, Glycine max
  unsure at all n locations
ctcagctcgtcttaccatccacaatcttacggtcagaccgaggtggcaaatcggatagtataacaatacttgagggccttcgtccatcgcaagccagcgttgtggggacgatttctgttgtgggcagaatggtcgtataatacttcgtgccattcgagtacgggattaactccgtttgaaatcaccttcgccgaaaaccaccagctatccctgaatacatangtggaacatcacaggtgtcataccctaatttcgtccggggaccatccgtttgttgggatgcgaccctcgtttgaccacttcgaggtacttggcacccatcgttaggcaatctgtgaagtttcgtgacatgct

SEQ ID NO: 187 - DNA, 416 bp, Glycine max
gtgtgattcctttctttttcttatcattctcctcatgttgattcagtctcattagttccatttcgtgttcctataactttccaaataaagttgcaagagacatgttagaaagatcccttgattctgtaatagttgttacctttggttgtcattccctacttaaacatcttagaactttattaataagatcctcattgggaaatatctttcctaatgatgcaagatgatttactatgtgtgtgaatctcttttgcatatcatgtatagtttcatttggattcattctaaacaattcatattcatgggttaaggtatttattctagaaccttttacatctattgttccttcatgggttacttgtaaggtatcccacatatcttttgcactcttgcaatttgatactctaaagtattca

SEQ ID NO: 188 - DNA, 471 bp, Glycine max
  unsure at all n locations
agctntgcatggatgccacacgtgaatcttctgtatcatccatcatttctttcattcacaaccccaacaagatgtagtacactagagttatgggcaaagcaatcagcatcccaaaaataacactgcattgggttaaagaagaagctccattggttaggattaaaagagaaagtaattgaatgaaaaggaaaaaggaatggaggggagagaaagttctaattgagccatataagaattagatttgaatactcacgctgtgctgagaatatcaggatgtacattatattccttagcaaagacaaatgggacaattccttggggaagagctgcctatatttttttgacattcagttgccaaacaaacaggacaagcaaacaaacaaacatgtcaactgcagtttcaaatccttggtgtacaatcacaaacatgatcattngaatcctcactactagtactaagatcttcaattt

SEQ ID NO: 189 - DNA, 412 bp, Glycine max
  unsure at all n locations
cttgacagctctatggaccatgctatcattcttcctgctagcttagtatttcttagcaccttcttgatggggtgatccttcttgacgatgatctaagggctctggaagtacggcttgaggcgttgagcagaggttatgagtgctagcgccactttctcgatcatttggtatctctttccaacatcatgaaggatgtgactgacaaagtagatgggtgtttggtactttccatcttcttggacaagggttgaactaatggctttttctgccactgaaaggtataggaatagggatgctccangcttangtcaacttataacaggtggtgttgcaatagttntctttatagctagganagcttgcttacaggcttcgtttcacaagaacgactcggttttcctgagtagcttat

SEQ ID NO: 190 - DNA, 408 bp, Glycine max
  unsure at all n locations
agcttgcttctacactaagaagcactctatattgagtgaatcaccaaagagagaacaaccaccaaaattgaggaccgttttgtaattntgtaatttacaatttacttaccttcatttctttcaagttttgtaacaaaaaggcctttcattggaagtgtgttgggagcctccaataagttaccaaacttccatttgtgtgtaataattctaggcaatttttccttaagatagtgagtgttttgttgggaaccttgaatgtggtcatccaaacactcttangatttgcctagtttacatttcttgcttactttcatagcttatttcctttaccttcccttttaaaaccacctagatagttttccttttaccaattagttnttttaccttatctttcacacctcttttagt

SEQ ID NO: 191 - DNA, 463 bp, Glycine max
  unsure at all n locations
gctttgatcaaagtgttcgagggggagcaagcaaagatagaggataactttcttcttgggaagtttgagctttttgggttcactacatcgccaagaggagttccacaaatcaatgttttatttgatgttgacgttgatggcatcgtagaattcattgctagagataaaatcatgaggatgaaaaaaaggatcatgatcgacaacaagtactggaggttgagtccctaagagatgaggagaatagtgagatatgcaaagaggtataaggcatangatgtggaggtaagggcaaacggaaggccagaacttgcttgagaattgtgcttttgaaatgatggacaaagtgaagaatcttaagaaattagtacccatagcaacaatgttattntttttagtttcattaacaattcagtaaaaaaaaataccgtgcgctaacttgaaatgcccnctgcacacatggata

SEQ ID NO: 192 - DNA, 383 bp, Glycine max
  unsure at all n locations
agcttagccctagaggggatggaccttttcatgttttggagaggatcaataacaatgcctataagttgggcctcctagaagagtatgcagttagcaccacttttaacatttctgatttaattacttttccaggtggagctaatattgaggaggaggaactaacaaatttgagatcaaatcctcttcaagggggaggggatgatgcaatcctccctaggaagggccagtcactagagacatgagcaagaggctccaagaggattgggctagagctggtgaagaaggccctanggttctcatgagcctcatggtagatttctgagcccatgggacaaggttgggtctaattatctttgtacatattaaactangatgtcattata

SEQ ID NO: 193 - DNA, 472 bp, Glycine max
  unsure at all n locations
agctatgtggcaagtacaaaggtcataaacgcgcccgttatattatcaggtcttgctttggtggccttaagcaagcttttattgctagtggaagtgaggattcacaggtatgaatcttcaatcatcattgatcaaaatgggaaaatattcgccagtgtaattttttataatttgcaaattgaaagccttgatgtttatatgtctctgttaaatgtgttttatttgctaagtttttatagctgtctcaataatttgttaaaataagttcaacatgcacttgatgcatgctatcgaggatcactaaaatattggcataaaagacccatgaaatggttctttgtggtctgatntactggacttgaatgaattgaactacacatcgctataatgttcaagagttcctggcttctgcaatattattctagtttatcttgataaaactaggaacatctcgattgataatgctggaagt

SEQ ID NO: 194 - DNA, 410 bp, Glycine max
  unsure at all n locations
tattccatattggggaatctaaaataacagacaattgattgtacaaaacaatgataggagtaaaatctagtaacatcataatttaaactcactgcaacggataaatgacaatcaccatactcaagagcctcatggataatgataagatcttcactaccctaatctaagaaaattagacgataaaacaatntatgtttggtgattacatagtggcactaatatgtaaatgcaaaaatgctgacctggccatgttcattgaaagtatcgagtccaacaattccaaggtcaagatctccagataacaattttcttgtgatgtatttgggcctctaaaaccaaactttgagtttggatagctgcaataatgcaagagaattggtttatggtcatgtagagatatagtacattga

SEQ ID NO: 195 - DNA, 331 bp, Glycine max
tccattgtcgaatttcgagcgtctcgatatatgatgcgcctaattctgacttccgagtgaagagttatgaccatttgaattactggcgagcttccgttgatcaatttcgagcatctccaaacattatgcgccttaatcggacatccgagtgaaaagttatgaccatttgaagttctcgagagcttccgttgttcaatttcgagagtctcgatatattatgtccgtgaatctgacattcatgagaaaagttatgaccacttgaatactcgagagctttcgttgtcgcatttcgagcgcctccgtatattattcgcattaatcggactttcta

SEQ ID NO: 196 - DNA, 300 bp, Glycine max
  unsure at all n locations
tttccatatgtcatcaaacataaaaaggggaaagggaatgtagtggctgatgcactgtctaggagacatgctttacttgctatgcttgaaactaagttggttggtctcgagtctttgaaagacatgtatgtgcatgatgtggactttgctgaaatttttgctgcatgtgaaaagttttctgaaaatggttactataggcataatggattcttggttaaagcaaataaattgtgtgtgcctaagtgttccattagagagttgcttgtgagtgaatcacatgaggnggggttgatgggacac

SEQ ID NO: 197 - DNA, 461 bp, Glycine max
  unsure at all n locations
tcaacatcagaccacttccagggtgctggaactacttcacatggacttgatggggcctatgcaagttgaaagccttggaggaaagaggtatgcctatgttgttgtggatgatttctccagatttacctgagtcaactttatcagagagaaatcagacacctttgaagtattcaaggagttgagtctaagacttcaaagagaaaaagactgtgtcatcaagagaatcatgagtgaccatggcagagagtttgataacagcaggtttactgaattctgcacatctgaaggcatcactcatgagttctctacagccattacaccacaacaaaatggcatagttgaaagggacaacaggactntgcaagaagctgctanggtcatgcttcatgccaaagaacttccctataatctctgggctgaagccatgaacacagcatgcttcatccacaacagagtcacac

SEQ ID NO: 198 - DNA, 402 bp, Glycine max
  unsure at all n locations
tatccncataagagtgcagaacagctggcgagtcagcattgattataggaggctaatccaggtaaccaaaanagatcattttcccctgccattcattgatcanatgcttgagcgcttggcaagtatgtctcattacaatnnttttatggttnttctggttatttacaaattcatattgctcctgaggatcaagaaaacaccacattcacctatccctttggcatttttgcctataggaggatgccctntggcctatgcaacgcctctggtaccttccaacggtgtatgcttagcattntcaatgattntttagagagttgcatagatgtgtntatggatgattntactgtttatggatcctcttntngatgcatgttggatagtctagatagagttcttaat

SEQ ID NO: 199 - DNA, 446 bp, Glycine max
agcttatgctgcaaacatctacaatagaccttctcaacctcaacaacaaaatcaggcacaacagaataactatgacctctccagcaacaggtacaatcccggatggaggaatcatcccaaccttagatggtcgaatccgtcacaacaacaaccttattttcaaaatgttgttggcccaagcagaccatatgttcctccaccattccagcaacaacaacaacaacaacatccccagaaacagcaaacagttgaggcccctccgcaaccttcccttgaagaacttgtgaggcaaatgactatgcaaaacatgcagttttaacaagagaccagagcctccattcagagcttaactaatcagatgggatagttggctacacagttaaatcaacaacagtcccagaattctgatagataccttctaatctgtcagaatcccaaaatgtgag

SEQ ID NO: 200 - DNA, 465 bp, Glycine max
  unsure at all n locations
cgtgcattcaatatcctgatgaggaggttccatatgtctcaagactggactaatacatttgctgtccaagtttcatggtcttgcaggtgaagatcctcataagcatcttaagaagttccatattgtctgttccaccatgaagccccctgatgtccacgaagatcatatctttctaaaggcttttcctcattctctggagggagtggcaaaagattggctgtactaccttgctcccaggtccattaccagctgggatgaccttaagagggtgttcttggggaaattcttccctacatctaggaccactgccatcaganaagacatttcaggcatcangcaacttagtggagagagcttgtatgagtattgngaaagattcaagaaattgtgtgcaagttgtccccaccaccagaattttgagcaactctttctgcaatatttctatganggacttancaacatgga

SEQ ID NO: 201 - DNA, 409 bp, Glycine max
  unsure at all n locations
tatgcattgtggaatttcaccagagagagcattgtttgaaacatctcaacttgttgatgctttcagcttaaccgacttcaaagggtaggctttccattgaacgagttgtgggacaagttcaataacaatgacaagtangaaagaccaatgacttgcaaaggaatagttccactaattctgttgtgtgaaaggtcaagggtattgtaaatttggcaattcccaacaccaggatgtatgcttccttccaacacattatttgacaagtcaagttgaaacaaaagactaaggttgccaatggataatggaatttctcctgacagtttgctcacatttaaattcaatgactgcatcttttggaacatgacaaaagaagcaggaatagtcccagtaatctgatggccaccaatat

SEQ ID NO: 202 - DNA, 393 bp, Glycine max
  unsure at all n locations
ctattacggacactatagatactcagctagaattgaacacggaagctctcaagaaattcanattgtcttatactttcacacggaacaccgattcaagctcataatatatcgagactctcgaaattgaacaacgaaagctctcgagaaattcaaatggtgaaaacttttcagacgaaagtcggattcagacgcataatatatcgagaagcttgaaattgatcaacggaagctctcgagaaattcaaatggtcataacttgtcacacggaagtccgattcaggcgcataatatatagagacgctggaaattgaacaacgaaagctctcgacaaattcaaatggtcataactattcacacggaagtctgattcaggcgcatactatatcgagactc

SEQ ID NO: 203 - DNA, 406 bp, Glycine max
ggctgcagcttctcgatatattatgcgccagaatcggacctcagtgtgataagttatgaccattttgaattttcgagagcttccattgttcaatttcaagcttctcgataaattatacgtctgaatcggactttcgtgtgataagttatgaccatttgaattcctcgagagcttccattgttcaatttcaaacttctcgatatattatacgtctgaatcggactttcgtgtgataagttatgaccatttgaatttctcgagagcatccattgtttaatttcaagcttcccgatatattatgcacatgcatcagactactgtgtgaaatgttatgaccattttaatttctcgagagcttccgttgttcaatttcgagcgtctcgatatattatgcgcctgaatcgga

SEQ ID NO: 204 - DNA, 328 bp, Glycine max
  unsure at all n locations
tctacttcataaccccttgaactacttcacattgatctatctggtccctctagaacaatgagtttgggtggtaattactatggcttagttatagtagatgattactcaaggctcatatggactttgttttaaccaaaaatgaagcttttggtggcttttaaaaacttgccaaggtgattcataatgaacaaggtctcaacattgtttcacttagaagtgatcatagaggtgaatntcaaaatgagtcttttgaaaactnttgtggagaaaatggaattcaccataatttntcttgcccaagaacaccccaacagaatggttttgtgga

SEQ ID NO: 205 - DNA, 455 bp, Glycine max
  unsure at all n locations
agcttctcacatctgactctctagttccaacgtggtgttttctcttgatgcacttcctccgatcaccttgaccaatggaatctccttccctcttaggtgctttgttcgcctatctttgatcctcaaaggcaatgttccatatgtcaagttcttcttcacttgtacgtcatccaatttgatcacacgagatggatcatggatatactcacgaagttgagacacatgaaagacaatgtgaaggttagaaagagacaggggtaatgcaatttggtatgcccacagtaccgactttttttagaatttggaaaggacagataaaatgaggtatgagttattgngatttcaatgctcgaccaactccagtccacaaagtgactctcaagaatacatgatcactaacctcgaactccaagtctttcctccttcttgtcctgatagctttctacctactctga

SEQ ID NO: 206 - DNA, 422 bp, Glycine max
  unsure at all n locations
tcacacttgataatggagaacacatgatcagcgctaggcaatgacattcatggtactccgaacaaaggtggagtatggaggattgccttgagggtccgcacttangcaatcatgaaactcagctccaaactcgaaagtggaggacacatgaacagccctaagcaataacattcatgtggctccagaaaaggatgagaatggaggattgccttgagggtcctctcttangcaatcatgaaacacaactccaaactcaaaagcggaggacacatgaacagccctaagcaataacattcatgtggctccgganaaggacaagaatggaggaatgccttgagggtcttctcttaagcaatcatggaacacagctccagactcgaaaatggaggacacatgaacagccctaaagcataacattcatg

SEQ ID NO: 207 - DNA, 397 bp, Glycine max
  unsure at all n locations
ngtanggttaaagtctcacgatagtcacgtgctcatgcaacagttgttagccatggctatacgagacatcttgccaaacaaagtcaggttagcgataactcacctgtgctttttcttccatgctatatgtagcaaagtcattgatcctgtcaagtttgatgagttggaaaatgaggccgcaattatactatgccagttggagatgtattttccccctgctttctttgacatcatgattcacttgattgtgcatctggtcagagaaatcaaatgttgtggtcctgtttatctatggtggatgtacccgattgagcgataaattgcanaagaagccattgaatttttttcagaatacttagagaatngctaaacctgtggccttctgagtctcgcatga

SEQ ID NO: 208 - DNA, 427 bp, Glycine max
  unsure at all n locations
ggtagagtccctntgtgtctctagcttcacacacatgtagnggaacatctatgnaaacctgcaacgtgtaagcattgcgttagctataatttatgaagaaccacttctagttctataattgtacaacatattagcatatgccaaactatgtgtatcatttggatcaccaaaataagaatattacctcaataaaatctccttttggcattagtgctctgcatgcatctctantcctttggtatggtgatattaaactagtgatgcaaataacaccagcatctgcaaagagtttagccacctcacctganaattntatatcgtgatgtctaattattaataaaacaataaaatataatcggaagatatcagggaaagcatttagaaagcaacataagaaaaaacagataaactcaccaatccttctaat

SEQ ID NO: 209 - DNA, 422 bp, Glycine max
  unsure at all n locations
agcttgtaacttatataatatatacattttattgtaattatattttaacacatcagaatggtgcgcccataacccacaggtcccaggatcgaaacctggttctgataaagagtggcttccgatctatcacatatatatatattttatgcgtaaaacatatatcattacgcaatgacatttgagtataataaaaaatagttctgcagggcctaacatttcagtgcttatattaatttagttaccatttaaattttattattgagtcaactttttaacgtatattcatattttctctttggtaattntattttaatttgcttaagtaaacatattttttatggataataatggcttccagtttcttagtgaaccacatctgaaaaattatacttgaacaagaagatgtgttcactatgtcatag

SEQ ID NO: 210 - DNA, 357 bp, Glycine max
  unsure at all n locations
tagatactcaagcccattcaaatgaaaggaattcataattaaaaagttgagaagggttcacngaagagaatntcaaaatgactctgaattgttttgtgaacaaaatggcattaatcgtaacttttccgctccaagaacaccacaacaaaatgggattgtggggaggaaaaaaaagtcccttgaggaacttgttagtgtttagctctactgagctntaaaagattggctaagatcttgttaaaacataagcacttagacaatgaatgaaagctggagttgctgcacatgatgtccaacgctatgtcaaggaataagatncggctgcacaatgcacaaggcaagataaaatgtcaaatg

SEQ ID NO: 211 - DNA, 384 bp, Glycine max
  unsure at all n locations
agcttgtcttctctagcctctnttgngcttttctacatttccttagtgacaagtcatctgcctagaagtttcttgtcttgacctggttgttgtgtctttctcatctgccatgcacttccatgtttaatttcgagtgtctcggtatattatgcgcctaaattggacatccgagtaaaaagttatggccatttgagtttgcctagaacttttgtgttcaattntgagcatcttgatatattattggcctgaatcggatatccaagtcaaaagtaatggccatttgaattttccttctgcttccatatataattntgagcgtctcgatatgctatgcacccgaatcggatattcgagtgaaaagttatgaccatttgaatttcttga

SEQ ID NO: 212 - DNA, 344 bp, Glycine max
  unsure at all n locations
tctggtgggacatcttgacttgctntccaatctgacattcaccacanattctgccttcttctattttcagaatgagaatgcctctaacaacacctttgtcaatgattttcttcatgcctcttaagtgcagatgtccaaatctttgatgccatattctgacttcatcttctttggaggatagacatgtggaggagtaactggtttcttgaggtgtccataggtagcagttgtcctttgatctgctgcccttcattagaacttcactcttctcatttgtcaccaagcattctgactttgtgaagtttacattgaatccttcatcacacagctgactgatgctgatc

SEQ ID NO: 213 - DNA, 355 bp, Glycine max
  unsure at all n locations
ttgaattgctttntggccttctggngtctccctgcctccaattaagactcgatccgggttgaaaagatcttggattgcagttccctcagcaaggaattcacggtttgaaaggatttggaacttgattccctttccattgtgagtcaaaatcttctctatggcctcagcagttttcacagggacagtggatttctccaccacaatcttgtcactcttgnagacatcagcaatcatgcgtgctgcactcttccagtaagtcaaatctgcaaccttgtcggcttcaagaccacgagttnttgncggcgtgtngacggagacgaacactatgtcagcctcatagacatgtttctcaaca

SEQ ID NO: 214 - DNA, 311 bp, Glycine max
  unsure at all n locations
tctgttgttcaatttcgagcgtctggatatattatgttccatattcanacatccgagtgaaaagttatgaccattagaatttctcgagagcttccgttgttcaatttcaagagtctagatgagttatgtacgcgaatcgaacatctgtgtgaaaagttatgaccattcaaatatcttgagtgcttccgttgtgcaatttcgagcatcttgatatattatgtcccacatttggacattcgtgtgaaaaggtatgaccattcgaatttctcgagagcttccattgtttaatttcgagagtctagatgagttat

SEQ ID NO: 215 - DNA, 415 bp, Glycine max
  unsure at all n locations
gtatatgacatgtcccacttgtactttntttttttatctaatttgcatcccacaaaattagaatctctggatcttgattcatccactgatttacctttctcatttaagtcaaggtaggttgatgtagccataagaatggacgcttctttgcattnttccataccaaatttttttattagttctatgcagtatttattttgaccgaggaaggttccatgtttcattttcttgacttggagtcctagaaagaaatttaattctcccatcatagatgtctcaaattcttttttgcatacaacatgaaaatcccttgcataaggtttcattagtatagccaaatataatatcatcaacatatatntgaacaattaacaaatcattgtttactttcataatntaacaaagtttgtcaact

SEQ ID NO: 216 - DNA, 305 bp, Glycine max
tatagatactcagcctcattggagcttgaggcctaggatcttcttatcaatggattctcttgcttcttggaagatgaatggaagcggaatggagaaagggagagagagaggagacgccacttcaaagagaagatgagtctagaagaagctcaccaccataggaggccatggataagagcttggaggaagaaggagatgaatgaagggagagggagagaagagcacgaacatttgtgctctacatgagctttgagatctgaagtttaatattcaaatgatcaaagttgaaaaaaatgcacacacat

SEQ ID NO: 217 - DNA, 396 bp, Glycine max
  unsure at all n locations
ntatcanatggatgtaaagagttcattcttatatggctntattcaagaggaagtatatgtagatcaacctcctagatttgagaattcagacaagcctaatcatgtttttaaattaaaaaaaaggctttatatggcttaaagcaagcccctagagcttggtatgagcgtctgagtaagttccttttagaaaaggatttctctagaggcaaggtagatactacccttttcataaatagaaaatcacatgacattntactggttcaaatttatgttgatgatattcattttagatctactaatgaattattatgcaaggaattctctcatgacatgcaaagtgagtttgaattgtcaatgatgggagaactctaattgtttcttggatacaaattaaac

SEQ ID NO: 218 - DNA, 325 bp, Glycine max
agtgtttcttttgcaagaagaagggacacatgaaaaagaattgccccgggttccacaaatggcttgagaagaaaggtgaatcaatctcattagtatgttatgaatctaatatgggtagtggtaatattaacacctggtggattgattctggatctactattcatattgcaaattctttacagggtatgcaaaacctaaggaaaccagtgggaagtgagcaaagcattttatcaggcaataagctaggctcacatgtggaggccattggaacttgcattttgactttaagtagtggctttattttaaaattagaaaggacttttta

SEQ ID NO: 219 - DNA, 289 bp, Glycine max
  unsure at all n locations
gcttatctttggttntacaaccaaagtccatgtgaaccttgagtaatcatctactataactaagccatagtaatttccacctaaactcagttctagagggaccaaataaatcaatgtgaaaaagttcaaggggttttgaagtagaaacaacatttttactttgaaaggagtttttaacttgctttcctttnttacaagcttcacacaatttatttttctcaaacttaagttntggaagaccaattactaagtctttcctaactagatgattaagatgatgcatatttat

SEQ ID NO: 220 - DNA, 460 bp, Glycine max
aagcacctgagctgcagctatgctgctatattacaatagaccttctttacctcagcagcaaaatcaaccacaacagcacaattatgacctcttcagcaacagatacaaccctggatggaggaatcaccctaatctcagatggtctagccctcagcaacaacaacagtagcctgctccttccttccaaaatgttgctagcccaagcaaaccatacattcctccaccaatccaacaacagcaacagccccagaaacagccaacagttgagacccctccacaaccttccctcagaagaacttgtgaggcaaatgactatgcagaacatgcagtgtcaacaagagaccagagccttcattcagagcttaaccaatcagatgggacaattggctacacaattgaatcaacaacagtgccaaaattctgacaagctgccttcttaagctgtccaaaatcccaaaaa

SEQ ID NO: 221 - DNA, 449 bp, Glycine max
agcttgtcatggtatatatatgtttcctaatagtctactctgtgttatataatacttagttaaatatattgtgtatactaaaagcaaatgcttaacattatacgtctttcgtactcaaggatataccaacattgaagggcggactgtcttgatgtagcgattttaacagcgatgacactatctttgttctatatattaactgtcatggagatggagctgtctttgtaaacaatctttgtcattatcagctgaaagatgaacatgttgttcgataggaaaataatgaaataccttatataaatgtattgtaaagttttaagaataaactgctcaaattgccagcagtttgtcgtagaatagtagtgcaaattcatgatgtaaatgtattagaatacagaataaacctatggtgccgttattaattgttatgagaacatcttgggtcttgc

SEQ ID NO: 222 - DNA, 447 bp, Glycine max
  unsure at all n locations
tgtaggccttgaatcttcttcatcaatggagtcctttgcttcttgaagataaattggaagcggaatggagaaggaggaaaggtgattagagatgccacttcaaggagaagatgagtcaagaacaagttcaccgccatatgaagatatggatataagagcttaaaggtacgagaagatgagtggagggagagggagagaaagggcacgacatttatgcctcagatgaggtatgaaatgtgaagtgtaatttctcanatgatcaaagttaaaaatatgcacacacaaggcctctatttatagtttaagtgtcatacaaaattggaggaaaatctgaatttctattcaaatttcacttgaatttgaatttgtggagccaaatttggagccaaaatttcactaattaggattgcatcatcccttccnctctgaaaatgaattgacctcaaa

SEQ ID NO: 223 - DNA, 440 bp, Glycine max
tcatcaaggatcttgttgaaatcatccaattgttcagtggttgttttttactctgtcatcttgaaggtgtacagtttttgcttcaagcatagccaatttgcaagggactttgtcatatacaatgactccagtttcaaccacattgaggttgttgtcttttctcttgcaacttctcttaaagctttatctccaaagcatagaatgattgcactgctggctctatcaatcatctctgatttctcctttgagcttagagattcagacatcctttcttctcctttaagagcttctgcacagccatgttgaatcaagattgcttccatcttgactctccataacccgaagtcattgtcccctgaaaacttctcaatatcgtattatgatgatcccatctttcttggtcttgatcttgtccccatagacggcgccacttgttgatt

SEQ ID NO: 224 - DNA, 407 bp, Glycine max
cgcatgataaatactgggacagtctcaaaccctgatgtatcagtttcagatccgtggagccaatgcgcagtgggacaagtagagtcgctaaaatcattggtcagactcctacctatgtgtgcctcgggcgtcttgatgatggcgtcccaaggctcattctctaccctgcaagcaactaccttggaccgaaagctatttggcaatttcaagatgcctgcagggtccttcaatcttatcatgatattgaccttatcaatagacattcccttgtatgaccgcataatggtacctctactagccaaatacaggggcttgccgaatggattctgtagtaaaactccaattgggattggattgctgtttgtatgcgcagctaaaggaacatcagctgtagttgaaactattag

SEQ ID NO: 225 - DNA, 410 bp, Glycine max
ctatattttcagtagatgaatatgaatccgcggccacctcatgtactcctctaaggacaatagcatcatttgttgcactgaattgttaggagttggaagccatcttctcaatcaaactcctagcctcagcacgggtcatatcaccaagagctcccccactagcagcattaatcatactcctctccatgttgctaagtccctcatagaaatattgaggaaggagttgctcagaaatctggcggtgagggcagcttgcacacaatttcttgaatctttaccagtactcatacgagctctctccactaagatgcctaatgcctgaaatgtcttttctgatggcagtggtcctacatgcaaggaataatttctgcaagaacactcttaacgtcgtccaagctgaaaatggacct

SEQ ID NO: 226 - DNA, 442 bp, Glycine max
agcatttacaatgattaagatatactctttcaagttttttggccataaattagtctgggatctcaatcaagtctcgagactcttgaaggtcaatggtctttaaactcacgaggttctgtaaaaaaaataaaaatacatcacattgaccataaatcattaaaataaaattcttagtatacattgaagctcatcatcctaggtgtggctcttgtgattgtgaatgagtttcattcgagtaagcaaaagactagttaccactttgtcttacgattctctaccctacctttgcaaatagaaagaaaaatgtagtatgtatattcacaatcatacctgaaccccatcccagagctttttgagcttgctacgaggcatggaaatctctacaagtcgttcagcgcagaagttatacggcaaagactcaagacaacattcatgccaatga

SEQ ID NO: 227 - DNA, 384 bp, Glycine max
tggatctgactgccctgctttatgtgatatacataattgggtataaagacgactagggcgcagtaactgacgtttgtttttatatccaaattgtataacctgtgataaatcatttaaagccattggtcctttattattcattatatgatcaattcttttaccacttctagattgtgagtatcaatgattattcatgatcacaaagcatatgccaaactcagatgatagtatatcaaattactatacttctgatcatgagggcgagccctggtgcatcggtaaagatgtgcctcggtgacttgttggtcatgggttcaaatccagaaacagcctctttgcatatgcatgggtaatgctgcgtacaacatccctaccccatacctt

SEQ ID NO: 228 - DNA, 436 bp, Glycine max
  unsure at all n locations
taagctccttcaactgcacaatgctcttaatatttgaagagtgtccttgtggaaccttcacccgacgaagacactgacaaaaacttatcttctccttcttggacaaagtatggcgggctgggggtaagtaaattatcttcccatcagaccttggatgcaaatgtgattgtatacccatatcagctaaatcttgacaggtattcaagccatccttcatcttgccttgaatgttcatgagcgttccaaccacactgatacaaacatttttctccacatgcataacatcaatacaatgtctaacgtcaagattacacctgttcggaagatcaaagataatggaccttttcttgcatatgcaactctgacttttatccttcttttgagtacttccaaatgcagtatntaagtgatgaacccgctgatatacctgctcacc

SEQ ID NO: 229 - DNA, 432 bp, Glycine max
agcttatgagcatgagggttagccttttcttgactataaaaataacgttgtttagttcccttgcttactcccataataccaggagccttgtgcatatcgctttttatacataagctaatgagtttctgttgtaacaaaagtgtttgcactacactatttgtcactacattcgcggtacgggctaaggctgattcatttatgcaggttgtcattggtcaagctgctgtgcacaggtgtaatgcaactgtcaacttccttgatgaaacaagaccttcatatcctgcaactgtaaataatggtgacttgcacaagctatctgttgatgtagctggcaatttgcttggcaccaataatgttaatattgacaagacacctatcatggccgctgaagactatgcattctatcaagaggtcatacctggctacttcatc

SEQ ID NO: 230 - DNA, 428 bp, Glycine max
  unsure at all n locations
ntccactcctttggaagatcattatttgcttgagtttcatagtcttgagaatcctcattgctttcatctcttttccttttagaatccctttcatgattatgtatctcttctaagaaatctgaaacatcatctaacacattctttcttggagaaataacattagactcatcaaaggaaacatgaatggattcttcaatattcatagttctcttattgtatattctatatgctttactatgcaaggaataaccaaggaagattccttcatttgccttggcatcaaactttcctaagttttcttttccattatttaatacaaaacatttgcaaccaaagacatgtaaatgtgaaatgtttggttttctaccattgaataattcgtaagggagtttctttaagatgggtcttattaaagccttatttaagat

SEQ ID NO: 231 - DNA, 422 bp, Glycine max
agcttcaacattcaatgtcaagcgtctcgatatattacgggactcaatcatacatccgagtaaatagttattgtcgtttgaattggctcagagcttcaacattcaatttcgagggtctcgatatattacgggactcaatccgacatccgagaaaaaaattattgtcgtttgaattggctcagaggttcaacattcaattatgagcgtctcgatatgttacgggactcaatcagacatccgagtaaaaagctattgtcattcgaattggctcagagattcaacattcaatttcgagggtctcgatatattacgggactcaatcagacatccgagtaaatagttattgtcgtttgaactggctcagaggttcaacattcaatttcgagcgtctcgttatattacgggactcaatcagacatccg

SEQ ID NO: 232 - DNA, 429 bp, Glycine max
  unsure at all n locations
tcaagaatcngatntcacagaatcaagattcaagaatgatcttttttcaagattcaatcaagcttcatgaatcaagattcaagagcaatcaagatcaagattcaggaatcaagaaaagactcaatcaagataagtactaaaagtttttcgtaacattgagtggcacaagaatttttcacaaaatctttaacgagagagttctactttctggtaatcgattaccgagagccaacattggttttcaaaactgatttacaaagcttgtaatcgattaccatgagcatgtaatcgattaccaatattgtaaaatgttagatttcaaatctcaagagtcacaactagtgataaaacattgtcaaatcattgtaaacttgtctaatcgattacacaatacttgtaatcgattaccagagtttctaaacggtttga

SEQ ID NO: 233 - DNA, 469 bp, Glycine max
  unsure at all n locations
ctaagctctgctgcaatattacaatagacctcctcaacctcagcagctaaatcaaccacggtagagcaattatgacctctccagcaacagatacaaccctggatggaggaatcaccctaacctcagatggtccagccctcagcaacaacagcagcagcctgctccttccttccaaaatgctactggcccaagcagaccatacattccttcaccaatctcacaacagcaacaacctcagaaacaaccaacagttgaggcccctccataaccttccctcgaagaacttgtgaggcaaatgactatgcagaacatgcagtttcagcaagagaccagagcctccattcagagcttaaccaatcagatgggacaatnggctacccaattgaatcaacaacagtcccagaattctgaatagctggccttctcaagctgtccaaaatcccaaatatgtcagtgccatatcattgag

SEQ ID NO: 234 - DNA, 414 bp, Glycine max
  unsure at all n locations
ttctacaatctcgagccttcanataaccctcctcaccttcttccgcatcattatcatcagtatgaggacgaatattacattcttctctatgccaaatttcagattgatctatccggttttcctcattgggctccacctcaatgctatccttttctgagctagcatggaccaccttatcttctgcacgtgcctttgtcttataaaccatttcagactcattaaaaataacatcatgacttataatgcatcttttgtgtcctggctctaaacaccacaatctgtaccccttaaaaccctgaggatatcctataaacatacacttgatagctctaggttccaatgtgtcttgccttatgtgagcataagcaacacatccaaacaccctacgtctatcattatttggaggatgccctg

SEQ ID NO: 235 - DNA, 425 bp, Glycine max
atactgcattgttgactaattgttgttgttgttatttacatctattttcagactcccaatttgcagattgagttttggggctgctttcttgctgaacaatgtttgttggactatgattgtataatatccttgtcttctatcgcggctgcgtctgttatatttcttttcaaacttattctggctctgaatgcatacttaaggaaatattatgttatggataatgatatacacatctctttaatggaacgatattacccgtgtttcaacgcatgtgttctcatgtgatgaattgatgattaactgttcgccaatataataaaattattgctctttactctaatatatataggtaacgacttaatgttgaagattagagaaggtgtatcccttctactccatcaccattaactatcagctaccttctt

SEQ ID NO: 236 - DNA, 438 bp, Glycine max
  unsure at all n locations
agctcgtagcctattcgaacaacaataactnttcactcggaagtctgattgagtcctgtaatatatcttgacgctcgaatagtaagaccgaagctcgtagcagattcgaacgacaataacatgtcactcggaagtcctattgagtcccgtaatatatcgagacgctcgaattttaaaaccgaagctcgtagcaaattcgaacgacaataacatttcactcggaagtcctattgagtcccgtaatatatcgagacgctcgaattttaaaaccgaagctctgagcatattcgaacgacaataacatttcactcggaagtccgattgagtcccgtaatatatcgagacgctcgaaatttaaaaccgaagctcgtagctaattcgaacgacaataacatttcactcggaagtgtgagtgagtcccgtaatatatcgagacgc

SEQ ID NO: 237 - DNA, 392 bp, Glycine max
  unsure at all n locations
gcattacattattactcatgcttctaaccatgtctaatattgttngatttctgcgttctgccacaccattttgatctggagaaccaagcatcttgtattgtgcaacactcccatgttcttgaagaaacttcgcaaatgaacctggtgcttgtccatcctctgtgtatctaccataggactccccacctttatgtgatctcacgatcttaatatgttttccacattgtgtcacatctgcatccttaaaaactttaaaggcatctaaagcttcattcttagaatgaagtaagtaaagacacatatatcgtgaataatcgtttataaaggatatgaatactctctgactagtggcattcatgtctgggcaaagtatgtctgtatgtatgatttct

SEQ ID NO: 238 - DNA, 424 bp, Glycine max
agctttaaaagtacccatttaccaacctcatagtctacttcacgccatttagtatcatcagtgcgtttcatcgtagcttgcgcttctaatagcttctgacgaatgcaaagaaaaacttcctcacagtgcttcagagtatcatccaccgcatctagtttggaggagctagtgatatagtctggaaaagagaaaggtttccgcccaaacgttatctcatacggcgtagagcccgtgcctgcgttccatgaagtattatgcgataattcgacccagggaaggaatctgccccaagtccccgaccggcggtgcaccatagcccgcaaatattgctctattactctgttcatgacttcactctgaccatcactctgtggatggtaggctgaactcattctaagccttgtaccactcaattaaaaaagct

SEQ ID NO: 239 - DNA, 376 bp, Glycine max
  unsure at all n locations
taagtcacctgcggcatgcaagcttctaaactttatacaagaatgaagctctgataccacttcttggacaagttgcctcagatatcttaagaagggggggttgaattaagatatcacagactattccccaattaaaaattctacttttaatttaatccaacaacccaagattccttttaaacaagaactcctagataataatgcaaattaatcttactaaatagaaataataagcaataaacaataaaggagtctaagggaagagaaaatgcaaactcagatntatactggttcggccacacccttgtgcctacgtccagtccccaagcaacccgctagagaggttcactatcttgcaaaatccctttacaagttc

SEQ ID NO: 240 - DNA, 441 bp, Glycine max
  unsure at all n locations
ccaacgctctgatcaagctctcccataatctanangtaaatctacgatctctatcagatactatgctagattgcacaccatgtaacctgacaacctcacttatatacgaggaggtcaacttttccatggaaaatctgatattaatgggaatgaattgagcaaacttattcaatctatcaacaataacccatatagaatctaaacctctaagggttctatgtagtcctaccacaaaattcatggaaatgctgtcccacttccactatggtatctctaaaggttgcaacttacctgaaggtctctgatgttatatcttatccttctgacagactangcatgcatacacaaactcactaacctctctctttatgtatagccaccaaaacatcgtctttaaatcatgatacatctgtggagcaccatcatcaatgctcaaattac

SEQ ID NO: 241 - DNA, 471 bp, Glycine max
  unsure at all n locations
tgtaacaatattntattgaaagtgagagtattaatagaagataaaaagttatcgattataaatttatagataaaattgaaaaacaactatgtagcttctaatttataagttatatgacatattttaagttagtagcattagcatgtggttgtaggtttttaaaatatgttaaaattccattttagtctcacaaatttaaaatatcttgttctggtctattgtttctagaaataatatagctaacaaaaaaaatacttttaaataatcatattttagtttttaattaattatgaactcttataattttttaaaaaataaattttattaaaatataaataaattatgtaaataatggaataattaaaatgaacagtataatattaaaattatttctaaataaaaatagtattatattataggagacaatatattagagttcttaataagtactttagtcatataatctatcca

SEQ ID NO: 242 - DNA, 451 bp, Glycine max
  unsure at all n locations
agcttcacacaatnntattttttttatcaaacttgagttntggaaaaccaattactaagactttcctaactagatgatttaaatgatgcatgttaatatgtgcagccctatgatgccacaatcatgaatcatctatcttactcaccaagcaacttagctcatgaaaagatacatgttcaacattcaacatatagatattacctattctcttactgatctggacaactttaccggatatggcttcacttataagacatcaatttctattgaactctattttgaaccctttatcacaaagttgactaatgcttagaagttatgctttagtccatccacatataacacattcttaatctgagttntatgttgattccctatatcatgagaaatcatatttttccttttgtggtnngtctcaacatgaccatagtttggacttgtcacacgtcat

SEQ ID NO: 243 - DNA, 379 bp, Glycine max
agtcaactgacgctgccgcttcattgttcaatttgagcgtctagatatatcatgcgcctgaatctgacattccagcgagaaggatgaccatttctattactcgagagctcttgtggttcaatttccaccgtctccttgagggaggtgcttgacctccacgtccgagtgaaaaaggatgaccattcttatttttcgagagcttccgttgttttatttccagcggctctatatccgatgcgcctgaattggacatccgagtgaaaatttataatcattaagatttctcgagagcttccgcactttcaattcgagcgtctcgatatattatgcacctgaatcggacactcgagtgataaattatgaccattttaatttctct

SEQ ID NO: 244 - DNA, 313 bp, Glycine max
tattcaacaatgacaaatcacataacataattttaagattctgagcctcactagtagcagtatctaaagcaataatttctgcttccatggtagaatgtgaaataatagtttgttcagcagatttccatgatattacaccaccagctaaagtaaagacataatcacttgtcgattatgtttcatcagaatcaaaaatccaatttgcatcactaaacccctcaattacttcctaatctaccaactacatatgctatgacatgcctatagagagttgtcaattgcatcaaagaaccactaatttgataatattgtg

SEQ ID NO: 245 - DNA, 471 bp, Glycine max
ggaaattaaacaatggaagcactcgagatattcaaatggtcataacttatcacacggaggtctgattcatgcgcataatatatcgagacgctcgaaattgaacaacgaatgctctcgagaaattcaattggtcataacttgtcacacggaagtccaattctggcgcatcacatatcgagacgctgtaaattgaacaccggaagctctcgagaaattcatatggtcataacttatcacacagaggtttgatttaggcgcataatatatcgagacgctcgaaattgaacaacgaatgctctcgagaaattcaaatggtcataacttatcacacggaggtctgattcaggcgcataatatatcgagacgctcgaaattgaacaacgaatgctctcgagaaattcaaatggtcataacttgtcacacggatgtccaattctagcgcatcacatatcgagacgctgtaattgaaca

SEQ ID NO: 246 - DNA, 410 bp, Glycine max
  unsure at all n locations
agctntagcttccaactcaacaggtaggtgacaagaattgccatagaccaattggaaaggagtaagtcttgtaggagctatgtatgttgttctgcatgcccacaaagcttcatctagcttttgggaccaatccttccttgattgagcaactgttttttctaatattttcttaactttcctattagaaacttcagcttgcccatgtggtaaggcgaagctaccttgggtttgacactgtagtgttggaggactttggtgagttatacattacaaaaatgagatcctccgtcacttattagtaccctgggtgtgccaaaccttgagaagatattatttcttaggaagcaaataacaatttttgcatttgcatgntgtaccactactgattcaacccattttcttacatagtc

SEQ ID NO: 247 - DNA, 359 bp, Glycine max
tcggacatccgtgtgaaaagttacgaccgtaaggatatgtccagagctatcatagttgaatttcgagcgtctagacatagtatgcgcccgaatcggacatccgtgtgaaaagttatgacgatatgaatatctcaagagctttcgatggtgagtttcgagtgtatcgatatattataatacctgaatcggacctccgtgtgaaaagttatgactatatgcatttatcgagagtttccgatgtatagtttcgagcgtatcgatatattataagcctgaatcggacatccgtgtgaaaagttatgaccattagaatttctcaggagctttcgttgtgcagtttcgagcgtctcgatatatga

SEQ ID NO: 248 - DNA, 424 bp, Glycine max
  unsure at all n locations
tagatagatcaacgtanggttctttttccttcaaccttcattctacatnttttccttaaacaaagacatgcatgattttactattgtatttcttctccatctcttccattgaaaagtgcattttttgtactattttatttttctttcttccattgtatatatatatatatatatacctattgatttcttattgcagtcatgatttgagtttttagagcaaactctttgagtcgatggtgctactatcttcgaaaatccttctatgaatcttcgatagtatccaaccaatccaacaaaatgtgtaatctctatagctatcttatgggcgtttcactgcaaaattgtgtctaccttggaaggatccactacattgctacccaccaagatcacatgacctaagatccgtacctcatcaagtcaaaac

SEQ ID NO: 249 - DNA, 376 bp, Glycine max
gcaactaggatgttcggaagtatcaaagtaatctgggaatggaacattggaaagctataaagaaagttatgagatacttacaaggaacaaaagatcacatgcttacatataggaggtctaatcatcttaaggtgattgggtattcagactcatactttgttggatgtgtggttatgagaaaattcactcttggctatgtatttcttttagtcggaggagtaatatcatggaagagtgcaaagcaaccagttgttgttgttgcatctaccatggaagtagaatttgcagcatgttttgaggctacaagttaagctaattgactgcgaaactttatctcagggctctgaattgacttacgactgctaggcattgaaat

SEQ ID NO: 250 - DNA, 298 bp, Glycine max
atcctctttcgaaacttctagatgatatttaccctttactgatgctaaaaatagcggcgaggaacgtcgagaagcagatcccgtcggagccgtactgggcattcttgattctgtacacatcagtgacactagaataatatcgtctctgccgatctgtctgttcgctgctgtatatgtttgctagtcaagggatattttcattagaatcaaaatgtgctctcagcgttataacaggagagacgacaaatggatttggacaggacaacagaggcttgtgtgagagaaacgttagaacctt

SEQ ID NO: 251 - DNA, 132 bp, Glycine max
  unsure at all n locations
tcacanaagtttgtatggcttgaaacaagcaccgaggcagtggtacaagaagtttaatgagtttatgagcaactcaggattcaaaagatgtgacatgcaccattgctgctatgttaaaaaatatactaccac

SEQ ID NO: 252 - DNA, 470 bp, Glycine max
tgacactataaaactaagcttccataggttattccaagatcatgatgaagaccaagtcaacttgtgtctcatgacaaaatctcatgagaacaacaaagaagaatctgtaaggaagaagtggtacatcgacagtggatgttccaagcatatgacaggagatgtatccaaatttacaaccatttctcctaagaaaagtggacacgttacatatggcgacaacaacaaaggcaaaattattggagtcggtaaaataggtacgagttcttctactcctattgaaaatgttatacttgtacaaggtttgaagcatagcctattaagtgttagtcaattatgtgataaaggatataaagtatcttttgattctgaaaaatgtgttattaagaatgagcatgataaagatatcgaacatatatggttcagagaatataatgtctacatgattgatttataacaacaacctgatatga

SEQ ID NO: 253 - DNA, 433 bp, Glycine max
ctcatctatctccactatgttgcctaatgcctgaaatgttatttctgatggcagtgttcctaaatgtagggaagaatttctctaagaacacccgcttaaggtcatcccagctgaaaatatacctgcgagcaagggaatatagccaatcttttgcactccctccagagaatgaggaaaagcctttataaagatatgatcttcttggacgttatggggcttcatggtggaacatacaatatggaactccttaagatgtttatgaggatcttcacctgcaagaccgtgaaacttacgcagcaattgtattattccagtcttgagaacatatggaacaccctcattaggatattgaatgcacaagctttcataagtgaaatcaggtgcatccatctccctaagagttctttacgaggtggaggttgaccatgttctt

SEQ ID NO: 254 - DNA, 415 bp, Glycine max
agcgtctcaatatattattggcctgaatcagacatccgaatcaaaagttatggctgtttaactatgccatgtgcttccatgttcaattttgagcatctcgatatattatgcacctgaatcgggcatctgagtgaaaagttatgccatatgagttagccgagagcttcgttgttcgatttcgagcgtcatcgacatattattggcctgaatcggacatccgagtcaaaagtgatggcagtttaaactttacatgtgcttccatgtttaattttgagcatctcgatatattatgcacctgaatcggacatctgagagaaaagttatgccatatgagatagctgagagcattcgttgttcattttcgagcgactcgatatattatcggcctgaattggacatccgagtcaaaagttat

SEQ ID NO: 255 - DNA, 450 bp, Glycine max
  unsure at all n locations
gcttataatgtcttacgggaaataacccactaacacacacaagggccataagatcaagttaacatgcttaaaaaaacttcctttaatctttattatatatattaacataaattctttttttaatttcaagaaaacattttcacaatatataatacattttttaaaaaataaatatagaggtgttacactggtggttgggagcataggttgaggtggtagtttatgactanggtaataattctcctacaaatgagctatactattggaatatatatttctacaagacggttggaatatgttagagagattaaatgttacgttattgctataaggattggtttgatatcataaaaaattggtgtagtgaactttcatcgcatagtttaaagacatcacaactaaaactaacacgagtgttgtattaatgtcttaacatacgtcttaatcaat

SEQ ID NO: 256 - DNA, 400 bp, Glycine max
gaagaaattcatatggtcataactattcactcggatgtccgattcaggtgtatcacatatcaagacgctcgaaatttaacaacggaagctctcgataaattcaaattgtcataccttttcacacggaggtcctatttatgcgcttaatatatcgagaagctcgaaattgaacaacggaagctctcgggaaatcaacatggtcataacttatgactcagatgtccgattatgcgaatcatatatcgagaagctcgaaattgatcaatggaagctctcgagaattccaatggtcataacgtttaacatggaggtctgaccatgcgcataatataatgacacgcttgaaattgaacaacggaagctcttgagataaccaaatgagcattacttttcacacgga

SEQ ID NO: 257 - DNA, 463 bp, Glycine max
ctgtcttgacttatttatacccatacccctcaatattatactataatatctatatgtacactatgatattgttgagtctaattaataatcaaaatgttattgtgtattgcttgatttgtcacatgttattgatgtgaaatatttatcaactttagtgataagttaatgactaattgctattgacagagttggctaaccacatctatcagggtctattccgaactattatttttcatacacaagtagtggcaaagtcaaatatttttttaatggggtgaaaaaatagttataatattttcatagatgaaaaataatatgagttttattaaaatggtactaaaggaattagaaatggtaaaaattaaaaagggtaagtggataaaaatagtaccaatttatctattttcacttttaacttttataactttttatattcatcttttttttaagaaaattatcttat

SEQ ID NO: 258 - DNA, 351 bp, Glycine max
  unsure at all n locations
gcttnctagacgcctactntagatacaactagatcagaatgcatcctccacacgaggagaaaatggcattcatcattgaagatgccaacttttgctatagggtcatgccattcagcctaaaaaatgcaggcacaacataacaacaactaatggaccgagtcttcaaacaacagataggacaaaatgccgaggtatatatggacgacatgattgtcaagtctcaaactataccccaacatgtggtggacctggaagaagttttcggggaactacgaaaatacgacatgcgcctcaaccttgaaaaatgcactcttggggtaggcaaccacaagtccctcactacagcactgg

SEQ ID NO: 259 - DNA, 343 bp, Glycine max
  unsure at all n locations
aagtttgaatatgatgtataagaaaatgaatgtgaacctttctcccctttgaaagacttgtaaaaaaaatgttttaaaaatacttttaattaatatctgaattttttttccttattagtatatatgtgaggggtagagggtgtcacatcctgcagcaaataatgtgcaatatcataacccctaaactgtatatatcaactttggcaattattggtgcactttntagccattcaggtgccatgtaacctattgttccttttaaattagtggttgttctagtttggtctttgagtaatagcttggaaagccaaaaatctgcaatctttgttgtgtgattggcatc

SEQ ID NO: 260 - DNA, 473 bp, Glycine max
  unsure at all n locations
tattaactctatacaagagtgaagctctgataccacttgttagacaattggcctcaggtatcttaaaaaggggggtagaattaagatacacaagctgtcccccaattaaaatttaactgtctcttttattaacaatgcaatcctctattatgaattactctaagaacaattcaaaaacaaacttctttaaagcaaaatataaacaataataaataatagaaatttaagggaagagagactacgaactcagtttttatactggttcgaccacagcctgtgcctacgtccagtctgcatgcaacccgcttaagagttccactatcttgtaaaataccttttacaaagtctgaagcacacatgaacaacccttcccttgcgttcaaaaaccttacaacttaagagaacatcggtactttaatcaatctctttgagtgagaataagaagaagacttctctatntaggagaaagatat

SEQ ID NO: 261 - DNA, 413 bp, Glycine max
tatgctgcaaacatttacaatagacctcctcaacctcagcagcaaaatcaatcacagcagaacaattatgacctctccagcaacagatacaatcccggatggaggaatcaccctaatctcagatggtctagccctcaacaacaacaacaacagcctgctccttccttccaaaatgctgctggcccaagcagaccatacattcgttcaccaatccaacaacagcaacagccccagaaacaacaaacagttaaggctcctccgtaaccttccctcgaagaacttttgaggcaaatgactatgcaaaacatgcagtttcaaaaagagaccagagcctccattcagagcttaactaattagatgggacaattggctacacagttaaatcaacaacagtcccagaattctgacaagct

SEQ ID NO: 262 - DNA, 465 bp, Glycine max
  unsure at all n locations
ttcacctgtctntacataatcagagccatcaacagacttcataaacatggtaccagcttgagagttaatagaaaaattaatgatgcatctttgtttccgatcagtccatgcatcggacataatagtacaaccatacttgacccattgctccctatggcctttcatcaaatttttagtatattcaacttccttcttcaagagtggaactctgatgtcatgatagctaggaatgggcaaatgtggcccatattgaccaatggctgcaaccattttctcaaagcttttcaatataatgaggttgaatgacaaacttgcttggtaccaaaagcgagcaatatgttaatgcacctttcaatacttcattcttatccattgactctcttatgttcatttgcctcagcatctccatttttctccgattgattgcattttctggattcttacaaaattatgccattggtcctt

SEQ ID NO: 263 - DNA, 450 bp, Glycine max
  unsure at all n locations
agcttcttacatagtccgctnttgcttgttctttatgcttaanaatagaaacattaggcatagacaaaagatcaagatgagttagtaggttaaaaccataaacaacttcaaaaggagaacaattagtagtgctatgaacaactctattgtaagcaaactcaacatgtggtaaacaagcttcccaagtctttaagttcttcctcaaaactgtcctaagcaaagttcccaatgtcctattaacaacttctgtttgcctatcagtttgtgggtgacaagtgggtgaaaataacaatttagtgcccaacttgccccacaaagtcctgcaaaaatggcttaggaacttagagtccctatcactaacaatgctccttggcanaccatggagtctcacacntctcttgaaaacaaatcagccacatgggaagcatcatcaactcttttacatggaat

SEQ ID NO: 264 - DNA, 389 bp, Glycine max
gcttgagaatggagaattgcactaagcaatcactacgcatagctccaaactcgaaggtggaggacacatgaacgaaaacacaattcatggggctccgaaaaaggggttgagaatggagaattacactaagcaatcactacgcatagctccaaactcgaaggtggaggacacatgaacgataacgcaattcatggggctccgaaaagattgagaatggagaattgcactacgcaatcactacgcatagctccaaacgcgaaggtggaggacacatgaatgaacacgcaattcatggcgctccgaaaagattgagaatggagaattgcactaagcaatcactacgcatagctccaaactcgaaggtggaggacacatgaatgaaaacgcaa

SEQ ID NO: 265 - DNA, 435 bp, Glycine max
gctggcttgctggctcctgcttcaattggtgtggctcttgcttcaattgggtgcttactgactggttgcttccttcgctcaagtgtgtgcctttacccccttactcctagtaagtgtttttaaagtaaataaaatttatatatttttgttaataaatattataagtttaagttagctagtattaacacatattgtaagttagtttatatagtattgtgtagttattctaagctagtattaacaaaaatactaagtttaagttagttagtagtagtattgtgtagttattttttacgtattaatattaatagatataccaatggtaggttagttactatgaaaatattatttggttagttagaatgaaaattttatttagttattgcatgatctaactatatgtgtgatatatctatatatatctatatatatata

SEQ ID NO: 266 - DNA, 330 bp, Glycine max
ggctaacccatggaagctcctaatatctcccacactctttgtggtgggccattcttggatggccttgagtttctcacggtccacttggaccccatttctaccaactacaaaacctaagaaaactatattatctacacaaaaggtacacttctctatatttgcatagagggtgtttttcctaaggactgatagaacttgtctgagatgtcctaagtgaaaatctaggtctctactatacactaaaatatcatcttaatatacaactacaaatctacctatgagaatccttatgacatgatgcataagcctcatacaggtgcttggggcatt

SEQ ID NO: 267 - DNA, 444 bp, Glycine max
  unsure at all n locations
atgcaatgattatttaattcaatgtcatatttcttcataatataaaagctatataaacattgcttccttcatcaatttttcataaggtcacaaaatcacccaccactttgtctctaaatcttattagaaacttatattgtttcattcatcagcttttcataaaatcaaaaaattcctaccactctttctctcaatcttattgcaaaaagtaaattcactactataaaaattggtttttctagacatttaacatcggttatgaaccaatgttagaatgagtgccaataaaagatgaccattgttaacattggttataaaaatcaatgttgaaatctactatataagtatggttctcaccanaaccaatgtgatatactagcaaatagacaaaattatttaagaattaattctttntacttataatttatatcattctacatactt

SEQ ID NO: 268 - DNA, 422 bp, Glycine max
  unsure at all n locations
atctacttcaatacactgattggaaatgatgtggcctaaaactataccttgctcaaccataaaatgacattattcaaaattatgaacaacgttagtttcaatgcatctattcacaactttttccatactattcaaacaaccatcagaagaggatccatatacagtgaaatcatgcatatacacctctatgcaattttctaaaaaatcacttgaaatactaatcatgcaccactggaaggtaccaggggcattgcacaggccgaaaggcattctcctataggcaaaagtgtcgaacgggtangtgaatgtggacttttcctgatcctcacgagcaatagtaatttgcatataaccagaataaccatcaatgaaacagtagtgggatatagctgccaggcgttcaagcatctggacaatgaatg

SEQ ID NO: 269 - DNA, 400 bp, Glycine max
atgcattggttaacatggtaacccatctgtccttgaaccacaaatctgtacccgtcgcaagggtctgtgatctgtgctcctctgctgaccaccatacagacctttgcccttccatgcagcaacctggagcaattgagcatcccgaagcttatgctgcagacatttacagtagacctcctcagccttagcagctaaatcaaccacaatagaacaattatgacctctctatcaacagatacaaccctgaatggaggaatcaccctaatctcagatagtctagccctcaacaacaacaacagcagcttgctccttactttcaaaatgctgctggcccaagcagaccatacatttctccaccaatccaacaacagcaatagccccagatacagtcaacagttga

SEQ ID NO: 270 - DNA, 365 bp, Glycine max
  unsure at all n locations
tacttttgtcttgaaggcagttctataagcccataatgcatcatccaactngcttgaccaatcctttttagtggaggctacagttttctccaaaatcttctttggctccctgttagaaactctagcttgaccattcgtttgcgggtgatacgatgagactactctgtgcgtgacattgtaatggctcaccatcttctgaagttggttgttgcaaaaatgagagccccgatcactgattaggaccctcgacaccccaaagcaagcaaaaatattcttcttcaagaacctcactatacgttcagcatcgctctttgggcagccactgcttcaacccactggagacataatcacagcccaaggatatt

SEQ ID NO: 271 - DNA, 435 bp, Glycine max
  unsure at all n locations
gctggtgagggtganaatctcagctgggagctgcccagagaagaaattgtggctcatgttgagactagtgaggtttgtgaagatgatgaattgcttccctgaaaccacacctcccaatttcttcatggaaaggtctatggaagttacaattgttgagtcattgttacacttgatgccggaccaagaacatgcataggatttcccagttaattttcctccagagggcaccacccaattgtgcaagctgttgtcatcatctacaagctccgattttaggctgagaagtgcctctgagtaagggtcaattgctagaactgctgatgataccatgaagaaggtaacaagaataagatttttgatgtagaaagcattgaaaatctccattggaacttggagagcatcacaaggtagagagggacaatngtaagtacccta

SEQ ID NO: 272 - DNA, 431 bp, Glycine max
gagacaacttactcgagaagctagagcttagctacacacacccctctaataactaagctcacctccttgagaagcttccttgagaagattcctaaagaagctagagcttagctacacatacctctctaatagctaagcttacctccttgagatgagaagctagagcttagctacacaccccctataatagctaagctcaccccatgacagaaaacatgagaatacataaaaaaaagtccttactacaaagactacttaatagaatggccaaaatacaaggcccagacgaaagaataacctattctaatatttacaaagataatcgggctcatacttagcccatgggcttgaaatctaccctaaggctcatgagaaccctcgggccttcccttggatctctagcccaatctacttggagtcttctacccaat

SEQ ID NO: 273 - DNA, 447 bp, Glycine max
agctatggagaaccaagccaatcagaatgctatacgaaatatagatgggaatagaggtaacaatggtggtaatgacggaccgaggcagaaccgggttgagggagtaaagctcaatgttcctcccttcaaaggtagaagtgatccagatgcctacctggactgggaaatgaagactgagcacgtatttgcctgcaatgactacactgatgcgcagaaagtcaagctagcaacagctgaattctccgactatgcccttgtttggtggcataaataccaaagagaaatgttgagagaggaaaggcgagaggtagatacatggactgagatgaaaagggtgatgagacaaaggtatgtgcccactagctataacagaaccatgcgacagaaactccaagggctgtcccaaggggaattaaccgtggaagatattataaagagatggaaatg

SEQ ID NO: 274 - DNA, 476 bp, Glycine max
  unsure at all n locations
nggaacatataaaattcaatacaaggccctctcaaggatttattcaaaacatatgcaagttgattgtttgaactaacaaactcggtagaaatctaattggacagtagctttccctcataaaatgacaatcaatttttatgtgcttagttttatcatgaaacacttgattagaagcaatatgaaagtttgtctggttatcacaatacaatttcattggctaaatttcatagaattgtagttcttgaaggagatgtttgatccacaccgactcacatgtggttgtggccatggtcctatattcggcttttgcactacattgagcaacattaaactgtttcttactcttcctagagataagatttccaccaatggagacactatcttgtgttaaagagtctatctataggagaacctgtgcaatcaaaatcacaatacccaaagaattgcgcatctcatttatcttcatgatataacta

SEQ ID NO: 275 - DNA, 398 bp, Glycine max
agctctcttaagacgaatcctatttatgctagagcttagctacacatacctctttaatagctaagctcacctcctttagatgagaagctagagcttagctacacaccccctataatatctaagctgacccccatgacagataacatgataataaaacacaagtccttattacaaagacaactcaggatgccccgaaatacagggctgataccctatactactagaatggccaaaataccatgccttgacgaacgaaaaacctattctaatatttacaaagataagcgggctcatacttagcccatgggctcgaaagctaccctaaggctcatgagaaccctagggcctttccatggatctctaccccaatctacttggagtcttttaaccaatgccct

SEQ ID NO: 276 - DNA, 448 bp, Glycine max
  unsure at all n locations
agctngacgatgttganaagaaaatatgttgtcataattgaagaatgaacatgtagcttctaatgactctgaaatgtcctacattaatatataattgttatgctacaaattcacataattcttagtatgttacgttaaatttaattggcaaacgtgtataacttatggatatactattatgtcattaatacgaatacctagtacatttaacggttacctaatttaaaataatttgttaacattaaccctaatatttagaggaataaacagagaataaaaattataatccaaaataacttatcatttacaaaatgtgtgggaaaaccaatatgtttgcaaatacatgaaaattatatacatactcgacatatgaaaatataacatggatgatgtctatggctgatccgtgcgctgccttcttcgcgacttgacataaacattgccatct

SEQ ID NO: 277 - DNA, 441 bp, Glycine max
  unsure at all n locations
ttacggacctatgaaactcagctatgctgcnacattacaatagacctcctcaacctcagcagcaaaatcaaccacagcagaacaattatgacctctccagcaacagatacaaccctggatggaggaatcaccctaatcttagatggtctagccctcaacaacaacaacagcagcctgctccttccttccaaaatgctgctggcccaagcagaccatacattcctccaccaatccaacaacaacaacagccccagaaacagccaacagttgaggctcctccacaaccttccctctaagaactcgtgaggcaaatgacgatgcagaacatgcagtttcaacaagagaccagagcctccattcatagcttaaccaatcagatgggacaattagctacacaattgaatcaacaacagtcccagaattctgacatgctaccttctc

SEQ ID NO: 278 - DNA, 374 bp, Glycine max
agcttgtgctcgaggccttgacctcataattgtctcatcactgtgtttgatccattctgagagtttccagggcttctgccacttccatttaaactgtagcagccattgatgatgacttctcttccacttccaaagttttccggcttgtcctatagctgctagcctcttcgttgacaactctccaatgggtatcatctggatataaacccattaaaacttattgagaaataaacactatcatcatcatcatcagggaaatagaatctagcaaacatacctttcgtgcttcatctaaaaatgtagctgactccctgcctgaccaattaacaactccaggagtgaatttgagttgctctggtgcaggaagcgacatt

SEQ ID NO: 279 - DNA, 408 bp, Glycine max
agcccatgtgtcgttcctgtcatattggtgccaaagaatgatggaagctggaggatgtgctcacattgcagagctttcaacaacatcaccattaagtacaggcatctcattcccaagctagatgatcttcttgatgaattgtatggatcatgttacttctctaagatagatttgaaaagtggatataatcagattacgattagagaaggtgatgaatggaaaacaacttttataaccaagtatggcttatatgagtggaaggtaatgccatttggtttaacaaatgaccttagtactttcatgaggttaatgaatcatgttttgagagagttcttacgacaatatgtggttgtctactttgatgacattcttgtgtataccacaaatgtggatgagcatttgcaacat

SEQ ID NO: 280 - DNA, 479 bp, Glycine max
  unsure at all n locations
tagttggatganattccatgatcacaccttatagtaagtagataaacatcctanatcaggaagaacaagttgatctagctacctagaaatcaaatgtgtaatcctaacctatgaagtatgccagggatgtcctaccttctctcttacatattgcggcagagcaattgatgccaagttgcacacagccgtttctgttggacttgtatactcaattatctcagtgcacaagtttcatgacttgattgtgcccaaattctgttggttgcttttcctattgcaagtgtcctaggatatagaaaaatgaagaggtttcaatgaaaataaatacaaaatgcactgacagaaacttagcaaaagtcaaacaagcatttgtaaaccaccttataaaatatgtaaggagttccagtttctatctgtgacttcaaaatttcaaaccagagagattctgtgcctgaacaaccttctttgcttttccccat

SEQ ID NO: 281 - DNA, 436 bp, Glycine max
  unsure at all n locations
agctntgatgatgtcgagaagaaatcacatgtttgtcatcatcaaaaaggggagaatgtgattgtatgtatacatgattttgatggtgaagaatcaaaacaaggcttatttgcttcaagattaatacaagattgtttcaacaaacaaagccttgattcaagatttcttcaagatcaagccttacctcaaaacgaaaggtttcaagtcaaccaaggcacatgtaattgattaccaatacatgtaattgattaccaatggtttgaaagtgtgtaatcgattaccagagactttgaacgttgggaattcaaattttaaatgaagagttacaactattcaagaaaaataactatgtaatcgattacactaatgctgtaatcgattaccagagaggattntcaacgaatatcgccaacaatcacatcttatcatttggatt

SEQ ID NO: 282 - DNA, 455 bp, Glycine max
  unsure at all n locations
taacanaaggcatgcgaagtgggtggaattcctagagcaattcccttatgttatcaaacataaaaagggaaaaggtaatattgtagccgatgctctttctcggcgtcatgcattactttctatgcttgaaacaaaattgattggtcttgaatgtttgaaaagcatgtatgaaaatgatgaaacttttggagaaattcttaaaaattgtgaaaaattttcagaaaatggtttctttagacatgaaggctttcttttcaaagaaaacaaattgtgtgtgcctaaatgttctactagaaatttgcttgtttgtgaagcacatgaaggaggtttaatggggcattttggggtccaaaagactctagaaacattacaagaacatttttattggcctcatatgaaaaaggatgtgcagaaattttgtgaacattgcattgtatgtaaaaaggcanagtcta

SEQ ID NO: 283 - DNA, 458 bp, Glycine max
  unsure at all n locations
agcttganattgaacaacggaagctctccagatactcttatggtcataacttatcacacggaggtccaattgaggcgcataatatatcgagacgctcgaaattaaacaacgaatactctcgagaaattcaaatggtcgtaacttatcacacggaagtccgattcaggtgcataatacaccgagacgctcaaaattgaaccacgaatgttctcgagaaattcaaatggtcataaattttcaaacggcagtccgatttaggcgcataatacatcgagaatcttgaaattgaacaacggaagctatccagaaattcaaatggtcgttacttgtcacacggaagtccgattcaggcgcataatatatcgagacgctcgaaattgaanatcggaagctctcgaganattcaaatggtcgtaacttttcaaacggaaagtccgattaagcgcataatatatcga

SEQ ID NO: 284 - DNA, 431 bp, Glycine max
  unsure at all n locations
atatagagtttttgggtcatgctggattctattgatgattcattaaagacttttccaaaattgctaaaccactgagtaatctgatgaacaaggatgctgtgtttatgtttaatgatgaatgcttagaagcctttaatacccttaaagccaagttggtctctgctcctgtgattacagcactagactggggactagagtttgaattaatgtgtgatgcaagtgattatgcagtangtgctgtgctgggacagggaaagggcagaatttttcataccatctactatgccaggaaagtgttgaatgatgctcagatcaattatgccaccactgagaaagaattgttggcaatcgtttatgcacttgagaaattccgatcttatttggtggngtcaaagatagtaatttacactaatcatgcaacaattaaacat

SEQ ID NO: 285 - DNA, 465 bp, Glycine max
  unsure at all n locations
tagaaaggtctactcanatggatgtatgttaagttgataagtaaaaaaaaatgcaaaaagtagaanatgcaggatcatcacgtgcccattgattcttggtttctaatatcaaataattaataacaagaagaaattcaattaaataattttttgaaatcaccaaatttaatttcctaatttgataaatcaaaggcattaattatataactaaaccttaccatgaaaaattggcatcattatgtatccttctactcctattttaaattttattatattgaacttatatttttttagtcaacattgccaagatgtggatcaggtttggccttccaaagacaatatcaatgatttataataatttatcaaatcatttgatattttgatttataataatttaagacaatatcaatgatttatattaatttatacactctgatgaactanatcccttgacaaatagttaat

SEQ ID NO: 286 - DNA, 464 bp, Glycine max
atgttctgcaggaaacttgtgtcccttttaagtttatgactttcggtctagatttattttaaaaaattgcaatagttgtagtatggtaatatatgcttctcaccgaaccctctctggaatttgagactactctctctgtagtctttaagctatagttcttttgcctcttcaatttttgttataccctttttagctgttttttgatgcattatttgtagctgattattagatttgactgcttgtggacaataatttctagtccatattctttataaaaattgagaatgactctgatatgctttagctttttaaacaaacctttggccggcaccaaatactgttactttatatacttataactcaattgcaggtatagattggcatattcatcaaactatagccatatcttggatccgttaattgagaacaattaccaattattcatgatcgagaggcttataatg

SEQ ID NO: 287 - DNA, 397 bp, Glycine max
  unsure at all n locations
agcttgtgccttttcacgtctggaatatgaatgtagcatatagatccaaagacccttaggtgctttgctgatggcttcttcccgttccaagcttcaattggagtcttgtcttttacagacttagttggacatctgttgagtatgtaaacagcagtgtagactgcttcaacctagaatgtgttaggtagtcccttctccttgagcatcgatctagccatttccataactgtgcgattctttctctcggacactccattttgttgaggagaatatgcgattgtaagttttcgctcaatgctttcatcctcacaaaatctttcaaactcgcgagatgtgtactttntgttgcgatcacttcttagtacttttatccgttttccacttttgatttcagcaa

SEQ ID NO: 288 - DNA, 315 bp, Glycine max
tcattccttgtttcactcatgtgtccaagtctttgatggcatatggttgaattgttgacagccttagtaactgctaccatatactcatctgcaatcatgtaaagagatcctcgcttctttccacgagccacaatgagattgccttttgttaccttccaagctctatatccaaaagtggtgtaatgcccctcattatccaactaccctatagatgttagatttccctttaaggcaagaatatgtcaaacattgtacagtgtccatagggatccactagaggtcgtgatgtcaatatcacctcttccgacaatgtca

SEQ ID NO: 289 - DNA, 377 bp, Glycine max
  unsure at all n locations
ggactcatgttatctacaatcacttgttacgttgattcttaagaaagtcctctaagacaacaccccatatgccatgtctctcattnggtcccatgactcctatctgatgtccctgcatcaccaataatttaagtgcccaactaatggttccatgcatatccttatgtctatataaatattcaaggccgcaagcattgaggaccaacacaaatcattcacatcataaagtgtttgaaattaaaattctcaacacttctcttcaaccattctcttctcagatcaatacaacaatgggatttcgttacctggcatatataggcattcaaagcggtgacgcacctaaggctatcttgcagtctatgtcggagagaaattga

SEQ ID NO: 290 - DNA, 260 bp, Glycine max
aagatctttggatgccgtcagaaattttatgactatgagtgtgagtatttggtacttgtgaattcattactcttctatgtagaaatttattgatttacaccccttgcaaactcagcatttgttacacaaagcttaaaattcagagagaacgcaccttgtcctatgtattattaaattcgcttcacaaccccttgctaactcagcacgctgcaagccataatgcattcatgtgatatattgccgtgcgacaacaacaacat

SEQ ID NO: 291 - DNA, 374 bp, Glycine max
tggccccacatagagaatggccaaggtgtatccatgacgttcaaaggtatggtggagcattaacattatcagtgaaggcctgacacttatggcatttcctcacatggatgcaacaattgctctccatagtgagctagtaatacccagttctcagaattttctaggccatggcatgtccattggtatgcgttccaaaggatcctttatgcacctctactagaatttgctcagcccctttagcatccatacaccgaagtagtaccatgtcatggttattcttgtataggatattcccactcaggaagaagtcggtcgccaaccttcacaacattcttttatcgttgtcagaggcctcccgtgggcattccttgtct

SEQ ID NO: 292 - DNA, 380 bp, Glycine max
ttaactcggaggtccgattcaagcgcataatatatcgagacgctcgaaattaaccaacggaagctctcgagaaattcaaatggtcataacttttaactcggaggtccgattcatgcgcataatatatcgagacgctcgaaattgaacaacggaagctctcgagaaattcaaatggtcataacttttcacacggaggtctgattcaggcgcataatatatcgagaccctctaaatttaacaacggaagctctcgagaaataccaatggtcataacttttcactgggatgtccgattcaggcgcatcatacattgagacgctccagattgaacaacggaagctcttcagaaattcagatggtcataacttttcactcggatg

SEQ ID NO: 293 - DNA, 164 bp, Glycine max
  unsure at all n locations
gcgtctgtatatgtgatgcgcctgaatcggacatccgagtgaaaagttatgaccatttgaatttctcgagagctttcgatgtttaattntgagcgtctctatataatataagcctgaatctgacatcagtgtgaaaacttatgaccatantaacttctggagag

SEQ ID NO: 294 - DNA, 452 bp, Glycine max
tcaagaaaaagatggcctcagcaaattccttatttccagaatggaattctatcaatagacctccaatctttaatggagagggttaccactactggaaaacccgaatgcaaatttttatcgaggcaatagatctaaatatctgggaagccattgaaatagggccttatatacccaccacagtagaaagagtttcaatagatggtagttcatcaagtgaaagcataaccatagaaaaacctagagatagatggtctgaagaggatagaaaacgagtacaatacaacctataagccaaaaacataataacatctgccctaggaatggatgaatatttcagagtttcaaattgcaagagtgctaaggaaatgtgggacactcttcgattaacacatgaaggaactacagatgttaaaagatctaggataaatgcactaactcatgagtatgaatta

SEQ ID NO: 295 - DNA, 333 bp, Glycine max
  unsure at all n locations
ctaagcttatccaggggagacggaccatctcaagtgctngaaagaatcaatgacaatgcttacaaagttgagctgcccggtgagtataatgttagttccaccttcaatgtctctgatttatctctttttgatgcagatggagaatccgatttgaggacaaatccttctcaagagggagagaatgatgaggacatgaccaagagcaagggcaaggatccacttgaaggacttggaggacctatgacaagggctagagcaaggaaagccaatgaagctcttcaacaagtgctgtccatactatttgaatacaagcccaagtttcaaggagaaaag

SEQ ID NO: 296 - DNA, 441 bp, Glycine max
  unsure at all n locations
tgcttctatagatggtagggaccaagcaaggaaatattcacatccttcaagggtccactatgacaggatcaactatttcacaatatgagagccatgcgtccaatggctcatccaatgataattctctatggcatctgtgtctgggcccataagtgaaaacataataaaagttttgagcaagcgaggcttacttggaaaacataaggttgaacctcttcagttttgtgagcattatgtctaagggaagtaacataggacaaaatttctaaaggttgttcacactacaaagggcattttggactatgntccatttgactactggggggactttgagagttccatcactgagaggggaaaggtatttcctctncatcatcaatgnatactccacaatgacatgggtattcatgatgaagtagaaatctgaagcttaccaatttt

SEQ ID NO: 297 - DNA, 398 bp, Glycine max
  unsure at all n locations
agcagcaagaggtcttgcaaagattcatgcttagtacagtgcagccaaagtgcctcacgggaatgtgaaatcctccaacgtgcttctagacaagaacggtgttgcatgcatctccgattntgggttatcactcctattaaacccggttcacgccattgcccgattgggagggtacagggccccggagcaagaacagaacaagaggctatctcagcaggctgatgtgtatagtttcggagtattgttgttagaagttctcacaggaagagctccttcatcgcagtacccttcaccggctcgtccccgaatggaggtagagccggaacaggctgcggtggaccttcccaaatgggttcgctcggtggtgagagaagagtggactgcagaggtttttgatc

SEQ ID NO: 298 - DNA, 345 bp, Glycine max
gagtagtgtcccactggtaaaactaactttccaaatttttgccttcgcaggaaatggccccgaggaagcttgcctcaaagaggtccaggaaggacaaggcagccgaaggaactagttccgctccggagtatgacagtcaccgctttaggagcgctgtacaccagcagcgcttcgaggccatcaagggatggtcgtttctccgggagcgacgcgtccagctcagggacgacgagtatactgatttccaggaggaaatagctctacggagttttaaaagactggctaagaatttggtaaaacataagcacttagacaatgaaggaaagctggagttgctgacatgat

SEQ ID NO: 299 - DNA, 304 bp, Glycine max
atctaggtccttatatggatggagctcaaccttgtctctcacttacatattaagttcactaaggaacctagcaatacttgttctttcctccttcctaagtccagctctcaaaatgagtagttccatttgttgcctatactcttcaacactcacactcccttgtctaagcctttggagcttgtccataagctccctttcagagtaggaggggatgtgcctcttcctaagggcactattcaagacaatcctatacctactagaggatccccatgaatccttctttccctagtgatgcaatcctacc

SEQ ID NO: 300 - DNA, 166 bp, Glycine max
  unsure at all n locations
atgaagcaacaatgatgtaagctccattggagcttgtangcctaggatcttcttcatcaatggattcctttgcttcttggaagatgaatggcagcggaatggagaaaggaagagagagaggagacgccacttcaaggagaagatgagtctagaagaagctcaccac

SEQ ID NO: 301 - DNA, 400 bp, Glycine max
  unsure at all n locations
tcttagtctcacctgatgaattcatggctacttcatgcactcctctaatgacaatagcatcacttctgacactaaattgctgggagtttgaagccatcttctcaattaaatttctggcttcagcaggggtcatgtctccaagggctccaccactggcagcatctatcatacctctcttcatgttgctaagtccttcataaaaatattggagaagaagctgctctgaaatctggtggtaagggaaactagcacataatttctttaatctctcccagtattcatacaggctctctccacagagttgtctaatacctganatatcctttctgatggtcgtggtcctggaagcagggaaaaaaatatctaagaatactctcttgaggccattccagctcgtgat

SEQ ID NO: 302 - DNA, 349 bp, Glycine max
  unsure at all n locations
tgtgtcacgattcactgtgacagtcaaagtgccattcacttagcaaatcaccaaatgtaccatgagaggacaaagcacatagatgtaaaactacacttcatcagagatgtgattgaatctaagaaggtgaaggtggaaaaggtttcaacagaagaaaacccagctgatatgttcacaaagtccctctctagtgtcaagttcaagcactgtctgaacttgatcaatttcgaagatgcctaaagctgattggtagaagtgcagccctgaatcacaagatagacactngctaatttggagtcaaggtggagatttgtggtgtgtgactcanaatcacaattggcacaagtga

SEQ ID NO: 303 - DNA, 325 bp, Glycine max
  unsure at all n locations
ntactgaagaaagctaggggtgactcaccttgcattagtactatgcccatggccgtgccggaggcgtccgtttcgagtgtgaatggacgggaaaaatctggcagagctagcactggtgcctgtgtcatggcacgcttaagagagtcaaacgcaagttgagaatcctcgccccaatggaaattatccttctggaggagtgaagttaacagcgccgcaaaggcagcataatcacggatgaacttgcggtagaagtccgttaaacccaaaaaaccacgcacagattgggttgtcatgggtgtaggccaattcaccatagcttctatct

SEQ ID NO: 304 - DNA, 289 bp, Glycine max
  unsure at all n locations
gctacgctcttaactgacacgctcttaatattcgaagagtatccttgtggaaccttcacccgacgaagacactgacaaanacttatattattcttctttgacaaagtatggcaggatagggacaaagtaaatttcttcccatcagaccttggatgcaactgtgatcgtatacccatatcagctagatcttgacgggtattcaagccatccttcgtcttgccttgaatgttaaggagcgtcccaatcacactgtcacaaacatgtttcttcacatgcataacatcaatac

SEQ ID NO: 305 - DNA, 307 bp, Glycine max
  unsure at all n locations
tatcgagacgctcgtaattgaaaacagaagctctgagccaattcaaacgacaataacttttaactcgggtgtccgattgtgtcctgtagtatattgagacgctcgaaattgaaaacagaagctttgagcaaattcaaacgacaataacttttgactcggatgtccgattgtgtcccgtagtatatcgagacgctcgaaattgaaaactgaagctctgagaaaaatcaaacgacgataactttttactcggatgtccgatggagacccgtaatatatcgagacgctcgtanttgagaacagaagctct

SEQ ID NO: 306 - DNA, 273 bp, Glycine max
  unsure at all n locations
cacttgttgaatatgcttctttgctntccttgcgctagcccttgtcataggtcttccaagatcttcaagtggatccttgcccttgctcttggtcatgtcctcatcattctctccctcttgagaaggatttgtcctcatatcggattctccatctgcatcanaaatagataagtcagatacattgaaggtggtactaacattatacttatcgggtagctcaactntgtaagcatcattgcttctttcaagcacttgacatggtccatcttccct

SEQ ID NO: 307 - DNA, 435 bp, Glycine max
  unsure at all n locations
gcttanacattgagaagacagtatgagcttcttgctatggatgagactgaatcaatagctgagtatttcaccaagattctcacactcaccaataagatgaagtgttgtggagaacagattaaggaacaactggtggttgagaaggtgctcagaacactgacatcaaagtttgatcacattgtggtggccattgaagaatcaaaggatcttacatctttcaagcttgaagaactacaaagttcacttgaagcgcatgagcagagattaatagacaggaatcctgagaagcacaatgatcaagccttacaagctcaaacaggcataaagtttgacaagcaatgagacaaatccaaaaagaacaaaggatagtggtgtgatgagaagtggagaaagactgaagattccatatgtggtgattctggatcatcttcacag

SEQ ID NO: 308 - DNA, 352 bp, Glycine max
cggcgtttgtagaacctgttacatgaggtcttttaggctcttgtggtccgtgatgataatgaaggggtacccgaggaggtaatggcgccattttcgaactgccgaggtaatggcatgaagctcgtgaatgtaagtagatgcatgttgaaggcgtgggcagaacatcttactataaaaggcgattggatgtgatctctgttgaagaatggcacccatggcaatagcaaaggcatatgttttgaggacaaaaggcaatgagaaatccgacgaggccaacaccggagcctgagtcattacttccttatgacgaaggaaggagtgggtagcctcttcagaccattagaattgatct

SEQ ID NO: 309 - DNA, 431 bp, Glycine max
  unsure at all n locations
gcggtagagagattgagatgatattgtagtcttcattttactgtcaacatgcaagggacatttctctcgttttagacattgtttcacaaattccaacggtggagatgtgtgaaaatggattccaaagtcggtgtccaaattgcacaatgatccaacggttaacgagtccaggatcatagttttaatgagataggttttgggtctctacgagaaaagagaaagctagaatgcgaaggatatttctctcacctctgacgttntttggcaaatttcaacggtgagaatatttgaaagtgagttctaaacctggttctcaaatttcatgatgatccaacggttaacgagtctgagatcgttgttttactaagatatgtttgagtgtatgcganaaanagagaggaatttggaaagaggagaagggaaaacgaaat

SEQ ID NO: 310 - DNA, 354 bp, Glycine max
  unsure at all n locations
agaaccaaagaagagcaagttatattgagacatgaactttggttatgcgaaaaactttttggatgagaaaacatatatctggatatggtttataattctatacttaagacatttaaaatagaactgagggaatcaaacttaggtcaatttaattctagtttacgatatgtactcatggttaaattntattttagtgattttaatttaatctttataaattatttagatatgttatgtgatatgtcacttacatagttattaaagtaacatatatgatttgttatatattacatcatttcatgaataaatcttttttattatgcagaaaaagcaatggattntttaattattttt

SEQ ID NO: 311 - DNA, 447 bp, Glycine max
tagactaacttcagcctaccattctcatactgatggccatactgaacggaccattcagtcattgaaggaccttctaagagcgtgtgtcttatagtagaatgaaagctgggagagttttcttccatcgatagagttcacttataacaatagttttcactctaccattggcatggatccctatgaagctctgtatggtagaaggtgtatggcacccttatgttggctagagcccagagaaggccttaccttatgacctaaagtggtacaacaaaccaccgagaaagtcaagttaatccaggataggatgatgactgctcacagtaggcatacaagttatcatgataagaggaggaaagatctggaatatgaggatggtgatcatgtattcttgagagtcacttcgtggactgaggttggtcgagcattgaaatcccgaaaactcacacc

SEQ ID NO: 312 - DNA, 355 bp, Glycine max
  unsure at all n locations
agcttggacttcctatgttttgggaacctctccttcctcaggtgtacccaaacccaatcacctggttcaagcacgactttctttctgcttttgttggttctccttgcatagcttgcatttttgttttcaatttgagccttcacttgcttatgcaacttcttcacatacttagctttagcctctgcgtccttatgcttaaacatagcaatgttagtcataggcaacaaatcaagaggtgtcaaaggattaaatccatacactatctcaaatggtgaacaattagttgtgctatggacagcccgattataggcaaactaaacatgaggcannacatgcttccaagtttaagattttc

SEQ ID NO: 313 - DNA, 216 bp, Glycine max
  unsure at all n locations
tgcctatgttgctgcggatgattgcttcatatntacctgngtcaactctatcagagagaaatcacacaccttcgaagtattcaaagagttgagtctaagacttcatagagatgaagactgtgtcatcacgagaatcacgagtgaccatggcagagagtttgaaaacagcactgttactgaattctcacatctgagggcatactcatgagctctcta

SEQ ID NO: 314 - DNA, 384 bp, Glycine max
  unsure at all n locations
agctnggcaaggttcttttcttgacaatgtgtcaccctttaaccaatgggcaaactgaagtgataaatcaaactctttctcaaatcctatgacacttcattaaaggtaatttgaaagcttttgaagattggctgccccatgtggaaattgcatacaataagggaaccaactataccattcttcttttgaagttgtttatggttttaaccctttgtctcttcttgatttgattcctttgcctaatattgattctatgttgaataaagatggatttttcaaagcttcttttattaagaacttgcatgagcaagtgaaggctcaaattagaaggaagatggaacaatatgttaaacaagccatcaaagggaggaagaagatggtgtt

SEQ ID NO: 315 - DNA, 397 bp, Glycine max
ggctgcagctttagatttttaataaaagacctatgattattgaagaatctatccatgttgcttttgatgagactaaccctataggccaagaaaggaaacacttgatgatattaacggattcattataagatatgcacttggtgaaagggcacaagacaaggaaatggaaatgaaaaagactttcaaattgatgaaaataaaataaatatagatcttccaagagagtggagaacttcaagatatcatcctcttgataatatcatcggtgacatctcaaaaagggtaacaactcgacactctctcaaagatccatgcaataatatggcttttgttcctttaattgaatctaaaaatttaaatgaagccataattaatgaacattggattattgttatgc

SEQ ID NO: 316 - DNA, 321 bp, Glycine max
  unsure at all n locations
agctntagcaactctntctttttgtttagtctagacttctaatgctcttaatctctcctcgtctaaatcaactaactcatctgacatcattttccaataatggtcgatcggaatgtccatttgtttttgtactctagctgattgcaaatgtatttcgaccggaagtatagcatcgtgcccataagtcagtcgaaatggggtagtattagttgattccttaggagaatttctacatgcccatagaacttgatctaacgttttattccaatttcttggcttttgggcaatgtgttttttaatcaagttaattacaatcttatt

SEQ ID NO: 317 - DNA, 399 bp, Glycine max
  unsure at all n locations
agctntcttaagatcaagccttgcctacaaggaaaggtttcaagtcatccaagggacatgtaatcgattaccaatggttcgaaagtgtgtaatcgattacacatcatatgtaattgattaccagagactctgaacgttgggaattcaaattttaaatgaagagttacaattgttcaagaaaaacaactgtgtaatcgattacaccaattctgtaatcgattaccagagaggattttcaaggaatatcgccaacagtcacatcttatcatttggattttgaatggccatcaaaggcctatatatatgtgtgacttgggacaaaattagagagagttttgctggtccaaaatgtcttatcctctcanaataaaatgagagagatntccagagaacttcatt

SEQ ID NO: 318 - DNA, 408 bp, Glycine max
  unsure at all n locations
atccttttcattttacaagcttgaaaagttnttgaaaggctttaaaagcgttactcttagaagatacgaataaagtccaggtatatatagagcagtcatctacaataaccaaagcatagtaattccctccgttgctcatcgttctagaaggaccaaaaagatctagatgtaaaagttcaagcggtctaaaggtagaaacaacatttttagatttgaaagatgctctagttttctttccattntgacatgcattacataattcatccttcacaaatttgagctttaggagtcctctaactaactccttagacactagcttatttaaatgattcatgtggatatgagttattctcctatgccaaagccaagagagatcatcactacttattaaacaagtcatgtttgagt

SEQ ID NO: 319 - DNA, 368 bp, Glycine max
  unsure at all n locations
gtgccttatgaatcctcccgtgcttatgccaccagtacctggaatgcctctcattntgtacatgacaatcttagacgagtcaatggggtgtatngctgggcaacatgacgaatccgggaagagagagcgcgcctgttactacctaagtaagaagttcacgacctgtgagatgagatactccttgctcgaaagaacgtgttgtgctctagtgtgggcatcccatcgcctaaggcagtacatgctgagctatactacctcgttgatatccaagatggacccggntaagtacatctttgagaagccagctctcacgggacgaatcgcccggtggcaagtcctgctatgcaagtntgatatantctacgtca

SEQ ID NO: 320 - DNA, 236 bp, Glycine max
agcttaactacacactcttggcgcgtatgatgaatgaacagcgcttggccatgacattcatgtggctccaaatgaaagcgcgaaacggagactcgccgtatacaactcggcaacctcattcgcggagctccagactcctaggtggaagacacatgaacagtgctaggcaatgacattcatggggctccgaagaaaggggacaatggaggactgccctataagggacacacttaagc

SEQ ID NO: 321 - DNA, 367 bp, Glycine max
agcttgctaacccatggaagctcctaatatctcccacactctttggggtgggccattcttggatggccttgattttctcctagagagggaaactacaaaccctaagaaaactatattatctacacgaaaggtacacttctctatatttgcatagagggtatttttcctaaggactgaaagaacttgcctgagatgtcctaaatgatcatctaggctcctactgtacactaaaatatcatcaaaataaacaacttcaaatctgactatgaaatcccttaagacatgatgcataagcctcataaaggtgcttggtgcattagtgagcccaaaagacatcactagccattcataccaaccaaacttggtc

SEQ ID NO: 322 - DNA, 371 bp, Glycine max
  unsure at all n locations
agctntgaattagtgtctgggttgaggataaattttgctaaaagtaaattcagggcaattagcaagtcacatcagcggattcaaaatgcggcaaattaccttaagtgcagagtattggccattcccttcttgtatttgggtatccctattgaggcaaacccaaagcgtagtgtgatatgagaccctatagttgagagatttgagagaaaactatcaaagtggaaccaaagacatctatcttttgggggaaggatcactcttataaagtcagctttaaattcaatccctgttttttctttctttcttttttcagggtcccaaagaacgtggccatcaaattggtgaggctgcaacgatggttcttatgggat

SEQ ID NO: 323 - DNA, 192 bp, Glycine max
  unsure at all n locations
tgctgaccaccatagagacctttgttcttccatgcatcaacctggagcgattgagcaacctgaagcttatgctgcanatatatacaatagacctactcaacctcagcagcacaatcaaccacagcagantaattatgacctctccagcaacagatacaaccatggatggatgaatcaccctagcctcacatg

SEQ ID NO: 324 - DNA, 401 bp, Glycine max
  unsure at all n locations
gctccttcaactgcacaaggctcttaatatttgaagagtatccttgtggaaccttcacccgatgaagacactgacaaaaaattatcttctacttcttggacaaagtatggcaggctgggggcaagtaaattttcttcccatcagaccttggatgcaattgtgatcgtatacccatatcagctagatcttgacaggtattcaagccatccttcgtcttgccttgaatgttaaggagcgtcccaatcacactttcacaaacatttttctccacatgcataacatcaatacaatttctaacgtcaagatcacaccagtacggaagatcaaagaaaatggatctcttcttccatatgcaactctgacttttatccttctttngggtcttcccaaatacaatattc

SEQ ID NO: 325 - DNA, 252 bp, Glycine max
atgaatttcaagaaatttccaaatgtcctaagtgtggggtatcacagtacaaagtgaaggatgatgacgagtgtagtagtgacgaaaactcaaagaagggccacccaacgaaggtgttgtggtatcttcccatcattccaaggtttaagcgtctgtttgctaatggagatgacgcacaagaccttacatggcatgcaaatgagagaaactgcgatggaatgctctgtcaatggttatctaagtccattgatt

SEQ ID NO: 326 - DNA, 470 bp, Glycine max
  unsure at all n locations
tgctggtacatacgacatcctcacggatcagtaccaagtccttgctctcttgcaattctgtgtaaaaggacacaatatagtaaggagccgcttgtgttcccctggccttgtaatcttcaagacctgtagaaaccatgtgtggcgtctggactgcaagaaaaaaacgaatacgtattgtgagactacgatggaagtgttgaaaaagaaaacactcggaataaataaatcattctttacatgtctttttaataatatttcacgttctgtaagtagaaaatttgttaagaggaagcatgtccataactatgtgcagggagagattagaattcgatttcttgataggtaaggtatatccaaagggtgtcaacagtagtttatatgaatctagaaactgtccaggacctagtggcaaatattaacatctttntatatatgtaactaanactgcatctctttctccaggctcggga

SEQ ID NO: 327 - DNA, 437 bp, Glycine max
  unsure at all n locations
acgagcgtctcgatatactacgggacataatcggacatccgggtaaaaagttattgttatttgaatttgctcataggttctgttttcaattacgatcgcctcaatatattatgggattcattcggacatccgagtaaaaatttattgccatttgaatttgctacgagcttccgatntcaattacgagcgtcttgatatacaacgaaaaacaatccgacatccgagtaaaaagttattgtcgttagaatatgcttagagcttctgttttcaattacgagcgtctcgatatattacgggactcaatccgacatccgagtaaaaagttattgtcatttgaatttgctcatagcttctgtnttcaattacgatcgcctcgatatatcatgggattcattcggacatccgagttaaaatttattgcctgttgagtttgctac

SEQ ID NO: 328 - DNA, 436 bp, Glycine max
  unsure at all n locations
tgcagcaaattctaacgacagataactttcactcggaagttcgattgagtcccgtaatatatcgacacgctcgaaatttaaaaccgaagctcatagcaaattcgaacgacaataacttttcattcggaagtctgattgagtcccataacatatcgagacgctcaaaatagaaaacagaagctcgttgcaaattcgaacgacaataacgttttactcggatgtccgattgagccccgtaatatatagagacgctcgaaatttanaaccgaagctcgcagcanattctaacgacaataacttttcactcggaagtccgattgagtcctgtaatatatcgagacgctcgaaatttaaaaccgaggctcgtagcaaatacgaacgacaataacttttaactcggaagtacgaatgagtcccgttacatattgagacgctc

SEQ ID NO: 329 - DNA, 400 bp, Glycine max
  unsure at all n locations
agcttgaagganaacttaatgccttggtcaacctagtaacccagcttgccatgaataagaaatctacgcttgttgcaagagtctgtggtctatgttcttctgcagatcaccatacaaatctgggtccttctttgtagcaatctggagtcaatgagcaacctgaagcttatgctgcaaacatttataatagacctcctcagtagcaaaaccaataacaacagaataattatgacctttcaagtaatagatacaatccaggttggaggaatcatccaaatctgagatggacaagtcctccacaaaaacaacagtctgtccctcattntcagaatgctgctggtccaagcaagccatatgttcctcctcaatacagcaataggaaccacaacagtcaccacaa

SEQ ID NO: 330 - DNA, 401 bp, Glycine max
  unsure at all n locations
agctttgatttcctttgttccgganacctttcttttctcatgtgcacccaaacccaatctccgggttcgaagacaaccttctttctccctttgttggcttgtttagcatagcttttatttttcctctcaatttgatctttgactctctcatgaagcttcttcacatagtccgcctttgcttgaccttctttatgcttaaaaacagaaacattaggcataggcaaaagatcaagaggagttagtgggttaaaaccataaacaacttcaaaaggagaacaattagtggtgctatgaatagctctattgtaagcaaattcaacatggggtaaacaagcttcccaagtttttaagttcttcctcaaaactgtcctaagcaaagatcccaaagtcctattaacaac

SEQ ID NO: 331 - DNA, 258 bp, Glycine max
  unsure at all n locations
agcttgaatntgcatgatgttgttattgatactactacaaaaaacagttttaacatcggcttattaacattggttttgtccaaaaccgatgttaagttaaacgcggtgacatatttgtaaataaagtatccttcttaacatcggtttttccaaaaaaccgatgttaactaatgatgttaacatcggttattggaaaaccgatgttaacgtatgataatgtaacattgattttttggaaaaccgatgttaatgcatata

SEQ ID NO: 332 - DNA, 391 bp, Glycine max
  unsure at all n locations
nttcccacataactcttccaatctttgatggagagaattatgatctttgggaagtgaaaatgcaatcctacatggagtctttggatttatgggatgctgtggaagaggattatgaaatatatccgctgcatgaaaatcccaccatgtcccaaattaaaaatcacaaggaaagaaagatgaagaatgcaaaggcgaggtcatgtttgttcactggtgtttcacaaatgatattcatcagaatcatgactcttaaatcacccaaagcaatttgggattatctgaaagaggaatacgctgaagatgatagaatacgaagcatgcaagtgctgaatttaaggagggaatttgagcttcaaaggatgcaagagtcagagacaatcaaagaatactc

SEQ ID NO: 333 - DNA, 478 bp, Glycine max
gacactatcaaactgaagctcgtgtccaggaggatatccatgtttctgtaacattcatcaacaatgtgatttgtgaatccagaatgtgtacaaaccttgtttcctttcccattagaactccctctgccagagcctccttggctacttcttcctcctctagaagtatagtttggaggaaaaccacttttcctataacatctgcccactgtgtgattatctccacaaacatcaagttgaacaaattgagcttatctttcattgactccgctaccacattaggcggcaccaccgactcctttccctctagcatcaaaatgtgcagcatcttattccatgagcttctttgatagagtttacagttatgccccacctttgtcgcggtttgtcggaaccaattatcatttctttcatccacaatggatctccatttacatgcctcttgtcctatgtatcttagaatattcatcataaacacata

SEQ ID NO: 334 - DNA, 469 bp, Glycine max
  unsure at all n locations
cgcttctacatttatcacctttatagatggatgttcgtgatatatgaatatttatttgcttcataacaaaaataaagcattggatcccttcaaagtctttaaggctgaagttgagaaccaatgtggtaagaaaataaaaatagtgagattagatagaggtggagaatattatggcaaatatactgagaatggacaagcacctggtccttttgcaaagtttcttcaagaacataggattgttgcccggtacactatgcctggttctccaaatcaaaatggtgtggcaaaaagaaggaaccgaacattattggacacggtacggagtatgcttagcaactctgatcttcctaaatccttgtgggctgaagcactaaagacggcagtgtatatattaaactatgttccaaccaaggctgtccaaaagacaccttntgagttgtttaaaggttgaaaacaaagtttgaaacat

SEQ ID NO: 335 - DNA, 427 bp, Glycine max
  unsure at all n locations
ctctcanagccttgagactacacatatcataaacaactttctttatctcctcctcagtatatatttctccctaacatctcaatctcctcttgaaccaaaactgtaaatttacctcttaagcaaaaaggttaataatctgccacttcagtgaataaattcctatagaaagaagtcaccatttcttctaaatctatcgaattaagcacccaatagcccttttcattcaatagcctagcatataagttagattgctttcttaanagagtggtgcaatgaaagtaatgagaattcttatctccaaatttaagccacttgcaccaagacttttgaaaccacaaaacttcttggaacaatatctgctctaactccccacataaatcttnttgtagccttaaatggtacttattatccttaatccttcaacttc

SEQ ID NO: 336 - DNA, 455 bp, Glycine max
  unsure at all n locations
tgctcaccactactagaggagaagcctttaggttgtttcatataaacctcctcttctaaatcaccattaagaaaagctattttcacatccatttgttgcaactcaaggtcaaaatgagcaactaatgccaagattatacgaagataatctttcttagatactggagaaaaagtctttgtgtaatctattccttctttntgagtaaattccttagcaacaagtcttgccatgtatctctcaatgttgcctaatgaatcccttttggtcttaaaaacccatttacatccaatggcctttgccccattaggcatctctacaaggttccaaactttgttactctgcatagaattcatctcatccttcatgacatcataccatannattgactctttacaactctnggcttgatgcaaaagttcaggatcattttcagctccatattatagcatattcta

SEQ ID NO: 337 - DNA, 429 bp, Glycine max
  unsure at all n locations
agctntgaatgctctattcaatggagttgacaagaatatcttcagactgatcaacacatgcacagtggccaaagatgcatgggagatcctgaaaaccactcatgaaggaacctccaaagtgaagatgtccagattgcaactattggctacaaaatttgaaaatctgaagatgaaggaggaagagtgtattcatgacttccacatgaacattcttgaaattgccaatgcttgcactgccttgggagaaagaatgacagatgaaaagctggtgagaaagatcctcagatccttgcctaagagatttgacatgaaagtcactgcaatagaggaggcccaagacatttgcaacatgagagtggatgaactcattggttcccttcaaacctttgagctangactctcggatagggctgaaaaggaggcacatga

SEQ ID NO: 338 - DNA, 455 bp, Glycine max
  unsure at all n locations
tgcttgaagggttgtacatgaccaaatctttagttaatcgtctttacgtttagcagtctntgtattcgtttaaaatgcatgaagataaatcagtacgagaacaattggatttgtttaataaactgattcttgatcttgaaaatatcgatgtcactattgatgatgaggatcaagccttgttattgttgtgctctttgcttaagagttactctcatttcaaagagactttattgtttggaagagactctgtttctcttgatgaagtgcaagttgctctgaattcaaaggaattgaatgaaagaaaggaaaagaagtcttctataagtggtgaagggctgacagcaagagacaagaccttcaagaaagatagtaaatctgataagaagaagcataagccagataatcatatgaatggtgaatgaaacatgttcaaaatcaattgtatcactgtaaaa

SEQ ID NO: 339 - DNA, 417 bp, Glycine max
  unsure at all n locations
agcttgtaatcgattacaacatttgtgtaatcgattaccagacataaaaattcaaatttcaagtctcaagagtcacaactcttcagaaactaattgtgtaatcgattaccacatttatgtaatcgattaccaataaggaattttcgaaaagtacacccaagagtcacaattgttcaagaagtttttgaatggccatcaaaggcctataaataggtgacttgngatacgaaattctttagagttttttctgaacaacattgtcttatcctctcaaaaccaaattgtcttatcactctcaaaatattccttggccaaaacacttgcaaattcaataaggaatcttgatcgatcttcaattggaatatccttctcttaaagagagaaaatgcttcttcttcttattcaaagagatctgtt

SEQ ID NO: 340 - DNA, 457 bp, Glycine max
  unsure at all n locations
tgtgagagctgaagacttcttcagacatgtagaactggggaagactgacaacccaataggttcaaacgtgactcaagtgtttgttgatcaactatcacgactaaacacgttgggtttgaacgctccccacactcaccctcgaggcactgagatccttatagtccttgagggtactctctatgttggatttgtgacttccaatcaagatggaaatcacctcttcaacaaagtgctgaacaagggtgatgtgtttgtgttcccaattggtctcattgatttctgcatcaatgtgggatatggcaatgttgccgccattgttggtcttagcagttaaaatgcaggaggcattactattgcaaatgctttgtttaaagctaatccacctatntcttctaaggttctcaccaaagcttgccaggtggacaagagcataattgattatcttgaanagcaatct

SEQ ID NO: 341 - DNA, 403 bp, Glycine max
  unsure at all n locations
tctggtgggacatcttgacttgctttccaatctgacattcatcacanaatctgccttcttctatnttcagattgggaatgcctctaacagcacttttgtcaaggaatttcttcatgcctcttaagtgcagatgtccaaacctttgatgccatattctgacttcatcttctttggaggatagacatgtggaggagtagctggtttcttggggtgtccataggtaacaaatgtcctttgatctgctgcccttcattagaacttcactcttctcatttgtcaccaagcattctgactttgtgaagtttacattgaatacttcatcaaacagctgactgatgctgatcaagtttgcagtcagtcccttcaccagcagtactttgttcagactaggaagtccatcatg

SEQ ID NO: 342 - DNA, 374 bp, Glycine max
  unsure at all n locations
agcttgtagggttaaagtctcacgattgtcacgtgctcatgcaacaattgttagccgtggctatacgagacatcttgccaaacaaagtcaagttcacgataactcgcctgtgctttttcttccatgctatatgtagcaaagtgattgatccagtaatgtttgatgagttggaaaatgaggccacaattatactatgccagttggagatgtattttccccctactttctttgacatcatgattcacttgattgtgcatctggttagagaaatcaaatgctgtggtcctgtttatctacggtggatgtacccggttgagcgatacatgaagatcttaanagggtatacaaagaatctatatcgtccagaagcatct

SEQ ID NO: 343 - DNA, 451 bp, Glycine max
agctatgaattcctccactaccacacatagtttacccttgtttggattatcttcaacctttcatatagaaatcaaaagacaaccaaccattcttcaacacccaaaagaaagaaggaaggaaaatagacttcagatgtaatgtaaaaagaaatctctattgtagatctaagcttacacttttactctttttttgtagatttttcaatccaaaatatgcctttctgcaaatgcctgaatatatgatcacatataagatagattatataaaaacaaattattcaaatgccatatgaatttaacatcatttccacaagaaaaaccttgtggcaatatcatgatcagctaaatagtaatatgcacagccacataacaacaatgcctctaaattattttcatcttccttgagaagaaacccagactcagcaatagcactctcatactctttatcagc

SEQ ID NO: 344 - DNA, 393 bp, Glycine max
  unsure at all n locations
tgccgccacggagttntccgactatgctcttgtgtggtggaacaagctacataaggagagagcaagaaatgaagagccaatggttgatacatggacggagatgaataagatcatgaggaagcggtatgttccggctagttactcaagggacttgaaattcaagctccaaaaactaacccaaggcaacaaggtggttgaggagtatttcaaggaaatggatgtgctcatgattcaagcaaatattgaagaagatgaggaggtaactatggctcgatttcttaatggtttgactaatgatatccgtgatattgttgagctgcacgagtttgttgaaatggatgaattgcttcacanagcaatccaagtggagcaacaattaaaaagggaaggagt

SEQ ID NO: 345 - DNA, 450 bp, Glycine max
  unsure at all n locations
agcttatgaccattcgaatttctcaagagtttccgttgttcaatttcgagcgtgtagatgagttatgtccccgaatcggacatctgtgtgaaaagttatgaccattcgattttctcgagagcttccgttgttcaatttcgagcgtctcgatatattatgaccccgaatcggacatctgtgtgaaaacgtatgaccattcgattttctcgagagcttccgttgttcaatttcgagcgtctagatgagttatgtccccgaatcgaacattcgagtgaaaacttatgaccattcgaatttctcgagagcttccgttgttcaatttcgagcgtctcgatatattatgttcccgaatcggacatccgagtganatgttatgaccattcgattttctcgagagcttccgcttgttcaattcgagcgtctcgatatattatgtccccgaatcgacat

SEQ ID NO: 346 - DNA, 480 bp, Glycine max
  unsure at all n locations
tggagctcggngtctttntgaagttcctcagctgacttgtagtagaatgagacatattcttccacccaagacttgatatcatcccatatctctagcccatcagaagcataaggatagtcctcgatcaaaagtcaaactccatggggagcagatggatccttaacagcaactcctctgaattaaaagcacccaaataacattgattagcataagagttatatcaagcctgaagccttttttcttcttatgtcattgatgactttttatatcatgcattcatgtgccactactctgtcaaagccatgaactgtcaaagccatcatttaggatgaaacagtctttgtctttccaaaatctgaaatacgagccacttgagcatctgctaaacgatatttcgtgccaccaatagtaacctcagatgaaacagtctccacatccaacacaatataatccaccaattgtctactagtaagtaatgac

SEQ ID NO: 347 - DNA, 440 bp, Glycine max
  unsure at all n locations
taaacattcaatttcgagagtctcgttatattacgggactctatcagacatccgagtaaaaagttattgtcgtatgaattggcttatagcataaacattcaactttgagcctctcgatatattacgggactcaatcagacatccgagtaaaaagttattgtcgtttgaatttgctcataggttcaaaattcaatttcgagcgtctcgatatatttcgggactcaatcagacatccgagtaaaaagttattgtcttttgagttggctcagaggttcaacattcaatttcgagcgtcccgatatattacgtcactgaatcggacatccgaggaaaaagttattgtcgtttgaatntgctctgagcttcaacattatattacgagcgtctcgatatattacgggactcaatcagacatccgagatacaagttattgtcgtttg

SEQ ID NO: 348 - DNA, 431 bp, Glycine max
agctctgagccaattctaacgataataactttttactcggatgtccgattgagtctcgtaatatatcgacacgctcgaaattgaatggtgaagctctaggcctattcaaacgacaataacgttttactcggatgtccgactcagtgacgtaatatatcgggacgctcgaaattgaatgttgaacctctgagccaactcaaacgacaataactttttactcggatgtctgattgagtcccgtattatatcgagacgctcgaaattgaatgttgaacctctgagccaattcaaacgacaataactttatactcggatgtctgattgagacccataatatatggagacgctcgaaatggaatgttgaacctctgagccaattcaaactacaataactctatactcggatgtccgattgagtgacgtaatatatc

SEQ ID NO: 349 - DNA, 463 bp, Glycine max
  unsure at all n locations
gatgcttctagtgaagacaggaaacgcgatgaaattagaaaacacaatgaaatgttaaaggcttctgaagctgttgctgaagtcagagcagaggtggataagctcgctgagagggtgagcctgcttctcatattatctttggttattgaaacataataactggagctgagaatgaggatatgagtgattttgatttgcaagtatctgtcttggaagtggctgtggatggagggaccagggtttctgacaaagagtttttgatgtccacagagttgcttatgaggcaattgctgaaactggatagtattgaggctgaaggtgaagtaaagctgcagagaaaagctgaggtagtgtttatggtggttagaattataacttaaattctaactaattgcgtattagntattgtgtttattttggtatttacaaaatcccacctattagtaagtcatggacactgact

SEQ ID NO: 350 - DNA, 427 bp, Glycine max
tttccgactatgctctcgtgtggtggaacaagctacaaaaggagagagcaagaaatgaagagccaatggttgatacatggacggagatgaaaaagatcatgaggaagcggtatgttccggctagttactcaagggacttgaaattcaagctccaaaaactaacccaaggcaacaagggggttgaggagtatttcaaggaaatggatgtgctcatgattcaagcaaatattgaagaagatgaggaggtaactatggctcgatttcttaatggtttgactaatgatatccgtgatattgttgagctgcaggagtttgttgaaatggatgatttgcttcacaaagcaatccaagtggagcaacaattaaaaaggaagggagtggctaagaggagttttaccaactttggttcttctagttggaaagacaa

SEQ ID NO: 351 - DNA, 352 bp, Glycine max
aagcttatgaccattcgaatttctcaagagttttcgttgttcaatttcgagcgtgtagatgagttatgtccccgaatcggacatctgtgtgaaaagttatgaccattcgattttctcgagagcttccgttgttcaatttcgagcgtctagatatattatgaccccgaatcggacatctgtgtgaaaacgtatgaccattcgattttctcgagagcttccgttgttcaatctcgagcgtctagatgaattatgtatccgagtcgtacattcgagtgacaacttatgaccattcgaatttctcgagagcttacgtagttcaatttcgagcgtttagatatattatgtccccgaa

SEQ ID NO: 352 - DNA, 442 bp, Glycine max
  unsure at all n locations
ngtgaatgtatatctatcattcccaacttgcaagtaaggtcttgaagttgctccgtgggaagtccttggtaagggatgtattcggtggctataagaccactgtctaattnttccttaataaaatgtcgattaatctctatgtgctttgttcgatcatgttgaactggattgtgtgcaatgctgatggcaaacttattatcacaaaccagtcccataggaacttcatattttattttgaggtcatcaagtatgatattcatccataacaactcacaaacaccttgagccatagctctgcttttgcacttgatcttgcaaccacattntgcttcttactcctccacgttactaaatttccacccaagaacatgcagtatcctgtggtagatctcccatcaacaatngatcctgcatagtcagcatcagtatatactttcatgat

SEQ ID NO: 353 - DNA, 439 bp, Glycine max
agctatagcaactctttctttttgtttagtcaaaacttctaatgctcttaatctctcctcatctaaatcaactaactcatctgacatcattttccaataatggtcgattggaatgtccatttgtttttgtaccctggctgattgcaaatgtatttcgaccggaagtacagcatcatgcccataagtcagtcgaaatggggtagtattagttgattccttaggagaatttctacatgcccatagaacttgatctaacgttttattccaatttcttggctttagggcaatgtgttttttaatcaagttaattacaatcttattggctgcttcgacctgaccatttgcttgcgcgtaatatggtgttgaggttaataatcgaaagccagttttttgggcaaattcttgcatttttcgtccagtaaaaactgaaccttgatca

SEQ ID NO: 354 - DNA, 423 bp, Glycine max
  unsure at all n locations
tatcagaaggggaatgagtaaataccacctcatgctgatattatgaaggtggcaaagtgtttcttttgcaagaagaagggacacatgaaaaagaattgccccggattccaganatggcttgagaagaaaggtaaatcaatctcattagtatgttatgaatctaatatggttagtgttaatattaacacctggtggattgattctggatctactattcatattgcaaattctttacagggtatgcataacctaatgaaaccagtgggaagtgagcaaagcattttatcaggcaataagctaggctcacatgtggaggccattggaacttgcattctgactttaagtagtggctgtattttaaaattagaaaggactttctatgtanccaagttttcccgaaacttgatttctatttcaaggctt

SEQ ID NO: 355 - DNA, 378 bp, Glycine max
atgacaatttgaattgctctagagattccattgttcaatttcgagcgtctcgatatattatgaatatgaatcggacctccgagttaaaaggtatgaccatatgaatttctcgagagctttcgttgttcaatttcgaggcgtttgatatattatacgcctgaatcggaactccgtgtgaaaagttatgaccatatgaatttctccagagattccgttgctcaatttcgagcgtctcgatatattatgcgcccgaatcggacctccgggtgaaaagttatgaccatataaatatcttgagagcttctggtgctcaatattgagcgtcttgatatatatgctccagaaattgacttgcgagtaaaagtatgaccatttgat

SEQ ID NO: 356 - DNA, 303 bp, Glycine max
  unsure at all n locations
tcggatgtncgatntaggcgnatattatatttagacacttgatattgaataacagaagctctcgagaaattcgaatggtcataacttttcacacggatgtccgattcgggcgcataatatgtcgagacgctcgaaattgaacaacggaagctctcgagaaattccaatggtcataacttttcactcggaggaccgattcaggcgcataatatatcgagacgctcgaacttgaacaacggaagctcccgagaaattcaaatggtcataacttttaactcagaggtccgattccggcgcataata

SEQ ID NO: 357 - DNA, 460 bp, Glycine max
  unsure at all n locations
tcaaactatttgcttcccgagggaaattctataaacagacctcccatctttaatggagtgggttaccactactggaaaacccgcatgcaaatcttcatagaggcaatagatttaaatatttgggaagccatagaacaaggaccttatgttccctctataatagccggaagtgcaacaatagaaaaacctagagcagattggactgagaaagaaagaagattagtacaatataatttaaaggccaaaaatattattacatatagcttaggaatagatgaatactttagggtttcaaattgtaaaagtgctaaggatatgtgggatacactacaagtaacacatgaaggcacaacagatgttaaaagatctaggataaacactttgactcgtgaatatgaactttntaggatgaatgtaaatgagagtatacaagacatgcaaaagagggtcacacacatag

SEQ ID NO: 358 - DNA, 443 bp, Glycine max
tggatactctgagtcacctgcagctgcagcttgaattgatacatcatttgtgtaatcttttaccagacacaaaagaaattcaaatttcaagtctgaagagtcacaactctatagaaactaactgtgtaatcaattaccacatttatgtaatcgattaccatgaagatattttcgaaaataactcccaagagtcacaactgttcaagaagtttttgagtggccatcaaaggcctataaataggtgacttgggatataaaattccttagagtttttttgaacaacattgtcttatcctctcaaaaccaaattgtcttatcactctcaaaatattccttggccaaaacactcgcaaattcaataaggaatcttgatcgatcttcaattgtaatatccttctcttaaagagagaaaattcttgttcttcttattcaaagagaattga

SEQ ID NO: 359 - DNA, 382 bp, Glycine max
aaaatgaagatacaataaaatagtgagaaaatatatagatttctaaattatttaatatgaaatattcaaaatataaaataaaagtttcttgcccgtacaacaattctatttataataattctatttaattcacataagattacatttaatagaagatacacatcatttaaacaaaaattaaagtttatagatggacaactagaaactaaggaagctatagctagctaagctactacatattaataaagaacaaaacattacaagaaaaggaaataattaaaaaaggtagataaagaaaaaagtgaggtgaaagtttcaaattttgtgtggttccaggcttgcaaaccaatcctccagaaaggaattgttgagaaaaagtaat

SEQ ID NO: 360 - DNA, 447 bp, Glycine max
tataatatattattacgctcgaaattaaacatcagaagctctcgagatattcaaatggtcataacttttcacccggatgtccgattatggcgaatcacatatcgagacgctcaaaattgaacaacggaagctcttgagaaattctaatggtcataattttaactcggatgttcgattcaggcgcatcacatatagaagcgctcgaaaaggaacaacggaagctctcgacaaattcaaatggtcataactttccacactgaggtccgattacggattataatatatcaagacgctcgaaattaaacatcgaaagctctcgagaaattcaattggtcatcacttttcacacggatgtgcaattctggcgcataatatgtcgacacgctcgaaattgaacaacggaagctctcgagaaattcaaatggtcttaactcttcacacggatct

SEQ ID NO: 361 - DNA, 461 bp, Glycine max
agctttcaagaaacttgcaaaagttattcaaaatgaaaaagatttgaaaattaagaccttgagaagtgatcatagaggtgaattccaaaatgaagattttaaaactttttgtgaagaaaatgggatttcacgtgatttttctgctactagaacttcacaacaaaatggggctgcagagaggaaaaatttgtgtttgcaagaactagcaagaactatgttaaatgaaactaacttagcaaattatttttggacggatgccataagtacaacttgctatgttctcaataggattttaataatacctattttaaaatccacaccttgtgaactttacaaaggaagaaagcctaacatatcacacttaagggtctttggaagcaaatgctttgttttgaataatggaaaactataccttgggcaagtttgattccaaactcaatgaagcactctttttacgatat

SEQ ID NO: 362 - DNA, 590 bp, Glycine max
gacactatagaaactaagcttaacattgaatttcgagcgtctcgatatattacgggcctcaatcagacatccgagtaaaaagttattgttgtttgaatttgctcagagcttcaacattcaattccgagcgtctcgatatatgacgggactcaatcagacatccgagtaaaaagtcattgtcgtttgaattggctcagagcttcaacattcaatttcgagcgtctcgatatgtgacgagagtcaatcagacatccgagtaaaaagttattgtcgtttgaatgggctcagagcatcaacattcaatttcgagcgtctcgatatattacgagactcaatcagacatccgagtaaaaagttattgtcgtttgaatttgcctcagagcttcaacattcaattttgagcgtctcgatatatgacgggactcaatcagacatccgagtaaaaggtattgtcgttggattggctagaacttcacaattaatttcgagcgtcttgatatatgacggactcaatcagacatccgagtaaaagttatgcgtttgaattgtctaaagcttcacaataaatttgagcgtctcggtttatgacg

SEQ ID NO: 363 - DNA, 488 bp, Glycine max
  unsure at all n locations
agctttgagccaattcaaacgacaataactttttactcggatgcctgattgaggcccgtaatatatcgagacgctcgaaattgaatgtggaagctctgagccaattcaaacgacaataactttttactcggatgtctgattgacgcccgaaatatatcgacacgctcgaaattgaatgttgaagctctgagcaaattcaaacgacaataactttttactcggatgtctgattgagtcctgtcatatatcgagacgctcgaaattgaatgttgaagctctgagccaattcaaacgacaataactttttactcggatgtctgattgagtcccgtaatatatcgagacgctcaaaattgaatgttgaagctctgagccaattcaaacgacaataactttttactcggatgtctgattgagtcctgtcatataccgagacgctcganattgaatgttgaagctctgagccaattcaaacgacaataactttt

SEQ ID NO: 364 - DNA, 301 bp, Glycine max
gtaagctggttgttaaaccaaactttagcaatataaaatagtttatgttacacgggactgaagtgtcccaaattgcaaactgataaaagacaagaaattttgtttgcaggtacttactccttcgtactccctccaaggaggcttccccatgaacatttctataattgtacaacccaaacttcaaatatcaacaacgaaagcaacgtcaaagctgttatctttttgcacaaccgcttgaaaaagctacatgtatgtggaataagtgtttatagagaatgcatgagacatcatgaagtaaaat

SEQ ID NO: 365 - DNA, 600 bp, Glycine max
  unsure at all n locations
agcttcatgcttaagtatgtatggcaaaactttgttactgttgttcaagacatacaagtgagcttgtaacaaatgttctacacttggagtgatcacatgcagtcctcttgaacccttaccacccactctgtcttcatgccgagactcgagaaggctaacaggtttagccttctctaagtattctgaacaaaattcaatggcttcttctgcaatgtacctctcaacaatagatgcttctggacgatatagattctttgtatacccttttaagatcttcatgtaccgctcaaccggatacatccatcgtagataaacaggaccacaacatttgatttctctgaccagatgcacaatcaagtgaatcatgatgtcaaagaaagcagggggaaaatacatctccaactggcacagtataattgcggcctcattttccaactcatcaaacttgacaggactaatgactttgctacatatagcatggaagaaaaatcacaggcgagttatcactaacctgactttgtttggcaagatgtcttgtatagcccaccactaacaaatggttgcatgagcacatganaatcgtgagacttttaaccctac

SEQ ID NO: 366 - DNA, 464 bp, Glycine max
tgatgaagaatgcttggaagttttttagactttgaatgaaaaccttgtatctgccgcaataatggttgtatctgactagagtaaggagtttgagttgatgtgtgatgccaacgactatgctgtgggtgcaaatctaggacatcgacgagacaagatattccatgccatatactatgtcaacaaggtcctgaataacgcacaattgaattatgcgactactgaaaaggaaatattggtcaacgtctatgccttagagaagtttcaatgctttctggtgggctccaaggtcgtcatcttcacagatcatgcaacaatcaaatatcttcttaccaaggcagattcaaagccaaggttgataagatgggtcttgttgattcaagagtttgacatcgtcttcaaagacaagaaatgatctgagaatgtaatagctgaccatttctcccggttagtgaatgaagaagtga

SEQ ID NO: 367 - DNA, 256 bp, Glycine max
caccggcgagcctttgaattgcttcgattaagtatctatgagacacatgtttcctaccataccctttgaccagctcctgagcaagtaatatgttatcctggatattcctaccaggaataaaagctgaatgagtgtttttcaccacactatttatcacatcactcagtctgctagtcaaaatcttcgatgtgaccttataaattgtgctacaacatgatattggcctcatgtctttgatggtttttgcctccgggga

SEQ ID NO: 368 - DNA, 368 bp, Glycine max
  unsure at all n locations
ntgagcaaattcaaacgacaaaagctttttactaggttgtttgattgagtcccgtaatatatcgagacgctcgaaattgaatgttgaagctttgagcaaattcaaacgacaacaactttttactcggatgtctgattgagtcccgtaatatatcgagacgctcggaattgaatgttgaacctctgagccaattcaaacgacaatcactttttactcggatgtctgaatgagtcccgcaatatattgagacgctataaattgaatggtgaagctttgagcaaattcaaacaacgataaccttgtactcagatgtctgattgcgtcccgtaatatatcgagacgctcgaaattgaatggtgaagctctga

SEQ ID NO: 369 - DNA, 420 bp, Glycine max
agcttcaacattcaatttcgagcgtctccatatattacgggactcaatcagacatccgagtaaaaagttattgtcgtttgaatttgctcaaagcttcaacattcaaattcgagcgtctcgttatattataggactcagtcagacatccgagtaaaaagttattgacgtttgaatttgctcagagcttcaacattcaatttcgagcgtgtcgctatattacgggactatatcagacatccgagtaaaaagttattgtcgtttgaatttgctcagagcttcaacattcaatttcgagcgtctccatatattacgggactcaatcagacatccgagtaaaaagttattgccggttgaatttgctcaaagcttccacattcaaattcgagcgtctcgctatattacaggactcactcacacatc

SEQ ID NO: 370 - DNA, 533 bp, Glycine max
agctttagaggactacacgtcttcgccttcagaggactactagtcctcgccttcagaggactacacgtccttgccatcagagggctacacgccttcaccattagaggactacacgtcctcgccatcacaagactacatgtcctcacaatcagagggcaacacgccctaacctttagaggactacacgtcctcgccgtcagaggacttcacgtcgtcaccttcagagggctacaagccttcacctttagaggactacacgtcctcgcaatcagggggctgcacgccctcaccttcagaggacttcacctcctcgccatcagagggcagtacgccctcaccttcagaggactacacgtcctcgccatcagaggactacacgccctcacccttagaggactacacgtcctcgccattagaggactacacgccctcgccatcagaggactacaggtcctcccctttaaaggactacacgccctcccttttagacgactacccgctctcccctttaaaggcttccacgccctcccctt

SEQ ID NO: 371 - DNA, 471 bp, Glycine max
tacttttttctttcctatagatggtttcagttactatatcttttatgacagtcttgagctggtcacaaaaggtcaaacaatagactatggaatgaacctgcactttgtgagcttaattgatatgtcaagttacaatttgtctggaataatacctccccaaatgttcagcctcattggattgtactccttgaacttttcccacatcaaattaacaggacaaataccaaatgagattggcaacattgaaaacttggagtcccttgatttctcaacaaaccaacttcggggtgaaattcctcaaggcctttccaatttgtcctttcttgcttccttagacctgtcatttaacaatttcacaggcaaaataccatcaggcacacagctttaagggtttcgtgcactcagctatataggcaatcgcaatctttgggacctccactttcaaaattttgctgcagggtagtgaaccta

SEQ ID NO: 372 - DNA, 462 bp, Glycine max
agcttatccttaaataagaaaaagtatccctcccattataatccaaagtttgataaaaaaaaaaaaagaaaaaacattgctgtttcaatagcaatatccttacaatatctctgcggataagctcctgaagtttaaacataatgcgttgacgagtggtgataggagtatttttccatgaaggaaaagcttgcttggctgcactaactgcagctttaaactcttcatatatagttaaatgaacttgagatacaacttcttgcgttgcctgagtaaagataaatattcaaattactttttacataaaccatcacaatgctaagaaaatttcaagcaaatatcattgaaaaacatatcaacttacgggatttataacatcaatgattacagaaccctgagaatttacaaatttccccccaataaaatttgagacctttagctacataccaataaaaaaggccataa

SEQ ID NO: 373 - DNA, 262 bp, Glycine max
agcttttattttctgatgagtaatcgttctagtatgtcttgaatgagctcctcgaaaacttgatgtaaataaacgaatttttgtccttcgtttccgagctatatatcctcgtttaattctggtcattgaataattgagactttgatgaataactatttgatttttcagctattcttttcttcttactagtctattaataacacaaatggattcttccaatgtataaaaaaagaacttcacaggctcttgctactataacctc

SEQ ID NO: 374 - DNA, 551 bp, Glycine max
  unsure at all n locations
tgagttaagcaagcctaaagagggtcgaggtttagtactttctgctatagcatagaacacaaaagcatgattgattagagaaatatccttatatgcatcaacttgtttgttagaaatacccaacacttttgtagaagcaagcttcatgatgatgaaccaagtaattttgatgatgccaaaagcccaaatgattgattcaagattgattcaagacttcaagatcaagcatcaagaatccaatccaagattcaagattcaagagaagaaatcaagaagcaacaagtcaagacttcatataggataagtattaaaagaanttttcaaaaaccaaatagcacagttttgttttacaaaagaattttttcaaattttctaagttaccagagtgattactctctggtaatcgattgcctgttatcagtaatcgattaccagtgaccaatttagttttcaaatgtttgcaacgttccaaaatgattttcaaatagtgtaatcgattacactatattagtaatcgattacaagtgaatcggaacgttggaattcaaaat

SEQ ID NO: 375 - DNA, 531 bp, Glycine max
tgtaggcgttggatcttcttcatcaatggagtcatttgcttcttgaatatcatggcagcggaatagagaaggaagaaagatgattggagaccccacttcaaggagatgatgagtcaagaagaagctcaccaccacaggaagccatggataagagcttgaaggaaggcgaagatgagtggagggagagggagagaaggggcacgaaattttatgcctcaaatgaggtctgaactttgaagtgtaattctcaaatgatcaaagttcaaaataatgcacacacatggcctctatttatagcctaagtgtcacacaaaattggagagaaatttgaatttctattcaaatttcacttgaatttgaaattgaatttgtggagccaaaatttcaataattatgattaatggaatttagatatggttcagcccactaatccaagatcaagtccaagattcttcactaagtgtgcttaggtgtcatgagacatgtaaaacatgaatgacatgcacaagtgtgactatatgatgtggcaac

SEQ ID NO: 376 - DNA, 354 bp, Glycine max
agcttgttggagagagcaatgtcaatattgtcatcaacttcagccctaatagttgggcctggaaactgaccgttgattcccatcagaacgtgttccaagcaatctggttttctgatcatgtactccacatcaaacttgtagtgtctcactattcctccgattgacaattctaccaaacccaaccatattatgcacccaacaaaaagagctttgaagctcattcttaattaattttgatcagagaaagcctaattagcaatataacaggaaggtatcaagtagtagaacgaagctattgatgaacaaattgaaagaataggtatagaggatcgaggatttggattgctggtaccc

SEQ ID NO: 377 - DNA, 248 bp, Glycine max
ctcagtccctgagaaactgattcccagaagacaacagggagtgtttattgctgaaaaccctagccttgcaacaagttctagggaagtagacaaggagatggacaagaaaatccgcagtatcgtgagtagcattttaaaagacgcctctgttcctgaagctgatgaagatgttccaacatcttccaccccgaatgtttctgtgcctgatgttgagaaagatgttccaacatactttcggtccaaatgct

SEQ ID NO: 378 - DNA, 333 bp, Glycine max
  unsure at all n locations
agctttgagcanattcaaacgacaataactnttgactgttttttccgatgtgccccgtaggaaattgagccgctcggaattgaaaaacggaggctctgagaacaaactaacgacaataacctttaactcggatgtctgatagaaccctgtaatatatcaagacgctcgaaattgaaaacggaagctctaataaaagtcctacgacactaacttttgacttcgatgtccgattgagccccgtaatatatcgagacgctcctaaacgaaaacagaaactttgaccaaattctaacgacaataacctttgacttcgatgtccgactgcgccccctc

SEQ ID NO: 379 - DNA, 395 bp, Glycine max
tgactagtttgcaaaatggcatacttgaaatatatatgttggatcaagtggcctcggaataattaagaagggggggttgaattaattattgatgtgccttgactaattaaaaatctatccttcttaatgttactagatttaattaagtttttactacaaagttaagaaagtaaagaacagtaattgaaacttaaccaaaagtaaaaacgataattaaaagagcacaacgaaaattaaaagtgtagggaagaagaagacaaacactataattttatactggttcggcaacaacctgtgcctacatccagtccccaagcgacctgcggtccttgagatttcttttcaaccttgtaaaaacctttacaagcaaagatccacaagggatgtacccctcc

SEQ ID NO: 380 - DNA, 474 bp, Glycine max
tgttgatttaagcacagataatccatcaattgcttctgatggtttagcagcatttcagcgtgtaagcaaattgacaagaaaagtgaacctttttgaaaaggattatatcttcatccccataaactatagtcttcactggagtttgaatgtcatttgtcaccctgctgaagtcatgacatgctacagagatgaagaaactaaaggatctcccaaagaagcttgcatcttgcacatggattcccgaaaaggaattcatcaagatctacacaatgttttccaaagttatctatgtgaagaatggaaagagaggcacaacaatgtgagggatgatgatgtttcttctatatttttacatcttccattcgtgccacttgagctgcctcagcaacaaaatgcatacgattggggcatctttttgtccactatgtggaacgttttctggacatgcttcaatcaacttcaaccgtccatgat

SEQ ID NO: 381 - DNA, 647 bp, Glycine max
  unsure at all n locations
ccgcaagcttcctgcacaatgactatattattaagatttgttctcaagctggtataatcttatcatgcttcagcgagtcagtggcacttacactaatcaagtgtcaagtaccaacgaagcatcagtaaggaaagttagtttacaataatttatctccacaagtaatactgagttctggcaacaaagaaaaaccataccaagaataaattagaaaaggcacaaaacagtctaccttgcatcaggaattccatggcagattacttcattaactgacctgttagataaagcaaatttcattcttaacatataccatggcaataagagaaaaatatgacattacagaaggaaagtacctacgtgcagcaagatttagggaagaaaaggtaattgagaggtgatggatatcctcctgaaaaagtaaaaagtcagaaaaaaattcattaccaatgaccatttgtaatagccatatgacaatgacatcatgaaactcaatgaaccatcatttggaagaggaattataacaaagttaggaagcatcctctctgtaatgctcaaggcttttttttgactttttcaaattctggtaagcagatagcagccttgatatacattntggtatttttttggcccccccttctctgacccat

SEQ ID NO: 382 - DNA, 344 bp, Glycine max
cttttctagttagagaccaacgtcttggggctaatgtatgatctgctcaaggacctacaggtttaggtaaatatctaatgcgttccccgacaggagaagttatttttgggggagaaactatgcgtttttgggatttgcgtgctccttggttagaacctctaatgggtccgaatggtttagacttgagtagactgaaaaaagatatacagccttggcaagaacgccgatctgcggaatatatgactcatgcttctttaagttccttaaattccgtgggtggcgtatcttcagagattaatgcagtcaattatgtctctcctagaagatgggtagctacttctcat

SEQ ID NO: 383 - DNA, 187 bp, Glycine max
agcttggtctaaaattcccgaaaaattagctttttatgattatatcggaaataatccagcaaaaggggggttatttagagcaggttcaatggacaatggagatggaataaccgtcggttggatacgaccttctgtgtataaagaaaaagatgggcatgaactctttgtacgctcccccccctccttt

SEQ ID NO: 384 - DNA, 546 bp, Glycine max
ttctccactaagttgcctgatgcctgaaatgtcttttctgatggcagtggtcctagatgcagggaagaatttctccaagaacaccctcttaaggtcatcccagctgaaaatggacctgggagcaaggtagtatagccaatctttggccactccctctggagaatgaggaaaagtctttagaaagatatgatcttcttggacatcggggggcttcatggtggaacaaacaatatggaactccttaagatgcttatgaggatcttcacctgcaagaccatgaaacttgggcagcaaatgtattagtccagtcttgagaacatatggaacaccctcatcaggatattgaatgcacaagctttcataagttaaattaggtgcaaccatctccctaagagtcctctcacgaggtggagggtgagccatgttctaagtaggaaaattagtagtggaatgctcacaattagatattcagaatcacccttaacagaatgctcaaaatgcacagaatgaccaggatgcacactatgcctaactaatctatgaaag

SEQ ID NO: 385 - DNA, 435 bp, Glycine max
tgccttgccccttgatatatttgagggactcatggtcactatgaatgacaaattccttgggataaaggtagtgttgccatgttttcaaagcccgtactaaggcatacaactccttatcataagttgaatagttaagggtatgaccacttaacttttcactaaaataagcaattggatggccttcttgcatcaacacagccccaatcccaacatttgaagcatcacactcaatttcaaaagatttttgaaagtttggcaacgcaagtatcggggcattagtaagcttttgcttaagaacattgaaagcttcttcttgtttctctccccatttgaaaccaacatttttcttgagcacttcattgagaggtgctgccaatgtgcttaaatccttcacaaatcgtctattaaaacttgcttagccatgaaaacttccta

SEQ ID NO: 386 - DNA, 323 bp, Glycine max
agcttcttacaagagactaagaaatttttgacgaaatttttttagaggaaagatcttggggaagcctcgatcttgcggaagcctcttttgtattaggaatcaagatattaagagatcgctcttaaggtatcctaaggttgtcacaaaagagttatatcgataaggtcctagatagattcaacatgaaagatagtaaaccaggagatatcccgatagctcaaggagacaaatttagtctcaaacaatgccccaataatgaccttgaaagaatagagatgcacaagattctttatgaatcaacagttggaagtctactgccccct

SEQ ID NO: 387 - DNA, 504 bp, Glycine max
  unsure at all n locations
taagaccatttctaatgggttagataatntatttttaattgtttatcctatgctaattagtccttataatatcacattataattaaataatttatatatttcttgtttcaataagtaattcttaaataataagaaaatattttttctcataagtaattattattatatatatataattataggttaattttaaacaatttaatgtgacatataaataatctaccatagttaaaaaaattaacaattatatctaaaaataaaccaatcgttaaataatgagcattgaagatgctctaagataggaatactcccataaataataaatcatgccattatgttattcctgtatgaatatctaatcatgtttctttttttactccccaattttattacctatatatcctttgaaaaatatactataaatattttgatgtattttttaagagaacaaaggctcctggtttaacaaaaagccaagacaggggaattaaggccatttaaaaa

SEQ ID NO: 388 - DNA, 293 bp, Glycine max
atgcaagcttttaactgggaaatgctccaagaaacactatcttctttttccgattctctggctgcttgctccagtaaagcacaagaagaaatatgagcaccagcagattgccccattagataaatcctattacatagtaacaaaaaaaaggaaaagataaatctcagttgaatgtctaaatatatgatgaaaaggaatcttgtatcatagtagcacgccacctattagggtcacctccataattagctatgttgttgatgatgaacgaaattccccgcgaagtatcatttacc

SEQ ID NO: 389 - DNA, 605 bp, Glycine max
taagcttgcaaactagcttgtttaaataataataataataataagaataattattattatctataccatttttatggcattatgaatgacagtatgaagtagcataatgtgcttagagagttcacttgcattggaaaattttcaaaaagaaaaaaacttaagttaaaaggataatgcaaccagattaatacttccaaagaaaaaaatgttttgtaaaaacattttcagacaatttaaatatttttatttgactatattagtataaatcatctctaatccatatatttttaatattatgttctttttttttcattttcttttgatatactttgtgttttaataacttgaattcaatatgattttgtttatcaattatttttggatttgtgcattacttatacgaaattttataagtttcttcttttggttagtatgttagtatttcacgaggttttaaaataattaattgattaaagacgtctttaagcagactcttaaataggttcgtaggccgataagccgagtcgagcctttaaaaaaagctatgacagataatgagtcgaactcaaatcttacgtagttaacttaagtcaaactccaatcta

SEQ ID NO: 390 - DNA, 419 bp, Glycine max
tgcctgaaactatatgagatccctttgtcgttgccttccaactagggttaagcttaaggagaacccaatctcctatctggtagttcacttcacgacgtttcccatcagcttggcttttcatagcagcttgttccttagaagcttatttcgaatagcttggaaagtgttatccctatcagttaacatctcttcaacggcctcaatgttcgaagaccctgtaatatattcaggaaagttaaagggttttcggccaaaggtgacaccatactgattggctccagttcccgcattccatgaagtattatgggaccattcgacccacgggaggagctatccccccatgcttggcccacgatggatgaaggctcgcaaatattgttcaattatgcaattcaaaacccttgtctgtccatcaattt

SEQ ID NO: 391 - DNA, 573 bp, Glycine max
agcttccaagaatcaagatcaagattcaagatttaatattcatgaatcaagagaacacttaatcaagataagtatgaaaaagttttttcaaatactaagtagcacatggatttttctcaaaatctgtttaccaaagagtttttactctctggtaatcgattaccagattattgtaatcgattactagtagcgaaaatggttttaaaaaaacttttaactgaatttacaatgttccaattgatttcaaaatgttgtaatcgattacaatgttttggtaatcgattaccagtgtgcttgaacgttgaaattcaaattcaaatgtgaagagtcacattctttcacaaaaaagctttgtgtaatcgattaccagtgaaagtttttgaacaaatcaaaagatgtaactttttaaatagtttttgactctttcaaattggctttaagtttttctaaaagtcataactcttctaatggttctcttgaccagacatgaagagtctataaaaacaacgctttgttttgcattcttacagctattcaatccaatcaatcttatacaatcctttacaagccctg

SEQ ID NO: 392 - DNA, 453 bp, Glycine max
tccaccttctatgtactcataaatcagtatcttctctgaaccatttaggcaccaaccgtagagtgtgaccaggtttggatgtggccaaccaaagccatgaccactcagaacctccatttcagccttgaattccttctcaccctcaagaccttccctttgaagcttcttcactgccacttgtctgccatctgaaaacactcccttgtacactgttccaaaccctccttttcctataactctgtcctctgagaagctgctagttgctttcagaatgtcggcatgtgtgaaaactgtcttgttcagacggataaccttaactgtgtcagacatccatgatgaggatccggagctgctggaatcatgccattgttttgtatccctcaagaggtatcttggttcctctgaagggcttttcaccgatacacagactaggatcgtaagaagcccgatact

SEQ ID NO: 393 - DNA, 548 bp, Glycine max
agcttgtgcatccaataccctgatgaggatgtcccatttgttcttaaaactagacgaatccatttgcttccaaagtttcatggccttgcaggtgaagacctgcacaaacatctgaaagaattccatattgtctgctacaccatgaaacccccagatgtccaggaggatcacatatttatgaaggcctttcctcattctttagagggagtggcgaaggactggctttattaccttgctccacggtccatcacgagttgggatgacctcaagagagtattcttagaaaaaaaatttccctacttccaggaccacggtcatcagaaaggatatttcaggcattagacaactcagtggagagagcttgtatgaatactgggagagatttaagaaactatgtgccagttgccctcaccactagatttctgagcagcttctcctccaatatttttatgaaggactcaataacatggagaggagtatgatagatgcttgccgtggtggagctcttggagacatgacccctgctgaaaccagaaatttaattgaga

SEQ ID NO: 394 - DNA, 230 bp, Glycine max
tccattattcaaaagttgcctgtgcttcttcaacccgtggctgttaatggtaatttagtccccctcggacaaagaaaactgatgtgtaatgatgactgtgctaagttagagcggaaaagggttcttgcagatgcttttgagattaccgctccaaatctggattcactccattttggtgagaattcggttgcttctgaattgctggctgacatgttgagacgtgattctaa

SEQ ID NO: 395 - DNA, 466 bp, Glycine max
tcaactgtgaagctatcttcgtatcgagcatggccaaatatgcatgactttcggtttgcgctttacaagttgccattgcgggttcccaaagatgaccaagaatatgctggtttatggggaggaacttttggttggcctcctggaaagccttctgaagacaagcctggaaaggctttattctttcttctgctcttttatgaggagttccagggacaacagcttcttattgcaacaaaaattttggaaggcacacactatgtgttacatcctaacgtgtcagcaatgtttacagcaaatatcaatgatccttcatccgaaccctttccctgggacactgatgcagactcggttccagtgaatatcaagcaagctttcgtgggagagggtattgcaagtggttacgggttcagataccctggatcaaagcctggttccctctttgttttagaaaatggtatccttgcct

SEQ ID NO: 396 - DNA, 430 bp, Glycine max
taaacattcaacttcgagcgtctcgatatattacgagtctcaatcaatcatccgagaaaaaagttattgtcgtttgaatttgctcagaggttcaacattcaattttgagcgtctcgatatatgacgggactcaatcagacatccgagtagaaagttattgtcgtttgaattagctcagagcttcaacattcaatttcgagcgtctcgatatgtgacgggactgaatcagacatccgagtacaaagttattgtcgtttgaatttgctcaaaggttcaacattcaatttcgagcgtctcgatatattacgggactcaatcagacatccgagtaaaaagttattgtcgtttgaattggctcatagcttcaacattcaatttcgagcgtctcgatatatgacgggactcaatcatacatccgagtgaaaaggta

SEQ ID NO: 397 - DNA, 461 bp, Glycine max
agcttagagccaattcaaacgacaataactttttactcggatgtctgattgagtcccgtcatatatcgagacgctcgaaattgaatgttgaagctctgagccaatccaaacgaccataactttttactcggatgtctgattgagtcccggaatataacgagacgctcaaaattgaatgttgaagctttgagccaattcaaacgacaataactttttactcggatgtctgattgagactcgtaatatatcgagacgctcgaaattgaatgttgaagctctgagccaattcaaacgacaataactttttactcggatgtctgattgaggcccgtcatatatcgagacgctcgaaattgaatgttgaagctctgagccaattcaaacgaccataactttttactcggatgtctgattgagccccgcatatatcgagacgctcgaacatgaatgttgaacctctg

SEQ ID NO: 398 - DNA, 553 bp, Glycine max
tgcatccatgtgcactagttattgtattattgaagagaaagaataaatttgaggtagagactacagagtgtagcatacatgtccacttgctgtttctgacagttggcgggtccataaatttgaaagattcaatgaaccatctttcagagacattgctattcccattgttgcagctgagtgtgatgatagattgctggaatatgaagcacaagaaacattaaaaggattgctaaaacaggcaaaagagtatgttcaatttgatttactgaatacaaaattacccaccgagttgtttgcaccccgattagtgcacgcagaccagccgaggccacaacctctactgacgaaacttctgaaagttgatgcctaaacacagcagtagcagctccaccaccttcatctccattcactgctaaattacctccaatcgtaacagcattgtgctttgataactgagaactgaattcacttgtcatagccattctgatactcataaacgtaataaaatacacaaacaatcagaccaaaaacaaagaagtgcttaacacattaa

SEQ ID NO: 399 - DNA, 357 bp, Glycine max
agcttctatagaaggttcattcctaatttctctacaattgcatcacctctcaatgagctggtgaagaagaatgtggcatttaccttgggtgataaacaagatcaagcctttgctttgctcaaagaaaagcttactaaggcacctgttctagctcttcctgacttttctaaaacttttgagctagaatgtgatgcctctagagtgggagttggagttgtattgttacaaggtgggcaccctattgcttattttagtgaaaaacttcatagtgccccccttcactaccccacctatgataaagagctttatgccttaataagagcccctcaaacttaggaatattaccttgtttccaag

SEQ ID NO: 400 - DNA, 400 bp, Glycine max
tctaaactttatacaagaatgaagctctgataccacttgttggataagtggcctcagatatcttacgaaagggggttgaattaagatatcacaaactatttccccaattaaaaatttattttactttctattcaagttataaattcccttaaaaatgaacttcttaaatattgattcaaataaagcaatttgaatatgaatataaaacaataataaataaaggagtttaagggaagagagattgcaaactcagacttatactggttcggtcactcccttgtgcctacgttcagtccccaagcaacccgcttgagagttccactatcttgtaaaagcctattacaagatctgaaccacacaaggacaacccttcctttgtgtttagatttctttacaacaa

SEQ ID NO: 401 - DNA, 111 bp, Glycine max
agcttgcataactgaaaccatcttttggggtattttattggtaaaaacagcagcaccttcaacagaattcattgaataaccacatggcttaaaagtaaagtcacaaatctc

SEQ ID NO: 402 - DNA, 387 bp, Glycine max
aatactaagctcgcttctacatttatcacctttatagatgattgttcgtgatatatgaatatttattcgcttcataacaaaaataaagcattggatcccttcaaagtctttaaggctgaagttgagaaccaatgtggtaagaaaataaaaatagtgagattagatagaggtggagaatattatggcaaatatactgagaatggacaagcacctggtccttttgcaaagtttcttcaagaacatacgattgttgcccggtacactatgcctggttctccaaatcactatggtgtggctaaaagaacgaaccgaacattattggacacggtacggagtatgcttagcaactctgatcttcctaaatacttgtgggctgaagcactaaag

SEQ ID NO: 403 - DNA, 426 bp, Glycine max
tgatgaagagtgcttgacagcttttcagaccttgaataccagtctcgtgtctgctcccataatagtgacacctgactggagtaaagagtttgagctcatgtgtgatgtcggtgactatgcaatgggtgcaattcttggacaacagcaaaacaaggtattccatgccatttattatgccagcaaggtcctaaatgatgcacaactgaattatgccaccattgagaaagaaatgctcatcattgtttatgccttagagaagttcggatccctatttgttgggctccaaagtcatcatctttactgatcatgcagctattaagtatcttctaacgaagaccgatttggagccaagggtaatcacatgggttcttctgattcaagagtttgatatagcgattaaagacaaatagggctaagagtaaagtc

SEQ ID NO: 404 - DNA, 609 bp, Glycine max
catcccatgcttctttggccgtcgttgcgttggatatcttctcaaatgtatcttcatccaccgattgataaatgagaaagagagctttcttgtctctctttcttgactccttcaacgtctcctttacaccttggcttagcgaggcttcatcttgttcctcgaagccattctctatgatatcccacacatcttgagctcctagtagcgccttcatcttgatactccaattatcatagttgttctttgtgagcatcggcatttggaaaggaaaacctccattcgccatcttttgaggatcttgaagctctgataccactttgttggaaataaggctttttatgtttaggaaaagtgtttaggaatattggagactttgaataggaaggagaattctctatggaggagagaactttgtatttttgcttgatacaaatgtgtaggattacatctctatttatactactctaaggagaactctagacacactaattctagagagttctcaactctagagatccaaagaggattctagagaatattaaaaccataagaaatatctagacacttcaaacactacaaaaattctctagaacatgacccataattact

SEQ ID NO: 405 - DNA, 353 bp, Glycine max
gcttaaggagaccactttgaactttttcacgaacaatatggcaatctaagtcaatgtgtttagtacgctcgtgaaaaacttggttaaaagagatctggatagcgattgattgtcacaccaaaaattggggggtgaacctaccaaacacgtaaatcttgaaggagatatgtgagccattggagctcgcaagtagtggaagccaaggctcgatactcagcttcggaggagctgcgagacagagtgggctgtttctttgagcaccaagaaataatggaattgtcgagatagacggagaagccgatgatggaacgtcgagtgtcatgacaaccggcccaatcagaatcactgaatgc

SEQ ID NO: 406 - DNA, 577 bp, Glycine max
tcttcagaaacgtggcatttgtgtgcaatacacaatgctcggttcaccacaacaaaatggtgtatcagaaaggtgtaatagaacattaatggatatgattaggagtatgttaatcaatttgactttaatcatatctttgtggatgtatgccttgaaaactgtcatgtatttgttgaataggattcctagtaaggcagttccaaagacacctttgaactgtggacaaataggacacctaatatgaggtacctgcatgtttggggttggcaagcagaaataaggatttataatctgcaagaaagaaaattggatgcaagaacaatcagtggctatttcattagttatccagagaaatcaaaggggtatatgttttattgtcctaatcataatatgagaattgtcgaaactggaaatgcaagattcattgaaaatggtgaaatcagtgggagtacagttccacgagaagtggaaattaaagaagttagagtgcaggtcctttttgcttgggcctctaacagtaaggtgattgctcttttaattggtgttgcataattaatgaagaggagcaacacattaa

SEQ ID NO: 407 - DNA, 331 bp, Glycine max
gtacatatgttctcaacacgagaacgtttgaggtatctaataagcatgtctgcaagttggtcaccggagttgacaaagtcaatgatgatttctcctgagagcaccttttctctcacaaagtgacagtcaatttctatttggttagtctgctcatggaagatcggatttgatgcaacgtggagagcaacttgattgtcgcatagtatcttgagtgtctccaaattttagttggtggagaaattgcctagccatgtaaccttggatgcaatagctgccatagcatgacacttagcttcaacactggatatagcaattgtttctgcttcttact

SEQ ID NO: 408 - DNA, 136 bp, Glycine max
atacgcctgaatcaacatccgtgtgaaaagttatgaccatttgaatgtttcgaaagcttcctttgttcaatggcgagcatatagacataatgagagcccgaatctgaccaccgtgtgaaaagttatgaccatttga

SEQ ID NO: 409 - DNA, 448 bp, Glycine max
  unsure at all n locations
agcttggaacatataaactgaatcctagttcctcttaaggacttagtcaaaatgtctgctggctgatcattagaattgatgaactcagtggtaatctccttggacaataatttttctcgaatgaagtgacaatcaatctctatgtgcttggtcctctcatgaaagactggatttgatccaatgtggagggctgcctgattgtcacaaaataacttcattcgtgtaacttcacaaaacttcaattcttgaagaagttgcttaatccacataagttcacatgtgaccaaagtcatagatcggtactcagcctctgcgctggatcgagcaacaacagtttgtttcttgcttttccaagagataagatttcctccaatgaaaacacagtagcctgaagtagatntcctatcaataggacaaccagcccaatctgcatacaatatccagatac

SEQ ID NO: 410 - DNA, 445 bp, Glycine max
tcaacctagaggagacggaccattccaagtgttggataatatcaacgacaatgcctacaagattgacttgcctagtgagtataatgtaagtgccactttcaatgtgtctgatctatctctttttgatgcagatggaggggccttgtatttgaggacaaatccttttcaagaaggagggagtgatgatgacataaccaagggcaaggaccatgaagcacttgaagggcccatgaccagaggcagacttaaacaagcccaacacgtcatagagacaaggctggtcatttgtatagctaccattgatgatgattgaaggcccaagtggagaaagatgaatgcccacaggcataggcactaccaagactactaattgttgctgaacgcccaagttaaataagtttttagttataatttatttttattgtaactttggcccaaactgttt

SEQ ID NO: 411 - DNA, 375 bp, Glycine max
  unsure at all n locations
taatatccaagcacttttgctntacttgcttgctttgctctttaatttgntttctattttcagtttcatgctccatgtaggtgaattgttctgttttattttctgtggagtttttttctatttacttggtgcatggtttttcagttatgtcaacacttgcattgcttttcagtttcatgcaaccatggcatgatttacattgcaaaattgaaggccgtgctgcatatgatatactcactaattntgagcagcgctggagaaaagccaccaaatggtctgagatgggtcggaaactcaagagagtatctaacttgaacgatgattctttgatcaagatagaacacatttcttggattcttagtctttcgaattact

SEQ ID NO: 412 - DNA, 451 bp, Glycine max
  unsure at all n locations
ntcccatagaccatctaaaatggtgatattccaatgggagtcttgaaggtagtcctgtaagcccatagggcatcatccaacttcacaaccaatccttccttgaggatgcaacaatattctccagaattttcttcaattctttgttggatacctcggcctggccatttttctgaggatgataaggtgaaactaccttacgtttgacattataatgcccaataccttctacaactatctattgcagaaatgtgaaccctatcactgattatcactctggagaccccgaagcgggagaaaatgtttctcttcaggaatttgatgacaatcttggcatcattctttgaggcaaccacaacttccacccacttggacacttaatcaacaaccaccaagatgtactcattcccataagaggatggtagagggcccacaaaataaataccccaacagt

SEQ ID NO: 413 - DNA, 452 bp, Glycine max
  unsure at all n locations
tgatgaggtgatattgataaagcanaccgaggggtttgaagctagaggtaaagaggattatgtttgcaaattaaacaaatccttgtatggtttgaaacaatcctctaggcaatggaataagagatttggtgaatttatggctcatataaagtttcatagaagtcaccatgatagctgtgtttacttcaaattttcttctaaagctgagtttgtgatattgctactatgtgttgatgatatcttgatagcaagtaataacaagagtgaagttgaaaaattgaaatgtaggatttgggaacaactaggaggatattgggaatagaaatcaaacaggacagaaaaaggaaattgttatatttgtcttaagagttatatatcagaaaagttcttgaaaggtttggaatgtcaaattccaaacctgtaactactcctatgtcttagcagtttaagct

SEQ ID NO: 414 - DNA, 450 bp, Glycine max
  unsure at all n locations
tatgctgcanatatttacaatagacctcctcaacctcagcagcaaaatcaaccacagcagagcaattatgacctctccagcaacagatacaatcctggatggaggaatcaccctaacctcagatggtccagccctcagcaacaacaacagcagcctgctccttccttccaaaatgctgctggcccaagcagaccatacattcctccaccaatccagcaacagcaacaaccccagaaacagccaacagttgaggcccctccacaaccttccctcgaagaacttgtgaggcaaatgactatgcagaacatgcagtttcagcaagagaccagagcctccattcagagcttaaccaatcagatgggacaattggctacccaattgaatcaacaacagtcccagaattctgacaagctgccttctcaagctgtccaaaatcccaaaaatgtcagt

SEQ ID NO: 415 - DNA, 418 bp, Glycine max
  unsure at all n locations
agctnggcatggtttttaatagctntanaagcgttacttttagaagatatgaataaagtccaggtatatctagagtagtcatctacaataaccgaagcataataatttcctctaatacttatgggtctagaagaaccaaaaagatcttaacgtaaaagttcaagcactctcgaggtagaaactgcatttttagatttgaaagatactctatttgttttcccttttgacatgcattacataatccatccttttgaaattttagctttgggagacctttaactaattccttatagactagcttatttagttgatccatgaggatatgagttattctcctatgccaaagccaagagagatcatcattacttcttaaacaagccatgtngaagtgagatgcactttctacattaagcatata

SEQ ID NO: 416 - DNA, 462 bp, Glycine max
actaagcttcttatccaggcacattcttggtggtgaaactccttcttccatggcttattcccttgtggatggagcctcccctctcctcttctcctttgccttccgctgcatctccatggtggaaaatcaccattgaagctcaaagatccagcctccatagaagcttcacatgcaagcttccatcagagttagtgcaactcgatgtcaaaacaacctttctccatggaagattggaggaagacattttgatgcaacaacctgaaggttttgaaatggaagggaagaaaaattatgtatgtaggttgaaaaggtttatatatgggttgaaacaatctccaaggaagtggtaccagagattcgatgagttcattattactcatgggtacaacagaagtgcctatgattcatgtatctattatagtaaggtgggggatggttttcgcatctaggtgctactctatg

SEQ ID NO: 417 - DNA, 457 bp, Glycine max
  unsure at all n locations
tctgggggacatcttgacttgctttccaatctgacattctccacagattctgccttcttctattntcagattgggaatgcctctaacagcacctttgtcaatgattttcttcatgcctcttaagtgcagatgtccaaatctttgatgccatattctgacttcatcttctttggaggatagacatgtggaggagtaactggtttcttgaggtgtccataggtaacagttgtcctttgatctgctgcccttcattagaacttcactcttctcatttgtcaccaagcattctgactttgtgaagtttacattgaatccttcatcacacagctgactgatgctgatcaagtttgcagtcagtcccttcaccagcagtactttgtccagactaggaagtccatcatggactagctttcccattccagtgatctttcctttagagccatctccaaatgtcaca

SEQ ID NO: 418 - DNA, 466 bp, Glycine max
  unsure at all n locations
acggaccttgaaactaagcttgaatcgatacacaaggcttgtaatcaattaccagatgttttaaacattttataacaaccttctgaaatttgaatttaaattttaaagacctgtaatcgattacaacttgtgtgtaatcgattaccagacatgaaaattcaaatttcaaatctaaagagttacaactcttcagaatctaactgtgtaatcaattacaatagttatgtaatcgattaccagtaaggaatttttgaaaataactcccaagagtcacaattattcaaaacgttntttggatggtcatcaaaggcctataaataggtgacttgnggtacaaaattccttagatttttcctgaacaaattttcttatcctctcaataccaaattgtcttataagtctaaaaaaagaattctttggccaaaacacttgcaaattcagtaaggaatcttgagtgatgttcaat

SEQ ID NO: 419 - DNA, 443 bp, Glycine max
  unsure at all n locations
tcctcttatgagtgcatagctctttcanaaatttagcatatcttggaatttgctttattgcatccagtagaggtatgtttacctctactcttctaaatgtttccaagatctccttctccgcctcttccattttcttgttggaaattgctcttggtgggaatggaagagggatatgctactactgtaagtcagaattaccagtagaagattcacctgcatagaaattgttaggcaacttactctttaaatttttgtcatcatctttttctggagttgagtgacgttgggcaggttcatttgcagatgaggaagatgctactagttgaggtccttgatactgttttcccaacctcaatgtaattgcactcacattcttgggattctgtacagattgagaaggtaatctgtcagaattctgggactggttttgatttaactatgta

SEQ ID NO: 420 - DNA, 443 bp, Glycine max
  unsure at all n locations
ntgcagcagatgccactctactctaaattntttaaagatatgttaacaaggaagaacaaatacattcatcaggaaaacatcagagtggaaggaaattgcagtgctgtgatccagaagatccttccacccaagcataaagatcctaggagtgtaacgattccttgttcaattggagaagtcaatgtgggaaaagctcttattgacctgcgagccagtatcaatttgatgccattctccatgtgcggaagattgggagagttggaaataatgcccactcgaatgactntacaattagctgaccgctccattaccaggccatatagagtaattgaagatgttntggtcagagtaaaacattttaacttcccggcagactttgtggtaatggatatctctgaagatactgacacccctgtattattgggaaggctattcatgttgac

SEQ ID NO: 421 - DNA, 180 bp, Glycine max
aatgaagtgaaatccaacatctatatgcttggttctatcatgatgaacctgatccctggccatgtatataacactaaggctatcacagtagatattaacatactcttgattaataccgagatcatttatcagacctcttagccaaattccttcctttggcagcttcagtaagagtcatat

SEQ ID NO: 422 - DNA, 469 bp, Glycine max
  unsure at all n locations
tactcagctttgcaagctggaatcatttatcctatcttcgacagccaatgtgtgagtcccgtctaggtattcccgaagaaaatctgcctcaccgtgataaaaaatgagaaggatgagctgattcctactcgagtgcagaacagttggagagtatgcattgactataggaggctgaaccaggttaccaaaaaggaccatttttcactgccattcattgaccagatgcttgaacgcctggcaagtaaatctcactactgtttccttgatggtttttctggttatatgaaaatcactattgctcctgaggatcaggaaaagaccacattcacctaccccttggacactttagcttataggaggatgcctttcggcctgtgcaatgcccctggtaccttccagcggagcatgattagtatttttagtgattntttagaannatgcatagaggtgtttatggatgatttcactg

SEQ ID NO: 423 - DNA, 424 bp, Glycine max
  unsure at all n locations
agcttcaaccctttcccaaaactcggcaaggtacgcgaaatgttattcccactcagatccaacaatgtcaaagatttcaaactagtccaattactcggtatcgtaccactaatatcattacctcccaaccttatctcaacaagagaatctaacttggcaacagaaggactcaaagtcccactaagattaaacttttccaaaataatcatgtccacctttccgtccccattgcaccttatccccaaccatggcccgtgacaagggtcatttccactccaagaatcaaccaaaatccaaggataccccaaccctccaagaaactccaacaacaccatcacttcaaaagcacacataaccccggcctttgcctcacaaaattcattgttctcataactcactttactcgctgcanattccgggatcg

SEQ ID NO: 424 - DNA, 311 bp, Glycine max
tgatagcagcgtaatggagaaggagaagggtgattggagatgccacttcaaggagaagatgagtctagaagaagctcaccaccataggaagccatggataagagcttgaaggtaagaaaagatgaatggagggagagggagaaagggagcatgaaatttaatgcctctaaagaagtttgaactttgaaagttaattctcaaatgatcaaagttgaaaaaatgcacacacatagcctctatttatagcctaagtgtcacacaaaattggagggaaatttgaatttctattcaaatcttactagaaatttgaa

SEQ ID NO: 425 - DNA, 322 bp, Glycine max
gcaaaccaatagcagcagaataattatgaccttttaagaaacagatacaatccaggttggaggaatcatccaaatccgagatggacaagtccttcacaacaacaacagcctatccctcctttccagaatggtgctggtccaagcaagccatatgttcctcctccaatgcagcaacagcaacaacaacaaagacaacaagcaactgaggcccctcctcaacctttcttagaagagttagtgaggcaaatgaccatccagaatatgcaattttagcaagagacaaaagcctccattcagagtctaacaaatcagatggggctga

SEQ ID NO: 426 - DNA, 436 bp, Glycine max
  unsure at all n locations
tccattggtgtcttgaaacctaaggctgatgaaggacatctattaatcaaatatgttgttgtgtttgcagcttctccccaaaaagcctttggcagtcctgcacttagaagcatgcaccttactctttccaaaatggtcctgttcattctttctgccaaaccattctgttgtggagtgtgagggactgttttgtgccttttgatgcctattttcctgcaaaactcattgaactgctctgaaacaaactccaggccattgtcagttcttaaaacttttaattttgtaccaagttgatttccaacaagagtatgtcattctctgaatttttgaaaagcttccgacttatttttcanaacatacagccatactcttcttgagaaatcatctatgatggtgagaaagtatgagcttccaccatgagttttcactctagatg

SEQ ID NO: 427 - DNA, 416 bp, Glycine max
  unsure at all n locations
agcttcatgcttaactatgtatggcaaaacttcattactggtggtcaagacatacaagtgagcttgtaacaaatcttctacacttggagtgatcacatgcagtcctcttgaacccttaccacccactctgtcatcatgtcgagactcaagaagcccaacaggtttaaccttctctaagtattctgaacaaaaatcaatggcttcttctacaatgtacctctcaacaatagatgcttctggacgatatagattctntgtatacccttttaagatctttatgtatcgctcaaccgggtacatccaccgtagataaacaggaccacaacattngatttctctaaccagatgcacaatcaagtgaatcatgatngtcaagaaaganggggaaaatacatctncactggcacagtataatt

SEQ ID NO: 428 - DNA, 459 bp, Glycine max
actaagctatgctgctacatttatataaacctccacagcagcatatcctttatcagataaataattatgacctttcaagcaacagatacaatccatgttgaaggaatcatccaaatctgagatggacaagtcctccacaacaacaacagcctgtccctcctttctagaatgttgctggtccaagcaagccatatgttcctccttcaatgcagcaatatcaacagcatcaacaaagacaacaagcagttgaggctcctcctcaaccttccttagaagagttagtgaggcaaataaccatccagaatatgcaatttcagcaagagataagagcctccattcagagtctgacaaataagatggggcagatggctactcagatgaaccaagcccagtcccaacattctaacaaatagtcttcacaaactgtgcagaatctgaaaaatgtgagtgccatcacct

SEQ ID NO: 429 - DNA, 333 bp, Glycine max
  unsure at all n locations
aagatatgggcctgcctatctgatcttctatgctttaataggtggaaagaagaattgagttcaagaggaacctcactcttatgatgaggtcataagcaacaaggacaattcaaaatggattgaagctatggaagaagaaatgtcttttctaaaaaagaattgtcctaaagggcagtaaattgttggatgcagatggctattcaagaggaaagaaggttttgaaggagttcaaagtgtaaggttcaaagctaggctagtagcctgtgggtttactcaaaaggaaggagtagattntgtagaaatcttctcacctatggtaaaacatagttcaat

SEQ ID NO: 430 - DNA, 339 bp, Glycine max
gcccatagggcatcatccaacttcacaaccaatccttccttgaggatgcaacaatattctccagaattttcttcaattctttggtggatacctcggcctggccatttttctgaggatgataaggtgaaactaccttacgtttgacattataatgcccaataccttctacaactatctattgcagaaatgtgaaccctatcactgattatcactctggagaccccgaagcgggagaaaatgtttctcttcaggaatttgatgacaatcttggcatcattctttgaggcaaccacaacttccacccacttggacacttaatcaacaaccaccaagatgtac

SEQ ID NO: 431 - DNA, 412 bp, Glycine max
  unsure at all n locations
tcactgaattgctggtcttattgaagaacatgcttctctgatcaaaacacttttccgaanaatcactacgaggccaaaaagattttgtgtccagtgggaatggagtacaagaagatccatgcatgccctaatgattgcatattgtatagaaatgagtatgcagaactacggcaatgccccacgtgtggggtatcatgatacaaagtgcaacatgatgaattaactgatgatgcaggaaccaaaaattgtcgtcctgccaaggtgtgttggtatcttccaataataccaaggtttaagcgattgtttgctaatacacatgatgcaaaaaacctttcatggcattcggatgaccgaaaatctgatggattactgtgacatcctgccgattcgccgcagtggaagacaattgatc

SEQ ID NO: 432 - DNA, 455 bp, Glycine max
  unsure at all n locations
ngtctctacagaagaaagaaacaaaaataagagtagattcattgtagataattctttgcagtgatcaagaataattatgaaccaaccaatcaatcaacaagcataaattgaaaattggtcccacattctaaaaatggtcatctcagtgcttcaaaaaaatttctcaaaagaaatagaaagtacaaaatcatacataaaagcttagaagcaaagtttgagggttttatcttacttttgatatcctgtgtccacacctttgctggggatgaaccaatttcttcatctcccagagtgttattccaattggcactttctttcttcaaatgaccaagctcgctcaacaaatattcaacattgatgtaatggcattccctccgagtcttccagaaaaggagttccacaaacaagagggggtgctttttcattntctttagcatctttctgaccaaacaagt

SEQ ID NO: 433 - DNA, 378 bp, Glycine max
  unsure at all n locations
agctntaaaggaaatctatattngnctcttgtcctatnttccttgcaatggaattttgttggattgctgctcactcctttgagtattttgcaattggtatctctatttagatattttctgagagaagaggtcaatggaaggcagcagctcaatcccaggaatttattcgaacactacagcgttattataacaacacatatttagatggtgataagcaaaaagcaattaacttgtaagtcaaataagccaattttttatttgtatttacaactgttttcatatgtaatatggtttacagcaaacacaagttatgtatatatgtgattgcattataatgatttactaattggtgggtctgattttgtttggttcacactc

SEQ ID NO: 434 - DNA, 420 bp, Glycine max
  unsure at all n locations
agctntgaccaaaccccagtagcagttgttttcttagagacttgcctcagcaccttgtctctgagattaaggataattgcattgtgttccttctgcaatagtgctttcttatccccatcagccatcatcttttcgagtttggcttctccatcaagtgcttccaccaggccctgctgaacaagaaaagctctcatcttcaatcgccataacccanaatcattttgccctgtgaatttttcaacctcatacttggccgagcccatttcttgaatcgaactcaaaatcgatccacactcaccgcaccaatttgttgtgccaagatcagattttacttcacaaaagaatgagtttcttgtatgaacaagaataagcaaaatgcagaaaaatgaaccataaactgcacagaactcacaacagtca

SEQ ID NO: 435 - DNA, 397 bp, Glycine max
  unsure at all n locations
gaagctctaatatcttccacactttttggtgtgggccattcttggatggccttgattttctcagggtccacttggaccccatttctaccaactaccaaacctaaaaaaactatattatctacacaaaaggtacacttctctatatttgcataaaaggtgtttttcctaaggactgaaagaacttgtctgagatggtctaagtgatcatctagcctcctactatacactaaaatatcatcaaaataaacaactacaaatctacctatgaaatcccttaagacatgatgcataagcctcataaaggtgcttggtgcattagtgagcccaaaaggcatcactagccattcatacaaaccaaacttggtcttgaaagcagntttccactcatcaccctttt

SEQ ID NO: 436 - DNA, 394 bp, Glycine max
ttaattgggcaccttaaaattggaggcttaaggttggaatccaaggagaagatgatgagaggactaccctttattaacccccgtgaataactttgggaaggatggttacttggaaagcaatttaaaatgaggttttccaaggaagcaaacttatgagctaagaagccacccgagctaatacatgctgacatctgggggccaatcaagccaagctcactaggtaaaaataactatttccttcttttcattgatgatttttcaagaaaaacatgggtttatttcttaaagcaaaaattaaaagtcttttcttgcttcaagaagttcaaagctgcagtggagaaagaaaatgatcaagatatcaaagccatgaggactgatcgaggaggataattca

SEQ ID NO: 437 - DNA, 446 bp, Glycine max
  unsure at all n locations
tagtanagctaagcactaacaatctctctctttggcaaattntgtctaaaacatacttagacacttcctgagcaggtacgagcagttatgcaagtgggatcagcaactttcattatcagagtaatcaagcacagcggtatctgtagtggcgacagcaaaattctgcaagttgcaagtcgtttcccggatgtcaagacatctcacgtgacatcagctttctgctccccctgtctccatgctcttactgctgtgaagcagttcactgcagcatcttctatcagctactagtcttttccaggatgtcaagacatctcatgtgacatcagctttttgctccccctgtctccatgctcgtactgcatcttctatcagctactagtttcagtagcttacatcaatcatcatcagcagcagcagtctgcccctagaatcatatacatacaact

SEQ ID NO: 438 - DNA, 397 bp, Glycine max
tccttgagaagattccttgagaagattcctaaagaagctagagcttagctacatacacctctctaataggaaagctcaccttcttgagatgagaagctagagcttagctacaccccctataatagctaagctcacccctatcccaaaaatacatgaaaatacaaaaaaaaagtccctactacaaagactactcaaaatgccctgaaatacaaggctaaaactctatactactagaatggccaaaatacaaggcccgaaagaaggaaaaacctattctaatatgtacaaagataagcaggctcatacttagctcatgggctcgaaatctatcctaaggctaatgagaaccctagggccttcccttggatctctggcccaatctacttggagtcttcta

SEQ ID NO: 439 - DNA, 421 bp, Glycine max
  unsure at all n locations
ntgatattggtaagtaaatgcctcanaacttctattatatttcctgtttctgaagtacgttntttctcactaacatctctttttataacattaatctctttaatcctctcatttgtactaattactttatcttacatttttcttccttttcttctcatctccttttctattaaaaaagttgcccgattttgttatataaatgcaatttctcttttcattntaccaaactctatataaagatattttatttgtttcaccaggacatatttgctgctggaactgatacttcagcatcaacactagagtgggctatggcagaaatgatgagaaatccaagagtgagggagaaagcacaagctgaattgagacaagctcttcgagaaaaggaaataattcatgaaagtgatctagagcaacttac

SEQ ID NO: 440 - DNA, 437 bp, Glycine max
  unsure at all n locations
tcaacatcagaccacttccagggtgctggatctacttcacatggacttgatggggcctatgcaagttgaaagccttggaggaaaaaggtatgcctatgttgttgtggatgatttctccagatttacctgngtcaactttatcagagagaaatcggacacctttgaagtattcaaggagttgagtctaagacttcaaagagaaaaagactgtgtcatcaagagaatcangagtgaccatggcagagagtttgaaaactgcaagtttactgaattctgcacatctgaaggcatcactcatgagttctctgcagccattacaccacaacaaaatggcatagttgaaaggaaaaacaggactttgcaagaagctgctatggtcatgcttcatgccaaagaactttcctatgatctctgggctgaagccatgaacacagcat

SEQ ID NO: 441 - DNA, 371 bp, Glycine max
gctggaatcatttatcctatctccgaccgccgatgtgtgagtcccattctttagtcttgaagaataccggcctcgtagtgatgaacaatgagacggaggagctgattcctactctggtgcagaacagttggagagtctgcatcgactataggaagctgtaccacgttaccacaaaggaccatcttcccctatcattcattgaccacatgcttgaacgcctggcaggaaaatctcactactgtttccttgatggatgttctggtcatatgcagattactattgctactgaggatcacgataaaaccacattcacctgccccttcagtacttttgcctatatgaagatgcctttccgactgcgcaaaggccct

SEQ ID NO: 442 - DNA, 459 bp, Glycine max
  unsure at all n locations
ctcgtacccggtatcctcagagtcacctgctgcatgcatgcttctgcattcaatttcgagcatctcaatatattacgggacttaatcggacatccgagttaaaagttattgttgtttgcatttgctacgagcttccgttttcaattacgagcgtctcgatatattacgggactcaatccaacctccgagttaaaagttattgtcatttgaatttgctacgagcttccgttntcaatttctagtgtattgatatattacgggacttgatcgaacattcgagttaaaagttattgtcatttgcatttactcacagctttcgttttcaatgacgagtgtttcgatatattacgggactcatccgagttgaaagttagtgtcatttgaatttgccacgagcttctgttttcaattntaagtttcttgatatatttcgggactcaatcggacatccgagttaaa

SEQ ID NO: 443 - DNA, 454 bp, Glycine max
  unsure at all n locations
tganattgaacaacggaagctctcgagaaattcaaatgatcataacttttcaaacgaaagtccgattcaggtgcataatatatcgggaagcttgaaattgaacaacggaagctcttgagaaattcaaatggtcataacttatcacacaaaagtccgattcaggcgcataatatatctagacactcgaaattgaacaacggaagctctcgagaaattcaaatggttataacttatcacaccgaagtccgattcaggcgcataatatatcgagacgctcgaaattgaacaacggaagctctcgagaaattcaaatggtcataacttatcacacggaggtccgattccggcgcatagtatatcgagacgctcataattgaacaacgaaagctctcgagaaattcaaatgctcataacttatcccacggaaggtcgattcatgcgcatgatatatcta

SEQ ID NO: 444 - DNA, 405 bp, Glycine max
agcttggaaatgaacaacagaagctcacgagatactacaatggtcataacatgtcacacgaaagtccgattcaggtgcataatatatcgagacgctcgaaatagaacatcggaagctctcgagaaattccaatggtcataacttttcacacggaagtcctattcaggcgcataatatatcgagaagctggaaattgaacaacgaaagctctcgagagactcaaatggtcataacttgtcacacggacgtccgattcaggcgcataatatatcgagacgctcgaaattgaacaacgtatggtgtcgagatattcaaatggtcataacttgtcacacggaagttcgattcaggcgcataatatatcgagacgcttgaaatgaacaacggaagccttgagaaactcaa

SEQ ID NO: 445 - DNA, 430 bp, Glycine max
ctacaatggattaggtatcccatttcaacaaaaaagatttacttaacagattaaattctgcaaaaatattttccaagtttgacatgaaatccggatttttgcaaatccaaatacaagaatcggataggtacaaattgcttttacaataccttttgggcaatatgagtggaatgttatgccattcagtctgaagaacgccccttcaacttttcagaaaattatgaatgatattttcaatccttattataatttatcattgtctacatgtggaagcaatgccttccaagattattttgatgatgccaaagaatcaagagtcatacaagtttcaagaatcaagatcaagattcaagattcaagattcaagaataatcatgatcaagattcaagattcaaataaagaatcaaaactcaagattcaagaatcaag

SEQ ID NO: 446 - DNA, 410 bp, Glycine max
  unsure at all n locations
gtctcacgattgaacatgctcatgcaacaattgttagtcgtggctatacgagacatcttgccaaacaaagttaggttagcgataactcgcctgtgattnttcttccatgctatatgtagcaaagtcattgatccagtcaagtttgatgagttggaaaatgaggccgcaattatactgtgccagttggagatgtattttccccccgctttctttaacatcatgattcacttgattgtgcatctggtcagagaaatcaaatactgtggtcctgtttatctacggtggatgtacccggttgagcgatacatgaagatcttaaaagggtatacaaagaatctatatcatccagaagcatttattgttgagaggtacattgttgaagaagccattgaattttgttcagaatactt

SEQ ID NO: 447 - DNA, 435 bp, Glycine max
  unsure at all n locations
ntgatggtgttgagaagaaatcacatgtttgtcatcatcattaaggggaagaatgtgaatgtatgtatacatgattttgatgatgtcaaaagaagaatcaaacaaggctcgcttcaagattaatacaagattgtttcaacaaacaaagccttgattcaagatttcttcaagatcaagccttgcctcacaatgaaaggtttcaagtcattcaaggcacatgtaatcgattaccaatggcttgaaagtgtgtaatcgattacacatcatatgtaatcgattaccagagactctgaacgttgggaattcaaattttaaatgaagggtcacaactgttcaagagaaacaactgtgtaatcgattacactaattctgtaatcgattactagagaggattttcaagagatatcgccaacagtcacatcttatcatttggat

SEQ ID NO: 448 - DNA, 347 bp, Glycine max
  unsure at all n locations
agcttacccctcattgtaccaacaagtgtccttatgaggttctctttggctccaaacccgattgccataatctntgtgtttttgggagtctatgttatccatggctacgcccttactcaaataaaagcatgccatgtgtgtttctaggtccctctccccaacaccatgcatacgaatgctatcatattctaactcaaaaaatatacctctctagacatgttgtctttcatgaatcaatcttcccctcactacgcctcatttggtccctaccttcccaacctcaaaccatgatatgaccttacttatctcttgccatcctctcatactacaacaactccatacaaaca

SEQ ID NO: 449 - DNA, 412 bp, Glycine max
tctattctgaatttcaagcgtctcgatatactatgggactttatcgaacatccgagtaaaaagttattatcgttggaatttgctaagaacatccgttttcaattacgagcgtctcgatatactacgggacataatcggatatctgagtaaaaagttattgtcgtttcaattttctaagagcatctatttcaattttgagtgtctcgatatattacgggaatcaatcggcatctgagttaaaagttattgtcatttgaatttgctacgagcatatgttctcagttacgagcgtctcgatataccacgggacacaatcaaagatccgagtaaaaagttattgtcgtttgaatttgcacagagcttctgttttcagtttcgagcatctcgatatattacaggactcaatcggaca

SEQ ID NO: 450 - DNA, 403 bp, Glycine max
  unsure at all n locations
ncaagcttgagcaaattcaaacgacaataacntttcactcggatgtctgattgagtcccgtaatatatcgagactctcaaaatggaatttcgaagctctgagcaaattcaaacgacaataactttttactcgtatgtctgattgagtcctgcattatatcgagaccctcgaaattgaataccgaagctctgatccaattcaaacgacaataactttttactcggatgtctgattgagtcccgtaatatatcgagaacgctcgaattgaatattgaagctctgaacaaattcaaattacaataactttttcctcggatgtctgattcagtctcgtaatatatcgagacgcttggactagattgccgaagctttgagcaaattcaaacgacaatatacttttact

SEQ ID NO: 451 - DNA, 447 bp, Glycine max
  unsure at all n locations
ntgaatgcactattcaatggagttgacaagaacatcttctgtctgatcaacacttgcacagtggctttagatgcatgggagatcctgaaaatcactcatgaaggaacctgcaaagtgaagatgtccagattgcaactcttggctacaaaattcgaatatctgaagatgaaggatgaagagtgtattcatgacttccacatgaacattcttgaaattgccaatgcttgcactgccttgggagagaggataacagatgaaaagctggtgagaaagatcctcagatccttgcctaagagatttgacatgacagtcactgcaatagaggaggcccaagacatttgcaacatgagagttgatgaactcattggttctcttcaaacctttgagctaagactctcngatagggctgaaaagaagagcaagaatctagctttcgtgtccaatgat

SEQ ID NO: 452 - DNA, 377 bp, Glycine max
tgcttgaatgcactattcaatggagttgacaagaacatcttcttattgatcaacacttgtttagtggccattgatgcatgggagatcctgaaaatcactcatgaaggaacctccaaagcgatgatgttcacattgcaactcttggctacaaaattcgaatatctgaacatgaaggaggaagagtgtattcatgacttccacatgaacattctatgaaattgccaatgcttgcactgccttgggagagaggataacagatgaaaagctggtgagaaagatcctcagatacttgcctaagagatctgacatgaaagacactgctatatatgaggcccaagacatttgcaacatgagagttatgaactcattggttctct

SEQ ID NO: 453 - DNA, 410 bp, Glycine max
  unsure at all n locations
catcacatgccattgcttcgttgatgaggttgctgtgatcgagatttgcggcattatagcgccacacgtcttcaccgtgagcctttgcaaatgaggggttgccattggccatgacgcgagcactcagactgtgccaaggtgccagcattacaggactactctccagcaagagaaaactagccatgctgtgttcgccgtttctcatcaatcgacgagacagagctgattgagaatagcccctgctgcacccgtcgcctttgaatatctttctttgcaccaagaacctcatgatgcgcttcagatgtgaagtatcacaccctaaacttgatgatatctccgatagtgtcatgggacttccatgcttctctatggcttcagctatgccaagctcaatcgcacattntatcact

SEQ ID NO: 454 - DNA, 397 bp, Glycine max
agcttcaagattaagatggcctcagcaaattccttatttccggaagggaattctatcaatagacctccaatctttaatggagagggttaccactactggaaaacccgaatgcaaatttttatcgaggcaatagatctaaatatctgggaagccatagaaatagggccttatatacccaccacagtagaaagagtttcaatagatgatagttcatcaagtgaaagcataaccatagaaaaacctaaagatagatggtctgaagaggatagaaaaagagtacaatacaacttaaaagccaaaaacataataacatctgccctaggaatggatgaatatttcacggtttcaaattgtaagagtgctaaggaaatgtgggacactcttcgattaacacatg

SEQ ID NO: 455 - DNA, 340 bp, Glycine max
agcttcttagtttcagatgatactgctgagtttgtagctacctcatgcactcctctaatgactatagcatcatttatggcgctaaactgctgggagttggaagccatcttctcaattaaatttctggcttcagcaggagtcatgtctccaagggctccaccactggcagcatctatcatacttctctccatattactgagtccttcataaaaatattgaagaagaagctgctccgaaatctgatggtgggggcaactggcacatagttttttaaatcgctcccagtactcatacaggctctctccactgagttgtctaatacctgagatatctttcctga

SEQ ID NO: 456 - DNA, 386 bp, Glycine max
gcttgagaaatatactaccccatgaagtttatcaattagttcatcaacagcgggaataggaaagttatctttgattgtgatggcattcaaggccctgtaatctgtgccaaatctccaagggccatccttctttttgacaagaatgattggaggtgaaaaatggcttctgctaggggcaataatcccttccttgagcatgtcagctatcattaattacttcaatctgatccttccggctgtgaggatacctatatggcttgacttttactggtccagcaccttcaaccaatgggattgaatgaatgtgagttcttctagggggtaatcctgatggcaccatcaagactgttctataagtgtaaagtaaacagttccgcaatggcatg

SEQ ID NO: 457 - DNA, 247 bp, Glycine max
  unsure at all n locations
tatcacctttaccagcgattgaaaaaaactnttagcgaatgtcaagaacatgaaagtgcaccgatactattaattggtcagcagattcttaagcgggttgaggacattaatacgatatttcgaaagacccaaaagaaaaaagtaaaacttgcatatggaataagaggtcgatattctatgatcttccatattggtctaatctagatgtcacacactgtattgatgttatgcatgtggagaaaaatgt

SEQ ID NO: 458 - DNA, 420 bp, Glycine max
  unsure at all n locations
agcttgaaggactacgttacacggatgaaggatggtcagaaggacatttactacatcacaggagagagcangaaggcagtggagaactctcccttcttggagagactcaagaagaagggctatgaagttcttttcatggtggatgcaattgatgagtatgctgttggacaactcaaggagtacgatggcaagaaattggtttcagctacaaaggaagggttgaagctagatgatgagactgaggaagagaaaaagaagagagaggagaagaagaagtcatttgatgaactctgcaaggtcatcaaggacattctgggagacaaagtggagaaggttgttgtctctgacagaattggtgattccccttgctgtttggcgactggtgaatatggatggagcgcacacatggagaggatcatg

SEQ ID NO: 459 - DNA, 407 bp, Glycine max
  unsure at all n locations
gaaatgacaataactntatacacggatgttctgttgagtcccgtttatatcgagacgctcaaaatttagatccgaagctctgaaaaaattgaattgacaataactttatacatggatgtccggctgagtcctgtaatatatcgagacgctgcaaattgaaaacggaagctcgtaggaaattcaaacgacaataactttttactcggatgttcgattgaatcgggtaatatatcgagacgctcaaaattgagactagaagctctgagcaaatttaaataacaataactttgtacacggatgtccggctgagtcccgtaatatatcgagaggctccacattgagaacggagactcttagaaaattcaaacgacactatacttttactcggatgcccgacagagtgtcgt

SEQ ID NO: 460 - DNA, 386 bp, Glycine max
tgaaggtttgtacatgaccaaatctttagttaatcttctttacctaaagcagtctttgtattcatttaaaatgcatgaagatagatcagtaggagaacaattggatttgtttaataagttgattctagatcttgaaaatatcaatgtcaccattgatgatgaggatcaagctttgctattgttgtgctctttgcctaagagttactctcatttcaaagagactctactgtttggaagagacttcatttctcttgatgaagtgcaagctactctgaattcaaagcaattgaatgaaagaaaggaaaagaagtcctctacaagtggtgaagggctgacagcaagaggcaagaccttcaagaaagatattatatctgataagaagaagc

SEQ ID NO: 461 - DNA, 401 bp, Glycine max
cttgagcaaattgaaatgacaataactttatacacggatgttcggttgagtcccgtaatacatcgagacgctccaaattgaaaacggaaactcttataaaattcaaacaacaataactttttactcggatgcccgacagattgtcgtaatttatcgagagatgctccaaattgaaaacagaagctcgtatcaaattcaaacgacaataactttttactagtatgtctgattgagtcccgtaatatatcgagacgctcaaaattatgatccgaagttctgagaaaattgaattgacaataactttatacatggatgaccggttgagtccctgtatatattgagacgctcgcaactgataatggaagctcgtatgaaatgtaaacgacaataactttttactt

SEQ ID NO: 462 - DNA, 341 bp, Glycine max
  unsure at all n locations
agcttgtagtttattcaaacgacaataactttatacaaggatgtccgattgagtgccgtaatatatcgagacgctccanattgaaaatggaaactcgtagcaaattcgaacgacaataactttttactcggatgtccgattgagccccgtaatatatcgacatggtccaaattgaaaacggaagctcgtacaaaattcaaacgactataacttttcactcagatgtccgattgagtcccgtaatatatcgagatgctccaaattgagaacgggagctcatagcaaattcaaacgaccataactttttacttggatgtccgatggagtcccgtaatatatcg

SEQ ID NO: 463 - DNA, 426 bp, Glycine max
  unsure at all n locations
tcntatttaaatttcgaacgtcttgatatattacgggactctataagacatccgagttaaaagttaatgtcctttgaattttctcggagcttttgttttcaatttggagtgtctcgatatattacgggactcaatcggacatccgagtaaaatgttattgtcgtttgaatttgctcagagtttcttttttaaatttcgagcgtctcgatatattatgggactcaattggacatcggagtaaaaagttattgtcgtttgaatttgctcagagcttctgttttaaatttcgagcgtctcgatatataacgagactcaataagacatccgaggaaaaagttaatgtcatttgaatttcttcgaagcttctgttttcaattttgagcgtctcgatattttacaggactcaatcggacatccgagtaaaat

SEQ ID NO: 464 - DNA, 456 bp, Glycine max
gcttatcccctaatgcacctattccattcctcccatggtcatcatcaccataaacagcaataacctctctccagccaaagtagttaacaaagtctgctattgcagtcatttcataaatgtcactaaaagcagttctaataaagaatgggaattgaagtgaagaaagagtagggtcagtggctgtaaatgatagtagaggaacttggagctcgttcgctatatgagatatgacatgagctgttgtagacgtctggggaccgattatagccacagtttgtgttgccatgagctgcaaggctattacacacaatttatgtaaaccaagagtaataatctgccaaactttgaagtaacttgtctaatagaaaaaaagatgcttttaaagttttaacacataaaaaagatgggaatattgtgaaggacgtaccctcggcaatgctcagaaaacctctgtat

SEQ ID NO: 465 - DNA, 449 bp, Glycine max
  unsure at all n locations
tctgcaagctggaaccatttatcctatctccgacagccaatgggtgagtcccgtctctgtagtcccgaagaaaaccggcctcaccgtgataaaaaatgagaaggaggagttgattcctactcgggggcagaacagttggagagtctgcatcgactataggaggctgaaccaggttaccaaaaaggaccattttcccctaccattcattgaccaaatgctcgaatgcctggcaggtaaatctcactactgtttccttgatggtttttctggttatatgcaaatcactattgctcctgaggatctggaaaagaccacattcacctgccccttcggcacttttgcctataggaggatgcctttcggcctgtggaatgcccctggtaccttccagcggtgcatgatcaatatttttagtgattttttacaanattgcatagaggtgtttatgg

SEQ ID NO: 466 - DNA, 413 bp, Glycine max
  unsure at all n locations
tgacatgctattgaacaagcagttatatactctgcttcacttgtagagagtgcaacaacatcctgtttcttagagcaccaggagatgggagcacctccaaacaataaaacatgccccattatgctttttctgtcaagaacatctccaccacagtctgagtctgaataagccacaagttgtggctcaaccttctctttctaatgtggaaatagaacaccaaagtctagtgtgctctcaagtatctcagtatccttttagctaccatcatatgtgaatgtcttggatcactcataaacctactgataactcccacattgaaagtgatttctggtctggaatgacaaatgaatctgagactcccaacaatntgcctatacaaggtacaatccactacaggttcagctttacattta

SEQ ID NO: 467 - DNA, 330 bp, Glycine max
  unsure at all n locations
agccaaaaactttaacaatgaccanagcaagacatctacattcaacttcagtacttgagtgtgcaacaacaaattgcttcttagaccactaacagatgagattggggctgaagaagacacaagcgtcgaaggtggaccatctgtaatctgggtcagacgcctagtcagcatcacagaaagtcacaatagaaaaaaggtgcagaagcaagcttgaaatgcgagccccacgagatggttcccttgagataccgcggtatccccttatggtatcatagtgtaacgccctgaaatttcgctaactggaaatcgattttaatgtatttctcatct

SEQ ID NO: 468 - DNA, 357 bp, Glycine max
ctttagctatgtgtgctgatgttggctacacagatagagcatctgaaattttttatgaaatgaaaagttctgggacttgccagcctgacagttggacattttcatccatgattaccatgtattcccgcagtggtaaagtttcagaggcagaagggatgttgaatgaaatgatccaatctggatttcaacctactatttttgttatgacatcactcatctgctgctatggaaaagcaaagcgaactgatgatgttgtgaagatatttaaacagctcctggatgtgggcattgttccaaatgatcacttctgctgttctcttctaaatgttctgactcaaacaccaaaagaagagcttg

SEQ ID NO: 469 - DNA, 445 bp, Glycine max
tgaaggtaaactagatgccttggttaacctggtaacccaactggccatgaatcaaatatctgcacctgtcaccagactctgtggtttatgctcctctgccgaccaccacacagacctttgtccttctgtgcaacaatctgaagcaattgaacagcctgaagcttatgctgcaaacatctacaatagacctcctcaacctcaacaggaaaatcagtcacaacagaacaattatgacctctccagcaacaggtacaatcccgggtggaggaatgatcccaaccttagatggttgaatccttcacaacaacagcaacaacaaccttattttcagaatgctgctagcccaagcagaccatatgttcctccaccaatccagcatcaacaacaataacaacaacaaccccagaaacagcaaacaattgaggctcttccgcaatcttccctt

SEQ ID NO: 470 - DNA, 400 bp, Glycine max
  unsure at all n locations
catgcaagctntntcacagtcaactgtgaagaccatgcaaggattgcttctggatntagcttcagctataacctcattagcaatcaacacaccatgaagaatatgccttcctttcagaacagcagtttgcctttcatcaatgaggtgagggaaaacaagagccagcctattagccagaattttggacactattntataaacacaccctataagagagatgggtctataatcattaagagattgagggttaatgatcttggggataagggctatgaaggaagcattgcttcctttggggtataagccattgatgaagaactcatccaagaaccgaataaagtcaggttttagaatctcccanaacttcttgataaaattaaagttcaagccatccgagcca

SEQ ID NO: 471 - DNA, 443 bp, Glycine max
tcaagaaaaatggcctcagcaaacttcttatttccagaatgaaattcaatcaatagacctccaatctttaatggagagggttaccactaccggaaaacccaaatgcaaatttttattgaggcaatagacttaaatatttgggaagccatagaaatagggccttatatacccaccacagtagaaagaattgcaatagatggaagcacatcaagtgaaagcataacaatagaaaaacctagagatagatggtctgaagaggatagaagacgagtacaatacaattgaaaagccaaaaacataataacatctgccctgtgaatggatgaatatttcagggtttcaaattgtaatagtgctaaggaaatgtgggacactctacaattaacacatgaaggaactacagatgttaaaagatctatgataaacacattaactcatgaata

SEQ ID NO: 472 - DNA, 362 bp, Glycine max
cctctgagtcacctgctgcatgcatgctaggaccgtgcccaagttgagcctccaatatatccaccgttgggaaatattagactttgagaactttagctactattatatcttggttggtcatattctctagccttgcttccctaccacgacaagggtaaaagcatgcagttgtctaaaccacataccttcatgttcctttttcattatcatcttgacccacataagccaattgattccttgtctttgtggattagagtcccaccaaaaagaattcatcatctgctacaattcatcttcaagagtggaaggaaacatatacacactcatgtaataagtgggtatagatcgagcaacagatttta

SEQ ID NO: 473 - DNA, 430 bp, Glycine max
cgcttggaaaatgatttctatacaaaagttagtcgtataaagcgactaacaaatcttcagtaatatcccgccaaacccagaaaactcctaatctcacacacagacttaagactctcccacttaagtacaacttctatcttagaaggatctatatctatactgccttaggatatcacatgtcctagaaaactaactttatctaaccagaactcacacttggacaacttagcataaagttgtcggttcctaagggtgtgcaacacaatcctcaagtgctcttcatgctcctttctagtctttgagtataccaaaatatcatctatgaaaactaccacagaactatcaagatatgggtgaaagatcctattcatgtaaactataaacacaccaggggcattagtcacaccaatgggcatgacatactcatagt

SEQ ID NO: 474 - DNA, 445 bp, Glycine max
  unsure at all n locations
agctntntatttttagtagatgaagatgaattcgtggccacctcatggactcctctaagaacaatagcatcatttcttgaactgaattgttgggagttagaagccatcttctcaatcaaattcctagcttcagtaggggtcatatcaccaagagctccaccactggtagcatcaatcatactcctctccatgttgctaagtccctcatagaaatattgaagaaggagttgctcagaaatctggtggtgaaggcagcttgcacacaatttcttgaatctttcctagtactcatacaagctctctccactaagttgcctgatgcctgaaatgtcttttttgatggcagtggtccaagatgaagggaagaatttctccaagaacaccctcttaaggtcatcccagctgaanatggacctgagagcaaggtagtatagccaatcttttg

SEQ ID NO: 475 - DNA, 339 bp, Glycine max
  unsure at all n locations
agctngcatacattattctccttgcctgcatcttanaaccttctggttgggtcatatagatgtcttcctctaaatccccatgcaagaatgtagttttaacatctaactgctccaagtgaagattctctgcagctactatgctcagaataactctgatggtagtcatctttacaactggagagaagatctctgtgaaatcaattccttgtttctgctgaaaccctttcaccacaagtctcgccttgtatcttcttctaccgtcagattcttcctttagcctatagacccacctattctgtaatgccttctttccttctggcaatttaattaaagaccacg

SEQ ID NO: 476 - DNA, 417 bp, Glycine max
  unsure at all n locations
gatgtttatgaattaattngacattatgttatatntattgatgatcaacttgatagtaaattaaaaaaatgtgaactcaattggcataagctatacaatagaataaaattatgcactttntacacatcactgactaaataaaaaaaatgttgtaacataaactaatttatcatcactttacatttctcaagaacaaaagtgtttatttacaccttcttttatctaatgaaattcatgtcaaattcattagttaaggaataaaactcattaaataattaataagtgatactacataatttactgaattttacgtgattgtaatttaataataaaaatgttaataatatattaatatatatttatgaaccttnttcattgcccaataaaaataaaaaagttaaataattattgtaatcc

SEQ ID NO: 477 - DNA, 418 bp, Glycine max
  unsure at all n locations
agcttattggttntgataatatcactagagaaaatacagcattaaaagtaatttanacgtaaaataatcatcaatctttatactatgtctctttcttgtcagatctcattcctggtgattttattcatgttattggggatgctcatatttaccgcaatcacgtgaggcctttgcaggagcagctccataaccagccaaagccttttccagtatgtgtaatgtttagcacttctttaagtttatcttttgactctcttacttngttaccccctaatgtacttcattgcagactttgaagataaatccaaagaagaaagatatagattcttttgtggctgctgatttcaagctcataggctatgatcctcaccagaagaatgatatgaagctgtctgtctaanatctggggattctcact

SEQ ID NO: 478 - DNA, 489 bp, Glycine max
  unsure at all n locations
tcttcatgtctctcctcgtatctctaacatctaggactcatgtgtttatcatagtaaggtggaagatggttcccacatctatctactactttacacggatgacatgcttatagcatcccaaaatttgttgccaattttgaggatgaagttactactctataatgaatttgatatgaaggacatgggagttgctgaaaagattctgggcaaggagaataagatggatgaagtccagaagatgatcttctgtgtcagaaggaatacattcaaaaattgctaaattgttttgggatggcatccgcaaaaatagtatgtactcccctaataacgtccattcgtttatctatactcaatactactcagtcaaatntagagaaggaatacatgtcgtgtgttccttatgcaagtgttgtagctagtctcatgtatgctacaccanaccanacctaacacaagaagtaatggtgtgagtaagtatattggtattct

SEQ ID NO: 479 - DNA, 389 bp, Glycine max
  unsure at all n locations
agcttcttagtttcagatgatgcagatgggtttgtagctacctcatgcgctcctctaatgactatggcatcatttctggcgctaaactgctgggagttggaggccatcttctcaattaaatttctggcttcagcaggagtcatgtctccaagggctccaccactggcagcatctatcatacttctctccatattactgagtccttcataaaaatattggagaagaagttgttctgaaatctgatggtggnggcaactggcacatagtttcttaaatctctcccagtactcatacaggctctctccactgagttgtctaatacctgagatatccttcctgatggctgtggtcctggaagcagggaannatntttctaagaatactctctt

SEQ ID NO: 480 - DNA, 504 bp, Glycine max
cgaatcgtttcagttggaaaaaatcccttgtgcatgaagatcaaaggatatgaacacacaaagatacatcaccaaagaaataaaataatgaaagatataaatttaaagcagatatcttttatctacattcacacaaacatctaaacaatattcactatctcaaattttaatttgacaatgaattacatttatcctctatttaataatgtcaaaataacaataaattgatatcttgacagaactataattataataagagtttaaaataattgtacattatcatctactcatcaatcattgttgttatgatttttaaaataatttttatcaaagtcaacaaacttatatcatagatgatgattgaatgataatgtaatcttacattatataatactttttctcttataataacctatagcaaggataaatgcacacattgatccgatgcacagattattaggatcattatatagtatggattcattgggatgatcgatgatgctg

SEQ ID NO: 481 - DNA, 446 bp, Glycine max
  unsure at all n locations
ntccacttggcttctaactnttcgactcttaacttataacttataagcttttaattaagtttataagctaattgtactaaatataatcttaatagttaatttggtttgataaatttatcttaaatttacattttattttaaaagagtaataacattttaacaccctttttttctctccatctctttcttcttattaaatcatattacctatcttagatatactgtatactnttctttcttctctctcttctttactcgaagtgttccataaaacatgaatctctctntattntttattctntataaaaatgtcattattattaatattcttttctcttatgagtctcaatataacctcttttgtcatttaattaggagtattttatttaacaataattaatataattaaatatgagagacattcgccacttttaattttatcttat

SEQ ID NO: 482 - DNA, 499 bp, Glycine max
  unsure at all n locations
cgcatcttttactaaggcagttntataaaatcgtccttgttttagtgtcatataatctcacttttggagtagtgccaattgcaatctatgtttctattgaagatccttggccctttgaaatattttcttggcttagaaatagctaaatccaatagaggtatctcactctcccaaagaaaatacactatatctcttttagaagatacaagtttcttggcatgcaaaccttccaatcttccaatggatccaaacttgaagctcaatcttcatgatggagacttactccttgatcccttagtgtataaaacgttaattggtagattaatttatctaaccatatcacgtcccgatataacatttggtgtaaatcacttgagtcaatatatgaaagaacatagagtntgtcacctaaatgttgtccatcatcttctgcagtatctcacatctactccaggacaaggtttattttccctgctcataactctctcaaattcactgc

SEQ ID NO: 483 - DNA, 474 bp, Glycine max
  unsure at all n locations
gcttactccaggtttcacttgacgtcttctttctatgcaatgacgttctctaacgtgaacactnntctttttatttattttaattntttatgattttatctaatgttatggaatgtcttaatttgttaatatttattattaaatttcttattatatttaagtgaagaaattaatgatatatgtaaagtgataattatatttgatttagaattaattntacataagccaaatgagtgcaacttgtgcatagtgcatacccctaatttcttagttntaataattaattatttntgtcgacaatcgattgtcttatgtaaaaaaatcaattttataacataatcgttgattatcaaattgattgtaaaaaaattatttatcatctcctttnttctttntttcaaacgtactatatttctcacttgttgttattcattggattctatttttttttcttaatttcatctaacttgttct

SEQ ID NO: 484 - DNA, 427 bp, Glycine max
tctatccatggcgttctatggtggtgagcttattcttgactcatcttctttatgaagtggcgtctgcaatcacctttccactttctccattccgctgccattgatcttcaagaagtaaaggactccattgatgaagaagatccaaggcctaaaagctcaacatggagctacatcactagtagtacttgttctttcctcctccctaagcctaactctcaaaaggagtagttctatttgttgcctatactcttcaacactcatactcccttttctaagcctttggagcttggccataagctccctttcatagtaggaggggatgcacctcttcctaagggtagctttcaagtcattccaatactctactagaggatcccatgaatccttcttttcctaacaagtgaagtccacccatagagggcatacc

SEQ ID NO: 485 - DNA, 380 bp, Glycine max
tgtgacatttgtcagcatcagatgtatagcgctatctcacctgtaggattgctgcaacctcttgctattccggaacaggtctgggaggatgtatctattgattttatcacagggttgccttgttccagaggctatgaagctattctggttgttgcggacaggctgaccaaatatagccattctgttccattgaaacacccttatactgccaaaggaattgttgagattttctctgggaagtactgatgctacatggagttccacaatctctcgcgagtgatagagatcctttatttatgagtttgtcttggaacgaactatttaatttacacgcgacaatgctcaagatgagtacaacttaccttccgcagactgatgga

SEQ ID NO: 486 - DNA, 480 bp, Glycine max
taacataaggcatgtgaagtgggtggaattcctagagcaattcccttatgttatcaaacataaaaagggaaaaggtaatattgtagccgatgctctttctcggcgtcatgcattactttctatgcttgaaacataattgattggtcttgaatgtttgaaaagcatgtatgaaaatgatgaaacttttggagaaatctttaaaaattgtgaaaatttttcagaaaatggttactttagacatgaaggctttcttttcaaagaaaacaaattgtgtgtgcctaaatgttctacaagaaatttgtcttgttgtgaagcacatgaatgaggtttaatggggcattttggggtccaaaagactctagaaacattacaagaacattcttataggcctcatatgaaaaaggatgtgcataaattttgtgaacattgcattgtatgtaaaaaggcaaagtctaaggtaaagcctcatggactgatact

SEQ ID NO: 487 - DNA, 423 bp, Glycine max
  unsure at all n locations
agcttctatagaagggttcttcctaatttctcaacaattgcctcacctctcaatgagctggtgaagaagaaggtggcatttacttggggtgaaagacaagagtaagcctttgctttgctcaaagaaaagcttactaaggcacctattctagctcttcctgactnttctaaaacttttgagctagaatgtgatgcctatggagtgggagttagagctgtattgttacaaggtgggcactctattgcttattttagtgaanaacttcatggtgccaccctcaactaccccacctatgataaaaagctntatgccttaataagagccctccaaacttgggaacattaccttggtgtcaagggaatttgcattcatagtgatcatgaatcacttaagtacattagagggcaaagcaagttaaacaaa

SEQ ID NO: 488 - DNA, 404 bp, Glycine max
  unsure at all n locations
agcttctatgttcaatttcgagcgtttcaatatattatgtgcctgaatcggacattcgtgtgaaaagttacgaccatttgaatttcttgagaacttctattnttcaagttcaagtgcctttatatatcatgggcctcaatcgtatatccatctcaaaagttatggtcgtctgaattggacaagagctttcgtgttgaatttcgagcgtctcgatatattgtggacctgaatcggacatccgagtaaaactttatgaccatttgaatttccctataacttccagtattaaatatggagccgtttgatatatcatgggacttaatcgtacattcatgttaatagttatggccgtctgaattggactaaagcttctgcgttcaattttgagcgtcctgatatattat

SEQ ID NO: 489 - DNA, 495 bp, Glycine max
  unsure at all n locations
tatacatactcaagctcgcacaggagtgtgaggtgatactgagtattcttttcaacaatgactggccttcaattagtggggattctgaggaagatgaatatggctccacgactggaaatgaaagcaaagcgacgctgatgcatgttccaaaagaacttgctgaaattgacaacatggagaacacgttcaccaaactaactctatcagcactgcgtagcttggaagaaattatgggtagaagctcaactgttagcattttctcattgcctactttgcataactaggctttgcaactgcaagaggattggaaaataaaatgactgcactagcgactgcaaccaaataggtcctcaggataacatagatcttctcgtgtttatcttcacatctatcttaatgtttattagaanagaaatagacacagaatttagacatgagtngccatttatacaagaggatccatctccctgtttaatggtagatttcatatgaaac

SEQ ID NO: 490 - DNA, 357 bp, Glycine max
  unsure at all n locations
actcattttatatatagcttaaggtgtgtttggtttgtattttcattttttgttttcatttcctgttntcagnttctgacactactaggaaataaggtttttacatcaattatttaagactttcaacatcggttattaaccgatgttgaaagtcccgatgttgaaagtaatatcgttaacatctgtttttcaaaatcgatggtaactaataaatacaacatttggtatttaaatagccaatgttacatgataagaattttgaanaaagaaatttataaatttacatatcaacatcgcgttatttaaaaaccgatgttaactagcactaaaagtcaatgttaactgtcactaacaaca

SEQ ID NO: 491 - DNA, 364 bp, Glycine max
  unsure at all n locations
tgtaatcgattacacaagtcttgtaatcgattaccagagtatattttcagaanataatttccaagagtcacatctattcaaatggtttatgaatggccatcaaaggtctatttatatgtgacttggaaacacgaattatgagagagatttcattgcccaaaaagttttatcctctcataagattaagagagtttttctgaattgaaatgtcttatcctctcaaaaagataccttggtcaaacacttgcatattcgataaggaattttgattgatcttcattgtataatctatctctttcaagggagatatcttcttctcttcttcttatttctggaaaaaagggattaagagaccgacggtctc

SEQ ID NO: 492 - DNA, 442 bp, Glycine max
  unsure at all n locations
ntntattgtaatcttgagattcaggacagcactctgatttctgaaatatttgggataaaaatggtcattgaccagtcccttttccatgacttaaccaaattacccagtgacggtgtaccatttgaaggtacactgaatgacgactgaaaatttgatttctctgcccatgatgcccgccagttggtttgcaccaacaatgcggatatgaccggacgtcttcttgccgggtcattggcttttgaaagccgcatccttcactatttaattgtgcgtattttgcttccacggtcttccaaccttgcccaggtttctgaggaagatctaattatcatgtgggcctttcatacagggtgtcaacttgactgggcacacttagtcagatatcgcatgcataaggcattgcgaataaatgctccattaccatatccacagcttgtcactc

SEQ ID NO: 493 - DNA, 417 bp, Glycine max
taacatcatatgaagccatggataagagcttgtatgaggagatgatgaggggaaggagaacgagagaatgagcacgaaattttgtgcctcacatgaggtctgaactttgaagcgttattcccaaatgatcaaagttaaaaaaatgcacacgcatgacctctatttatagcctaagtgtcacacaaaattggagggaaatttgaaattctattcaaaatttacttgaatttgaaattgaatttgtggagcaaaattttggagccaaaatttcactaattatgattaggggaatttagctatggttcagcccactaatacaagatcaagtccaagattctccactaagtgtgtttaggtgtcatgagacatgtaaagcatgaaggacatgcgcaaagtgtgactatatgatatgacaat

SEQ ID NO: 494 - DNA, 416 bp, Glycine max
tagcttgaactatatgagatttgaatctaattttacttggatcaacaatataatatatatttaatttatagttgaaaatacggaaaaacaagaattttgatctattgataacatcatatttacctccatcgcaatgttataatacgttctagaacatgctcatattggtttcgtaatagttgatattgatttactcatagagctgaatataagaacaattgtcggttttaaagtacgtgatattctttataaaataaaacggtggttatagttaatggaaataataaaattaagaaatgtactttattaagctcgcgaatcaatagctgtatttaaaacaatatgtctattacttgttgcataacttgccacgtctgtcttctaactgtacttgaatatctaatgacggatatagt

SEQ ID NO: 495 - DNA, 318 bp, Glycine max
gtttttgcccaaatggagacactggatgtctgcctgtctcaagtcagctagcatttctattcttatcaatggcagtcctacaaaggatattgctcctactagaggtttgaggcaaggggatcctttagcccccttactctttaatatagttggagaaggcatcacaggattgatgagggaagcagttcagaagaacttatatataagctatatggctggaaagaaaaaggaacccattaatattttgcagtatgcggatgacacagtttttgtgggtgaggctgagtgggagaatgttattgttttgaggctatgctc

SEQ ID NO: 496 - DNA, 433 bp, Glycine max
  unsure at all n locations
agcattgcaataatttcaatagttctatcgaacatatcaatagacacgtcgttttttcaaatattttgtgtaggtaactgttacacgtcaattcttgtccccaaagattatggattagagattttaatttaggattcctataaataatattataaagttagaaacattaaaacaattgatttcagaaattaatgtgaaagagattatgccaaaattttgttctggaacctggataagattgctatattttaaagtaaattatattgtaaaataatatcatataaaggtaattttttatttggtaacatgaaaactntatatgcaagtcaaaatccaaatttaaacatcttgtttctcaaataataataaactatattccaattttattaaggggatacccttctgggatatatatatatatatatatatatat

SEQ ID NO: 497 - DNA, 362 bp, Glycine max
ctgcctttgccctgatatatcttgaggactcatggtcactatgaatgacaaagtccttgggataaaggtagtgttgccatcgtttcaaagcccgtactaacgcatacaacttcttatcataaggtgaatagttaacggtatgaccacttaacatttcactaaaataagcaatcggatggccttcttgcatcaacacaggcccaattcccacatttgaagcatcacactcaatctccaaagattcttgaaagtttggcaacgcaagtatggcggcattagttagctcttgcttaagaacattgaaagcttcttcttggttctctccccatttgaaaccaacaattttcttgaacacttcattg

SEQ ID NO: 498 - DNA, 225 bp, Glycine max
agcttttcactcggatgtccgattccggagcataatatatcgagacgctcgaaattgagcaacggaagctcttgagaaattcaaatggtcataactttccacatggatgtctgattaagacgcataatatatcaagatgttcgaaattgaacaacgaaagctctcgagaaattcaaatagtcataacttttcactcggagggtccgatcatgcgcataatatatc

SEQ ID NO: 499 - DNA, 484 bp, Glycine max
  unsure at all n locations
ngctataatattagttaaaaaatagtttatgaaatttatcacatattatttttataaaataatcatacaaacattcatgtcataagataaaatacttacaaataaatctcaaacatatataattttgtctttataattaataatttatgctattgatttatgaaagtttgtgtatatgtaacctaacttaatcttaaattcatcaattacaactatatttgataagacatttcagttaatttttaatttttttcactagctaaaaaatttgtttgactatttagaaaacaagttttttttaatagtttctaacattttttcaaactatttgaagtaacattntttaaaaccttagatttgaaattctaactttntatattttttttcattgttatacttaatatatttatccaattntctagttaccattttttaagagatcataattgtattattngtcaatcattttatctttttcaactac

SEQ ID NO: 500 - DNA, 471 bp, Glycine max
  unsure at all n locations
gtatggctcgaaacatgcaccgaggcagaggtacaagaagtttaatgagtttatgagcaactcaggattcaaaagatgtgacatggaccattgctgctatgttaaaaaatatactaatagttatgttatccttgctgtgtatgttgatgacatgttgattgcaggatctagtatggcagaaattaacaggttgaagcagcagttggcagataactttgaaatgaaggatcttggtccagctaaacaaatccttggtatgagaattcttagaaacagatcagaaggaattntgaagctgtctcaggagaaatatatacacaagttgcttgacaggttttaccttggagattctaagaccaggaatacccctttgggatctcatttgaaagtttcaaagaagcaatcttttgagacagatgaagaanaatggtacatgtcaagagtaccatatgcatcagcaagtgggagttt

SEQ ID NO: 501 - DNA, 363 bp, Glycine max
  unsure at all n locations
ngctaacccgtggaagctcctaatatctcccacaccttttggtgtgggccattcttggatggccttgattttcttagggtccacttggactccatttctaccaactacaaaccctaagagaactatattatctacacaaaaggtacctgaaagaacctgcctgagatgtcctaagtgatcatctagactcctactatacaccacaatatcatcaaaataaataactacaaatctaccaatgaaatcccttaagacatgatgcataagcctcatanaggtgcttggtgcattactgtgcccaanaggcatcactagtcattcatacaaaccaaacttggtcttgaaagcgggtttccactcatc

SEQ ID NO: 502 - DNA, 453 bp, Glycine max
  unsure at all n locations
agcttcatggaacatttatgatactgatgtaaattcaggtcttcatggttntacaaaaatcatagttgttgtttaggcggttatcgttatcaaaattctagaatgctttgtaaagatgttcatcaagtccaagtctgtgcctatgcattgtagtcgaaatgaattcaagatagtcaattgacccatttccgtcaacatcagcctgaggaaaaaatatacatgtcttgcaaattgaaacaattaggaacaaagcanaaatgcatgacaacaaaaaatagtataaagatataggaaatatcatagtttaatcacaacattaaaaaaggctntagctagagcctacataataataattataataataataataataacaacgaagcanacatgcattacaacanaacaaaattaagaaataataaatatcagtgttaactcctattgtcacaacat

SEQ ID NO: 503 - DNA, 385 bp, Glycine max
  unsure at all n locations
tgtcctcggtgacgaanacaatagaataagcctcttcgagcttttcacaggcgtcaacgattcgaagaatgaagggtctgtgtttggaggtggcgatgaggtggaggacaacctcggtgtcataggtggtgttgaagatggagccgttgtcttcgaggttggttcggagggtcttatagttgacgaggttgccgttgtgggccacgccgactgagccgaagcggtaaccggcgacaaagggctggacgtttttgagcatggataggacggcggtggagtatcggacgtggccgatggagatgctgccggggagctggtcgagttttgattggttgaagacttcggagacgaggccaacgccggtgatggattggaggacgttgtt

SEQ ID NO: 504 - DNA, 296 bp, Glycine max
agcttgaggagcttgctttagcccatatagagctttattgagtctaaaaacacgatgtggaagagtgttactctcaaaccctgcggggtgctctacatagactctctcttgcattagtccattgaggaattcacttttacatccatttgaagagtctcatatgtatgagcagcaatgacctatagtgtatgcctccggtgacaacaagagtgaagttatgtatatcatacctcctttataaaacctttggaacaaccttgcctgttgtacatactaacttcctataaagctatgtc

SEQ ID NO: 505 - DNA, 470 bp, Glycine max
  unsure at all n locations
agctatagggtagaatttagatccatggactaagtatgagtctgcttatctttgtacatattaaattgagattntattatttttttgggccttatattcagggattcacagtgtagggagggtatcctagtaatataggatttttcagcctttgtattttagggcacctagactagtttttgtattatgggtagttttataatttcacatgcattaagtgtattatttgatgtgtgtgttgngagagaaatttaattgaattgcaagaagctcaatccaattaaattttagaccagcctaagggggaagtgagcatttgtttgttacacctcattatcacatcatatagtcacactttgtgtttgtccttcatgctttacatgtctcatggcacctaagcacacttagtggagaatcttggatttgatcttagattagtgcgctgaatcatagctgaactcactaatcat

SEQ ID NO: 506 - DNA, 455 bp, Glycine max
  unsure at all n locations
tcattctacancctgaaaagaggatgagatagttgcacgaaagagaaagcttcctaactaaaattttcatgcaagtggaccttcttctagtaattctgacttaccgcagccttttatccctcttcaattcccacctagagcaattccaaacaaaaaaaatggaagaagcagaaaaggagatcttggagaccttcagaaaagtagaggtgaacatacctctgctagatgccatcaagcagattccaagatatgccaagtttctaaaggagctgtgcacccacaaaaggaagctcanaggcaatgaaaggattagcatgggcagaaatgtgtcagcattgataggtaaatttgttcctcacattcctgagaaatgtaaggacccaggtactttntgtataccttgcattattgngaacaataaatttgagaatgacatgctagatctaggagcatca

SEQ ID NO: 507 - DNA, 439 bp, Glycine max
  unsure at all n locations
tatcccctaatgcacctattccattcctcccatggtcatcatcaccataaacagctataacctctctccagccaaagtagttaacaaagtctgctattgcagtcatttcataaatgtcactaaaagcagttctaataaagaatgggaattgaagtgaagaaagagtagggtcagtggctgtaaatgatagtagaggaacttggagctcgttcgctatatgagatatgacatgagctgttgtagacgtctggngaccgattatagccacagtttgtgttgccatgagctgcaaggctattacacacaatttatgtaaaccaagagtaataatctgccaaactntgaagtaacttgtctaataganaaaaagatgcttttaaagttttaacacataaaaaagatgggaatattgtgaaggacgtaccctctgcaatgctca

SEQ ID NO: 508 - DNA, 493 bp, Glycine max
  unsure at all n locations
tccatgaatntcttggtaccagacctagcaattgtacccaagttgctcaccatatctgaaaaaaaaaacataacaaaaatgaattagagactaaccaggtaaacaaaaaaattggtccacaaatatctcaataaaagaacatctcaacctaccagctttggtcatgccaataccattgtcaacaatggttagcatattgttagtcttgtcaggaataatatgaatgaacaactatggctaagtatcgagcttgctcttgtccgtcaaactctcaaatctagtcttgtccaaagcctanaattttacatacaaccacataattaattaatctttcaaaacaaatcaactcaagaagaagaccaatattaacacaaccacacatcacactaaaaaaattcagtggcagggtacaacatttcaatcataattcatctcccaacgtaaccaattcactcctacaaaataaattagatgtcactaattcactattcac

SEQ ID NO: 509 - DNA, 436 bp, Glycine max
gtaacctctaagatcatatcatccacaaagaagaggtgggaaacttaggcatctcctcccttcccaaatgagaaaggtttccatcaactattgtgaatagaatccaaaatcagatgagcaagtctctgcatgtagagcacaaaaaggagaggaaataaggggtctccatgacaaaggccgctggacaatttgaaggaatcgataagagatctattccagctgatggagatgtttgtccaattgatgcaacgagagattagggagaacatccgagaaggaagaccaaggttttggagggtatcgatggtgaaatcccattcaatatgatcaaaagccttttgaaggtcgagcttcaagatcatgtagcaaggcttactagtattatgctctagagaatgaacaagctattggatgataacataattgtccataacac

SEQ ID NO: 510 - DNA, 486 bp, Glycine max
tcttagtctcagctgatgaagatgaattcttggctacttcatgcactcctctaatgacaatagcatcacttctggcactaaattgttgggagtttgaacccatcttctcaattaaatttctggcttcagcaagggtcatgtctccaagggctccaccactggtagcatctatcatacttctctccatgttactgagtccttcataaaaatattcgaggagaagctgctcataaatctggtggtaagggcaactggcacatagtttgttaaatatctcccagtattcatataagctctctccactgagttgtctaatgcctgaaatatcttttctgatggtcgtggtcctggaagcacggaaatatttttctaagaatactctcttgaggtcatcccaacacgtgatggaccttggagcaaggtaatatagccagtcctctgccactccctctaaagaatgacgaaaggccttcagaaatatgtgat

SEQ ID NO: 511 - DNA, 457 bp, Glycine max
ctacagcacatgccactattcttcaagttcttaaaggatatgttaacaaggaaacacaagtatattcatcacgaaaacattgtcgtggaatgaaattgtatcgttgtgattcaaaagatccttccacctaagcataaagaccttgggagtgtaaccattccttgttcaattggagaagtcactatgggaaaggctcttattgatttgggagccagtattaatttaatgccactctccatgtgcataaggttgggagagttggagatcatgcccactaagatgactttacaacttgctgaccgctccattaccagaccatatggagtaattgaagatgtgctggtcagagtaaaacaatttatcttcttgatagactctgtggtaatggatatctgtgaagatattgacattcctgtaatattggaaggccattcatcgtaaactgtgagttgatagt

SEQ ID NO: 512 - DNA, 200 bp, Glycine max
tcagtgctttcacacacaagggtctactaatttggttgctattccgttggagggtattacgggggttgctgatcttgatgagagaaagttagttgcatattttgacagcaagattgttcctgtgcccaaggctgagggaactgagtacgtagcttcaaagcaaaagcctccatttggaccaacgttcattggagcagctt

SEQ ID NO: 513 - DNA, 455 bp, Glycine max
agctttgagccaattcaaacgacaataactttttactcggatgtctgattgagtcccgtaatatatcgagaccgtcgaaattgaatattgaagctctaagccaagtaaaacgacaataacgttttactcggatgtctgattgagtcccgtcatataccgagacgctcgaaattgaatgttgaatctccgagccaattcaaacgacaataactttttacttggatgtctgattgagtcccgcaatatatccagaccctcgaaattgaatgttgaagctctgagccaattcaaacgacaataacctttttactcggatgtctgattgaatccccgtatataacgagacgctcgaaattgaatggtgaagctcttgaccaattcaaacgacaataactttttactcggatgtttgattgagtccccgcatatatcgagaccctcgaaattgaatggtg

SEQ ID NO: 514 - DNA, 229 bp, Glycine max
acaccatacactactcaagcttgaaattgaacaacggaagctctcgagaaattcaaatggtcataacttttcacacggatgtccggctcaggcttataatatatcgagacgctcgaaattaaacatcgaaaactctcgcgaaattcaaatggtcataaattttcatacggatgtccgattcgggcgcatcatatgtcgagaagcttgaaattgaacaaccgaaactctt

SEQ ID NO: 515 - DNA, 631 bp, Glycine max
  unsure at all n locations
agcttgcattgcgttggagtatacatccaccttttaagtatttgacgaagagaaatattgtgaaatagaaacaaacttatacaaataatcagttcccagatttctaaagattggacaaaaaaggattaaaaataaaaaaaataaaacaaaaaacattggttagatttttttaacgcgtacattattttatatatcatttgggtaaaaaaattatatttgtattatttgggtaattttttttgtattaaataggcactattagaaaatatgctgttcacatctgttatttatgacgttctacattggttattaaccgatgttgaaagattatagttaacaccggctttttaaaaccggtggtaatgtaaaattgacacatcggtatttaacaaccgatgtatataataagattacaccaaaaacatatgaatgtgatagttacatcggtnttatacaaaatgatgtaactttacataaaagaggttttataaaataatgtaacgatacgtaacatggtttgataaaccgaggtacttcaaagtacattatttataaaaaccgaatggataggattttttaaaaactttttttttacaaaaaaccaaataacccggatttaaaccaccccccc

SEQ ID NO: 516 - DNA, 201 bp, Glycine max
tcggtattctatttcgagcgttccgataaattatgggactcaatttgacatccgagtaagaagttattgtcgtttgaatttgctcagagctttggcattccatttcgagcttctcgatgtattacgagactcaatcggacatccgagtgaaaacttattgtcgttcgaatttgctcaaagcttctacattcaattttgagc

SEQ ID NO: 517 - DNA, 207 bp, Glycine max
taacaaaaggcatgcgaagtgggtggaattcctagagcaatttccttatgttatcaaacataaaaagggaaaaggtaatattgtagccgatgctctttctcggcttcatgcattactttctatgcttgaaacaaaattgattggtcttgaatgtttgaaaagcatgtatgaaaatgatgaaacttttagagaaatttttaaaaattg

SEQ ID NO: 518 - DNA, 477 bp, Glycine max
agcttgaaggtgtgtagcccaccatctttttatattagaatactgggaatgtgtctactatcattggcatcattttttctctggcattgaggagccacttgagctgccaagtctctccacctttgggcgtattcttttgaaagatttgtgccccctttttgcacatgttctatagttgctcctatccgaagacattatactgacactggctaacgaaagcaaccactaagtccttccaagaatggactcgggaaggttccaagttagtgtaccaagtaatagctaccccagtaagactttcttggaaggaatgtattagcaattcctcatcttttgcggatgcccccgtcttccgataatacatctttagatgggtcttggggcaaggtagccccttgtacttgtcacagtccacaccctgaacttgggaggggtgatgatattgtgtactaggaacaactcttctaagttagcaaa

SEQ ID NO: 519 - DNA, 206 bp, Glycine max
agcttgataatggaagacacatgaacagctcttgcaataacattcatggggctccgaaaaatggtgagaatggaggattgcctttgagggcctcacttatgcaatcatgaaacacaactcccaactcgaaagtggaggacacatgaccagccctaagcaataacattcatgtggctcccaaaaaaggtgaaaatggaggattgcct

SEQ ID NO: 520 - DNA, 449 bp, Glycine max
aagcttgccaaccatggaagccctaaatcttcccactttttggggggggccattcttggatggccttgattttctcagggtccacttggatcccatttctaccaactacaaaccctaagaaaactatattatttacacaaaaagtacacttctgtatatttgcatagagggtgttttttctaaggactgaaaaaacttgcctgagatgtcctaagcgatcatctaggctcctactgtacactaaaatatcatcaaaataaacaactacaaatctacctatgaaatcccttaagacatgatgcataagcctcataaaggtgcttggggcaatagtgagccccaaaagcatcactaacccttcatacaaaccagacttggtcttgaaagcgggtttccactcatcaccctttttcatctgatttggcgatcccccttttaagatcaatttt

SEQ ID NO: 521 - DNA, 240 bp, Glycine max
gggatcttaagtgaccgcggctgcagcttttaacattaaatggtataacttttactcggaggccggaattaggcgcataatatatcgagacgctcggaattgaacaatggaagctcttgagcaattcaaatgggcataactttttactcggatgtccgaatcaagcgcataatatatcgagacgctcgaaattgaacaatggaggcacccaagaaattaaatgggcaaaaacgttttact

SEQ ID NO: 522 - DNA, 205 bp, Glycine max
ctttgatgtaacatttggagaggttaatgaaacaacgtattatgatgcgctccatgagaggttggatcaaatggagaatagagaccatatgaattgctcaagagcttccattgttcaatttcgagcgtctagatatataatgcgcctcaatcggacctccgagttaaaagttatgaccatttgaaatgctcaagagcttccattg

SEQ ID NO: 523 - DNA, 485 bp, Glycine max
  unsure at all n locations
agctntgaaatccaaagatctaatccaaggtatatgtttcataaaggggattcccttacttgtgctattcgagtgcaacctattcttttatatcctattcgtgtgtagggaaacttaagctttttgtgtcttctttaaataaagatatggtgggagaaaccccaactagcggttttgtggtaatttctaatggggggttgaattggcctgtggaaatttctggtagaacattaatgattgatctaatttgttggcctttgagccaaattgatggtattctgggtatggactgggtatcttccaaccatgtcttgttaagctgctttgataaaactatggcggttgatggctctagagtgagtaaggatatatatggagaagccagcttcatgatgaatcaagattgattcaaagaagttctgatgatgacaaaggtgatgacaaaaagctcaacgaccagaacaattaatgatacaaagatgatg

SEQ ID NO: 524 - DNA, 424 bp, Glycine max
tatttcactcaagccagccccatagaactttggcataagagacttggccattgtcatattcaaagaatgttgaacatgaagaagaaagacatgaccagaagtctaatggggttttctcgccaaattgcaatgcttggcagtttggtaaacaaaatagaatgccatttcccaaatcaacttggagagcctctcaaaagatgcaactaattcacactaatgtggcagaacctcaaagaacaccatcactacaagggagttcatactttattcttttcatagatgattttacaagaatgtgttggatttttttcttaaaattcaggcatgaagtggctagagtatttataaaggttaaagaagatggtggaaactccaagtggctgcaagattcaagttctaagaaccgataatgggaaggaatata

SEQ ID NO: 525 - DNA, 449 bp, Glycine max
agctttttgttgcgttaaatttcttaaattttatcacaaattcaaaaccttaagccaccgggtcaacaatagaatctttttattgctttttttctaaagttggcacaaaaaaacagatgttcaattatgtgggtagataattccaccaacaaaattatttgttaaatgtaactcaatctctcacagtagcgtaagatcatattatatttatatgtggaaaaacaatttatttaataaaagaaattatatttaacttttatcgcatgtaaaactttattaaattaacgacgaatatgccattgcaacggaattaatctatgaccaaatgatttgaaagatatctatgatttctgatttaggttaattaaaaaaggaaccaattcatatttttaattatttataacttatattaactaagggaataaaaatttcaattctattctcatttg

SEQ ID NO: 526 - DNA, 204 bp, Glycine max
cttggaaaatatgctgaggagtgcgttatctgcgataattgatgaaatgtattcaactttcataaaggacagacatatccttaatggaattctgatccttaatgaagtggttgaggaaactttgaagagaaagaagccagttatggttttcaaagcggatttctaaaaggcctatgattctgtatcttggtcttttttggatta

SEQ ID NO: 527 - DNA, 212 bp, Glycine max
tcaagcttttggaatataagctgaggagagtgttatctgcgataattgatgaaaggtcttcaactttcataaaggacagacatatccttaatggaattctgatccttaatgaggtggttgaggaaactttgaagagaaagaagcctgttctggttttcaaagtggatttccaaaaggcctatgattctgtatcttggtcttttttggattac

SEQ ID NO: 528 - DNA, 201 bp, Glycine max
tgtgaccatttgaataactcaagagcttccattgttcaattttgagcgtctcgatatattatgcgccttaatcggacctccgagtgaaaagttatgaccatttgaataactcaagagcttccattgttcaatttcgagcgtctcgatatcttatgtgcctgaatctgacctccgagtgaaaagttatgaccatttgaattt

SEQ ID NO: 529 - DNA, 583 bp, Glycine max
tcacttcaattggtgcatgctaatatctggggaccatcaagtacccctagctttggtggaagaagatatttttccctcttcgttgatgactacacctgaatgatgtgggtgtacttcatccaacaaaaatctgatgcattctctagcttcaaggagtacaaggccttagtggaaaagcaaagtgggcattccctcaaaatcttgagaacaaatcgtgggggagaattcaatgggcacatattcatcaatttttgcaatgatcatggcatcaagaaggagctgactgttcgtcacactccacaacagaatggtgtcgctgaaaggaaaaatagaaccattgtggaaatggcttgattgatgctacaacacaagaacctgccaaagaatctatgggcgaaagctgttagcatagcagtatacattctcaaccgttctccaactaaagaaatcttaaatttgacgccatatgaagcatggttcaacagaaaaccaacagttgatctttttaaagttttgggatgtgttgcttattcgcacttcccaaggagaaccgattaaagctttttgaaaaaggagaaaaatg

SEQ ID NO: 530 - DNA, 375 bp, Glycine max
tcaacattcaattttgagcgtctcgttatattacgggactctatcagacattcgagtgaggagttattgacgatcggattggctcaaagactcaacattcaatgtccagcgtatcgatgtgttactggactcaatcacacatccgagtaagaagttattgtcgatcgaatttgctcataacttcaacattcaatttcgagcgcctcgctctattacgggcctcagtcagacatccgagtaaaaagttattgtcgatcgaactggctcaaagcttaaacattcaatttcgagcgtctcgatctatcacgagtgtctttcgcacatccgaggccagaggaattgtccccagaattggcgtacatgctgacattcaac

SEQ ID NO: 531 - DNA, 450 bp, Glycine max
agcttagagccaattcaaacgacaataactttttactcagatgtctgattgaggcccgtcatatatcgagacgctcgaaattgaatgttgaagctctgagccaattcaaacgaccataactttttactcggatgtctgattgagtcccgccatatatcgagacgctcaaaattgaatgttgaagctcagagccaattcaaacgacaataactttttactcggatgtctgattgagtcccgtcatatatcgagacgctcgaaattgaatgttgaagctctgagccaattcaaacgacaataactttttactcggatgtctgattgagtcctcgaatatatcgagacgctcgaaattgaatgttgaagctctgaaccaattcaaacgacaataactttttactcggatgtctgattgagccccgtcatatatcgagacgctcgaaattggaa

SEQ ID NO: 532 - DNA, 571 bp, Glycine max
agcttatggtaaaactaacagcaatggaaagtacagtttcactgttgaaggctttgactatgtgaaaaatggagcctcagactgcaagggtaaactccatgctccttctaaggattcacgctgtttcatacccaccaagcttaatgagggaaccaaactgaaggtgaagtccaaggataaaaatgaaggtgcgctcagagcttaaccatttgcttatgctcctgaaaagccatatgattgcgaaaagtccaatcccaagcctttccctacttcttatgacaaaccatattattagaactctaccccaccccctttacccttaccgcacccacaccctccttactactataagtcaccacctccaccaccatcaacatactattacaaatctcctcccccaccttcttattactacaagagcccttcttcaccatcaccatcaccttctccatattactataaatctcccccgccaccatcaccatcaccacctttaccctactactattaaatctcccctcctccccacaaagatccataccatcctccttactactacaaggcaccctcc

SEQ ID NO: 533 - DNA, 586 bp, Glycine max
tgatgatgttattaaaggctttgcactacctctggcagtaacagtgacaaagatgatcataagtacgtttacaacttgacatcaaattttacttgagattttataatttctgatacttggttcacttggacataacagtggggagcaattgatggaagatgaatctcaaattgatctaaggagaaggaagaaacttgttcttgatggtgatttggaaagacaaatcaaagatctccatgagaagtaggtttgaccagatcaaacttttgtctgaactttggagcatgatttaaattagagccttgtcaaaaagaaattcagtcttttttatttcattttgtttacatcattggtacaaacattcttaaaaggagtgagcaagatagatcaattcatagcttttcaatattttgttgaatatcattatttgtactgtatttcaattcatagcttttcttgtactaatttaacccgagtttaataaattccaaaaattaaaaaaaaaatctccatattctacatcggttcaattataaacgatgtagaacatatcctcattctacatcggttaggcaataaacgatgt

SEQ ID NO: 534 - DNA, 367 bp, Glycine max
ctaagctcttactcggatgtccgattgagtcccgtagatatatcgagatgctttttttgaaaatagtagctcctagcaaattcgaaccataataactttttactcggatgtccgattgtgccccgtagtatatcgtgacgctcgaaattgaaaacataaggtctgagcaaattcaaacgtcaataactttgtactcagatgtccaattgagtcccgtaatatatcgagatgctccaaattgaaaatagtaggttcttgcaaattcaaaccataataactttttactcggatgtctgattgagtcccgtactatatcgagacgctcgaaatggaaaaatgaggctctgagcaaattcaagcgacttta

SEQ ID NO: 535 - DNA, 644 bp, Glycine max
tatcaatgcaaggaattaacacaagacttgagactagaattgaaaaattttacactcataaaaactaaattaatattgaagtctttatgaaaatttaaaacattctcatttaaccttaatttttattaaaataaagtctatcgaatgaaatattttttatccctactatttttttctagttccttctccgtttcaaactatatattatgatagttttaattattggatttttaaattttgtaggtgtgattgttgaacttatgtgttatattgcaaattttaaatcatattgaactttagcctatgtgataatgataataataatacaattcttcctgatttttgctttcactcaaactaaattttgattggattgaattacagattttatcaaattcaacccagatacccacctatatgattgatgaatgttgacaagatgggtctaactattttaaatatgtaatgaatattagttcctcttttacttgagtgctaaagtccggatcagaggaaaatgattacatatgaccctggatgtcagtatctagatatattaacaaattatataaaacagcaggacataatttccattaaaaaatatatgttttattaaattaagcagataccatagctttaaccca

SEQ ID NO: 536 - DNA, 470 bp, Glycine max
tgacaggtttaggtgcaggtgctgctactggtggaggcacttgaatttggttgccagacctcaaggtgatggcactcacatttttcggattctgcacagtctgtgaaggaaatttgtcaaaattttgggactgagcttggttcaactgagtagccatctgcccatctgatttgtcagactctgaatggaggctcttggctcttgctgaaattgcatattctggaaggtcattttccttactaactcctctaaagaaggttgaggaggagcctcagttgcttgttgtctttgttgtgaccggtgttgttgctgctactgtattggagggggaacatatggcttgctttgacccccaccattttaaaaaagagggacacattgttgttgttgtggaagacatttccctctcaaatttggatgattccttcaacctggattggatctatttcttgaaaggccataattattct

SEQ ID NO: 537 - DNA, 555 bp, Glycine max
gggttaaagtctcacgattgtcacatgctcatgcaataattgttagtcgtggctatacgagacatcttgccaaacaaagtcaggttagccataactcgcccgtgcttttccttccatgctatatgtagcaaagtcattgatcctgtcaagtttgatgagctggaaaatgaggccgcaattatactgtgccagttggagatgtattttccccctgctttctttgacattatgattcactttattgtgcatctggtcagagaaatcaaatgttgtggtcctgttcatacacataattcaaattcattaatatgtaatgcatatattggatgaaagctttgaaaatggaacttatggcagttcatcttaaattgttgcaggtactcttacttcttcggatactgttcattcttccaagcaggtactcttccttcttcagatattgttccttcttcctagtgtctaattcttgactcattttgtatggtgtactatatgatgatgtaaatgggaatatggtttctaaacagtttttatacccgttttttgtttatgttc

SEQ ID NO: 538 - DNA, 369 bp, Glycine max
tctgttgttcagtttcgagcatctcgatacattatgcgccttaatcggacattcgagtgaaaagttatgaccatttggatttctcgagagctttcgtagtccaattttgagcatctcgatatattaactccccgaaccagacatcggggtgaaaagttatgaccacttgaattctcgagagcttccggtgcttaatttcgagcttctcgatatgttatgcgattatatcgaacatccgacggagacgctatgatagatttaaattctcgagagcttccgctgatcaaatactagcgtcaagatatgttgtgcgtctgaatcggacatctcagggaaaagttctgaccatttgactttctcgagagcttc

SEQ ID NO: 539 - DNA, 337 bp, Glycine max
agcttgagattgatcaacggaaagtctcgagaaatacaaatggtcataattttcactcacaagtctgattcaggcgccaaacatatcgagacgcttaaaattgaacaacggaagctatcgagaaattcaaatggccataacatttcactcggatgtctgattaagccacataatatatcgagacgcttgaaattgaacaacggaagctgtcaagaaattcaaatgctcataacttttcactcggatgtccgattcaggcgcataatatgtttagacgctcgaaattgatcaacggaagctctagagaagtcaaggggtcattatttttcacacggat

SEQ ID NO: 540 - DNA, 353 bp, Glycine max
gaaagacagtgaagtgtcttaagactgacaatggcttgaaattctgtaaaggtgaaggcattgcaagacagtgtgttgtacactatactctatagtagaatggagtagttgaaaaaatgaacagaacctcgttagaaagggccagatgcatactatccaatataaggttgaataggagttttggggctaaggtagttagcacaacatgttatctcatgaattgctcaccgtccactggcatagatttcaggacccctattgaggtatgatctaacaaacttacttaatattcaatgttgaagatggtttgatttcccacatactatcatgtaaataaaggtaagctagagccc

SEQ ID NO: 541 - DNA, 624 bp, Glycine max
acctacagaaactaagcttattcagctgccctgctcgaccaagcatatccaccacacaagcataatgctctaactttggctttacgccatacaaactctgcatttgaccaagatattttaatccttctgttactaagccagcatggttacaggcaattagcactcccagaaatgtaaaagaatccggtctgcatcctttattttgcattaatccaaacagctcaatagccttcagcacatgtccatggataccatatcctgcaattataacattccatactgcttcatccttctcatttaccctgtcaaaaatgttccgagattgttccaagcatccacatttagcatacatgtcttttaatgcacaagtaacaaagttatcctcagaaagacgaggtttcattgcaaaggagtgaacttctttccccagccgcaatgcatccacatttaatctcggtattatattgtattatttgaagctattgaaaggaaaaattggaaaaaagatagtacctttgtagtaagaggttgtaaaagcaaaaagcatctgaagagtccgcattgaaatggagacagactacgagcaacgacaccaaagcaggaggaaaaattgcataccaaaaa

SEQ ID NO: 542 - DNA, 380 bp, Glycine max
agcttttatcaatattaaaacatcttactcttatcaaagcacatgtaacttataagtcttgaataactctattaccaattaagcaagattgtttgcacagaagaaaatcaacagataataaccatataacagcaaacttgccatgggttgacaaattcaggaggaccagtttgactgcctccactactttgaggatcagaaggattatttggcattccgattgacgagatgcttctctgggaatgagctgcactatggtctaacttaaaggtgctgctgctccagaaatcttctgatccatccaccttagtcactgtttgaccttgagtccttagtcctttagatgcttcatccattgaaataatccctggagttttttt

SEQ ID NO: 543 - DNA, 490 bp, Glycine max
tgcccggtgctggttctcgagtgaggaaacttgacttagagcgtccatatcaactcatgcacccgatgcgatatatggtgagctatggcggctcctatactttcctatgcgtatgcttccaccagcgagatcaatcccatcagtggccttgtttatgacattctgatgcttgagtcttctaccacctttcgtgagctatccacacgccttgggagcgcgcagtgggttccttaataattctcgcgacaatgggaccatcaatgacaccggccggcaaactcgattgcctgcctgttagaatcgtacacctttgatgtgcactggtacggataaacagggatgccttatttagtatataaaatatataaacgcgcatgaaaacactcttggttgctggagaaatagcttgcctcttagagagtgccaattatctaggacattgagctcaggccccttgcttgtcttccttcgggccggctgaatagactac

SEQ ID NO: 544 - DNA, 551 bp, Glycine max
  unsure at all n locations
tcttctcaacaggatcatataacctgtaaccaaattcattctcatcataaccaatgaagatacattgccttgactttgcatccaacttggatctctcatcctttggaacatgcataaaagccttgcagccgaaaactcttaagtggtcatacttcacattcttgcccaaccagattttgttcggcgcctcactattcaaagcaataacaggactaagattgataacatgcaccgccgtgtatagtgccttaccccagaagtgcttgggtaactttgcttcagagagcatacatctcactctctcaattaatgtcttattcatcctctccgccaaaccatttagttgaggagttttctcatgagcaatgtcatgcttcttgcagtagacatcaaatggtccctaatactcaccgccattgtcaatacgaatgcgnttcagcttcttgcttgattgcctcttaactaagacatgaaactccttgaacttcttaagaacttggtcatttgtcttttaagcatatacccaaagtttcctggaatagtcatcaatg

SEQ ID NO: 545 - DNA, 487 bp, Glycine max
tctaaggtggaacaacaattgcatagaaacagtcatgaagatgagttcatctaattttcactcgcttggttggaaagacacaaataagaagaagggaggatcatcaacaatcaatctcaatgttacaactcaaagaactcaaaataagttcgatgaggagcttaagaaagcaaggagctatgaaattaagtgcttcaagtgtttgggaaaaagtcacatagtttctcaatgttcaactaaaaagactatgttacttaaggaggatagagaaataattagtgaatcttcttcaaaatctttcccatctagcgatgaagaagagcatcaagaggaaagaaagttagaacgagatttgttcacgattagaaggatgttgggtagccaagcagttgaattggatgatagtcaaagagaaaagatttttcatgcgaggtgccttatccaaaggaagttatgctctttgatcattgatggtgggagtttcact

SEQ ID NO: 546 - DNA, 381 bp, Glycine max
ctggtgagcaggtcactcataatgtgaacattcctgttgacttttaaaaggagaactacaaatggttcttccttgaccagtaacccccaatccaaggtacatgaattgagtttaattactatccactttcagtataattattatcttacactctccatttatactgttaatcaatcagaaatcatatatgaaaacaacttttaagtaattttatataaaagttaacaaacttattatatgtaccatacataaactgcttactcataaattactatttttattaagaaatgttttagctttgttaattatatataagttctgtgtatttttgccaacattatcttgctatactagtagaatgtttaatatgttaaccaaatt

SEQ ID NO: 547 - DNA, 363 bp, Glycine max
gacacgggcttcttctccttttgctagttgtgggttaaaaagacaattgtgcaaaatcccccaaaatttaacaaaacaatcatcctcaatgtccacatctggaagttgaaaaaagagtttcaaattaatgttacaaatcttccataactaatgagggacacaaagtgagtaaaggttgaaagaaatataattctagtccaagatgtattaattatcatgtatgtaccctagctttcttcgggcagtaagtgataaataccgcaaggtaaattgtctcaatcaccccaccgaatgcattgatggtgataaaaagcgtttctccggtcttcacataggcataaaagatccaaagcattgcactga

SEQ ID NO: 548 - DNA, 621 bp, Glycine max
tgtatgaggggaaaaagtattaaacgttacatatagatacccattctccatcttttaagcgctcaagagcttcaatcatgtgctcttgataaattccaccacctcttgtaataggtatgcatttccctgtgcaagttaccattttagaaacaacagtactctgtaaaaacaactagaaaagcttttcagcatattttgatgcatatattaataaacttcaacccaatcatatgaaatagacagcagtaaagcatcacagtaagtattaaccttccgattcaaacattgttagcctagtgaagtgaaatgggtttaattcaatgctactgaactatagacaaagacaacacacaaaaggacttcatccaaatcaccacaatgtaatacattcattgaagaaaggccttgatagttgataaacagatttgttatattcaatgacatttttgccaattctggttttcttttttctttttttgattcagaattaaattttgggagtcgaaaggatactaaagtgctttagctgcaaatttccttttcaacaacttttaagcaacagatctgttgtgttaaagtattgtcccaagatgaaaagaaacaagattgaggatctatgtc

SEQ ID NO: 549 - DNA, 627 bp, Glycine max
  unsure at all n locations
caatttttttgtgttgtatagcaaatattttttttagttagataccttatgtttgaatttgataatttacgagtttgatatatatagatatttattataaatattaaattttcaatattattaattaatcaaaaattattttaaaacaatgttaacaagatattataaaagttaataaatttatcttgtgtaaaaatttataaatagatggccttgtaaaaaattaaaacaaacattttacaattagtgcatatgatgtttattcataatattttgtttaattgaaaattatatttttaatatatcatattaataaaataaatgtatattagtaataataaaaaaattattatttaaatatgttatttaaatttaaaaatttacttacaattaaataccttactattttaaatagtttttattaatgtcaataacaaaaaattcaatgtaaaattattttatataaaatttatgtaaaatacattgataatgtaaaattattttatattgttatcataatcttattaattttctcaataacaactttaaaaatcatattcaagttgatgttcaacangttaacatgacaatgtaatttatttttatatttacaatgcataataatta

SEQ ID NO: 550 - DNA, 627 bp, Glycine max
tctatagaaggttcgtccctaatttctctacaattgcatcacctctcaatgagctagtgaagaagaacgtggcatttacctggggtgaaaaacaagagcaagccttttctttgctcaaagaaaagcttactaaggcacctgttctagctcttcctaacttttctaaaacttttgagctagaatgtgatgcctctggagtgggagttggagctgtattgttaccaggtgggcaccctattgcttattttagtgaaaaactttatagtgccaccctcaactaccccacctatgataaagagctttatgccttaataagagccctccaaacttgggaacattaccttgtttccaaggaatttgtcatttatagtgatcatcaatcacttaagtacattagagggcaaagcaagttaaacaagagacatgcaaaatgggtagagtacctagagcaatttccatatgttatcaaatacaaaaagggaacaacaaatgtggtagttgatgccctctctaggagacacgcattgttttgctccctaggagcccaaattttaggatttgataatattagggacttgtatgctttaaatgaacatttctcttccatttacgagagttgtgggaaaa

SEQ ID NO: 551 - DNA, 427 bp, Glycine max
tcagttttcaattacgagcgtctcgatatattacgggactcaatcatatatccgaattgaaagtttttgtcattcgacttttcatagagcttctgttttcaatttcgagcgtcacgatatattaaagggctcaatcgcacattcgagttaaaagttattgtcgtttgatttttctcagagcttccgttttcaattaccagcgtctcgatatcctacgagacacaatcgaacatccggcttaaaagctattgtcgtttgaattggctcagagcttccgtgttcaattaccatcgtctcgatttattaccgtactcaatcggacatccgaattgtgagttattgtcactagacttttcatagaaatttcgttttcaatttcgagcgaatagatatattagagggctcgatcggacatgcgacttaaagg

SEQ ID NO: 552 - DNA, 488 bp, Glycine max
agcttgccaacccatggaagctcctaatatctcccacactttttggggtgggccattcttggatggccttgattttctcaaggtccacttggaccccatttctaccaactacaaaccctaagaaaactatattatctacacaaaaagtacacttctctatatttgcatagagggtgtttttcctaaggactgaaagaacttgcctgagatgtcctaagtgatcatctaggctcctactgtacactaaaatatcatcaaaataaacaactacaaatctacctatgaaatcccttaagacatgatgcataagcctcataaaggtgcttggtgcattagtgagcccaaaaggcatcactagccattcatacaaaccaaacttggtcttgaaagcggttttccactcatcaccctttttcatcctgatttggtgatacccacttttaagatcaatttttgaaaagatattggcaccatgcaactcatcaagc

SEQ ID NO: 553 - DNA, 498 bp, Glycine max
cgtgcattcaatatcctgatgagggtgttccatatgttctcaagactggactaatacatttgctgcccaagtttcatggtcttgcaggtgaagatcctcataagcatcttaaggagttccatattgtttgttccaccatgaagccccctgatgtccaggaagatcatatctttctaaaggcttttcctcattctctggagggagtggcaaaagattggctttactaccttgctcccaagtccattttcagctgggatgaccttaagagggtgttcttggagaaattcttccctgcatccaggaccattgccatcagaaaagacatttcaggcattaggcaacttagtggagaaagcctgtataagtactgggaaagattcaagaaattatgtgcaagctgttctcaccaccagatttctgagcaactccttcttcaatatttctatgagggacttatcacctggagaggagtattattgatgctgccagtggtggagc

SEQ ID NO: 554 - DNA, 486 bp, Glycine max
agcttatcttaatgaaaaagggtatgccaaaatatgtatctccagaagattggaattggctaattaaacacaagtagagtggttcaaaattttaagtaaaattattttattattttgaacataatttttttaataggtttacacttataatataaaatcacttatactttgatgtaggaaagaagcttgacaaacaaagctaattgaagcaagcaagaaataaaataaattattgaaaaaatcaattgtgcaaaagacatttgaaatggtagcatcttttaatattttatattagttttcttacaagttatataaaataactcattttttattttgtgattatttttatatgatatatgaaaggttggtgaaatttataaagacattatgcattatattatattatttaatttgttttttactatataaattttaatagaaaaaagatttaatatctggtgaatgacaaaaaaattaaggtaaaga

SEQ ID NO: 555 - DNA, 305 bp, Glycine max
tgcagggataacttggattgaattttacgaccttatgatggccaccaacaattgttcacctcagaacttcattggaagaggtgaggttgggatggtttactagggcattctacctgatggctcaatggttgcaatgaaacggcttgaataatcaaattctcaaagagatgctgtgttctaaagcgaggaggacattgttaagcaccttgaagcaccgtaatctggtgccattaaaaggaagttgcaccattggaagaaccaatttgggaaattatatattgtgatggtttttaaagatatttaac

SEQ ID NO: 556 - DNA, 366 bp, Glycine max
tttgagaaattcaaatggtcataacttttcacacggatgtttgattatagcgcatcgcatatagagacgctcgaaaatgaacaacggaagctctcgagaaattcaaatggtcataacttttcacactgacgtacgattcatgcttataatatatggatatgctcagaaataaacatcggaagctctcgagatattcaaatggtcataacttttcacatggatgttcgattcgtgtgcataatatgtcaagaggctcaaaattgaacaacggaaggtcttgagaaattcaaatgttcataacttttcacacgaatgtccgaatcatgcttataatatatcgatacgctcgaaattaaacaacggaac

SEQ ID NO: 557 - DNA, 438 bp, Glycine max
agcttgaatcggacatctgtgtgaaaagttatgtccatttgaatttttcaagagcttccatttttaaatttcgagcctctcaacatattatgcgcccgaatcggacatccgtgtgaaaagtcatgatcatttgaatttctcgagagtttccgatgtttaatttcgagcgtattgatatattataaccctgaatcggacctcagtgtgacaagttatgaccatttgaatttgacgagagcttccgttgttcaatttcgaatatcactatatgtgatgcgcctaaattggacatccgggggaaaagctatgaccatttgaatttctcaagagcttccgttgctcaatattgagcgtctcgatacgtgatttgcctgaatcggccatccgtgtgaaaaagtataaccatttgaatttctcaagagcttccgttgttcaatt

SEQ ID NO: 558 - DNA, 456 bp, Glycine max
acccgatactatacacaaccctagcttgtattatataatatccttgaatcttcaatcaagaatttgatattctgaaggccaaaaataccgagatatatttaaaaaattattaatctatcctaataaatacttattcatattctcaaatcttgtatcatatccttccattcattatattttttaaaaataaaattatctgtcaacaatgtcataccataatggttatctaatctaaactatttaacctggcaaaacgataatttttgttattatgatgaacaagaattataaattataaaatcttagtcatataatgaaaattaaaaaaatacatataattttgtaagtgattattcaaccagtaataaaaattttaggttaattatttatataaaattaaattagtcatttttattcttatataagatgatgatttacattaagatggagtcaatg

SEQ ID NO: 559 - DNA, 473 bp, Glycine max
tgcttgggattgatcctccaaagggtgttttttgttatggccccccaggaactgggaaaacacttttagccagggctgtggctaataggactgatgcttgttttataaaggttattggaagtgagctacttcagaaatatgttggtgagggggctatgatgggtcgtgaactattttaggtaaaatgcacaagactccgtcctctagcttttttttatcattgtttcgatgaaaataaatcattcgactaaaattttctgatttttagatggctcggtcaaagaaggcatgcattgtgttttttgatgaaattgatgcaattggaggagctcgatttgatgatggttgtggaggtgacaatgaggttcaccgcaccatgcttgaaattgagaatcaccttgatgggtttgatgctaggggaaacaataaatttttgatggcaactaacagggtggttgaatttattgtgagag

SEQ ID NO: 560 - DNA, 533 bp, Glycine max
tgcttctacaataaggtgatgtccttcggactcaagaacaccggggcaacctatcagcaagcgatggtagctttgttccacgatatgatgcaccaagaaatcgaagtgtatgtggacgatatgatttctaagtccaaaaccaaagaagagcatctaatcaacttacggaagttgttcgagaggttgcgaaagtaccagctaaggttgaacccagccaagtgcactttcgaggtcaaatcgggaaaactgttgggtttcatcgtaagccaaaaagggatagaggttgaccccgaaaaagttaaagccatcctcgaaatgccgaagccatgcactaaaaagaaagtctggggtttcttggggcgcttgaactacatcaccaggttcatatcacagctcacggctacctgcaagccgttattcaagcttttgcgcaaggatcagtccgttcgttggaatggtgattgtcaagaggtgtttggaaagatcaaacaatgtctcatgaaccccctggtactaatgccaccggtgggtgg

SEQ ID NO: 561 - DNA, 473 bp, Glycine max
agcttgtcagtttattcccaaaaacctgcctagtccaagaatatggctttcaattgaatgacaatagtctctaaatcaattcattggcgtatcacttcactcacttgaattacaacatgatagatacttaactgataaatcatatatatgtgatatgagtaattaattaaaactatatatatataggacaaagatatattattgattaaatttttaaaaaacaaaatattgttagtgattatttttttaaatgaatatatgtaacataattagaattgacagtaaactgtatggtaaaaaacacagttataatattaagaaaaaaatttaatcaaatctcctattttaaatataactatgcttattataataaaacattaaaataccataattggatttggatgtcctaaaacaactggcactaatcctttttaaaaaaaacttataactcaaattgataaaagcttatcaat

SEQ ID NO: 562 - DNA, 568 bp, Glycine max
tatgaaaataagagaaagaaactttcaaaataaatttgtatattaaacaaattatttttggtcaccttgttaaataaatatttattttagtcaaattaatttataagttagtcgaataaacttttataatctaattaactattagagcaatttggcaatcatacccatggttaaagaagttatttaaccagtaaaaaaaacttttaggaattaaatttacttaaaatatttataaaacatatatacttttttagggtaaacgtatgtacttaaaatatatcctttattcaattttgttagacattttagtaatttatttgtttcattttaattgtgattttataatattgatgatgtattaaatatttttttcttaatatatccattatcggtcatcattaagtgagaaaacaaaaaaaagtataaataaaagatagtccaattaatataaaagaaaaaaatattataaaaattgcataataattttaataaaatctataatataattacatatctaaatttctgtaccaaaatttgtccacaaataaaatggagggattttatatta

SEQ ID NO: 563 - DNA, 497 bp, Glycine max
atttacattttcaaagattacatattggggaatctaacataacagacaatcgattgtacaaaacaatgataggagtaaaatctagtaacatcataatttaaactcactgcgacggataaatgacaatcaccatactcaagagcctcatggataatgataagatctttcctaccctaatctaaaaaaattagacgattaaacaatttatgtttggtgactacatagtggcactaatatgtaaatgcaaaaatgctgacctggccatgttcattgaaagtatcgagtccaacaattccaaggtccagatctccagataacaattttcttgtgatgtatttgggcctctaaaaccaaactatgagtttggattgctgcagtaatgcaagagaattggtttatggtcatgtagagatatagtacattgatggaagccaagggaaaaaatagaacgcacatgaggaagcaactcacttaacttatttctgctttttggatca

SEQ ID NO: 564 - DNA, 342 bp, Glycine max
agctttgtatggtagaaggtgtaggacacctctatgttggctaaagccctgagaagacctcaccttaggacttgaagtggtacaacaaaccaccgagaaagtcaagttgatccaagaaaggatgaggactgctcagagtaggtagaaaagttatcaggataagaggaggaaagacttggaattcgaggttggtgatcatgtattcttgagagtcactctgtggactggggttggtcgagcattgaaatcccaaaaactaacacctcgcctcatcggtcctttccaaattcttaaaagagtcggtcctgtggcataccaaaatgcattatccccatcacattc

SEQ ID NO: 565 - DNA, 582 bp, Glycine max
ttgttgacaacactgtggctgcagcattcaatgctgaccttgtccaacctccatcacccttgctgcccaaattactttgatctctaagtacatcatgatgtaagctccattggagcttgtaggcctaggatcttcttcatcaatggattcctttgcttcttggaagatgaatggcagtggaacggataaaggaagagagagaggagacgccacttcaaagagaagatgagtttagaaaaagcccaccaccataggaggccatggataagagctttgaggaagaaggagatgaatgaagggagagggagagaagagcacgaaattttgtgctctaaatgagctctgaaatctgaagtttaatattcaaatgatcaaagttgaaaaaaatgcacacacatgacctctatttatagcctaagtgtcacaaaattggagggaaattcaaatttcacttgaatttgaaattgaatttgtggagccaaaaattcacttaatatgattagtgaaatttaattatgtttcaaccccactaatccaagatcaattccaagattctccactaagtgtgcttaagtggcatga

SEQ ID NO: 566 - DNA, 539 bp, Glycine max
tgctatgtacccctacgccaaactagtatcatagaagaaatatgatatgggagaagagcggcgtaaaaccggtaaaaaataagtcaacaaggtattgcatgcgaactttatcatagaggtccgattctctacttggcttgccaacatcatcataatcaaaaaggccaacgcctaatggcaaatattcatcgactacactgatttgaatagggcatgccctaaagacgcataccctttgcccaacattcatagactagtcgatgggacatccgagttccaggagcttagcttcctagatgcttactatggatacaaccaattcaaaatgcatgctctaaacaaggagaaaatgacattcatcactaaagatgccaactttaactgccaggacaagccaactttagtggagttgggtatgttaaagtaagttaatgacaaaaaactcccttactgagcatcatcccatgagggaacatgtttcctcaccaacccaatgagtggtgctacaagtatatacaaatatgggacaaaacttttgt

SEQ ID NO: 567 - DNA, 314 bp, Glycine max
gcatgcaagcttgtaatcgattacacaaatcttgtactctattaccagaggagaatttcagaaaataatttccaagagtcacatctgttgccatcaaaggtctatttatatgtgacatagaacacgaatttgcgaagagtttttgagaacacaaaggtcttatcctctccaaaaaagaaaaattatcttatcctcttaaaaattccttggccaatacccttgcaattcaataaggaattattttgagtgctccattgttcaatctatctctttcaagagagaattcctcttctcttcatcctatttccaaaaag

SEQ ID NO: 568 - DNA, 446 bp, Glycine max
agctgtgagacaactcaactttcataactttggactcaaatgtctgattacggaccataatatatcaagacgctaaaaattgaacacggaagctcgggcccaattcaaactgccataacttttgacttagatgtctgattgtggaccatattcgaactgccatgattggtgattctgatgtttgactaccgcccataatatatcaagactcttgaaattgattacaaaagctcctcacaaattaaactaccataacttttgattggatgtctgattgtggccgataatatatcaagatgctaagaattgaacacggaagctcctagaaaattcaaactaccataacttttgacttgaatatctgattgcggaccataatatatcaagactcttgaaattgatttcgaaagctatgagcatattcaaaactttcataacttctgact

SEQ ID NO: 569 - DNA, 437 bp, Glycine max
  unsure at all n locations
agctntccttcattctctttcaagttaacattttgaataatttttatcatttacaaattatttattttgaagtaataatttttgtggttagaatgaaatttgaacctgaagtttaagtgtagtaatttttggaattagattttttattttgaaattattactaataattatttataagcctctttgttcatggtttttctgccttagaaatttttacatgtgacccttcctgtttttggagttaaagaattattcgtaaattatttaattggagtaataatttttttgttagaatgaagtttgaatgtgtagtttaagtttaatagagcaagacaatagattnttttatttttatcattcacaaattatttattttaagtaataatattttttgttacaataaaattgtaagctgaagtttaagtgtattatatttt

SEQ ID NO: 570 - DNA, 383 bp, Glycine max
tatatggcctaggatgtgggtttgtgactaaattcaatttaaacacaagtcttgcacttgccacattggtacaactccctccatcaatgatcaccatgcaaactttgccattgatcaaacatctaatgtggaaaaagttttgtctttaacttttctccatagacttcaattaatgggcaagtaaccgtctaatcatcaacaaatctccctccggtggtttctacacttcctcctcatcatcctcactctctttttccttttcaacttccgactcactaatgtactctccatctctaagaatcatggctttcttgttagggcactcatgtgcataatgtcccaagccttggcaccgaaagcacttcacataccaactttttttt

SEQ ID NO: 571 - DNA, 444 bp, Glycine max
  unsure at all n locations
gcttgcttctatagtacatacacaatatacatcatcacaatgacattnttaacatcaacaaaatgtcatctccaggtcattgtcaacatcaacatcatctcatctcaatgtcattctcaacatcaacattatctcatctcaatgtcattccaacatcaacatcattttatctcaatgtcattctcaacatcaacatcatctcatctcaatgacattatcaacaacaacaacatcatctatatcaacataatcattaataacaacatgatctcgtatcaatattatcataaacaccaacatcgtttgtatcaattattattaatatcatcttcaatatcaacatcattctctatcaacattatcataaacatcaacgtcacctcatatcaattaatgtcattgtcataccctaatttcgtccggcgacctttgcttgatgacatg

SEQ ID NO: 572 - DNA, 438 bp, Glycine max
tagacaattacatatcctccttctttgatacagataattcaaaatactttgtttcatggtctgcccaatgaagacccttatgctcacttagctacctatatagagatatgcaatactattaagttggcgggtgtgcctactgatgcaatccagttgagtctgttctcattttctttatatggagaagctaagagatggcttgattcttttaaaggaaacagtctgaagtcatgggatgaagtggtagaaaagttcttaaagaagtacttccctgaattgaagactgcagaaggcaaagttgccatctcttccttccaccagtttctagatgaatcgttgagtgaggcactcatggtttttcagaaccaatacagctcaacatattcatagatgggttgagaccacaatctaagcagctcttggatgcttcagctgggg

SEQ ID NO: 573 - DNA, 326 bp, Glycine max
tttagccaattcagacaacaataactttttactcggatgtcttattgagtcccggaatatatcgagacgctcgaaattgaatgttgaacctctgagctaactcaaacgacaataactttttactcggatgtctgaatgagtcccgtgatatatcgagacgctcgaaattgaatgttgaaactctgagccaattcaaacgacaataaatttttaatcggatgtgtgattgagtcccggaatatatagagacgcctcgaaatgaatgtggaacctctgagcccattcaaccgccattaccttttactttgaaggttggatggggcccc

SEQ ID NO: 574 - DNA, 430 bp, Glycine max
agcttgtagggttaaagtctcacaattgttacgtgctcatgcaaaaattgtcagtcgcggctatacgagacatcttgccaaacatcgtcaggttagccataactcgactgtgctttttcttccatgctatatgaagcaaagtcattgatcctgtcaagattgatgagctggaaaatgaggccgtaattatactatgccagttggagatgtattttccccctgctttctttgacatcatgattctcttgattgtgcatctggtcatagaaatcaaatgttgtggtcctgtttatctaccgtggatgtacccagttgagcgattcatgaagatcttaaaaggatatacaaagaatctatatcatccataaccatctattgttgagagggacattgcagaacaagccattgaattttggtcacaacacattca

SEQ ID NO: 575 - DNA, 419 bp, Glycine max
tagcttatccagaagcacttttagaaatagaaatttagacaaaaaaaagtttctccataagttagaaatgatcttatagagaagttatatgacagagttcctataaatgagcttattcataagctaattttagcttatacagaagcttatttcattcttttcttcttatattttcctctcctcctagaagcgcttatggggaagtttatccaaataggccctttatatttcattgttctttctcatttccctgagtcattgctgctgaaagcaactttgacatctctcccagcaggaatatgatcgactaacctctagactcaaccccgatggtaaatcaaagcacatctagtcgagaattttacaccccattgtgtacagtcaccaaaacttacaccttttagtgttgtaatttatga

SEQ ID NO: 576 - DNA, 408 bp, Glycine max
ttggagtttccaagtgccaaatcgtcttcttcttttgtccagtcttcttctggcttcaattcattagtgggctttccttctgtgtccagcatcttgggatgttcccagcctttgatgacagctttccaggttctgctatccagtgatttgaggaaggccaccatccttgctttccagtattcatagctggttccatccacaatgggtggtctgttcactggtccttcttctttctccatgttcatcacaatttatctccctagatctcactcagtgaattagagtgcccgctctgataccaattgaaattctgatactgaggccagatgtcgtaccggatgtcacgacatcacgcttcagaacatgcagattatatttgactgtctgacagattaaacaagttaataa

SEQ ID NO: 577 - DNA, 430 bp, Glycine max
  unsure at all n locations
agcttgaaccttacagaccctattctagtgatcttacaagacttgttgtttccaagtaggaatgaaccaccaacttgttcatcaagctcctcaaaccaagacttgtttggggtcatatagaatgaacacccagagtccaagatccattctgtctcagagttttcatgagacaccattaaagcctcagctgactcataaccatcttcaactagagcagcatttctaggctctttagattgatcttacttgcttcctttctatctatcaggacaaaatctcctagtatgaccttctcttttgcagtggtaacatctaatgtttggtacattagatccagatcgagtttgtgacttggatctttttccttctgtcttatcatccttcgtatactatcttacacgaactgagagttcctacncatgtacataag

SEQ ID NO: 578 - DNA, 573 bp, Glycine max
tctttgagaaaacttccttgagaagctagagcttagctacacacacccctctcataactaagctcacctccttgagaagcttccttaagaagattccttaagaagctagagcttaactacacatacctctataatagctaagctcacctccttgagatgagaagctagagcttagctacacaccccctataatagctaagctcacccccatgacaaaaaacatgaaaataacaaaaaaaagtccttattacaaagacaactcaaaatgccccgaaatacaaggctaaaaccctatactactagaatggccaaaatacaaggcctagacgaaggaataacctattctaatatttacaaagataagcgggctcatacttagcccatgggctcgaaatctaccctaaggctcatgagaaccctagggcctcttcttggatctctagcccaatctacttggagtcttttagccaatgcccttgcggggtaggattgcgtcaaccctcacgactttatctgcgtagggacattgtgtatcatgccgccaacatgatacacctttactaaggccaccaa

SEQ ID NO: 579 - DNA, 412 bp, Glycine max
ttcttttggatttgattggaatttctgacttgaaagaattccttggttgctttgacacacaacactcaacacacaattgttttggtatctcaatttggggaagaccatgagccattttcttacttttcaaattacttaaactcctgaaatttaaatgaccaaacctgtgatgctacatccagctttcatcacttatagaagcagccaagcattgaaattctgcagtctgaattccaatcttgaatgctctatttcttgacaaaggggcctctataatcaacctcctatttctatcaaatatctttatttgattggcctccatctgcattgagtagcccttttctagcaactgtctcaaactcagcaaattattcttcatattgggaacatatagcacatcattgataaatga

SEQ ID NO: 580 - DNA, 462 bp, Glycine max
tggacttcctgtgttttgggaacctctccttcctcaagtgtacccaaacctcatcacctggttcaagcatgactttctttctgcttttgttggcttgccttgcatagctcgcatttttcttttcaatttgggccttcacttgctcatgcaacttcttcacatactcagctttagcctgtgcatccttatgcttaaacatagcaatgttaggcataggcaaccaatcaagaggagtcaaaggattaaatccatacactatctcaaatggtgaacaattagttgtgctatggacagcccgattataagcaaactcaacatgaggcaaacaggcttcccaagatttaagatttttctttaaaacagtcctaagcagcgtgcctaaagtcctattgactacctcagcttgaccatcaccttgtgggtgacaagtagtagaaaacaacaatttagtactaatcttac

SEQ ID NO: 581 - DNA, 425 bp, Glycine max
  unsure at all n locations
tagagtcacctgaagctgcagcttcctggcctttaggtaaaaagactcgtgatcgctatggatgacaaactctntgggtaataggtcatgctgccagagttgtagagccctaaccaaagcatgcaactccttaaataagagaagaggaaaggcagaggctcctaacttttgactaaaataagctatcggatgtgcctgttgggataaaacagccccaatgcccatatttgacgcatcacactcaatttgaaatgatgttgcgagattaagcataacaagaatgggtgcattatttaacctatggttgagggcagcagaggcctcttattagttgttaccccattcgaaacccacattcttcttaacaacttcacgtagaggagcagccaatgtactaacatccttatccaatctgctatagaaac

SEQ ID NO: 582 - DNA, 217 bp, Glycine max
tatactgcaaacatctacaataaaccttctcaacctcagcagcttaatcaaccactacagaacaaatatgaccttttcagcaacaagtacaattctaggtggaggaatcattcaaaccttatatggtcgaatcccttccaacaacgacaacaacaacaaccaccttatttttataaagttgctggcccaagcaaaacatattttcctccaccaatcc

SEQ ID NO: 583 - DNA, 438 bp, Glycine max
agcttgaatcggacatctgtgtgaatagttatgaccatttgaatttatcaagagcttccgttgttctatttcgagcgtctctatatgtgatgcgccataatttaacatccgtgtgaaaagttgtgaccatttgaatttctcaagagcttccgttgttcaatttcgagcctctcgacatcttatgcgcccgaatcgaacatccgtgtgaaaagttatgaccatttgaatttctcgagagcttccgatgtttaatttcgagcgtatcgatatattatatgccttaatcggacctcaatgtgaaaagttatgaccattttaattgcccgagagcttccgttgttcattttcgagcgtctctatatgtgatgtgccttaatctaacatccgtgtgaagagttatgaccatttgaatttctcaagagctttccttgtttagtt

SEQ ID NO: 584 - DNA, 540 bp, Glycine max
  unsure at all n locations
acctttccaacatttggtccatgaatggcagatgaaaatgacatcattcaacttgcggtagtcaataaaaattcgccacccagtgattgtccgtgtaggaataagatcattcttatcattacagatcatcttcatatcgcctttctttggcaccacctggaccaaactcacccaagtgctatcagagttggataaattagtcttgcttcaagcaacttgaggacttttttgcacacctcctccttcatagatggntgagtctcctctatggatgtctatccagtctgaattcaccttccatcattatgctatgcatgaaataggatggactaatccccttaagatcaaatatgtgtcatcctattgttgtcttgtgcttcttaagaacctccaccaatagtgcttcctcaattgaagacaacgtattattgataaccactagtttaacatcatctgcttcctgggagacatacttaaggtgaggaggtagaacccttaactcaaccttaagtttttctgtaagagtgcctttttttagct

SEQ ID NO: 585 - DNA, 437 bp, Glycine max
agcttcggctttgtcctcaatgcttcatgtagacttgcccaaaatcgcgaagtgaacctcggatccctgtcagatacaatactggaaggaattccatgcaaccttactacttctttgatatacaacatccactagcttctccattctatacttcatattcactagaataaaatgagcagatttggtaagtcgatctactatgacccatacagcatcatgtcctcgactagacttaggtaaactagatacaaaatccatggatatgctctcccatttccattccggaattgccaagggcttcaattctccttatggtcgatgatgctccgccttagccttttgacatgtcaaacaccttgctacatattcagctacatctttcttcatgccatgccaccataaacttctcttcaaatcttggtacatcttagtcattc

SEQ ID NO: 586 - DNA, 478 bp, Glycine max
  unsure at all n locations
cccttcatgatgaatcaagattgattcaaagatgttttgatgataacaaaggggatgaaaaaaagctcaaaggtcaattcatgataatcaaagaatgagttcaagatgttcaaagatgtttaagatgatcaagatgatcaagattgaataaaaaacacttcaagaatcaagaatcaagattcaaggttcaagcttccaagaatcaatatcaagattcaagactcaatattcaagaatcaagagaagacttaaatgagataagtatgaaaaggttttttcaaaaacttagtagcacatggatgttttctcaaaaaatgtttaccaaagagtttttactctctggtaatcgattactagaatattgtaatcgattaccagtagcaaaaaatgattttgaaaaagttttcacatgaatttacaacgttccaattgatttcaaaaagttgtaatcgattacaatgttntggtaatcgattac

SEQ ID NO: 587 - DNA, 334 bp, Glycine max
ttgctatccaacaatgttgcttcatgctttaggatttctatacattggttctctgataaataccttgtgttgtcttcaggagctcatataaagagtgtatgcacacaagccggtatgtatgctatccgtgcccggaggaagactgtaacaaacacagacttgctttatgcaccaaataaagtcatctaaggataccagaacatcactgcaactcccaagtatatggtctacaactgaggtattttttcatctttttccgagaccatagcagctttatctttattttcccctggaaattgaagggcatgcgattctatctaattaactctctgtt

SEQ ID NO: 588 - DNA, 447 bp, Glycine max
agcttgaaggacatgcacaaagtgtgactatatgatgtggctatggcgtgtagcaagcaaatgctcacctcccccttaggctggaccaaactttaattgggttgggcttctcccaattcaattaaatttatctcccaacacacatcaaatagggcacttaatgcatgtgaaattacaaaactacccctaatccagaaactagtctaggtgccctataatacaagagctaaaaaatcctacattactagggtaccctccctacactatggagccctaaatacaagtcccaaaaataatgaaatcctaatctaatatgtacaaagataagtggtctcatacttagcccatggacccaatcttcttggagtcttctatccaatacccttgagggatagtgatgtagctccatgtggagcttgtagaccttggatcttcttcatcaatgga

SEQ ID NO: 589 - DNA, 333 bp, Glycine max
attgcacaacggaagctctcgagaaatttaaatggtcataacttttcagaatggaagtccgattcacgcgcataatatatcgagaaacttgaaattgaacaacggaagttgatgagaaattcaaacggtcataacttatcacactaaaggtctattcaggcgcataatatatcgtgacgctcgaaattgaacattggaagctctcgacaaatgctaatggtcattacttttctaatggacattcgattcatgcgcataatatatcgacacgcttgaaattgaacaacggacgcctcttataagttcaaatgcgtatagctttttacaacgaag

SEQ ID NO: 590 - DNA, 447 bp, Glycine max
agcttgtaattgaataccttaatgataaccaactatcctgtttcacagttcttaaaacataaccaagaacaatttaacatattacaacacctcataatccattataacatgttatcaaatacaattttaagcataaaaaatcaactttgttcatacaactataagtacacaaagattacaaaaatattaatgttgcttcttattctattacttttattaataaaaattaattactttaaaatcatataaataataagatctaattaattgataatataatttttagtcactaataaatgcatatgaaactcactctttttcttcttctcaaaatcacctgctaatatatatattttttgggtttctattctacattaaaacatagtaccctatttatactaatcactgactattatgctcatatagtgaacccaatttatattaatc

SEQ ID NO: 591 - DNA, 433 bp, Glycine max
agcttaccacctttcccatgatgcagtcaccagattgcgaacttccctttaaactcatgtgtgatgcctctaactatgcacttggggttgttttgtcacagagagttaataaactatcccatgtcattgcctatgcttcacgcactttagatgcaacccaagttaactacaccaacactaagaaggagcttttatctattgtttttgctttagagaaatccagatcttattttctttgctctcgtattattgtctttactgaccatgcagctttgaggtacttattgaagaagccttatgctaaacctagattgataaggtggatgcttcttcttcaggagtttgatattaagattaaagacaggagtggtgcagagaacttggttgttgatcatttgagctagattgaggaacttattgatttctttcctat

SEQ ID NO: 592 - DNA, 430 bp, Glycine max
tgtttaccccatgttgaatttgcttacaatagagttgttcataatgccactaattgttctccttttgaagttgtttatggttttaacccactaactcctcttgatcttttgcctatgcctaatgtttctgtttttaagcataaagaaggtcaagcaaaggcggactatgtgaagaagcttcatgagagagtcaaagatcaaattgagaggaaaaataaaagctatgctaaacaagccaacaaagggagaaagaaggttgtcttctaacccggagattgggtttgggtgcacatgagaaaagaaaggtttccaggacaaataaaatctaagcttcaaccaaggggagatggaccatttcaagtgcttgaaagaatcaatgacaatgcttacaaagttgagctgcccggtgagtataatgttaattccacct

SEQ ID NO: 593 - DNA, 422 bp, Glycine max
agcttatgtctggtcgagtatacatctaagcatatataactctcccaacaacttatgcatatggaattgcttccatttttttcgttccaattcatttctaagacattgtgcgagactaaatttgtctcctttctgaattggaatgggtgatgttgagcacttttccatcctgaatctctctagtactttattgatatatgatttctgagacaaccctaacaatccttgtgatctatttctgaatatttttatccctatcacataacttgcctcacccatatcttgcattttaaagatgctagagagaaacttcttagtctcatgaagtagaccaagatcattagttgcaagcaaggtatcatcaacatgtagaattagaaaaataaccttactcccactgaccttcaaatatatacactgat

SEQ ID NO: 594 - DNA, 229 bp, Glycine max
tttcactctgatgtccgattcaggcgcagaatatatcgagaagttcgaaaatgaacaaaggaagctcttgagcactatcaatgatcataacttttaactcggatgtccgatttacgcgcataatatatccacacatatcaaattgaacaatggaagctcttgagaaattcaaacggtcataactatttactcggagggccgagtcagtctcactatatattgagaccct

SEQ ID NO: 595 - DNA, 374 bp, Glycine max
agctttcattgttcaatttctagcgactctatatcttatgcgcctgaatctgacctgcgagtgaaaagttttgaccatttgaatttctcgagagcttccgttgaccaatattgagcgcatcgatatattatacgcctgtatcggacctccgagtgaaagactatgagcatatgaaatgctctagagcgtccattgttcaatattgagcgactcgatttattatgcgcccgaatcggaccttctacgtgaaggttatgaccattggaatccctcgagagcgtcgggtgctcaatttcgagcgtctggatatattatgcgcctgaacatgacttccgtgtgaaaacttctgaccatttgtatttctcgagagcttg

SEQ ID NO: 596 - DNA, 443 bp, Glycine max
  unsure at all n locations
agctntactattcaaagaatagccaagaaatataccttcatatgattttgcatcaaacttgcccaagttgtctttcccattatttatcacaaagcatttacatcaacaaatatgaagatgggaaatatttggttttcttcctttgtatagttcatatggtgttttctttaagacaggtataattaatgcttattcattatatagcatgcaatattaacagcttcagcccaaaaatatttaggaagatttgtatcattaagtaaagttctagctaattcttctaatatctattttcctctcaactactccattttgttgagaggttctaggtgtagaaaaattatgttctataccattttcatcacaaaataattcataatatttattctcagattctcctccatgatcacttctaatggatgcaatgttgagattnttcttat

SEQ ID NO: 597 - DNA, 525 bp, Glycine max
ttgagcaaattgaaatgacaataactttatacacggatgtccggttgagtcccgtaagatatcgagacgctcaaaatttagatccgaagctctgagaaaattgaattgacaataactttatacacggatgtccggttgagtcctgtaatatatcgagacgctgcaaattgaaaacggaagctcgtaggaaattcaaacgacaataactttttactcggatgttcgattgaatcgggtaatatatcgagacgctcaaaattgagactagaagctctgagcaaattgaaatgacaataactttatacacggatgtccggttgagtcccgtaatatatcgagacgctccaaattgagaacggaaactcttaggaaattcaaacgacaataactctttactcggatgcccgacagagtgtcgtaatatatcgagagacgctccatattgaaaacggaagctcgtatcaaattcaaacgacaataactttttactcggatgtctgattgagtcccgtaatatatcgagac

SEQ ID NO: 598 - DNA, 491 bp, Glycine max
ctataaaactaagcttatgctgcaacatttacatagacctcctcaacctcagcagcaaaatcaaccacagcagaacaattatgacctctccagcaacagatacaaccctggatgaaggaatcaccctaacctcaaatggtccagccctcagcaacaacaacagcagcctgctccttccttccaaaatgctgctggcccaagcagaccatacattcctccaccaatccaacaacagcaacaacctcagaaacagccaacagttgaggcccctccacaaccttccctcgaagaacttgtgaggaaaatgactatgcagaacatgcagtttcagcaagagaccagagcttccattcagagcttgactaatcagatgggacaattagctacacaattgaatcaacaacagtcccagaattctgacaagctaccttctcaagctgtccaaaatcccaaaaatgtcagtgccatttcattgaggtcgggaaagcagt

SEQ ID NO: 599 - DNA, 428 bp, Glycine max
  unsure at all n locations
agcttgtctaaggcgcagaagcatcagcaaaatgtttacataattntgcttgacagttccagcatcagcatattcctaacatgacatgacatcatgcacatgtcaatagtggacttcaaaaatagcttaccaagaaaatatacttacatgaagtcatgaacaatactattatcaaatgctcccacttgatttgagttggaaaaataggcgcaaccacattacaaataaaatattatagaagtcacatgagattcctttgtaaagacaaaccatacctgaaactgtgcacgtgaatcagcctctagtttggaatagaaatcacgttcctccatagaaaaatcaacttttttcagctctatatacttaggcggcaaggaaataataggttccccgtcaagaagtgtacctacagagaatgatcatcacat

SEQ ID NO: 600 - DNA, 453 bp, Glycine max
  unsure at all n locations
tcttctgctggcaacaatggatttcaacttgcaagtagtgcagacaacagtacaccaaaatataaaagaccgcctgatgatacttcatccccctttggattatctgaaagtgaagaatctggagcgggggaaaacaaaataaaagaaaaagctgtgaatggaagtgactttgctatggccgcagataaggctggggcttctgtgtttcaaatgaggaagaataagatatcaactgatgaatctggagatagtgtgcatagacaaggaagaagtggaaggaatttatcattagtaaggccagacctcccttctgggagggagaagtcagagaatgtaccaacaatgaagccagtacaagacatgaagcctaatgataagagtaaaacgtaagctggatttattnttagatctagttcatcctttctacttctattttccaaaactgtcctcata

SEQ ID NO: 601 - DNA, 439 bp, Glycine max
gagctttgactgacccctcacacttatactcctaacacgtcccgctaactaataaatcatcatttggcaagtacccatccttcttaatttttgaatgaagatcatgacgtatatgccccaggggctcatattgagagcgtgggttatcaccaactacgaatacttgcactgtatcgacaacttctatccaactacaacctgcctgcttttttaaccccatgtccttcattctcatcctaacgatcgctgcttctttccatttccctactgaagcatacatatttgaaagtaatgaataggtgcctgcattctgtggatcaattttcaaaattatctctgctacaagcttcccaatatcagcatttccatgcacattacatgcagcaaggagcgctcaccagacagtcaatggcacctcttccccaagcccctgaatgat

SEQ ID NO: 602 - DNA, 473 bp, Glycine max
ttgagaaaattcaacaacaataaatttttactcggatgtctgattgagtcatgtaatatttcaagacgctcgaaattgaataccgaagctctgagcaaattcaaaccacaattactttttactcggatgtctgaatgagtcccgtaatatatcgacacgctcgaaaatgaatgtttatgctctgagcaaattcaaacgacaataactttttactcggatgtctgattaagtctcgtaatatatcgagacgctcgaaattgaatactaaagctctgagcaaattcaaacgacaataactttttactcggttgtctgagtgagtcccgtaatatatcgagacgctcaaaattgaatgtttatgctctgagcaaattcaaacgacaataactctttactcggacgtgtgactgagtcccctaatatatcgccacgctcgaaatagagtcttgatgctctgagcaaaatcaaacgac

SEQ ID NO: 603 - DNA, 437 bp, Glycine max
agcttgtttaccccatgttgaatttgcttacaatatagctgttcatagcaccactaattgttctccttttgaagttgtttatggttttaacccactaactcctcttgatcttttgcctatgcctaatgtttctgtttttaagcataaagaaggtcaagcaaaggcggactatgtgaagaagcttcatgagagagtcaaagatcaaattgagaggaaaaataaaagctatgctaaacaagccaacaaagggagaaagaaggttgtcttcgaacccagagattgggtttgggtgcacatgagaaaagaaaggtttccggaacaaaggaaatcaaagcttcaaccaaggggatatggaccatttcaagtgcttgaaagaatcaatgacaatgcttacaaagttgagctgcccggcgagtataatattagttccaccttca

SEQ ID NO: 604 - DNA, 322 bp, Glycine max
tctacattcaatttcgagcgtctcgatatgttacgggactcaatgatacatcccagtaaaaagttgttgtcgcttgaattggctcacagcttcaacattcaatttcgagcgtctcgttctattacgaggctcaatcagacatccgagtaaaaagttattgtcgtttgaattggctgacagcttcaacattcaatgtcgagcgtctcgatatgttactggactcgatccgacatgcgagcaaaaagttattgtcgtttgaattgtctcaaagcttcgacattcaatgacgagcctctcgatatattacgggactcaatcagac

SEQ ID NO: 605 - DNA, 378 bp, Glycine max
  unsure at all n locations
tcgaatgtctgattgagccccgaacatatcgagacgctcngaaatgaatggtgaacctttgagctaattcaaacgacaataacatttttctcggatgtctggatgagtcccgtagcataatcagacgctcgaaattgaatggtgaacctcttagctaattcaaacgacaataacttttttcacggatgtctgatagagtcccgtaacatatcgagacgctcgaaattgaatggtgaagctctgagccaattcaaacgacaataactttnttctcggatgtctgatagagtcccgtaatatatcgagacgctcgaaattgaatgttgaaactcttagccaattcaaacaacaataactttttactcggatgtctgattg

SEQ ID NO: 606 - DNA, 366 bp, Glycine max
ggaatgaatttgttttctagcaaaacaaattattatacctatagttcatattgctaaatggaccaatctaagttttgtgcttttatttgttttttgcttagctagtctcttcttaagtaatctcccttgtttttcttgaacaataggtggcagaacgtaacaatgatcctcaattggcagacttcattgagagcgagttcttgtatgagcaggtaaaacttgcagttgaattcatagtatggttggatttcataagatataagactccttgaccattgtatgtaatacaatactctgaactctttacgttctaaaataattggtgtcttttacacggatcaagaaaataataataaataaatgaat

SEQ ID NO: 607 - DNA, 467 bp, Glycine max
  unsure at all n locations
gcaagcttatgcgttagctgactcanatcttgattcagagtcttcaaagtatgtgatctgtctcttggaggaagctcttagatgccctttagatggtcttcggaaaggacaagtgagtgctaagttttggattaaacattttatgctgatatcagtgctgaagtaatgtatttatatttgttattcttttaaattgtaggcactgaataatctagggagtgtctatgtagactgtgataaactggaccttgctgctgactgctacatgaatgcactcaacatcaagcatacacgagcacatcaggggttggcacgtgtatatcatcttaaaaatctccggaaagcagcatatgatgagatgacaaagctaatagaaaaggctcggagtaatgcatcagcttatgagaaacgttcagaatattgcgaccgtgacatggcaaagagtgatcttagtatggcatcacaat

SEQ ID NO: 608 - DNA, 407 bp, Glycine max
  unsure at all n locations
tactttctgacagacatgattacagaatttatattttcatattggtaaatttgatctgtaaacctttatactttataaaatatgcaaatatagtcttctttttctaagaattcatcatggtttattagagttaaaaaaaaaaagagtaaatgcatatatattctaaagcttgaaaatcacattattaataaaattacaagatttcaattacaattatgttcggtgagatatttcagtaagtttctagtattttttattagctgaaaaaattatttgactattcgataaataaaccatntttaatagttcttaacattttttgaaacattatttagaataatattttttaaaacgttaatgtttaactttttatatnnttttattnttatctttgatatatttattca

SEQ ID NO: 609 - DNA, 390 bp, Glycine max
  unsure at all n locations
ttcatctagttctaccaaatataatcaagtgtctagctctgatggttgaataaaatacgtaagttcttattaaccctctagcatatattttttattctcatccataaaaaaataagaatagcttgatgtatatatactattaattaagaatttttattatttatactaattatatgcaattacttacaaaagttactttttgacagaatatctcatatattgaatctagttggaacgattcaaaacacaacttaaatatgttttcaaattatattgagattgacttttaaaattaaaatcatcaaattaattttatgccaaaaaaattagtgagatggaacaagtcataattactctgaaaaagagtngaactttatagttttaactttt

SEQ ID NO: 610 - DNA, 355 bp, Glycine max
tttaggggtatttgactaatgagggtttatgggtagtttattaattagggtttagtgttacttaaccaattagggtttatgggtatttgaaaaattaagctttagtgttacttcaccagttagggtttaggattatgagacaatttataattacttgattgatcactatttaggggtatttgaaatttgggattcataggttacttgataaattggagtttatgtgcgtttatctaactagggttatgaatacttgactaattagggtttagttttacttgatcgataattaagggttatcgtacttgagtaattaacgtctttgggtacttgacaaattatgatttatgattac

SEQ ID NO: 611 - DNA, 310 bp, Glycine max
  unsure at all n locations
aacacacttcaatcaaaatgggtttggccctaggtgcacaagatatggaatggaacaacttgatgtgaggatactttcttacatggtaagctngaaaaaaaatccatatgactcatgcagaaagttntctcccaaaaggtgaagaaaggcaggtatgcttgctaaaaatgtcactttatggccttaagcaatcacctcgctagtggtacaaaagggttgatactttcatttttaataatggctttaaaaggtgcgagtatgatggttatgtttacttganngacaatgagcatgatgctattgtctactt

SEQ ID NO: 612 - DNA, 446 bp, Glycine max
  unsure at all n locations
agatggaccatttcatgtgcttgaaagaatctttgaaaatgcttacaaagttgagctgcccggtgagtataatgttagttccaccttcaatgtctctgatttatctctttttgatgcagaaggagaatccgattngaggacaaatccttctcaagagggagagaatgatgaggacatgaccaagagcaagggcaaggatccacttgaaggacttggaggacctatgacaagggctagagcaaggaaagccaaggaagctcttcaacaagtgttgtccatactgtttgattacaagcccaagtttcaaggagaaaagtccaaggttgtgagttgtatcatggcccanatggaggaggactaaatgacaccactttgtttcaattttagagtgtttagtttggctaaataatggcccaatccttgtaaagttggctaaccaaaaatat

SEQ ID NO: 613 - DNA, 382 bp, Glycine max
tctttgtttcagatgaggcagatgagtttgtagctacctcatgctgtgagttttaagccatcttctcaatcaagtttctggcttcagtaggagtcatgtctccaagggctccaccaccggcagcatctatcatacttctctccatattactgagtccttcataaaaatattggagaagaagctgctccgaaatctgatggtgagggcaactggcacatagttttttaaatctctcccagtattcatatatgctctctccactgagttgtctaatacctgagatatccttcctgatggccgaggtcctggaagcatggaaattttttttctaaaaatactctcttaaggttatcccagctcgtgatgaaccttggagcaaggt

SEQ ID NO: 614 - DNA, 209 bp, Glycine max
  unsure at all n locations
agaagatggtgagaggactaccctctattaaccaccttgatcaactctgtgaaggatgtttattggcaagcaatttagaatgagttttccagaggagtcaaacgcaagagctaagaagccacttgagctaatacatgctgacgttngtgggccaatcaagccaagctcactaagtaaaaataactatttcgggcttttcattaatgatt

SEQ ID NO: 615 - DNA, 397 bp, Glycine max
tcatgcaactggaacatggaaagaagacagtatatactatgcattgaagatttctcaaaccttatcacccatatcggcaattaaagaaagcttttaatggaagccaagagaatgaaagtacaccaaaaagccttaggctgaaataaagtttatgattgggtaaaggacatcgtaagtatctttgggaagaacccaaagaaggaatcatttgagaagaacatatggaagaaaaggtcaatattctttgatctttcatactggtctgatctagatgtacgacaatgtatagacataatgcatgtcatgaaaaatgtttgtgatagtttaattggcaccattaacattaaagacaagacaaaggatggtttgaaatgtcatcaatatttgattgacatgg

SEQ ID NO: 616 - DNA, 355 bp, Glycine max
ttacatgtcaaattcttgttcccaccacattatgagtttttaagtttaatgggcagcatgttgatatactgaaagattcaatgttccaaatgaataataatcaagtggcctagtgcatctgaatttttgataatcaaatcaatgcataagccctttaagcatgttttgatgtcctagaaatagtagatttttaacatttgagcaagaaaatcaaaacatacagtcatcactcctgttgctgcactgacaccagcttcaccaaacatagcagttgctgcttcagtgacaagagcagttgccccaatattgaccaccctgcatacaacaaaatactagcatgagaaacattctatac

SEQ ID NO: 617 - DNA, 354 bp, Glycine max
tctgttgttcaatttcgaacgtgtcgatatattatgcgtcttgaatcgtacctccgagttaaaagttatgaccatttgaatttctcgagagcttccgttgttcaattacgaccgtctctatatattatgcgccttaatcggacctccgagtgaaaagttatgaccatttgaattggtcaagagcttccattgttcaatttcgagcgtctcgatatattatgcgcccgaatcggacatccgagtgaaaagttatgaccatttcaatttcttgagagcttccgttgttaaatttcgagcgtctcgatatattatgtgcctgaatcggaccttcgagttaaaagttatgaccatttg

SEQ ID NO: 618 - DNA, 347 bp, Glycine max
tctgcatgtttagagatttctagttagagaatgttttattcgggttgcttggggactggacgtaggcacaagggtgtggccgaacctgtataaatttgagtttgcactttcttttcccttaatctcctttatttattattgctttatattcatattcaaattgttttatttgaatcaatatttaagaagattgtcattaagggaattcataacttgaataaaaagtgaaatacatttttaattggggaagtagtttggaatatcttaattcaaccccccccccttcttaagatatctgaggccgcttgtctaacaagtggtatcacagctttattcttgtataaagt

SEQ ID NO: 619 - DNA, 395 bp, Glycine max
  unsure at all n locations
gcttgtgcattcaatatcctgatgagggtgttccatatgttctcaagactgttctaatacattcgctgcccaagcatcatggtcttgcaggtgaagatcctcataagcatcttaaggagttccatattgtttgttccaccatgaagccccctgatgtccaggaagatcatatctttctaaaggcttttcctcattctctggagggagtggcaaaagattggctttactaccttgctcccaagtccattttcagctgggatgaccttaagagggtgttcttggagaaattcttccctgcatccaggaccattgccatcagaaaagacatttcaggcatcangcaacttagtggagaaagcctgtataagtactgggaaagattcaagaaattatgt

SEQ ID NO: 620 - DNA, 473 bp, Glycine max
  unsure at all n locations
cggatccttaagcacctgcggctgcaagcttgaatatttaagcaagagtntggagtgcacattgaagttactaagatgtggagagccatgaaagaagcaaagcaactagtggaagggaatgagaggaaacaatatgccaaagtatttgattatgcacatgaattattgatgagcaatcctggatcaacagttaaaatcaacacagtgccaagtccagaaggtccaccacaattttagaggctatatatttgtcttgctggctgtaagaaggggtttggtgctggatgtaaaccattcataggtctagatggatgtttactaaagagtgcatttggaggaaacttgctttcttgctgtgggcttgatgacaataaccacatctttgttattgcttatgctgntgnggacattgagaacaaagacaattggaaatggttttaactttgntgcatgaagatcttggggattacata

SEQ ID NO: 621 - DNA, 307 bp, Glycine max
agcttccattggttgaatttgagcacctcgatatatatgcgcctgattctaatctccgagtgaaaagttacgaccatttgaattcctccagagcttccattgttgaatttcgagcgtctcgatatattatgcacaagaatcggacctctgagtgaaaagttatgaccatttcaatttctcgagagcttccgttgctcaatttctagcacctcgatatattatgcgcctgaatcggacctccaagttaaaagctatgaccatttgagattctcgagagcttccgttgttcaatctggagcgtctcgat

SEQ ID NO: 622 - DNA, 363 bp, Glycine max
tgttgaattaccgaaaggaaataaggtagttgtagcataatggatatttcataacaaattggacgaaaatggtgaggttgtgagaaacaaggcaatattagtctctaaaggtgactcacaataggaaggtataaactacatagaaacttttgcacatattgcacgtttagaagcaatacgcatcttactttcatttgcaacctatagtaatatgaagttgtattaaatggatctaaaaaacacatttttaaatggattaatccaagaagaagtttctattgaacaatctcctggatttcaaagtgaaacccttcttcaacatgtttttaaactcaacaaagcatcatatggacttaaacaagc

SEQ ID NO: 623 - DNA, 442 bp, Glycine max
  unsure at all n locations
gcttgctaacccatggaagctcctaatatctcccacactntntaggttgtgccattcttggatggccttgattntcttagggtccacttggaccccatttctaccaactacaaaacctaagaaaactatattatctatacaaaaggtacacttctctatattttcatagagggtgttnttcctaaggactgaaagaacttgtctgagatgtcctaagtgatcatctagcctcctactatacactaaaatatcatcaaaataaaaaactacaaatctacctatgaaatcccttaagacatgatgcataagcctcataaaggtgcttggtgcattagtgagcccaaaaggcatcactagccattcatacaaaccanacttggtcttgaaagcagntttccactcatcaccctttttcatcctgatttggtgataaccactttta

SEQ ID NO: 624 - DNA, 463 bp, Glycine max
  unsure at all n locations
gcttatgctgcanacacttataatagacctccttaacagcaaaaccttcttcaatagaataattatgacctttcaagcaatagatacaatccaggttggaggaatcatccaaatctgagatagacaagtcctccacaacaacatcagcctgtccctcctttccaaaatgctactggtccaagcaagccatatgttcctcctccaatgcaacaacaacagtagcagtcacaacaaagacaacaagcaactgaggctcctcctcaaccttccttagaggatttagtgaggcaaatgaccatccagaatatgcaatttcagcaagagacaagagcctccattcagagtctgacaaattagatggggcagatggctactcagttgaaccaagctcaatcccaaaattctgacaaattgccttcacaaactatgcagaatccgaaaaatatgagtgccatcaccttga

SEQ ID NO: 625 - DNA, 360 bp, Glycine max
tcagaattcaatttcgagcgtctcaatatattacgggactcaatcatatattcgtgcaaaaagttattgtcgtttgaattagctcagagcttcagaattcaatttcgatcatctcgatatattacgagactcaatcagacatctgagtaaaaaagttattgtcgtttgaattagctcagagcttcaaaattcaatttcgatcgtcttgatatattacaggactcaatcagacatctgagtaaaaaagttatggtcgtttgaatatgctgagagcttcaacattcaatttcgagcgtctcgatgtattacgggaatcaatcagacatccgagtaaaaagttattgccgttggaattagctc

SEQ ID NO: 626 - DNA, 430 bp, Glycine max
  unsure at all n locations
agctntgagctaattcaaacgacaataatgttttgctcggatgtctgattgagtcccgtaatacatcgagacgctcgaaattgaatgttgaagctctcagcaaattcaaacgataataactttttactcggatgtttgattgagtcccgtaatacatcgagacgctcgaaattgaatgttgaagctctcagcaaattcaaacgacaataacttttttactcagatgtctgatagagtcccgtaatatatcgagatgatcgaaattgaattctgaagctctgagctaatccaaacgacaataactttttgctcggatgtctgattgagtcccgttatctattgagacgctcgaaattgaattctgaacctcagagctaattcaaacgacgaataacttttactcggatgtgtgattgagtcccgtaataca

SEQ ID NO: 627 - DNA, 388 bp, Glycine max
tgacacttcgagacttatacaatactcaagcttcccgccaatggtatttgaggtttaatgataccattatttcctttagatttaaggaaaatactgtttatcggtgtatgtatctgaaggtcagtgggagtaaggttattttctaattttgtatattgatgatatcttgcttacaactaacgatcttggtcttcttcgtgagactaagaaatttctctctagaaactttgaagtgaaagatatgggtgaggtaagctatgtgatagggataaaaatattccataatagatcacaaggattgttaggtttatctcagacagtatatatatcgataaagtgctagagagattcaagatggaaaggtgtttaacattgcctactctaattt

SEQ ID NO: 628 - DNA, 449 bp, Glycine max
  unsure at all n locations
agctntaaggtgtgcaactccaccattttcatattagaacactggtaatgggtctactatcattgttatcatttatttctccatcattgaggtgccacttgagctgccaggtctctccacctttgggtgtattctttgaaacatttgtgcccctttttgcacatgttctgtagttgcatcctatctggagccatatcagaattgtactgacactgcctaacgaaagcaactattaggtccttccaagaatggactcgggaaggttccaagttagtgtaccaggtaacagctaccccagtaagactttcttgggagaaatgtatcagtagttcctcatcttttgcgtatgcccccaccttccgacaatacatctttagatggttcttggggaaagtagtccccttgtacttgtcaaagtccggcaccttgaacttgggaggggtaatgat

SEQ ID NO: 629 - DNA, 358 bp, Glycine max
tcaacattcaatttttagcgtctcgatgtatgacgggactcaatcagacatccgagtaaaaagttattgtcgtttgaattagctcagagcttcaacattcaattttgagagtctcgttatattacgggacacaatcagacatccgagtaaaaagttattgtcttttggattggctcagagatttaacattcaatttcgagcgtctcgatatatgacgggactcaatcagacatccgagtaaaaagttattgtcgtttgaatttgctcagagcttcaacattcaatttcgagcgtctcgatatatgacgggactcaatcagacatcccgagtaaaagttattgtcgtttgaattagctc

SEQ ID NO: 630 - DNA, 435 bp, Glycine max
  unsure at all n locations
agctntgagccaattcatacgacaataactntttactcggatgcctgattgaggcccgtaatatatcgagacgctcgaaattgaatgtggaagctctgagccaattcaaacgacaataactttttactcggatgtctgattgacgccccgaatatatcgacacgctcgaaattgaatgttgaagctctgagcaaattcaaacgacaataactttttactcggatgtctgattgagtcctgtcatatatcgagacgctcgaaatngaatgttgaagctctgagccaattcaaacgacaataactttttactcggatgtctgattgagtcccgtaatatatcgagacgctcaaaattgaatgttgaagctctgagccaantcaaacgacaataactntttactcggatgtctgattgagtcccgtcatatatcgaga

SEQ ID NO: 631 - DNA, 435 bp, Glycine max
agcttgtatttctctcccatggttgatataatatctatgatggtatcaaagctcttcctttgaagagccctgctgcgctacttatattcttcctctcgattatcatatccttcattcttacatcatgagtgaacaacaacaagatcaatcacttaatgtacacagtccttattacctttatctgggagaaaatccagcgatagctttggtttcttcggttcttgattcatccaattataattcatggagtcgatctatgcttattgcattaagtgcaaagaacaaatctgagtttgtcgatggttttattcaaagacctgcatcagatcatgcacttcatgcagcttggaagaggtgaataatatggtgatttcgtggttggttcattcaatctctctttcaattaggcaaacatactatggatggataatgcac

SEQ ID NO: 632 - DNA, 461 bp, Glycine max
  unsure at all n locations
agcttatgctacanacatctacaatagacctcctcatcctcagcggctatataagccacaacagaacaattatgacctctncagcaacaggtacaaatccgggtggaggaatcatccaaccttagatggtcgaatccttcacaacagtagcaacaacaataacaggcttattttagaatgttgctggcccaagcagaccatacgttcctccaccaatccagcagcaacaacagcaacagccccagaaacaacaaatagttaaggctcctccgcaaccttcctttgaagaactngggaggcaaatgactatgcaaaacatgtagtttcaacaagagaccagagcctccattcagagcttaactaatcagatggaacaattggccacacagttaaatcaacaacagtcccagaattctgacagaataccttctcaatctgtccagaatcccacaaatgtgagt

SEQ ID NO: 633 - DNA, 300 bp, Glycine max
  unsure at all n locations
gcaagcttgagcagantcanacgacaataactnttaatcggacggcatttgttcccctaaatatcaaactgctccaaattgaaaatggaagctcgtagcaaatttaaacgagaataactttttactcaaatgtgcgattgagtcacgtaatatatcgagacgctctaaattgaaaacggaagctcatagcaaatgtaaaccgtaataacctttaactcggatgtccgattgagtcctgtgatatattgagacgctcaaatatgaaaacagaagctctgcgcaaattctaacaacaataac

SEQ ID NO: 634 - DNA, 399 bp, Glycine max
ctaagcttaagaaaaagatggcctcagcaaattccttatttccagtaaggaattctatcaatagacctccaatctttaatggagagggttaccactactggaaaacccgaatgcaaatttttatcgaggcaatagatctaaatatctgggaagccattgaaataaggccttatatacccaccacagtagaaagagtttcaatagatggtagttcatcaagtgaaagcataaccatagaaaaacctagagatagatggtctgaagaggatagaaaacgagtacaatacaacctaaaagccaaaaacataataacatctgccctaggaatggatgaatatttcagagtttcaaattgcaagagtgctaaggaaatgtgggacactcttcgattaacacatg

SEQ ID NO: 635 - DNA, 234 bp, Glycine max
tctcatgatgaaaaatcaccattgaaggacctcattgaagatcaaagatccagcctccatagaagctccacaagcaagcttccatcaagttatgaccatttgaatttctcgagatcttccgtggttcaatttcgggcgtctccatatgtcatgtgcctgaatcggacctccgtaagaaaatatatgaccatttgaacttctctagagctttcgttgtttaatttcgagcttctc

SEQ ID NO: 636 - DNA, 389 bp, Glycine max
tttctcagtcgtctgtaaggatgattgtgtgttagaaagcgacgatccctactgtagactgtttttctgccatgtttaagttgtatgtaacttgtattttcttcacagatggggcatgcatgatgacccttaacactgtaaccgctgagattcccatatgctggaaagtcattaatggtacaaaaaagcattgcacgcatttcaaaggtctccttgtgaaacacatcaaacactacaaccccctcgtcccacaactttctcagatcttcaaccaacagacttagataaacatcaatgtcatttcctggctgtcttgggctcgatatcatcatagacaacatcatgtattttcgcttcatgcataaccaaggaggcaaattgtaaattac

SEQ ID NO: 637 - DNA, 482 bp, Glycine max
ttaagcacctgagctgcagctatgctgaaacattataatagacctctctagcagcaaaaccatctacaatagaataatcatgacctttcaagcaatagatacaatccaggttggaggaatcatccaaatctaggatggacaagtcctccacaacaacaacagtctatccctccttttcagaatgctgctggtccaagcaagccatatgttcctcctccaatgcagcaatagcagcaacaacaacaaagacaacaagcaactgaggcccctcctcaaccttccttaaaagagttagtgaggcaaatgaccatccagaatatgcaatttcagcaagagacaagagcctccattcaaagtctgacaaatcagatagggcagatggctacttagatgaatcaagctcaatcccaaaattctgacaaattgccttcacaaactgtgcagaatccaaaaaatgtgagtgccatcaccttgaggtctgg

SEQ ID NO: 638 - DNA, 372 bp, Glycine max
agcttcggttaatctcaaagctacaaaaacataacctcgttttaggattaccaagtatgtcatacaaagatgatttactttatgaggcatgtgaaaagggaaaaaaattaaaaaactcttttttcaagaaaaaacattgtttccacctcaagaccttacatattgatctgtttagtccaaccaaaagacatctatcaggggaaaaaaggtattgactcatcagagccgatgactactctaaatggacatgggttaacttcctagcctagaagaatgaatcttttagtgtcttctttaaattttgtaaaagaattcaaaatgaaaagaattatgcattaccttaatcaaaagtgatcatatgggagaatttga

SEQ ID NO: 639 - DNA, 370 bp, Glycine max
tatagcttacttattatccacaaaaagcttcactccattactttccttgatttttaattcttgtaataatgtgtccaacgagacagcttggcaagcactcattgtagctggaacatacttagcttcacatgttgataaagccactatggattgcttcttagaactccatgatattggtgttgcaccatacatgaatatgtaacctatagtactctttctgtcatctctgtctcctccccaatccgcatcagtatatcccactaattcctctgagttgttgttgtctttatttggaaatagaattccagtattgatggtcccttttatgaaccttagaatcctcttagcagttaggagatgaggaattctg

SEQ ID NO: 640 - DNA, 369 bp, Glycine max
ttcactcgcatgtccgattcaggcgcatagcgtatttatacgctagaaatctaacaaaggaagctctcgagaaattcaaatggtcataacttttcactcgcatgtccgattcaggcgcataacatatcgagacgcttgaaattgaacaactgattttctcgagaaattcaaatggtcataacttttaactcgcatgtccgattcaggcgcataacatatcgagacgctcgaaattgaacaacggatgttctcgagaaattcaaatggtcataacttttcactctcatgtgcgattcaggcgcataacttatcgagacgctcgaaattgaacaacggaagctctcgagatattcaaatagtcataacttt

SEQ ID NO: 641 - DNA, 311 bp, Glycine max
tacttcgggcgtgtattatagagcaacaaggtagcttgatggattgtttgccattgattgagtttacttacaacaatagctaccaagccagtattggtatggctccttttgaagctttatatggacgaaagtgcaaaactcctaattgttggtatgatgatggagaagcagtacttcttggacctgaaatgctacaacagattaacgaacaagtgaagttgatttgagagaagataaaggcatctcacgataggcaggagagctattatgatagaaggaggaagccactatattctcaggaaggagaacat

SEQ ID NO: 642 - DNA, 321 bp, Glycine max
tctcgatatacaatagggcttaatcggacatccgagttattagatattgtcgttagatttttctcagagcttccattttcaattacgagcgcctcgatattcaacgggactcaatcggacatccgagtcaaaagttattgtcggttgaatttacttagaagttctgttttcaatttcgagcgtctcgaaatattatagggctcaatcggacatccgaattaaaagttattgtcgtttgaatatacttagagcttttgtattcaattacgagcgtctcgatattctacaggacacaatcggacatccgagtcaaagatattg

SEQ ID NO: 643 - DNA, 433 bp, Glycine max
  unsure at all n locations
agcttgatcttttagttttttatctntaatctttaatccctgaacgaactattcaagtttgtaattcgaactttaattatcttttaattcgttcctaaagatagatcgccaaatctgttgctaactgcacattaatctgttaaagatataacagatttatgtgtccagtattttcgggcaagatgtcctggacatcgtatccgacatcgtggatcctgcagcttcaattcttcatttgacattntatcttgccttgtgcattgtgcagcccaatctgattccttgacataacgttggacatcatgtgcagcaactctagctttccttcattatctaagtgcttatggtttaacaaaattttagccaatcttttaaaactcagtaaagctaagcactaacaatctccccctttggcanatttgtctaaacatac

SEQ ID NO: 644 - DNA, 445 bp, Glycine max
  unsure at all n locations
agcttatgctgcanatatttacaacagaccttcttatcctcagcagcagaatcaaccacagcagaacaattatgacctttccagcaacagatacaaccctggatggaggaatcaccctaacctcagatggtccagccctcagcaacaacagcagcctgctccttccttccaaaatgctgctggcccaagcagaccatacattcctccaccaatccaacaacaacaacaaccccagaaacagccaacagttgaggcccctccacaaccttccctcgaagaacttgtgaggcaaatgactatgcagaacatgcagtttcagcaagagaccagagcctccattcagagcttaaccaatcagatgggacaattagctactcaattgaatcaacaacagtcccagaattctgacaagctgccttctcaagctgtccaaaaccccaaaaat

SEQ ID NO: 645 - DNA, 437 bp, Glycine max
tatttaagaggggaattatgcaaggttgtaaacttgtaatgtattgtgattataatttgtactattataagttgtaagcttttggagaagcaaagttgttgaagttatggaaggtaatggtagaaggaggaggcgccacttcagcagaatccatgcattctcttgtggaaaagcttcattcaaaggggagcattcactcataggcggtcctggattctcaaggatagtgtactgcaacgaagcggaacgcggtgaggggagtcttgtgagctatggtgacaattatgtgagtactactaagtatacagtggccactttccttcccaagtccttgtttgagcaattcaggagggttgccaatttttacttccttatctgtgcaattctgtctttattcccggtttctccttactcggctgtcagcaatgttgttcctc

SEQ ID NO: 646 - DNA, 459 bp, Glycine max
tagagcctcgggtagttcattaaatatttgtttcatttcatccaagctcatattgtccaaaacggagggtctaggggcaaccctcacaatttcaccaccttttggttcctgaactcgtgcgtcggctttaatgactagttctgaattagagtttgcaccacattttattataaatggtgaggtcgagccagtattaaattggagtacattccactgtgtaacgtcagtttcagatccagagcccagatctgttgatggcatgcgatcatgagatatatcttgaatggggtcatcttcttcaggaattgactgtatcataacaaaataaaggattcaggcatcaaagaaaatcaatccaaattaattttcatcagttgagtcctttagcatattataaaattgttaccaacttggacaacggatgaaagaagttaagcatacaatacacaatacttcgca

SEQ ID NO: 647 - DNA, 397 bp, Glycine max
actcagctgggaaattatgttctaatatgactatctttgatctaagctattataaagcttgttgcaagctcgtaatttataattgaaagttattaacttgacttattgaaatataaatgtttgaataaaatatatactggaataattgatttaaataaaataattaaatcttataaacatattcatatgatattcttatataatttttaacttttttatgtcaattagtaaaatataatacacatatcatctatcgataacaatatcttgatgtaatgctgaaataataaaataaatatcgttaatattataatggataaacattgtaatataaaaatatccgcataatattaatataataaatcacacatacattattatctatcattattaatat

SEQ ID NO: 648 - DNA, 464 bp, Glycine max
  unsure at all n locations
ntgaagatattcaaatgaaaataccttntaactcggatatttgagtgagtcccataatgtattgagacactcgaaatagaatacagaagctgtaagcaaattctaacgtcaataactttttactcgaatgtccgaatgagtcacgtaatatatcgagacactcgaaattcaatacagaatctctgagcaaattctaacgacaataacttttaactcagatgtctgatcgagtcccaaaatatatacagacgctcgaaattgaatacagaagctctgagcaaattcaaacgatgataagttttaacttagatgtccgatcgagtcccacaatatatcaagatgctagaaattgaatacagaagctgtgagcaaattctaatgacaataattttttacttggatgtccaattgagtcgtgtaatatttcgagacgctcganattgaatagagaagctctgaggaaa

SEQ ID NO: 649 - DNA, 267 bp, Glycine max
acttttatgctgaacaaatgatggcttgaatgtgaaaagcatgttgaaatgagaaactttgaaaattttaaaattggaaaaatttcagaaaatggtttctttagacatgaaggctttctttttaaaaaaaacaaattgtgtgtgcctaaatgttctactaaaaatttgcttgtttgtgaagcacatgaggaggtttaatggggcattttggggtccaaaagactctataaacattacaagaacagttttattggcctcatatgaaaa

SEQ ID NO: 650 - DNA, 465 bp, Glycine max
  unsure at all n locations
tctagactntatacaagaatgaagctctgacaccacttgttagactagtgtcctcagatatcttaagaagggggttgaattaagatactacaaactatttccccaattaaaattctatttcaatttcaatgcaagttacaagttcccttgaaaatgaactcttaaataatgattcaaatagaacaatatgaatataaatgtaaagcaataacaaataaaagagtttaagggaagagaaagtgcaaacttagatttatactggtttggtcacacccttgtgcctacgtccagtccccaagcaaccggcttgagagtttcaatatcttgtaaaattcctttacaatttctgaacacacaaggacaatacttcctttgtgttcagatttctttacaacaagagaccctcggtctctcaatcccctttgagaatttagaaagaagagaagaataaatctctcttgaaag

SEQ ID NO: 651 - DNA, 405 bp, Glycine max
agcttatgctgcaaacatttacaatagatctcctcaacctcagcagcaaaatcaaccatagcaaaaaaattatgacctctccagcaacagatacaaccctggatggaggaatcaccctaatctcagatggtctagccctcaacaacaacaacagcagcctgctccttccttccaaaatgttgctggcccaagcagaccatacattcctccaccaatccaacaacaacaacagccccagaaacaacaaacagttgacgctcctccgcaaccttccctcgaagaacttgtgaggcaaatgactatgcagaacatgcagtttcaacaagagaccagagcctccattcagagcttaactaatcagatgggacaattggctacacaattaaatcaacaacagtccctgaa

SEQ ID NO: 652 - DNA, 387 bp, Glycine max
agcttctatagaaggttcgttcctaatttctctacaatcgcatcacctctcaatgagctggtgaagaagaatgtggcatttacctggggggaaaaacaagagcaagcctttgctttgctcaagaaaagcttactaaggcacctgttctagctcttcctgacttttctaaaacttttgagctagaatgtgatgcctctggagtgggagttggagctgtattgttcaaggtgggcaccctattgcttattttagtgaaaaacttcatagtgccaccctcaactaccccacctatgataaagagctttatgccttaataagagccctccaaacttgggaacattaccttgtttccaaggaatttgtcattcatagtgatcatcaatcact

SEQ ID NO: 653 - DNA, 386 bp, Glycine max
  unsure at all n locations
agcttgtcaaagaatccaacctctcatggtagaagcaaacacatagaaacaagatttcactatcttagggatcaagtgaacaaagagaaactgaaagtggagtactgctacacatttgatcaacttgctgatattttaaccaaacccctcaaaggggagaggtttaaaatgttaaggggcataattggcttgatgaacttaggagatcagaattaagggaaggtgtgagagtttaattttgttttgtgtggggtagatttgtttgtgctttgaatataagagagagtaacagaattttaaaattctgttataagtactagcctaagtgtgaagggttattactctgtntttgcttgtataaaagggcatacatacatcttaataaa

SEQ ID NO: 654 - DNA, 358 bp, Glycine max
aatttctcccacacttttggggagggccattgctggatggccttgaatatactagggtacacttggaccctatttctaccacctacaaaacctaagaaaactattttatctacacataaggtactcttctctatatttgcatagagggtgtttttcctaaggactgaaagaacttgcctgagatgtcctaagtgatcatctacgctcctactatacactaaaatatcatcaaaataaacaactacaaatctacctatgatatcccttaagacatgatgcataagcctcataaagtgcttggtgcattatggagcccaaaaggcattactatccttcttacaaaccacacttggtcttg

SEQ ID NO: 655 - DNA, 403 bp, Glycine max
agcttgataacccattcttctttccttattacatgatgcataagcctcataaaggcgcttggtgcattagtgagcccaaaaggcatcactagccattcatacaaaccaaacttggtcttgaaagcggttttccactcatcaccctttttcatcctgatttggtgataaccacttttaagatcaatttttgaaaaggtattggcaccatgcaactcatcaagaaaatcatcaagtctaggaatggggtgcctatactttacagtgatgttgttgatggccctgcaatctgtacacattctccatgtaccatcctttttgggcaccaacaacactggcacaacacatgggcttaggctctcttggacccaacccttctccaacaattctttaacctgagactcta

SEQ ID NO: 656 - DNA, 469 bp, Glycine max
ttaggacacttgaaactcagcttcttatccaggctcatcttggtggtgaagctccttcttccatggcttattccttatgcgcctgaatcgaacatccgagtgaaaagttatgaccatttcaatttctcgatatcttccgttgttcaatttcgagcgtctcgatatgtgatgttcctgaatcggacctccgtgtgaaaagttatgagcatttgaatttctcgagagcttacgttgttcaatttcgagagtctcgacatgtgatgtgcctgaatcggaccaccgcgtgtatagttatgaccatttgaatttctcgagagcttctgtcgttcaattgcgagggtctcgatatgtgatgtgcctgaatcgaacatccgagtgaaatgttatgacaattctaatttctcgagagcttccactgttcaatttcgggcgtctcgatatattatccgcctgaatcggacatccgagt

SEQ ID NO: 657 - DNA, 336 bp, Glycine max
  unsure at all n locations
agcttgcactaagatttctgattcaggttcctaatgtatcgagacattggttattgaacaatggaaactcccgagaaattaaaatcgtcattacttttcactcggatgtccgattcaggcacttcagatatcgagacgctcgaaattgaacaacggaagctctcgagaatttaaaatggtcattactttacacatggaggtccgattcataaacatcacatgtcgagatgctcgaaattgaacaacggaagctgaagagaatttcaaatggtcataacttttcacttggatgtccgatncaggcgcatcatttatcgaggcattggttattgaaaa

SEQ ID NO: 658 - DNA, 389 bp, Glycine max
  unsure at all n locations
agctnttgcaagctggaatcatttatcctatctccgatagccaatgggtgagtcccgtccaggtagttccaaagaaaatcggcctcaccgtgataaaaaatgagaaggaggagttgattcctactcgagtgcagaacaattggagagtatgcatcgactataagaggctgaaccaggttaccaaaaagaaccattttccactgcctttcattgaccagatgcttgaacgcctggcaggtaaatctcactactatttccttaatggtttttttggttatatgcaaatcactattactcctgaggatcaggaaaagaccacattcacctgccccttcggcacttttgcctataggaggatgtctttcggcctgtgcaatgcccctggtacc

SEQ ID NO: 659 - DNA, 456 bp, Glycine max
tgtgcattcaatatcctgatgagggtgttccatatgttcttaatactggactaatacatttgttgcccaagtttcatggtcttgcaggtgaagatcctcataagcatcttaaggagttccatattgtttgttccaccatgaagccccctgatgtccaggaagatcatatctttctaaaggcttttcctcattctctagagggagtggcaaaagattggttatactaccttgctcccaggtccattttcagctgggatgaccttaagagggtgttcttggagaaattattccttgcatctaggaccacttccatcagaaaagacattttaggcatcaggcaacttagtggagaaagcttgtatgagtactgggaaagattcaagaaattgtgtgcaagctgtcctcaccatcagatttctgagcaactccttcttcaatatttctatgagggactta

SEQ ID NO: 660 - DNA, 377 bp, Glycine max
agcttcacataatttttttttcacaaactttagttttggaagaccaattactaaatctttcctaactagatgattgagatgatgcatgtttatgtgtgcagtcctacaatgccacaaccaagaatcatctttcttacttaccaaacaactcagttcatgaaacgatgcatgttcaatgtttaacatatagatattacctatccttttaccaatatggacaacctcactggatatggcttcactagtaaggcaacaattcttgttgaatttgattttgaagcctttgtcacatagttggctaatgctcaggaggttatgctttagtctatcaacatatagaacattctttgtttgtgttttgtactaatttccaatat

SEQ ID NO: 661 - DNA, 447 bp, Glycine max
  unsure at all n locations
tggcatatcttggaatctgcttgatggcatctagcagaggtatgttcacctctactttcttgaaggtctccaagatctccttttccgcttcttccattttttttgtttggaattgctttaggtgggaatggaagagggataggaggctgctgtaagtcagaattactagaagaaggtctacctgcatgaaaatttttgttaggaagctctctcttttgtgcaactatctcatcctctttttcaggtgtagaatgaagcttgacaggttcangtgcaggtgctgctacttatggaggcacttgaatttggttgccagacctcaacgtgatgacactcacattntttggattctgcacagtttgtgaaggcaatttgtcagaattttatgactgagcttgagtcatctgagtagccatttgtcccatctgatttgtcagactctgaatg

SEQ ID NO: 662 - DNA, 393 bp, Glycine max
  unsure at all n locations
agctntatcaaatggatgttaaaagggtttttctaaatggcttaattcatgaagaagtatatgttgaacaacctccataatttgaaataacagataagccaaatcatgtttatagattgaaaaagactttatatggtttgaaacaagccccaagggcatggtatgaacgtctaagtaaatttcttttagaaaaagatttttctagaggaaaagtggataccacactattcataaagagaaagtatgatgatattatgttagttcaaatatatgttgatgatataatatttggatccactaacgattcattgtgcaaggagttctctcttgatatgcaaagcgaacttgagatgtcaatgatgggagaactaaattacttcctgtggttacaaa

SEQ ID NO: 663 - DNA, 395 bp, Glycine max
agctttaaaatttgaattaaaacgttcataaactgctggtaatcgattactatatatgtgtaatcgattacacagtgcaaattttgaatttaaattttaatagctgttgtaaatcagttttggccaccggtaatcgattacatcctctggtaatcgattaccagagagtaaatttgttgaaaaagacttttttaacttaaaattcttggccaaaccttttgcaatttcaattggaattcccttcctatttaatatcctttctaagactctatagactgtcttgatcatccatcttgaatatctttaatttctttgtcttgaataaagctttgagacgcatgtgaaactttggcatcatcaaaacattcagctttatcctttgtctacaaatttgg

SEQ ID NO: 664 - DNA, 446 bp, Glycine max
ttctgcacatattcaaggacctatgaccttatccatgcatatggtttctttagcttgtacaagaatgtgtaagctgacttctctctcatttccttttatattcccagatgaaatgtaggttccatggctagttgtactttcctatgcacttggatataataaacgaagttcggtaaccataaagataattacaatttggtgagcctgctaaatgtttataagggaccgtgtagtggaacatctttggagacaggtgtgcgagggaaacaaactacttgctgactcaaatgatcaatgcagatgtaatgccgaagacattctattggaaatggaccgtatcttacagcctgaaggagctgtgatattccgagatcaagccaacatgttaatgcatgtgaacagaactgtgaaatgaatgagatggaataccagaatggtggatcatg

SEQ ID NO: 665 - DNA, 450 bp, Glycine max
  unsure at all n locations
tcaagttgcttggacatcaacttattntgggccaacaaggcatcttgtgatgaaagctctaataaactcttcttggtaggaatatgaactctatcatgcaaaattgcatggtcactggcagccacattttcaattaagtccatggcttctttaggtttcttcaacttaatttttcctcttgcataaacgtcgagtaactgctttgattgcggccgtaacccatcaatgaagatgttcagctgtataggctctgaaaaaccatgagtgggagttttccgcagcaagctacggaatctttctaatgcctcactcaaagattcatcaggaaactgatggaatgaagatgcaggtctttaaactgttgcccttgaatgaatgcaaccatctcttggcctccccagataaagaaaatgaaaataggctgagcctaatagcatatccaggtacatc

SEQ ID NO: 666 - DNA, 385 bp, Glycine max
agcttttgtcgtttgaatttgctatgagcttctggtttctattacgagtaactcgaaatactacggaacgcagtcaaacatccgagtaaaaagttattgtcatttggatttgctcaaagattctgttttcaatttgaagcgtctcgatatattacaggactcaattggacatccgagttaaatgttattgccgttttaatttgttacgagcttccattttcaattacgagcgtctcaatatattacgggactcaatcggatatcctagttaaaagttattgtcatttgaatttgctcagagcatctattttgaatttcgagtgtctcgacatactacgggactcaatcatacatccgagtaacaagttattgtcggttggatttg

SEQ ID NO: 667 - DNA, 386 bp, Glycine max
  unsure at all n locations
agcttatggcggcaaaggataagctactctacctgaagcatgttgatgttggtgtttaagaacactgtatccttgaaaagcaaaaaaaggtcagcttctcaagggcaggtaagactcctaaagttgaanagctagaattggtgcacacaaatgtttgggggccagccccagtgaaatctgttggaaactcacgctattatgtcacttttatcaacgagtctaccagaaaggtatgggtttattttcttaaaaataaatctgatgtgttttctgtgtttaaaaggtggaaaatagaagttgaaaatcaaacaggtctaaaggttaaaagtctgaaatctgacaatggtagggagtatgatagtcaggagtttaaagacttctgttca

SEQ ID NO: 668 - DNA, 362 bp, Glycine max
  unsure at all n locations
agctntgtgagcttcaaaagctcagcatgttcactaccctgaagaacattgcaagttgagttctgcaaggtaagaacagggattgcaaagattgagtgtgcagttcttccctcagacaacaataaggatgttatgccacttgatgcaactgttaaaataatatgtccctttgaacgaaatgcagaggctagtgtcttccgcatgaaagtttttcaatccccctataaccataaaggaagaaaatgccaccatattgcatattaacatcattcattactatatcaaagatactttnttgctcatctgcaccaaggaaagttgaaaatattcttaattacttaagatatataaataattgaatt

SEQ ID NO: 669 - DNA, 459 bp, Glycine max
  unsure at all n locations
gtngtctgtgctactactaagacagtacacactgtgactcattttatcaatcggcgcanatgtcttagcgtagttgatcccttctacttgatgattatcgagtataactaaccgggctttaaaaggttcaattgtcccatccaagtgatacttcatgcggtacacccatttgcacctgagagctttcttttcgggtggtagttgttgcatggtccacgtacgatttcattcaagagcttgaatctcagattgcattgcttctttcttgtgagcatctttcactacctcatgaaaatagagtggttctttttctgcaataataattgcaaggaaatgtctatgtggcaaagaaaatttttcacaatttacataatgcgagataggataggatgcacctganaaaatgagattaagccgatgaacgagtgataggagataacttcttaatcatgtgtatga

SEQ ID NO: 670 - DNA, 457 bp, Glycine max
  unsure at all n locations
tctgaatntaaaaggtaaagtatgtaatttcaattaatgatgaatataatcaatagtgaatattatgtacacatatatgataagttatgaatgtattgaaacgttatttattaatttaattctcctcaaggaccgagattatgtattttcctatgcacatttaacagaatatttgcaagtattgattatacattgagactctatgtagaaaaagatataaacacaatttttataaaataaaatttcataaaattcaactttataagatttattcttagttcctacaatgcatatatgcgtgtttcagtgctttttaactttccttatatttgcttcaaaaatatggtagattttagagatatatgaacttagtccaccaattaaattataacttgtatgtgtccttatttctcanatattatagtaatgcaacattctcaaatactcacatccttct

SEQ ID NO: 671 - DNA, 405 bp, Glycine max
agcttccatcacctcggttttctttaacttcgtgggacacccttttcagcacaaggtccccctcattcaacttgtgggggcgcaccttcttgttgaacgcgttctttatcctttgttgatacaggcgcctatggctcatgggcgtcaaacgcttaccttcaataaggttgagttggtcgtagcgtgtttgagcccactctgattcttctaggcccgattctgctagtatcctctgggaagggacctctaccttaaacgggagcactgcttccatcccataaaccaaggagtacagtgttgccccagtagaatttcgtaccaaggttcggtacccatgcagggcaaaaggcaacatttcatgccaatctttgtacgacactgtcataccctaatttcgtccaagga

SEQ ID NO: 672 - DNA, 451 bp, Glycine max
tgcttgagaagtttctatggaggttggatctttgagcttcaataagggtgcagtggaaaataaaggagaagagatgagaggaggcaccatccactagagaataagccatgaaaggagaagcttcaccaccaagagagtgccttggataagaatcttagagagcgccatccactaaatgtgcttaggtgtcatgaggcatgtaaagcatgaaggacatgcacaaagtgtgactatatgatgtggcaatggggtgtagcaagcaaatgctcacctccccctctaaaatttaattggattgagcttttcccaattcaattaaatttatttcccaacacacatatcaaatattcacttaattcctatgaaattacagaactacccctaatacaaaaactagtctaggtgccctaaaatacaagggctgaaaaatcctacatttctagggtaccct

SEQ ID NO: 673 - DNA, 272 bp, Glycine max
cccgacgaagacactgacaaaaacttatcttctcctttttggacaaagtatgacaagcagggggcaagtaaattttcttcccatcagaccttggatgcaagtgtgatcgtatccccatctcatctagatcttgacgggtattcaagtcatccttcatcttgccttgaatgttaaggagcatcccaatcacattgtcacatacatttttctccacatgcataacatcaatacaatgtctaacgtctagattagaccagtccgaaagatcaaag

SEQ ID NO: 674 - DNA, 395 bp, Glycine max
agcttttcctcccagtcttgtcaatgatgtaaatgcttcagaattgaaccaaatgcattgaggccagctgtgatgagtgacaaaaacaatgctgtcctgttagatgcaaaaccagccaactgaacaatggtgggactataatacatcacagtgttgattcccacaaactgctggaagattaagaggcccacaccagcatataaacctcttctcacagctgaagttcttaaaagtttgactatgttgatcttctctgatgattctgcttccttaatttccatgtcaactgattctttcaaggcctgaatttcgccttcaacttcatgtggtggataaatctttttcagaatcgattttgcttcctcttccttaccctgtgggaacaaaaatggaac

SEQ ID NO: 675 - DNA, 408 bp, Glycine max
  unsure at all n locations
agctttgatggagaacaaccttaggatgtagagggtacacgcatggagaagaagaaagcgcgagcaaaataggtggcgtctaatataatttaaattgtaagttcaacatcaattttcaataaaaaaaaccaatgttaacaaattcatgttaacgttaacatcggttttattcaataaaccgatgttaactgatcatacgttaacatcggttttcagaaaactgatgttaacgaactaaggctaacatcggttttctgaaaacccgatgttaactaattaatgttaacatcggtttttccagaaccgatgttaaagtcactttgttaacatcgattntattcaaacccgatgttaaagtatacacaatattcacaattatgccacgacgtttatcttaacattggtttt

SEQ ID NO: 676 - DNA, 435 bp, Glycine max
tagtgaaccatgaagcttgatcgagttcatctaatacttcatcaatcgtggggattggaaatcgatcgcggactgtaacaacattaagagacctgtaatcgacacatatgcgccatgttccatcctttttcttcacgagaagaactggagacgaatatgggctcgtgcttgatcttattaagcctgcagataagagttctgcgatttgcctctcaatctcggccttttgaaagtgtgggtacctataagcgcgtacgttgaccggagctgttgcagggagaagggtgatacgatggtttacttcgcgtgagggaggcaagcttctgggtggttggaaaagtttatcgtatcggagaagaaggtttgcgattggtgtgataatacgtggaggatgtgtggctgtacctgtgggggtttcagataagagacataagt

SEQ ID NO: 677 - DNA, 358 bp, Glycine max
  unsure at all n locations
agcttattaatgtatgattaaataacatttaagacaatttgatcagttaattcatatttaaatatttttataactgttaatttgtttattaatttcaaaaattattttaacaaataaattaattcaaacattttgtatattttaatgaggaaagtatatgattcgatattatcattttagtgatgtattcaagtttctttgaaatatatgattagataacattattttatcacgtattcacataatttaaataaaaagttacaataacgtgaggaatagtgaaattttgttacgcaagataatgaaatttgatatattcttattaaattgatatagaatgaaatataanaatttaaaa

SEQ ID NO: 678 - DNA, 434 bp, Glycine max
tatatattgatatatacttaatattatttgtaaaatattaataatttagaaaataaaagtctatttcaattgaatgattaataataaaaaatcaatattgattcgaattataataatactaacattttttttattagtaggaagtgaatttatgtactagaaagttcaataactcacgcgcattattcaataaagttagaccgacttggtattataatactaacatgaacacttatttcatctgcataacttatcttaataatttggtcatttaatttttatttttttaagtacaaaggtctaaaatagtcaatagtttgatgtatatatattattattggacatagaatatcaaaattgtaaataatgttaaaactaatttatatttgatatattaactaatttcacaatagtttgaattattttttaatatg

SEQ ID NO: 679 - DNA, 182 bp, Glycine max
  unsure at all n locations
tgaactcctgcaatgttgngctattccaagttcatttaccatacctttattttcgattgcttccttcactccttcagctaggcccatgtatcctacttcaaatgttgacaaaacatcaactgattgttgatttgctttccaactgattgttgtaccaaacaaagtgaacacatattctgtta

SEQ ID NO: 680 - DNA, 506 bp, Glycine max
ttgaagatctatacagtgtaatagagggggcctttgatcactcattctgattttgcttatgattaattttacttgcaaaagcttatatggaacaagctgagatgactaaagcggtcctggatttgttctgggggaaaaatgaatgtggagaaaaccaagatattcttctcagaaaacatcaactggcatataaaggaggatcttactgcaaagattggttctcaatgtactttggggaaatatcttggagtgccgatattccataaaaaggtgaagaaagaatcctttgagttccttctacataaagttaatcacatattaagtggttggaaaagtaaaatgttatccatggcgggtagattaaatcttgcaaagtatgtgaacaaagctcttccctcatatgtgatgcaaattgtgaaaattccggcctacatttgtggtgaaatttatagaaatgtagagcatttttatttgggggatgatgagaatacgacgagagtgcatat

SEQ ID NO: 681 - DNA, 169 bp, Glycine max
gcagcttaaatagaccactttcaggtgctggaactacttcacatggacttgatggggcctatgcaagttgaaagccttggaggaaagaggtatgcctatgttgttggggatgatttctccagatttacctgggtcaactttatcagagagaaatcagacacctttgaag

SEQ ID NO: 682 - DNA, 620 bp, Glycine max
tatcccatgcctccttagcgtatgtttcataagaaactatctttaactcttcatcacctaatgcttgatagatgaggaagaaagctttcttgtctctctttcttgaatcctttaaagtctccttttgtgcttgggatagtgaagtctcatcttgcggctccttataacctttttcaaccatttttcaaacatcatgtgctccaagaaggaccttcatttcgatgctctaattgtcatatgcgctcccctttagaaatgaaacttggaaggatgccgctcaattgcttgccataactatagaggaatttcttatcaaaacctaagctctaataccactttgttggaaaggagataggaagtatttgagagaaatggaggaggagagaatatttgaaaaaaggctagtttttatcacttgagatacgctttgggcttgactcctttttgtgtctttggatgctttacaaataacaacctctccccctattataggcttcaatgagggattctaaatacctcaagaaagatccacacaccttaattgagagtttacacattttttccaactacttagttctacacacctctttccatgcaaatatttttttcacttatttcta

SEQ ID NO: 683 - DNA, 392 bp, Glycine max
tgaaattgaacaacagaagctcttgagaaactcaaatgttcatatacttgtcacacggaagtccgatgcaggcgcataatatattgagatgctcgaaattgaacaacgaatgctctcccgaaattcaaatggccataacttgtcacacagaagtccgattcaagtgcataatatatcgagacactcgaaattggacaaccaaagctcttgataaattcaaatggtcataacttttcaaacggaagtctgattcagccacataatatatcgagaagcttgaaattgaacaacggaagctctcgggaaacaaaaatggtcataacttatcacacggacgttcgatttaggcgcataaaatatggagacgcttgaaattgaacagcgaatgctct

SEQ ID NO: 684 - DNA, 176 bp, Glycine max
agcttaagagcctacttttgtggcaaaacaatatagttggaacaatcccataagagcttggaagctgcatagagatcaaagtcctagacttatcagaaaaccttctcacaagtagcataccaaggagctttggcaacatttcaaatatccaggagcttcaactaagtgtcaataag

SEQ ID NO: 685 - DNA, 554 bp, Glycine max
  unsure at all n locations
ttataaattcttgctcacttgatacactccatggatgaacagtttggacttttgccgaataaagagtggtggaatttgcaggaggattttgcttgtagatcattgtatcaagaacggtgtcaaaattctgaggagaatctagggagacaaagaacataggaattgcaaccttctgatggatttctaggtcgcccacaaggttaacaagctcaacaaaatcactgataaggcgctgaggaacatagaacacctcagaactgcatattaggaggtttttatcgttgtcgcttggttctttgtaactgacttgaaagtgcgctggcatcgtgctaacaaccttctgtaccattcttgcttgttgtgataaccaatctgagtcctcaccatttgttaatatagaagaccaagactcggatacctgaattcccagtaatgtgtaaattgtcagagaaaagagctatacgaccttctaagagctatatgaccttttaagagttaaagctatgctgtanaatattttcagtgacattgtcctgaatgattgaatatgatct

SEQ ID NO: 686 - DNA, 609 bp, Glycine max
tgaaggacatgcacaaagtgtgactatatgatgtggcaatggtgtgtattaagcaaatgctcacctcccctctaaaatttaattggattgggcttctaccaattcaattaaatttatttcccaccatacacatcaaatattcacttagtgcgtgtgaaattacaaaactacccctaatacaaaaactagtcttggtgccctaaaatacaaggactgaaaaatcccatatttctagggtaccctacctacattatggagccctaaatacaaggaccaaaattaatgaaaccttaatctaatatgtacaaagataagtgggctcatacttagcccttgggcccgaaatctatcctaaggctcatgagaaccctagggccttctcttgcatctttggcccaatcttcttggaatcttctatccaatgcccttgcggggtaggattgcatcactaatgtacccaaccctagggtattttatgaataagagcctaagagaaacctacctttagcccaaactagaaaaactattattgcatgccttccgaaattcatgcataagctaacatggtaaacacacgaaaaaatcgagtcaacgagagacacaactttg

SEQ ID NO: 687 - DNA, 179 bp, Glycine max
gcatgcaagctttggaggcattacctttatggaactaaatttaagggggttaatgaccataagagccttagatatatgtttgatcaaagagagcttaacatgaggcagaggagatggttagaggtccttaaggattacgaattttagcttaactatcacccaggtaaagccaatgtagt

SEQ ID NO: 688 - DNA, 362 bp, Glycine max
tgagcaaattcaaacgacaataacttttgactcgaatgtcctattgtgttccgtaggatatcgagacactagtaattgaaaacggaagctctgagaaaaatcaaatgacaataacatttaactcggatgtccgattgagccctgtaatatatcgagacgctcgaaatttaaaacggaagctctaagaaaagtcaaacgacaataacttttaactcggatgtccgattgagtcccgtaagatatcgagacgctcgtaattgaaaacggaagctctgagaaaaatcaaacgacaataacttttaactcgaatgtccgattgagccttgtaatatatctagacgctcgtaatttaaaacggaagc

SEQ ID NO: 689 - DNA, 533 bp, Glycine max
  unsure at all n locations
attagtgtaccatacaactgcagctccagccaagctatcttgtaaaaaagtgtatgaacaactttgcatccctagagtgtgcccccatcttgcgacaatacatcttgagatggttcttaggacaagtcgtccctttatacttgtcaaaatcaagcactttgaattttggggggatgacaacatccggtaccaagcaaagatctgtcatgtccacgaatggatagtcaccaaatccttcaacagctctcaatctctcctcgaggagatcgagtttccttctttcttcggccgccgggggtggtccttctatggacaagaatattggttgtgctgtgaggttgggctgaggcaacgtgttgggcaccggcccctcgacgaggatcggagggtagaaatcgacatccncttgggcatactctcgatgatcttcatggaccgcgtttaggggaggatggtgcgcggtagctaggatagatgggtctgcttcggcaccccaactaacagcggcagcggtggccgtgttattctccatg

SEQ ID NO: 690 - DNA, 439 bp, Glycine max
tggcaagtttgtattgtacaaatggtcccagagtgccccttttattatgtactcataaaccagtatattctcgaaccttttattgcaaggtgcctgtgacgaatcttatacaaaatcatgatctctctctgaaattctggaaggccttgacctgacctgttaagaattattgattaaatttattatttattatattataaccaggtaagaactaagatcattattaatatatatatatatatatatatttagatatattgatatcttaaagattggacgaaccataactcccatatatgaaatgataagaggttggtgagataaatggagattttaagatgtgtattaaaacattgtactaaaaaagaataaccgaataacagagtactcggggactttaagattatttctcatgcgaattttttttatttctctttta

SEQ ID NO: 691 - DNA, 627 bp, Glycine max
  unsure at all n locations
tgcattcgatagtggagctcatccaatggagttattaatgctaagaaaattcaggttttaaagaaggagctgaatgctttggaggctggtatctctgacagaattctgaatcaatttgaagtggagctcaagaagtctcttcaggagcaattgtggcatgctgctaatgcctatgaatgtatgctgaagcaaaaggctatagtgaaatggttaaaggaaggggacagaaattcagcttacttccacaagctgataaatcatagaagaagacataatgctattcaaggattgatcattgatggggaatgggttcaggaccctagtagagtcaaaactgaggccttcaatcatttcaaagatagattttctgagcagaattttaatagaccaaccctggatggtgtgcagctaccttcccttggtcaaagtgagaatgaagcccttgtggccagattttctgatgctgatacagtttggttaccaaaagccatcaagaatgataacaaagcagtaatttaaattaaattcatcttagctnttctattttatgatcactctcgattgctggaatggtgaaggaaatgggcttctttatacgaggaccctatacagctgcaatgtgacatc

SEQ ID NO: 692 - DNA, 175 bp, Glycine max
ggcatgcaagcttcttctcaacaggatgataaaacctatatttctattcattctcaccatagccaatgaagatacactgccttgactttgcatccaacttggatctcttatcctttggaacatgcacaaaagccttgcagtcaaaaactcttaagtgactatacttcacattctt

SEQ ID NO: 693 - DNA, 632 bp, Glycine max
  unsure at all n locations
agcttcaagttgctcggatagcaacttgttttgggccaacaaagtgttctatgatgaaagcttcaacaggcttcttttggttgggatgtgtgctctatcacacaagattgaatggtcactagcaaccatattgtcaatcaattccatggcttcttcaggggccttcaattttatttttcccctgcagaagcatctaaaagctgcttggattgtggccttaacccgtcaatgaaaatattgagcaggattggttctaaaaatccatgagtaggcgtctttcttagtaacccacaaaatctttccaaagcctcactcaaggactcgtttggaaattgataaaaggatgagatggcagcttttccttcagcagtcttggactctaggaagtatttcttcaagaatttttcaaccacttcatcctaagtcttaagactgttacctttaaatgaatggagccatctttttgtctctccaaacatagaaaatgaaaacaagctcaatctaacagcatcctcaggcatgccaaccagtctaacagtggtgcaaatctcaatataagtggctaaatatgcatatgggtcttcatttggcagaccatgaaacaanatgttctgaatcaactgaattaatga

SEQ ID NO: 694 - DNA, 385 bp, Glycine max
taaacattcaatttcgagagtctcgttatattacgggactcattcagacatccgagtaaaaagttattggcgtatgaattggcttaaagcataaacattcaactttgagcctctcggtatattacgggactcaatcagacatccgagtaaaaagttattgtcgtttgaatttgctcagaggttcaacattcaatttcgagcgtctcgatatattacgggactcaatcagacatccgagtaaaaagttattgtcttttgagttggctcagaggctcaacattcaagttcgagcggcccgatatattacgttaatgaagcggacatcacgctaaaaagttattgccgattgaattcgctcccaagatcaacattacattttcgagcg

SEQ ID NO: 695 - DNA, 651 bp, Glycine max
ttagtgcctcctcaccaggtccataatgagcatttgcagatttattggcattccaagtactagaattcttattagctaatacgtcaaaaatatagttacttgtattaagatcaccacactgggcatacatttgaattagggagctttggacaaatgtttctaattcaaagcctgctacaactatatgtgcatggatgggcattccatgatccaaaaggtcatcaggagacaaaaaagcactgagaagattaacaatagtaatgtagtttacaggcacaccttcttctctcaacaaattgaaggcttcaatcgctgcattaggttctttgttatcagcatgtccacctattagtgcattccaagtcacttcatctctgtcaggcataattttgcacaccctttgtgcagcagccatggaaccaaatttcccatacatggtaaccaatgcattacctatgatcaaattgtgatggagaccaagaagaatcacaaaggcatgaacaatctttaatgtttctaaatatacatgcagataatgcagtagtgaaggtacatagtttgtcggctttcttgtttgaagcatctcaatcaaaagttctaagcacgtggataatttccattgtcacattgcttgccatatggaattcatga

SEQ ID NO: 696 - DNA, 330 bp, Glycine max
gcctaagatcctcttcatcaatggattccttatcttttttgaagatgaatggcagcggtatggagaatgaatatagagaagatactccacttctatgagaaaatgaatttagaaaaagcttaccaccataggaggtcttggataagagcctgtaggaagaacatgactgaacggagagggagagaatagcacgaaattttgtgctctaaaagagctctaaaatctgaagtcttattttcaaatgatcaaagttggaaaaaatgaacacaccttacctttatttattagcctgactgtttcacacaactggagggaaattttaattttaat

SEQ ID NO: 697 - DNA, 490 bp, Glycine max
tgcttagtccttatgaaaaggaagaagcttgaaacctatcctatcattgaaatacaactccaccatatgaaagtttgtaggtagcacttcctccccatgcacatggacatttcatgcagctgatttgcgggccttggtttcattgcattggaatcataaaccaaggctgcaagaaggccatagagacatgaacctaaaggaatgttagtgatgaggatattgtggttcacaccaacactgtttgggccaaatagctctgaggtaatagacactgctgcagaaaacacaaagcctgaactcagccctatcaaggcagtgcctatgtgtaatgcagctccactgccagatatggccagcaaaatgaatgcaattggtgttagcaccaagcctgctccaaaccatccagctcttgcaatgtgtatcttcctgcattgtcatacaacattagatgaatttacgtgcaatgttggtttcgtgacatgtcctccca

SEQ ID NO: 698 - DNA, 412 bp, Glycine max
  unsure at all n locations
tgcttaagattatatattgatttctctaatttgcacactatgtgtttctttccttcaactaagaatcccattgggtggtccatataaacattctcctctaattctccattaagaaaggcattttttgcattcatctgatgtagctccaagtcataatgggctactaatgctatgataatcctgaaagaatcctttattgagaccgatgaaaacgtctctttataatcaatgccatctttcttagtaaatcccttagcaacaagtctagccttgtaacatttaaggttgtcatgagagtcacatttagtcttgaagacccacttacaaatcttacaactttggtnattctaccaggtgccaaacaccattatgttcccatggaattatctcttctttcatgggatttaactac

SEQ ID NO: 699 - DNA, 365 bp, Glycine max
gcataatattataataatcacttccaaaaattgacaaacataatttaaaagaaatataataataaccataatattaattaacaatcataatttgtttatcacaatagaaattatccaaaataaacattctatcaatttacctaagtaaacattgtatcagtgtaccaatcattacaaatttatccaaattataataattagtcataatctactataaataaaagataaacatatatcatataccaagagtgtccgaccgccaaaattcgaagaagtgaaatatgagttaacatatttttatataatatttagcatattgttattataaataattaaaaaaaaactaaatatcatgtcaacaaaat

SEQ ID NO: 700 - DNA, 470 bp, Glycine max
  unsure at all n locations
tgccttgccccttgatatatntgagggactcatggtcactatgaatgacaaattccttgggataaaggtagtgttgccatgttttcaaagcccgtactaaggcatacaactccttatcataagttgaatagttaagggtaggaccacttaacttttcactaaaataagcaattggatggccttcttgcatcaacacagccccaatcccaacatttgaagcatcacactcaatttcaaaagatttttgaaagtttggcaacgcaagtatgggggcattagttagctnttgcttaagaacattgaaagcttcttcttgtttctctccccatttgaaaccaacattnttcttgagcacttcattgagaggtgctgtcaaatgtgctaaaatccttcacanatcgtctataaaaacttgctaagccatgaatactcctcacctcggtcacagacttaagtgtaggccattcttg

SEQ ID NO: 701 - DNA, 458 bp, Glycine max
  unsure at all n locations
agcttganattgaacaacagaagctctcgagaaattcaaatggtcataacttatcacaccgaagtccgattcaggcgcataatataccgagacgctcgaaattgaacaacggaagctctcgagaaattcaaatggtcataactgatcacacgaaagtccgattccggcagatagtataccgagactcttgaaattgaacaacggaagctctcgagaaattctaatgggcataacttttcacatggaactccgattcaggcgcataatatatcgagacttttgaaatataacaacggaagctctcgagaaattcaaatggtcataaaatttcaaacgaaagtccgattcaggtgcataatatatcgagaggctggaaattgaacaacggaagctgtcgagaaattcaaatggtcataacttatcacaccgaagtccgattcaggcacataatatatcga

SEQ ID NO: 702 - DNA, 437 bp, Glycine max
gaagctcttgagaaattcaaatggtcataacttatcacacggaagtccaattcatgcgcatagtatatggagacgctcgaaattgaacaacgaaagctctcgagaaattcaaatggtcataacttgtcacacgaaagtccgattcaggcgcataatatatcgagaagctcgaaattgaacaacggaagatcttgagaaattcaaatggtcataacttgtcacacggaagtccgattcaggcgcataatataccgagacgcttgaaattgaacaacggaagctctcgagaaattcaaatggtcataacttatgacacggaggtcctattcaagcgcataatatatcgagacgctcgaaattgaacaacggaagctctcgagaaattcacatggtcataacttatcacacggaagtccgattcaggcgcatactatatc

SEQ ID NO: 703 - DNA, 456 bp, Glycine max
agcttctcgaatattatgcgtttgaatcggacttccgtgtgataagttatgaccatttgaatttctcgagagcatccattgtttaatttcaagcttctcgatatattatgcacctgaatcagacttccgtttgaaaagttatgaccattttaatttctcgagagcttccgttgttcaatttcgagcgtcttggtatattatgcgcttgaatcggacttccgtgtgataagttacgaccatttgaatttctcgagagctttcgttgttcaattccgagcttctcgatatactatctgccggaatcgaacctccgtgtgataagttatgaccatttgaatttctcgagagctctccgtggtcaatttcgagcatctcggtatattatgcgcctgaatcagacttccgtgtgacaagttatgacaattagaatttctcgagagcttccgttgttcaatt

SEQ ID NO: 704 - DNA, 447 bp, Glycine max
  unsure at all n locations
agctttccacattgaattcagcacctaatgtcatattagatggaaattgtgtatcttaacataagagatttcagatggactttaatcctaatcccacagccgaccttttcacgagatctctacttaaccctttggttaaatgatcagccaaattatgctgagttctcacaaactccactgatatcacaccatgcatgattaactcccgaaccatgttgtgtctaacacccaagtgtctagacttcccattatacacttgactatatgccttagccaaagttaatatgggggaaccttattccttttgtaggaattcagttcaacaagtaacaggctgtcaacatagcctcaccccanaatccttcacttanacccgaataggataacatggaattcaccatttctttcaaggttttattcttcctttcagctacaccattctggttt

SEQ ID NO: 705 - DNA, 409 bp, Glycine max
ctcagcttaacattcaatttcgagggtctcgatagattactggactcaatcagacatccgagtaaaaagttattgtcgtttgaatttgttcagagcatcaagattctatttcgaacgtgtcgatatattatgggactcaatcggacatccgagaaaaacgttattgtcgtttgaatttgctcagagcttcggctttcaatttggagcgtgttgatatattacgagactcaatcagacataccagtaaaaagttattgtcgtttgaattggctgagagcatcaacattcaatttcgagcgtctcgatatattacgggactcaatcagacattcgagtaaaaaattattgtcgtttgaattgctcagagcttcaacattcaatttcgagggtctcgatagattactggact

SEQ ID NO: 706 - DNA, 435 bp, Glycine max
  unsure at all n locations
agctntgaggattntcaaacgacaataactttttactcggatgtctgattaagtcccgtaatatatcgagacgctctaaattgaatgttgaagctctgaccaaattcaaacgacgataaatttttactcggatgtctgattgagtcctgtaatatatcgagacgctcgaaattaaatgttgaagctctaagcaaattcaaacgacaataactttttaactggatgtgtgattaagtcccgtaatacatcgagacgctcgaaattgaatgttgaagctctcagcatattcaaacgacaataactctttactcggatgtctgattagagtccgtaatacatcgagactctcgaaattgaatgttgaagctctgaccaaattcaaacgacgataactttttactcggatgtctgaatgaagtccgtaatacatcgaga

SEQ ID NO: 707 - DNA, 478 bp, Glycine max
  unsure at all n locations
ctcaagcttctaacgctatacaagaatgaagctctgataccacttgttagacaagtggtctcagatatcttaagaaggggggttgaattaagatattccaaactgtttcccctaattaaaaatctatttcactttttactcaagttatgaattcccttaatgacaatcttcttaaatattaattcaaatgaaacaatttgaatatgaatataaagcaataataaataaaggagattaagggaagagaaaatgcaaactcagttttatactggttcggccacacccttgtgcctacgtccagtccccaagcaacccgcttgagagttccactatcttgtaaattccttttacaagttctaaacacacaaggacaatccttcctttgtgtntagaattcctttacaacaagagactcacaatctcttaatcccttagagaatgagaagaagaagaagaacaaatctctctagaaagagat

SEQ ID NO: 708 - DNA, 453 bp, Glycine max
taccatacctttgtgttcgacaagtggcctctgatatcttaagaatgtgggttgaattaagatattccaaactacttccccaattaaaaatatatttcactttttattcaagttataaattcccttaacaatgaacttcttaaatattgattcagataaaacaatctgaatatgaatataaagcaataataaacaaaggagattaagggaagagaaagtgcaaactcagatttatactggttcggccacacccttgtgcctacgtccagtccccaagcaacccgcttgcgagatccactatcgttgaaatttcttgtacaagatctaaacacacaaagacaatccttcctttgtgttagaattcctttacaaaagaacccacggctcttaatcctagagaatatgagaagaacagaatgaattatcctaaagagataaattacagatgacact

SEQ ID NO: 709 - DNA, 457 bp, Glycine max
tacttctaccttactcgattatggattccaacagttcaaggctgattattctcttttcactaaaaggtctcctactggccttaccattgtccttgtttatgttgaagatttggtgcttactgacactgatcttgctgaaatctagcaactaaagcactccctggatgcaaaattcagtattaaggaccttggaatactcaaatacttccttggttatgaagtagcccgatccacctcaggtattgccttgcatcaaagaaaatattgccttgatcttcttctagacactaatctgcttgctgcaaaaccttctttcttacctatggatcctacactaaaatttcacaaatcttctggtattcctttctttgatcctactgtttacaagaggcttatggcgcgattattatatcttactcacacaaagcccgatattagctatgctgttggaaaattg

SEQ ID NO: 710 - DNA, 447 bp, Glycine max
agcttggatgatagaggtttgcggttataaacatattagggtgatagattggtggataaagcagcctggacccaagaatttgcgcacttttgtctatctgatttaagttttagttcctcttctggtatgcttctttcattatctggagaagaatcatctggaatggatttagatagcgagtcaacaatcatccgcgcactatttatgctagcatgaagagttaggaactgctctactgcaggctgtgggttttgttccttatcagaattacttagctctgcatatacactgccaaaaacatcacaaaataagagtcagaaacaatctgttatgctgtattgcaggagggtgacacaatataatgcctaccatcccatagaagaattgtggaagacgtggatgattaacataatatatgcgtaaaccccagtctgtctgtatgattga

SEQ ID NO: 711 - DNA, 461 bp, Glycine max
  unsure at all n locations
tgagggcactgattcttanaaataactgaataatgtagtggtgttcacttgtcagctgaagcaaagggtccagtgcaacaatactcaagttggtccaatgccaaacgtgcactcttgcaagcaatgacacttccatctgaccctttgacagcaaaatttggaggacaaactatgttcacatcactagggcagctagttgtgttgcaaccccttaagcctccctgagcgatcaccaacactggcagattgaagccatcaacaaggctaacatcatagaaatcttgtcctttatttgaagccaaagtgaattccactagagaaactggaggggttccaccattaccattgcatggtacttgacctgatccacagtcaccagtggcacaagtgaatttcccatatgtgtctgttgagcattgagacttggcccagaatctgccagaccatggagctgtgacatc

SEQ ID NO: 712 - DNA, 426 bp, Glycine max
  unsure at all n locations
agcttcttagcattgccaacaaagtaagattgcttggttctgaattntccaatttaagaatagttgaaaaaatactggtgactgtccctgaaagatttgaggctactattacagccttggagaatactaaggatctgtcaaaacttaccttggcagaacttgtaaatgctttgcaatcccaagagcaaagaagaagaatgagggctgatgattctgtggaaggagtattgcaagctaaattgcaaattaaccaaggagagaaaagcaagtggaagaaatacaacaagaagaatttcaatacacaagaagcagcgggtaacactagcaacaaaagtggagacaacaacaaaggatttcctccttgcaagcactgtggcagaatgggtcatcctcctttcaaatgttggagaagacccgatgttaagt

SEQ ID NO: 713 - DNA, 317 bp, Glycine max
  unsure at all n locations
ttgaagaatatgcttgctgcctattacacagttacctaagaaccattatgacgcagataatatgttatgccctgtgggtatggaataccacaaaatacatgcttgccctaatgattggcttttgcataaacatcaatttgctgaantgcgcagctgcgctacatgtggagcgtcacgtttcaaagtgaagtatgatgaaagcagtgtagatggaggcacatacgaagacttggcatgacaagagtggtggggtcttccagtaataccaacgtttaagcgattgtttgctaatgcacatgaagcataattcctcacat

SEQ ID NO: 714 - DNA, 380 bp, Glycine max
  unsure at all n locations
tgttagctcgatgacttgtcagaaacaatatcttgactagcgtcacatcagagaattaaacttggacatcttttagaaatgcttgctgaattaagacaggcagaaatccagcgtctccactagggacaaaaacccattctttgcagcatataatccaaaaaagcccatgagactgagtcataggccttttcaaaatccaccttgaaaaccatagctggccttatgcttctacaagcttcctcaatcacctcattaagaactagtatgccatgcaggatgtgtctgtttttgatgaaagttgtctgcctctcatcaataagaccagatatcacttgtctcaatctatttgctaataacttagatatcaccntgtacataca

SEQ ID NO: 715 - DNA, 394 bp, Glycine max
gcttacacgaatactgttgttattgaagaatatgcttcctgtagataacacattacccaagaaccattatgaggcggataagatattatgccctgtgggtatggaataccacaaaatacatgcttgccctaatgattgtattttgtatagacatcaatttgctgaaatgcgcagctgccctacatgtggagcgtcacgttacaaagtgaaggatgatgaaagcagtgttgatggaggcacatacaaagattgtccatcaaaagtgtgttggtattttccagtgataccaaggattaggcgatttgttgcttatgcacaagacgcaaaacacctaacatggcatgctaatgggaggattaaagatggatcgctcgtcatccagctgattcttctc

SEQ ID NO: 716 - DNA, 466 bp, Glycine max
  unsure at all n locations
tcctcgcacatattagggaagttgngagcaagatgctggtcatgtatatctacaagaacaacttctatttgatatcgaaaaagaaacaagcacaaagatacgtaatgttgaatcangaaaagttatgttaaaagaacgacttcgccataaaagggtacttcttatactcgatgatgtaaataaattgcatcaattgaatgttttgtgtggaagtcgtgaatggtttggttcacggagtagaataatcatcacaactagagatatgcatatacttagagggagaagagttgacaaagtgttcagaatgaaaggaatggatgaatatgaatctattgagctttttagttggcatgcatttaagcaagcaagtccaagagaagatttattgaactttctagaaatgtagttgcttattctgcgggattgcactagctcttgaagtccttgggtcctatttgtttgatat

SEQ ID NO: 717 - DNA, 457 bp, Glycine max
  unsure at all n locations
agcttggtagtaactctatggacttaaactagctagccgcaaatggtatgagaagttgaatttcttgcttctccaacttgggtttcaacattctatagttgatcactccttttttatccatcacacagttgattcccttactactcgtgtatgtagatgacatagtcattgttggaaattctatggatatgataacttcattcaagcagaatttagataatcaatttgggcattcttaagttctttcttggtgctggtgttctcagtgccaaacctgcaagcaccccttctgaacctacctttgagacttcgccaagatgtcgctcctatacctgactttcacacgcccagatatatcccatgttgaccaacaacttagtcaattttcagccctcccaacagtgagtcattatcaataagcccaacgcgtactttgngtatttgaaaaggaatccca

SEQ ID NO: 718 - DNA, 486 bp, Glycine max
  unsure at all n locations
tgtagaccanatgcttaccactactaaaggagaagccttcaggttgtttcatataaacctcatcctctaaatcactattaagaaaggctatnttcacattcatttgttgtaactcaaggtcaaaatgagcaactaatgccaagataatacgaagagaatctttcttagatacaggagaaaaagtctctatgtagtcgatttcttctttttgagtaaatcccttagcattgagtcttgccttatatctctcaatgttgcctaatgaatccgttttgatcttaaagacatttacagccaatggcctttgccccattaagaaactctacaaggctccaaactccattactctgcatgtaattcatctcatccttcttggcatcataccatagatntgactctntacaactatggattgatcaaacgtctcatgatcattntcagctgcaatattatagtcaaattttgcaaatatacaatataataact

SEQ ID NO: 719 - DNA, 465 bp, Glycine max
  unsure at all n locations
tctcaggtccggtcatggaaagacttggcaactgccttcattatgcagtaccaatacaacacggatatggctcccgatcggaaccagctntagagcatgaccaagcgagaacatgagtccattaaagaatatgcccaaaggtggagagacctcgcagcccaagtcgttccgcccatgactgagagtgagatgatcacaattatggtagatacgttgcctacgttctactatgaaaagctgatagggtacatcccagctaactttgcggacctcgtcttcgcccgagaaaggatcgagtccggactaagaaaaggcaagtttgaatatgcctccaacgttacccccaacaacaacagaagagccccagtggtgggcacgaagaanaaggaaggagatactcacgcggtcaccaccgccccaacatggatganagcgccccanaatatccaaaactcataccagcac

SEQ ID NO: 720 - DNA, 448 bp, Glycine max
  unsure at all n locations
agctnttggaaggatcgagaagtgccttatgaatcctcccgtgcttatgccaccggtacctggaaggcctctcatcttatacatgacaatcttagacgagtcaatggggtgtatgctggggcaacatgacgaatccgaaaagaaagagcgcgctgtttactacctaagtaagaagttcacaacctgtgaaatgaactactccttgctcgaaagaacgtgttgtgctttagtatgggcatcccatcgtctaaggcagtacatgctgagccatactacctggttgatatccaagatggacccggttaagaacatctttgaaaagccagctctcacgggacgaatcgcccagtggcaagtcctgctatccgagtttgatatagtctacgtcacccanaaggcgataaaaggaagcgccttagcagaattattggctcaacagcctcttaac

SEQ ID NO: 721 - DNA, 420 bp, Glycine max
  unsure at all n locations
ggtctacgcagttaatgttntattcatcgttagataattaatttgttaacnnnnnncataatattttgtgtgtaacctaaaacttcattcaaattatataaattctcacaagtggatcaacccagcaatatgacttgttttttcaaattctcactactagaaaaagcagatttaacattggcgcattaacattgattttctacaaaaccgatgttaacataaatgcggtgacataattgtaaataatgtgtatccgttaacatcagttttgaagaagaaaaccgatgttaacgtatgatcagctaacatcggtttgttgaataaaatcgatgttaacgttcacatcaatttgttaacatcgggtttttattgaaaaccgatgttgaacttacattntaaattatatntgacgcgacctat

SEQ ID NO: 722 - DNA, 449 bp, Glycine max
  unsure at all n locations
agctntcatcaaatatatgcatgttttcaataatgcaattagtaagccaatcacacaaaccaatcatcaaatataaatgtggattaaatattaatcgatgtcaataatatgtttagtaggttatgtaacttaatgtgaaaattttcaaaaattttaataattgcagcattagtccaattcaacttaatgtgataaatacattggtcttcaaatttcacctcaataaattatatgacttatgtagaaaaatctagcaaatgaatctagcaaaatcaaatatataaatagaaaattacattagacgatgttaattaattctccttcatcatgatcattacgattagcatgaacgtgattagcttcttcttctccgacaacattaggagtgatttgtatggacagaggactaacataggtgtccatgtatgaatcatcatcttctacattaa

SEQ ID NO: 723 - DNA, 350 bp, Glycine max
agcttggactatgactacgaagccattatactattggaatgcgatatatgtaatcacgctctcttttgatcctgtcgaacactacacgcagactctgtttctttccattaaaaaaccttcttccttcttttgtgcttattaacaaagactttgctgtgcaagataaatgagaatgatctattcaagcatgactggaggagcagatcatgagttcaagtgctgcagatatatcctagaaatggatactagcattccttgtcggacttctcactgagattatagccactctcatcaatcctgcagatgagaatattgctgggtataagcttctggctgagcttaaatacgtc

SEQ ID NO: 724 - DNA, 419 bp, Glycine max
  unsure at all n locations
taagagagatgtgttgtgcttctttctatacatttctttttcagactgataacttcctccactgtacagggaaagctgagaaacggttctttggcagctataaaggttttatcagctgaatcaagacaagggatccgggagttcttgacagaaatcaaggtgatctctagtatagagcatgagaatctagtcaagttacatggatgctgtgtggaagacaaccacaggattttggtatatggctatcttgagaacaacagcctagcacaaacacttattggtaagtgaactactgccatgtgatgtgagtatgctntgttagaaaaactatcttgataatgaattaatcctcatgagtttataggttcaggccatagtagcatccaattaagttggcctgtaaggaggaacatttgcat

SEQ ID NO: 725 - DNA, 434 bp, Glycine max
agcttagaccatgtgaactgctcttgcacttccatcgttcaatttcgagcggctcgatatattatgcgcttgaatcggacctccgagagaaaagctcagaccatcatgagcgctcaagagcttccattaatcaatttcgagggtctcgatatgttatgttcctaactcagagctccgaggcaaaagttatgtccatatgaatatgtcgagagctctcggtgtttaatttcgatcgtcttgtatatgtgatgctcctgcatcgcacctccgagtgaaaagttatgaccatttgaatacctagagagcgtccgatcttcaatttctagcgtctctatatgtgatgcgcctgaatcggacctcctaatgagaagcaatgaccatctgaatttatcaagagcttccgctgacaaattcgagcgcctctatatgagatg

SEQ ID NO: 726 - DNA, 448 bp, Glycine max
  unsure at all n locations
tattagtgacctatgaaactaagctatgctganatattacaatagacctcctcaacctcagcaacaaaatcaaccacagcagaacaattatgacctttccagcaacagatacaaccctggatggaggaatcatcctaacctcagatggtccagccctcagcaacaacaacatcagcctggtccttccttccaaaatgctgctggcccaagcagaccatacattcctccaccaatccaacaacatcaacaaccccagaaacatccaacagtcgaggcccctccacaaccttccctcgaagaacttgtgaggcaaatgactatgcagaacatgcagtttcaacaagagaccagagcctccattcagagcttaaccaatcagatgggacaattagctacccaatngaatcaacaacagtcccagaattctgacaagctgccttctcaagct

SEQ ID NO: 727 - DNA, 448 bp, Glycine max
  unsure at all n locations
agcttgctcgtcttgctgatatttatcatgcagacttttctgatgatgaccgaggaacaattagggatcaacttgaaacttatgtgcttcaagtgagaagaaatgcttctttttccacttgtgaagatgttcaaagtttggctatgaagatggttcaaactgagaaacatttggtatttccattggtttataaacttattgagctagctttgatattggccggtgtcgacaacatccgttgaaagagctttttcagcaatgaagattatcaagtctaaattgcgcaataagatcaacgatgtgtggttcaatgacttgatggtatgttacaccgagcgggagatattcaagtcacttgatgatattgatattattcgaacatctaccgcacagaagtctcggaaaggacacttgcctcgtaattntatttaacccgctattgtaagat

SEQ ID NO: 728 - DNA, 475 bp, Glycine max
  unsure at all n locations
cactaagcttcccatcctggtattacaagttccatcaagtcattacctcatatggttatgaggcaaatgcagctgatgattgtgtataccacaagtttagtgggagtaaatactcattcttagggttatatgtcaatgatatactgcttactagcaacgatataagcttcttacttgagactaagaaatttctgatgaaagattctatgatgaaagatcttggggaaacctcttttgtattatgaatttagatactaagagatcactctcaaggtatcataaggttgtcacaagagagttatatcgataagggcctagatagattcggcatgaaagatagtaaaccaggagataccccgatagctaaatgagacacnattagtctcacacaatgtcccaataatgaccttgaaagaatagagatgcaaaagattccttatgcatcagcagtatgaagtctaatgtacgctcaagt

SEQ ID NO: 729 - DNA, 455 bp, Glycine max
  unsure at all n locations
agcttatatacatctgcaacttgaattctgttacaactganaagctaactaactaattcagccaactaactaactatttctgttaaagctgtttatactgctaagagcccccctcaagctgggaatggatattcatcattcccagcttgttacaaaggtgctgaaaggtggctggtcgtaaagctttggtgaatatgtccacaagttgcattganggatgagaccggaaggagcttgacgagacccgcagtgactttgtggcggataatatgacaatcgatctcgatatgcttggtgcgttcatggaaaacgggatttgttgctatctgaattgcagattggttatcacaatataaagtggctggctgaataaatgctacaccaatgtcttggagaatatacgttaaccattgcagctcacaggcagtagatgcgagagctcgatactcagcttc

SEQ ID NO: 730 - DNA, 414 bp, Glycine max
agcttaacttaaataccttcaattttaacttatgtgcttatatgataagtccaaaccagttctgaagaagctattctaaatggccccaaattgtattcttgagtctttaatgctcgtgctgaccaagcttctgttcctggcctgtttattttcttcactgaaataatttgtgttctgtgctgacgagtgtgctgtaagaaactgactttggcgatcttaacctacctaatactctattttgaaaacaggaaaaaccgagtccatggatccaaattcaagaattatggttcctgaagataggcatggactccatgcaattgatattttggaccctgacttggtatgcttgttttaaagtttgttgaagtgcaatgcagatatccaagcaagttattcatgaatcctatataattc

SEQ ID NO: 731 - DNA, 440 bp, Glycine max
  unsure at all n locations
agcttaaacaaatccaaaagagaaagaagctacataacataactaattgtacctgtaggaattataagattgttttgagagtgaaagatcgtaacaactaacactgattaaaaaaaaaaaaaaaactaattgtacctgtattggagacatatccctttgcatataatcaagaggggtccaagaggcaagcttttcacaagttttagaacccanaatacagcctctaatagtgttccaatagcgaggatcctgaattctcttcctcaaccatggtgagtaatcttgaagacgatactccttgtaaacccttccaggcacttccacaccaccgcccttgctagtcacaccaaaaccaaatattgtgaagcccatgagtgctgctatgaggaacaacatgaccaccaagtacaaccatagtgcacatgccacatgaaaacatg

SEQ ID NO: 732 - DNA, 439 bp, Glycine max
  unsure at all n locations
agcttccttaagaagattcctaaagaagctagagcttagctacacatacctctctaatagctaagctcacctccttgagatgagaagctagaacttagctacacaccccctataatagctaagctcacccctatgacaaaaaacatgaaaatacaaaaaaaaattccttactacaaagactactcaaaatgccccgaaatacaaggctaaaaccctatactactagaatgaccaaaatacaaggcccaaacgaaggaaaaacctattctaatatttacaaagataagcgggcttatacttagcccatgggctcgaaatctaccctaaggctcatgagaaccctagggccttcccttggatctctagcccaatctacttggagtattctacccaatgcccttgcggngtaggattgcatcacagcagagtttgaccttca

SEQ ID NO: 733 - DNA, 436 bp, Glycine max
agcttccttaagaagattccaaaagaagttagagcttagctacacacacctttctaatggctaagctcaccaccttgagatgagaagctagagcttagctacacaccccctataatagctaagctcaccctcatgaccaaatacatgaaaatacaaaaaagtccctactacaaagactactcaaaatgcctcaaaatacaaggctaaaaccctatactactagaatgaccaaaatacaaggcccaaacgaaggaaaaacatattctaatatttacaaagataagcgggctcatacttagcccatgggctcgaaatctaccctaaggctcatgagaaccctagggccttcccttggatctctggcccaatctacttggagtcttctatccaatgcccttgtgggttaggattgcatcattccctccaccttggaaag

SEQ ID NO: 734 - DNA, 309 bp, Glycine max
  unsure at all n locations
gtgcctgtatattgatgcgccggaatcggacatacgatggagaagttatgaccatttgaatttctcgagagcttcctatgtttaatctggagcgtctcgatatattatacccctgaatcgaacctcagctgtgaaagttatgaccatttgaatttctttagagcatccgatgttcattnttgagcgtctctatatgtgatgaagcttaatcggacgtacgtgcgaaaagttatgaccatttgaatttctagagagcttacggtgttgaatatcgagcgtcgcgacatattatgcgcccgaatcggacat

SEQ ID NO: 735 - DNA, 447 bp, Glycine max
  unsure at all n locations
agctntcatgtcntaataaattgttaattctactgaaattgattattttaaaaattatgtttattatgatttttgatcggatgattataaaactttttctattgatgatatatagaaattagattctatgttataacatttaaaatataaaactacattatgaaaaatgcaatggtaagtaaattaaatactttttcttgagagattcataactaataacgcgaagttgaaatagacataacgttttaagttgaaattctattaatttacaattagtattgtttgattgagtagaaagaaaagtaaaaaaagattaataaaattaaattaaaatagaatgtacaaatataaattctgcattattttactggttattattttttttattctctttttcttcaaacgaaaccttagtattcttataattgaatgagttttttatgtcca

SEQ ID NO: 736 - DNA, 171 bp, Glycine max
  unsure at all n locations
tcaacatcagaccacttccagggtgctggaactacttcacatgtgacttgatggngcctatgcaagttgaaagccttggaggaaaaaggtatgcctatgttggtgtggatgatttctccagatttacctgggtcaactttatcagagagaaatcagacacctttgaagtat

SEQ ID NO: 737 - DNA, 419 bp, Glycine max
agcttataatatattgatacgctcgaaattaaacgtcggaaactctcgagaaattcaaatggtcataacttttcacacggatgtccgattcgggcgcataatatgtcgagaggctcgaaattgaacaacggaagctcttgagaaattcaaatggtcataacttttcacacggatgtccgattcaggagcatcacatatagagacgctcgaaatttaaatgggcataatttttcacacggatgatcgattcaagcttataatatattgatacactcgagattatacatcggaaactctcgagaaattcaaatgggcataacttttcacacggatgatcgattcgagcgcataatatgtcgagaggctcgaaatcgaataacgtgagctctcgagaaattcaaatggcgatacatttatac

SEQ ID NO: 738 - DNA, 422 bp, Glycine max
ttgagtggcttaatggctggagtagaagattcaatatagttgtagtttgaattaattgctccaagagaagcaatggaagtgagaggaaggggagccaaagcgccaagacaaccaatgatgaaacggagcacatcttccctagagagacaacagtacctatcacggataggagtgatggaagttgaggggctccgattcatgttaagtggtagattgttgctgctgttgccaggagattcactattcttgagccacttgccatagtagataactgagaatcgcttgctcatgcccttccatggctacgctcttggaacaagcagacgcttcacaccttgtttcatcatgttcagcgcatctatcaaccttaatgagaggaagtaaagtaagatattaagggtggttttgtcaaattagaaaaa

SEQ ID NO: 739 - DNA, 376 bp, Glycine max
tggtctaacctttcacatggaggtccaattcaggctcataatatatcgagatgctcgaaattgaacaatggaagctcttgagcaattcaaatggtcataaccttactctcggaggtaagattcatgcacataagttaacgagacgctcgaaattgaacaacggaagctctcgagatattcagatgatcataacttttcactcggaggtgcgattcaagcgcatcatgaatagagacgctcgaaattgaacaacggaagctctcgagagattcacatggacataacatatcacatcgaggtcagattcaagcacataatatatcgagacgctcgtaattgaacaacggatgctgtcgagaaatctaacggcataact

SEQ ID NO: 740 - DNA, 455 bp, Glycine max
  unsure at all n locations
cgctcgtgaccatntgaataactcaagagcttccattgttcaattntgagcgtctcgatatattatgcgccttaatcggacctccgagtgaaaagttatgaccatttgaataactcaagagcttccattgttcaatttcgagcgtctcgatatcttatgtgcctgaatctgacctccgtgtgaaaagttatgaccatttgaatttcttcagagccttccgttgttcaatttcgagcgtctcgatatcttatgcgcctgaatcggacctccgagtgaaaagttatgaccatttgaataactcaagagcttccattgttcaattacgagcgtctcaataaattatgtgcctggatcgacctccgagtgaaaggttatgaccatttgaattgctcaagagcttccattggtcaatttcgagcgtctcgatatattatgcgcctgaaccggacctccga

SEQ ID NO: 741 - DNA, 367 bp, Glycine max
tccattgttcaatttcgagtgtctcgatatattatgcgcctgaatcggacctccgaatgaaaagttatgaccatttgaatttctcgagagctacctttgttcaatttcgtgcgtctcgatatattttgcgcctgaatcggacctccgagtgaaaagttatgaccatttgaatttctcgagagcttccgatgttcaatttcgagcgtcttgatatactatgcgactgaatctaacctccgtgtgaaaagttatgaccattttaatttctcaagagcttccgttgttcaattttgagcgtctctaactgtgatgcgcctaaatcagacatccgagttaaaagttatgaccatttgattttctcgagaac

SEQ ID NO: 742 - DNA, 446 bp, Glycine max
agcttctatagaaggttcgttcctaatttctctacaattgcatcacctctcaatgagctggtgaagaagaatgtggcatttacctggggtgaaaaacaagagcaagcctttgctttgctcaaagaaaagcttactaaggcacctgttctagctcttcctgacttttctaaaacttttgagctagaatgtgatgcctctggagtgggagttggagctgtattgtacaaggtgggcaccctattgcttattttagtgaaaaacttcatagtgccaccctcaactaccccacctatgataaagagctttatgccttaataagagccctccaaacttgggaacattaccttgtttccaaggaatttgtcattcatagtgatcatcaatcacttaagtacattagagggcaaagcaagttaaacaagaggcatgcaaaatgggtagagtac

SEQ ID NO: 743 - DNA, 451 bp, Glycine max
  unsure at all n locations
tttgaagtttgtcatttcaatttctcactaagtaaaatggatcattcttaaggtccaacaccttaaaatgatcaccacttaagtaaaacagaatcatttgataagcaagaactacgtaggtctgatttcctcatcgcaattgaggatacgtangagcaaaagccccgcttttgtcgaccaccccaagagatcgttaatgtgccaatgccttaacgtttctctcctttcaaaaacaagagatcgttaatggtccaatgccttaacgcttctctcctttcataaacaagagatcgttaatggtccaatgccttaacgtatctcttctttcanaaacaagagatctttaatggttcaatgccttaacgtctctctccttcataaacaagagatcgtatatgtccaccgcctaacgttctcatctttaaaatcaaataccggtaatggtcaacac

SEQ ID NO: 744 - DNA, 470 bp, Glycine max
  unsure at all n locations
acgggtggatggatcgatagaatggtcagattagttgtggtagttgatagctgcccagccctacctctcatattattgacaaattctatttctataatatataaaattgtatactttttatgtaagaaagaaaatatataaaaagaataatttatcattaaaagtgggttgtatattaattattataatttaattatgtttatatgagaaactgttaaaatgatatgttaaagtaaaagactacggatatcatttttttactctaacacaactaatggttntagcacatgtttgtgtgtagtcatttgctgtgttcaggatcgacccgtcagaaagtaaaatctaaaataaaaattgagagaggattttttattctaaagaanataatgatagttgaagtcttttatttaactgtgtgacattgtttactttaaaaaataatatatatcataatagacctaaagtttaag

SEQ ID NO: 745 - DNA, 445 bp, Glycine max
  unsure at all n locations
agataaggctaatatctgcatattntnttcctttctttcttgttttatatatgatcaaattatctaatctataagattaaaagaatgattaatttaattataataatacacttattttcaacttatatcttttcaaaatatttccgttattaatattttttaatggctttgtgatatattttttcttttttataaaatatatttataatttcaaagtaataaatattataaaatgaataatttagaaagaaggtaatatcattctaataaaatggtatttctggcccttttactcatctttaattttgagcttaattcttatttaaatctatttaagaatgtaattatctaactatgttcaattcaataaatgtaattcgcaagtcatatctaatggatgtattacggtcatatgatatgttttgatggaatatcatagttaaat

SEQ ID NO: 746 - DNA, 471 bp, Glycine max
  unsure at all n locations
actcattctttaactaccaacagaaagaaatgcagttttgctaagcccagtttagagtatcttggcctcatcatttctggttntggggtggcagcagataaatccaaggtggctacaatgagttcctggccagttccgaaagattcgaagagtttgaggggatttttaggattgataggctactatagaagatttgtccaaggctatggtaaaatagcaaagcctttgactgaattactgaaaaaggatagctttgtatggacactagtagctactctagcttttgaaactttaaaatctgccatggtcagtttgcctttattagcagttcctgattnttcaaaaacctttgttctggagacaaatgcttctagcanaggagtaggggctgctcttatgcaagagggcaggcctttggcttttatgagcanaggactctcccctcgagcacagctgaagtcagtctatgaa

SEQ ID NO: 747 - DNA, 452 bp, Glycine max
  unsure at all n locations
agcttctttgagaaaacttccttgagaagctagagcttagctacacacacccctctcataactaagctcacctccttgagaagcttccttaagaagattcctaaagaagctagagcttagctacagatacctctctaatagctaagctcacctccttgagatgagaagttagagcttagctacacaccccctataatagctaagctcacccccatgacaaaaaacatgaaaataacaaaaaaagtccttattataaagacaactcanaatgccccgaaatacaaggctaaaaccctatactactagaatggccaaaatacaaggcctagacgaaggaaaaacctattctaatatttacaaagataagcgggctcatacttagcccatgggctcgaaatctaccctaaggctcatgagaaccctagggcctttccttggatctctagcccaat

SEQ ID NO: 748 - DNA, 433 bp, Glycine max
gctcttctcaagtgtcttcacttgttctatgttaagcctccttttcttctctcctgcctgagatccatcatcagaatcttcctcagcattagcttcttctccaagttcaatccctgaaaatgacatagatctcttgccaagaaaggatgctcctccacctgcatatcaacattgtgaaacattagtattaggccactacacaacataatattgcaccattggttggtgtttttgtgatctagaggagagagtaccatggtactcttgaggtgcacatgaagttataattgagtcgagtgaacgtggaggttgatggtcatcttggtgaggtgttgtagcatgaaatttgctgagaagatagccatatcattgctggctagcctatgcctgatgccactgatcttcaatggctgaatgatattctgatcaccat

SEQ ID NO: 749 - DNA, 360 bp, Glycine max
  unsure at all n locations
taaagattgaatttcgagcgtntcgttatattacgggactcattcagacatccgagtaaaaagttattgtcgtatgaattggcttaaagcttaaacattcaactttgaccgtctcgatatattacgggactcaatcagacatccgagtgaaaagtaactgccgtttgaataggctcagaggttcaaaactcaatttcgagcatctcgttatatgactggactcaatcagacatccgagtaataagttattgtcgtgtgaattggctcagagggtcaacattcatttttgagcgtctcgatatattatgggactcatatagacatccgagtaagaagttattggcgcttgaattggcacat

SEQ ID NO: 750 - DNA, 424 bp, Glycine max
  unsure at all n locations
agctntgagccaattcaaacgacaataactttttactcgaatgtctgattgagccccgtaatatatcgagacgctagaaatggaatgttgaacctatgagcctattcaaacgacaataactttttactcggatgtctgattgagtcccataatatatcgagacgctcgaaattgaatgttgaacctctgagccaattcaaacgacaataaccttttactcggatgtccgattgagtgacttaatatgtcgggacgctcgaaattgaatgttgaacctctgagccaattcacacgacaataactttttactcggatgtctgattgagttccgtcatatatcgagacgctcgaaattgaatgttgaacctctgagccaattcaaacgacaactaacttttactcggatgtctgattgagtcccgta

SEQ ID NO: 751 - DNA, 395 bp, Glycine max
  unsure at all n locations
catctgatgttntccctttagccacaatttccaagtacttccctaatagaataaaggatatcatcatggaacttgtctcaaagaaatcttgtccttcanatgtgtgcccagcgcaaccagcacgtccatgttagcggattttcgcttcagtgcatgatatgaacctacatagaacctaatagtaatagccatagtaaaatgactataagaatctccaatttcttgaaaacaatacaataaaattgtctttggtgaataaagagaaacattaacaagaaaagaaattagaattaaatagttattgatagtcatagtaccttttgccaactatgaactgcacaggcgtgctaagaatccatcttataaacaacccaagagtaagcgtattgtggatc

SEQ ID NO: 752 - DNA, 451 bp, Glycine max
  unsure at all n locations
agcttataattggcttccaaattgattttgtgtatacaatatgatggactgattccttttagatcagaaatgtgccaaccaatagccgctttacgtcgttgtagaatttgcaccagttattcttcttcttctttcttcaaaaagttgctaattataacaagtttggtctcatcttcttccaagaatacatactttaaatgtgccagaagggtttttaattttgctttgggcttttctgttggactcagtttttccaattcttcacaacaaccttgtcaacataattgtcttttgaatcatcaagctcttcatcacaagctaagcaatctctcccatagccaggttctttntccaaaggagactgtagcaccatggntgaggctaataatgttatttcctgctccacctcttcttcttcgaaataggcatcacccatatctgagtggttcat

SEQ ID NO: 753 - DNA, 351 bp, Glycine max
agcttccattgttcaagtttcgagtgttttcgatatattatgtcgcctgaatcgacacctccgaatgaagggctatgaccattcgagtctctcgagagctacctttgatcaatctcagagcgatcgatatattatgcacctgaatcgcacctccgcgagacaagattcaccgttctagcttctcaagagcttgcgctggactacttactcccgcattaacagtgatgcgcctacttaagccatacgagtttgacatcctgacctttagactgagtcgcgcacctacgttgctgaaatcctatcgtcccaagagtttttgctctctggtgagccactaccagattattgtat

SEQ ID NO: 754 - DNA, 334 bp, Glycine max
ggcattgcaaacgattcacacctggactctcactcctctgccacctcacaagcaagttgttggctgcccgtggatatacaagatcaagtataatgcagatggtaacattgagctgtccaaagcgagacttgttgcgaaaggatacacacaagtggaaggcttagattaccttgctactttctcccaagtgccaagctcaccatagttcaactcattcttgccctttgcagccattttgattggcatctcaagcaattagacgtgaataatgcatttctttatggagaattgatgaagaagttacatgagtctttctccagaatgcatcagccta

SEQ ID NO: 755 - DNA, 463 bp, Glycine max
  unsure at all n locations
agcttattgggagataattntcaatcatcattgntatatgcaatgacaatcaacaaatctcaagatcaatcactagcatttgtgggtttgtacttgcctagaccgatgtttagtcataaacaattatatgtggcagtttcaagagttcaaagaaaacaaagattaaagatcttaattcatgacaaggaaagaaaaccattgaagtctgctactaatgttgttttcaaagaggtatttgaaaacctttaataagtatgtccacaagtgctactaattctatttgtatcaactataatttgatttacaatactcgtatatcttatatgcaagtttcctcttggagtggctgcattatttttggtccttggccaaagttacatttttctcctctgaaatgtagatagatgcaagtatcatggttcttaacatattgcattggtgggaatatgtggaaacaatatga

SEQ ID NO: 756 - DNA, 169 bp, Glycine max
agaatcggaagaagtaattggctttttccctggcgatctaactgcagatctcttgacctctgccgtggaagcagctgcataagccattcatgatatttctacaccttagatcaacatgatgaaagcagctgggtgggaccttgatgctgatgccaactgactcgaacct

SEQ ID NO: 757 - DNA, 297 bp, Glycine max
aagaatatccctttatttacaatattgtcacctttaataatttatcatcagttcgagagataatatcggttttgatcaaaattaatgttaacgagcattgtttattaaggtcgtcaaaggaaacttattgatgcaatgctacccgccaagggcattggatagaagactccaagaagattgggtcagataggcaagagaaggccctaggggtctcaagagccttatggtagatttcgggaccatgggctaagtatgagcccacttatctttgtacatatcatattatgattccattat

SEQ ID NO: 758 - DNA, 359 bp, Glycine max
  unsure at all n locations
agctntgcaacaaatgtcactctactcgaaatttctgatagatatgtttgacaggaaaaacaaacacgtccaccacgagaatattgtcgcggaacgaaaccgcagtgctgtaatacagagaattcttccaccaaaacataaggaccctggtagcgcaactactccttgatcaatcgaagaagtcactctcggaaaggctctcattgactggggtgccagaatcaacctaacggcgctctctatgtgtacaaggtcgggagagctggaaatcacgctcacgagaatgactttacaacttgctaaccgatccatcacaagaccttacggtgcagatgaggaagtactgactagagtgaaac

SEQ ID NO: 759 - DNA, 389 bp, Glycine max
  unsure at all n locations
tatcttaagtcacgtgcggcatgcaagctcgactagtccacataagtgagaattcntatttgtctaagacgaggagcattaagggttatcattgcctgacaataccgctcatcaacataacatttgtgtggtttgcagaattctttgagcttaggatagtaagtattgtcttcaactatcctaagagctagttctcggctaatttcaaaccactgggagccttttcaccaggcactcatgttgatttcaaattattttgtttggtattagaagcatacttccccaatgagtgagaaaagtgtacataacatatttaatagcatgaacaaacaatttataaagactcaggataagatcatgaacaagcatgagccagaaacccatgatca

SEQ ID NO: 760 - DNA, 448 bp, Glycine max
  unsure at all n locations
taagtaataataatagtaagaagaatattaataactattatctatanccattttgtggcattatgaatgacaggatgtagtgacataaagtgcttagagagttcacttgcatgtgaaaaattttcaaaaagaaaaagacttaagttaaaaggataatgcaaccagattaatacttccaaagaaaaaaatgttttgcaaagacattttcagacaatttaaatatttttatttgactatattagtataaatcatctctaatccatatattttttaatattatgttctttntattcattntcttttgatatactttgtgttttaataatttgaattcaatatgattntgtttatcaattatttctggatttgacatntacttatacgaaatttataagtttctttttttggtagtatttactaggtttaaaatgttaattggtaaagacgt

SEQ ID NO: 761 - DNA, 427 bp, Glycine max
ttcacatttacttgatggggcctatgcacgtcgaaagccttggaggaaagacgtatgcctacgttgatgtggatgatatctccagagctacctgcgtcaactatatcagagaaaaatcacacccctttgacgtattctaggagctgagtctaagacttcaaagagaaaaagactgtgtcatcaagagaatcacgagtgaccatggcagagagtgtgacaacagcaggtttactgaattctgcacatctgaaggcatcactcatgagttctctgcagccattacaccacaacagaatggcatagttgagaggaataacaggactctgcaagaggatgctagggtcatgcttcatgccacagaacttccctataatctctgggctgaagccatgaacacagcatgctacatccacaacagagtcacact

SEQ ID NO: 762 - DNA, 477 bp, Glycine max
  unsure at all n locations
ctcagcttaggatgagctntattatgaacataagacttaattntacatatgcatctttctattggatacatccacctgtattgaacaggaccacctaatctaactttgtttgccaagtgaacaggaaagtgaaccattatgtcaaaaaacttggaggaaaaatcatctctgattgacaaagaatttcaataatttgtgattctatataatccaaatcttctacctggatcactntctaacacaaagagcgaaagaaggatccaaggtgaattaaaagatcaaccaccacactaggcattgtgcttctaattgctatttgtaataagtaatgtaacatgatatgtgtatcatgactctngtagccagaatatttgtcagtgatatgcatgcattntgaaatatttgttgcactcccatctangcaattggcatctttcaagataccacanaaaatagacttctttnttgtagtcatta

SEQ ID NO: 763 - DNA, 477 bp, Glycine max
  unsure at all n locations
cttctacctatgacagtgctaagggatgtttccctagatagtagaaggtatatagattgttttagaaggagtgctcttttgatatcaccttttgttataaaatgattttccttcttaaaaatcttcttggaggaatccttttcctctttttccttccccttggcctttgaagagaaggccttactatccttctttttcttttgtttttctagtttttcttcctcatccctattatctttcatagttagttgatctttggccacctgtgaaggtgtttgaggatgcaacacanatttagtgccaagatgggtgagggtaatctcattagttaggccattttaaatgatcttcctatcanatttccatggccttcctaaaagaatatgcattgcctccatgggaactatatcacaattaacttcacccttttatgtcccaatggagaaaggtacctttacttgttggctaattatcatt

SEQ ID NO: 764 - DNA, 449 bp, Glycine max
  unsure at all n locations
agcttattgggagataattntcaatcatcatttttatatgcaatgacaatcaacaaatctcaagatcaatcactagcatttgtgggtttgtacttgcctagaccgatgtttagtcataaacaattatatgtggcagtttcaagagttcaaagaaaacaaagattaaagatcttaattcatgacaaggaaagaaaaccattgaagtctgctactaatgttgttttcaaagaggtatttgaaaacctttaataagtatgtccacaagtgctactaattctatttgtatcaactataatttgatttacaatactcgtatatcttatatgcaagtttcctcttggagtggctgcattatttttggtccttggccaaagttacatttttctcctctgaaatgtagatagatgcaagtatcatggntcttaacatattgcattggtggaattatg

SEQ ID NO: 765 - DNA, 401 bp, Glycine max
  unsure at all n locations
cgaatcggacctcagtgtgaanagttatgactcttttgaatncttctagagctttcgttggtcaatgtcgagcatctcgacatattatgcgctcgaatcagacatccgtgtgaaaagttatgaccatttgaatttctcgagagcttccgatgtttaatttcgagcctctcgacatattatgcgcccgaatcggacatccgtgtgaaaagttatgaacatttgaatttctcgagagcttcggatggttaatttcgagcctctcgacatattatgcgcccgaatcggacattcgtgtgaaaagttatgatcatttgaatatctcgagagccttcgatgcttaagttcgagcggactcgatatatataagcctgaattgccctcagtgtctaaagtatgaccat

SEQ ID NO: 766 - DNA, 356 bp, Glycine max
agcttatctatttcttttgatgaacttcaagattcatttttaacttgcataaagaatctgtcaaacttgccaaattattttcattttctaagaaaactattttaaatttagaaaagaaagttttgaaattaaatgtagaattataaaatcttaaagcagaagttaaaacattaaaaccaatagatacaaaccaatcctctactaaatgtttaatacaagatagcaatgaagcatctcattcatgtaaatattgtaaaatatttaaagaagaaattaaagatgtaaaagattctctttccatacttactcttggcaaaaataatttatatattatactaggaaaacatatatgtgtt

SEQ ID NO: 767 - DNA, 444 bp, Glycine max
  unsure at all n locations
agctnnttgaanagacacatctcttcttanatttttgaaaaggcacgaaggacctatatatgtgtgtgtccaatttcaaaaagcaagagatagatattccaagaaaacttcattgtcaaatgctctctcaataactcttgggcaaacacttgcaaatctattgagagttcatccaagaacttcaaattgtattattcactctaaaggagaggaatctttctgttcttcttagaaagtcaattgtaatcaaaagactagttgtctcttgaattatgagtttcctgaacacaacggaaagggattccttgngtgttcaaaagttgcaaaagggttgtttacaaagatagtggaaaatctcaagtgggttgcttgaggactggacgtangcacgggaagcggccgaactatgataaatcgagtctgcatatctctcttcccttatct

SEQ ID NO: 768 - DNA, 363 bp, Glycine max
  unsure at all n locations
ctataaaactaagctttgcctcnaacatattatttccaacttccaatgctctgngaatcgattacaaggcaatgtaatcgattaccagaagacaattttgaaaaacaacttttaaaaaaggttttgaatttaaattttgaatcatgtaatcgattatcagatgtttgtaatcgattaccaacaacggcacttcagtaaacactttgaaaagtcatgacccttcaaaatataattgtgtaatcaattaccaaaaacctgtaatcgattaccagtgaagagttttaggaaaaatcttttgaaaagacacatctctccaaaccattttgaaaaggcacgaagggcctatatatgtgtgtgtctgac

SEQ ID NO: 769 - DNA, 329 bp, Glycine max
  unsure at all n locations
agcttatccncacaagagtgcagaacatctggtgatgtctgcattgattataggaggctgaatcaggtaactagaaaagatcattttcccctgcctttcattgatcaaatgcttgagcgcttggcaagtaagtctcattactattttcttgatggtttttctggttatttacaaattcatattgctcttgaggatcaagaaaagaccacattcacctgtccctttggcagttttgcctataggaggatgccctttggcctatgcaatgcccttggtaccttccagcggtgtatgcttagcattttcagtgattttttacagacttgcat

SEQ ID NO: 770 - DNA, 385 bp, Glycine max
actcagcttgccgcacggacgtgtccgactatgctctattcgtggggaacatgctacgaaaggagagagcacgagatgaagagccaatggttgatacatggacggagatgaagatgatcatgaggaagcggattgtgccggctagctactcaagggacttgaaattcatgctcctcaaactaacccaaggcaacgaaggggttgaggagtatttcagggatatggatgtgctcatgattcatgcaaatattgaccaatatgaggagggagctatggctcgatctcttaatgtgttgactaatgacatacgcgatattgttgagctgcacgagtttgttgaaatggatgatttgcttcacaaagcaatccaagtggagcaacaatt

SEQ ID NO: 771 - DNA, 453 bp, Glycine max
  unsure at all n locations
agcttataatatattattacgctcgaatgtattcatcagaagctctcgagaaattcaaatggtcataacttttcacccggatgtccgattatggcgaatcacatatcgagacgctcaaaattgaacaacggaagctcttgagaaattctaatggtcataacttttaactcggatgtccgattcacgcgcatcacatattgaggcgctcganaaggaacaacggaagctctcgagaaattcaaatggtcataactnttcacactgaggtccgattcaggattataatatatcaagacgctcgaaattaaaaatcggaagctctcgagaaattcaattggtcatcacttttcacacggatgtccgatttgggtgcataatatgtcgacacgctcgaaattgacaacggaagctctcgagaaattaaatgggcataactttatactgaggtcgatc

SEQ ID NO: 772 - DNA, 434 bp, Glycine max
ctcagcttagatgggatcattgaaaaatagatatatcttgatttctttaatgtttaatgaatactctgatattgatggtcttgatttattctcacaattgacagtactaagagaagtgttaagagaagaaattagcacaccaatagaactattgagttatattaaaactctatattcttttccaaatgtttacattgcatataaaattctattgacaatctttgtaacagttgctactgctgaaagacgttttgaaaaaaagttgttcataacatacacagaataaagatgatctattttgcatctaaattatatttaaataaacggcatattaaatgtgtacatgttaattgaagcattcaaataattggtgttacgagagaatgagaagagaagtgataacttggtacttcaacgtggagcctaagaatgta

SEQ ID NO: 773 - DNA, 301 bp, Glycine max
  unsure at all n locations
ctcagcttgtgatcctgatctacagacgactcggttttatgctcttgttcttaactatatctaggncagatatatgctattgtgtgcacaaattatatcaacttgtcttcaacccctatacgaaccacatgcatgctactaacatgtctcttcggtaccttaagcacactgttattcaaggtattttttttatggccaacttatacacaaaattacatgcatatgtggatgcagattaacgatcatgttctgaaagttaaagatcaaccactggcttctgtatcttcttagaaattccttg

SEQ ID NO: 774 - DNA, 467 bp, Glycine max
  unsure at all n locations
ttaagtcgacgcggctgcagctgctaagaccgatatnggttcttattttgttctcatgngctcctttccttaaactgagaaccccattggttggttcatataaacattctcctcaaaatctccattaagaaagacagttttcacatccatctaatgtagctccaagtcataatgggctattaatgccatgataatcctgaaagaatcctttcatgagaacggcgaaaatgtctcttaataatcaatgtcatctttttgagtaaaatcccttagtaacaagtctagcattgtaatgttcaaggttgccatgagagtcatgtttagtcttgaagacccactttcaactaactctcttataaccctttggtaattctacaaggtcccaaatatcattatgtgccatggaatttatctcttctttcatggtatttaaccacttctcagaatcatcacagcttgcagcttgc

SEQ ID NO: 775 - DNA, 450 bp, Glycine max
  unsure at all n locations
agcttcanacttcgntgcatctaaccactatctctnttcttcactttccatggcctctctaaagcactcaggttctccatcatctgttaggatcacatactcattagtagaatacctattagaaggttgtctttccttgttggacctcctgagttgaacttgaggtggctcgatagcaccaccaagattttcatcttgtgacatgtcatgctcctcttcatacatcattttgaacatcagtatttagattctgaatatgcggctgaactggttcaaaatcaaccacaccaacattgtcttccttgggtgtagacttcttcaccttatcaatgtcttgaatggtttggtctttcatgaatttcacatcacggcttctgacaagcttcttctcaacaggatcatataacctgtaaccaaattcattctcatcataaccaatgaagatacatt

SEQ ID NO: 776 - DNA, 333 bp, Glycine max
  unsure at all n locations
actcaagctctgaggaacttcanacaacaacaactntntactcggatgtcttattgagacccgtaatatatccagacactcgaaattgaataccgaagctctgagcaaatttaaacgacaatacgtttttactcgtatgttcgattgagtcccgtaatatattgaatcgctcgaaattgaagaccgaagctctgagcaaattcaaacagcaataaatttttacttggatgtctgattgagtcccgtagtatatcgagacgcttcgacttgaatgccgaagctctgagtaaattcaaacgacaataacttttttcctcggatggctgattgagt

SEQ ID NO: 777 - DNA, 228 bp, Glycine max
agcttcgacattcaatatcgagcgtttcgataatttactggacttaatcagacatccgagtaaaaagttattgtagtttgaagttgctcagagcttcaacattcaatatcgagcgtttcgatatattacgggactaaatcagacatcagagtaaaaagttattgtcgtttgaattatctcagagcttcggcattcaagtccgagcgtctcgatttattacgggactca

SEQ ID NO: 778 - DNA, 425 bp, Glycine max
  unsure at all n locations
ngaagttgctgagctgaaatccaagtattgtggctctctttgttnttacccattatatgctgtagtttcgttgttagattttttctttataggaatttatggtcctgtaagttcattgagagggcccaggcactaatacatggagatctacacactggttctgtgatggttactcgtgaatcaactcaagttattgatccagaatttgcattttatggaccaatgggttttgatattggagcattcttgggaaacttgattttggctttctttgctcaagatgggcatgctgatcaagcaaatgatcgaaaagtaggtcccctttttccatgtcttctgtggtccttacttgtcctcttctttgcatactataagttgtatttagtcacatttcttgttattctccataatctagctaccactta

SEQ ID NO: 779 - DNA, 423 bp, Glycine max
agctttgaaatccaaagatctaatccaatgtagatgtttcataaatgggattcctttgcttgtgttgtttgattctggtgccacccattcctttatatcctgtttgtgtgtaggaaaacttaagctttctgtgtcttctttaaataaagatatagtagtagagacccctactagtggttctgtgttaacttctgatgtgtgtttgaattgttctgtggagatttctggtaggatattcttgattgatttgatttgtttgcctttgagccagattgatgttattcttggtatggactggttatcttccaaccatgtcttgttgaactgttttgagaaaagtgtggtgtttgatgattctggagtgagtaaggatatgatgtttatctctgccaaccaaggtgtgacatctttaaaggaagatgc

SEQ ID NO: 780 - DNA, 372 bp, Glycine max
  unsure at all n locations
tagcatgttataaatatatctattagcataatttatactagtgagaatatttgtatgggtatcttaccagaagcagagctcattcaccctttgaatcaagatgtatagtaggtccggttctgcaacagtaatgcaggtgatcctcttcaatttgatcatgttttgtttgctanaacatcataccatctattgccatttactcgaatttatagtcgctaacattagctactacaattaaaataacttaacaggttattgcaattctatctagtatatataagaaataatatggcatgcagtttatacatatattttctttataaagaggaatcataatttgtatatatttgatgcatttaaagtttttactat

SEQ ID NO: 781 - DNA, 262 bp, Glycine max
agcttcggttgttctatttcgagcatctttatatgtgatgttcctgtatcggacctccgtgtgataacttatgaccattataatttctcgagagcttccgctgttcaatttcgagcgtctcgatatattatgcgcccaaatcggacatctcggggaagggttatgaccatatcaatatcacgaaagctttggttggcaatttctagcatctcaattgtgatgttcctgtatcggaccttcgtgtcataacctatgaccattt

SEQ ID NO: 782 - DNA, 407 bp, Glycine max
  unsure at all n locations
tcgaagaaacggataacagattgattntactctgtaactagacgacatctccgactgatattgtggaccctatttgcttcttgatgcaatcctaccccctaaggacattgaataaaagactccaagaagattggaccagagagatgcaagagaagaccttaggattctcatgagccttagggtagatttcgggcccatgggttaagtataagtccacttatctttgtacatatcatatcaaggttttattatttttgggccttgtatttagggctctatagtgtaggtagggtacccttgaaatgtaggatttttcagcccttgtattttagggcaccttgactagtttattgtattaggggtagttctgtaatttcacatacattaagtgaatatttgatgtgtgt

SEQ ID NO: 783 - DNA, 386 bp, Glycine max
gcttggcacaatgccactccatttactatccgagtatatagtggatcttgggatgacaatggcatttttatttacacaacattaaatcatataaaatattgcctccccaatggagatagtgggataattaaaacattggatgtcccaatttatattacaaaggttgttggaaacaccatcttctgcttgggtcgcgatgggaaaaacaaagctataactgttgatgcaacagaatatatctttaagcttttcttgttgaagaaaaaatatgatcatgtaatgaacatgataaagaattcgcagctttgtgggcaggctatgattgcttatctacaacagaaagggtttcctgaagttgcgctccattctgtgaaagatgagagaat

SEQ ID NO: 784 - DNA, 417 bp, Glycine max
  unsure at all n locations
tcaagaaaaagatggcctcagctnattccttatttccataagggaattctatcaatagacctccaatctttaatggagagggttaccactactggaaaacccgaatgcaaatttttatcgaggcaatagatctaaatatctgggaagccattgaaatagggccttatatacccaccacagtagaaagagtttcaatagatggtagttcatcaagtgaaagcataaccatagaaaaacctagagatagatggtctgaagaggatagaaaacgagtacaatacaacctaaaagccaaaaacataataacatctgccctaggaatggatgaatatttcagagtttcaaattgcaagagtgctaaggaaatgtgggacactcttcgattaacacatgaaggaactacagatgttaaaagat

SEQ ID NO: 785 - DNA, 413 bp, Glycine max
tgtaatcgattacacacatactgtaatcgattaccagagcacattttcaaaaaatattctcaacagtcacatctttttatgtggttcttgaatggctatcaaaggcctatatatatatgtgacttgagacacgaatttaagaagagtttttggagaacaaaaaggtcttatcctattaaaaagcaaatcgtgttatcctcttacaaattccttggccaaattacttgtgattcaataaggaattatttgagtgctcaaattgttcagtctatctctttcaagagagatttcttcttttcttcttcttcattctgaaaagggattaagagaccgagggtctcctgttgtgaaagaattctaaacacaaaggaagggttgtccttgtgtgtttagaaccttgtaaaggaatttac

SEQ ID NO: 786 - DNA, 369 bp, Glycine max
  unsure at all n locations
agctttaccattgaattcagcaccttatgtcatattagatggaaattgggtatcttaacataagagaattcagatggactttaatcctaattccacaagcgaccttttcacgagatctctacttaaccctttgggtacatgatcagccacattatgctgagttctcacaaactccactgatatcacaccatgcatgattaactcccgaaccatgttgtgtctaacacccaagtgtctagactttccattatacactggactatatgccttagccaaagntaatatggggtaaccttattccttttggtaggaattcagtttaacatgtaacaggctgccaacatagcctcaccccaaaatccttcactt

SEQ ID NO: 787 - DNA, 391 bp, Glycine max
  unsure at all n locations
agctntggagaaccaagccaatcagaatgctagacgaaatatagatgggaatagaggtaacaatggcggtaatgacggaccgaggcagaaccgggttgagggagtaaagctcaatgttcctcccttcaaaggtagaagtgatccagatgcctacctggactgggaaatgaagactgagcacgtatttgcctgcaatgactacactgatgcgcagaaagtcaagctagcagcagctgaattctccgactatgcccttgtttggtggcataaataccaaagagaaatgttgagagaggaacggcgagaggtagatacatggactgagatgaaaagggtgatgagaaaaaggtatgtgcccactagctataacaaaaccatgcgacagaaactt

SEQ ID NO: 788 - DNA, 425 bp, Glycine max
tttatctctatatatttttttattcttttaggaatccatataatagccatatgatatacgagttcttgttattcaattatttgttttctaagaaatccgactcaatacgaattttctgagacttcattcacttcaatttactaccacaaattgcctcatgtacctacaacaattcttttacctgtattgaaaaataggggtatggcaaaaaaattagagcaattgtcctccactgagtgggcataagcttagcaagatgaagtagctttttatcctcttctcttgtccacccaatctatacacaaaaagcatcagattgaaaaatcactcattagaaaaatatcacaacaattaataacatagttggtacatactccttatcaataacatcttaaaaaaagagaggctcttaaacccaaagaaag

SEQ ID NO: 789 - DNA, 399 bp, Glycine max
  unsure at all n locations
tttaacccnctttntaaaagatatgcttagaatacagatgaagaacaagaagcaatcaatttaacaatgttcttttaaacgtgcaaggaaaaattgattgcaataaaataaatgagataagggaagagagaaatgcaaacttgatttatactggttcgaccactttccgtgcctacatccaatcctcaaacaacctacttgagattttccactatctttgcaaaaatcctttttacaacttctgaacacccaaggaatcattttcccttgtgttcaagaaactcacaattcaagagacaaccagtctcttgattacaattgattttatgagaagaacaaaaagatttctctcttttagagtggataatacaatttgaagttcctggatgaactctcaat

SEQ ID NO: 790 - DNA, 415 bp, Glycine max
  unsure at all n locations
agctntactatgtaatgaataaccaaggtaaattccttcatctgacttggcatcaaattctcctaagttttcctttccattgtttaatacaaagcatttgcaaccaaaaacatgtagatgtgagatgtttggttttctaccattgaacaattcatatggagttttctttaagataggtctgattaaagccctattcatgatataacatgcagtattaacagcttcagcccaaaaatattttggaagaggagtatcattcaataaggttctagcaatttctttcacagacctatttttcctttcaacaacttcattttgttgagggggtctaggtgcagaaaaaatatgttcaataccatgcttttcacaaaataagtcaaattctttattttcaattccccccatgatcacttct

SEQ ID NO: 791 - DNA, 410 bp, Glycine max
  unsure at all n locations
tcttacatagtccgcctttgcttgaccttctttatgcttaanaacagaaacattatgcataggcaaaagatcaagaggagttagtgggttaaaaccataaacaacttcaaaaggagaacaattagtggcattatgaacaactctattgtaagcaaattcaacatggggtaaacaagcttcccaagtttttaagttcttcctcaaaactgttctaagcaaagttcccaaagttctattaacaacttttgtttgcccatcggtttgtggctgacaagtggttgaaaataacaatttagtgcccaacttgctccacaaagtcctccaaaaatggcttaagaacttagagtccctatcactaacaatgctccttggcaaaccatggagtctcacaatctcctgttggatcaagt

SEQ ID NO: 792 - DNA, 410 bp, Glycine max
tcttaagcacctgcggcatgcaactataccttatcggaattggaaaagatttaatgtaagtcaagagcatgatagtgtgtcgataccattaactggtcacaggttcttaagcaggccgagggcatcaatattgtatttggaaagacccaagagaaggaaaaaactaaaacttccatatggaagaagaggtcgatattgtttgatcttccatactggtatgatctagatgtcagacattgtattgatgttatgcatgttgagaaaaatgtgtgtgatagtgtcattagcacacttggtaacattcaaagaaagacaaaggatggtttgaatactcaccaggatctagtttagataggtatacgagacccagtacattcaaggtctgatggtaacaaaatatacttgccttc

SEQ ID NO: 793 - DNA, 388 bp, Glycine max
ttctctaccacttgtcatccacaaactgatgggcttacagaggtagtgtataggtctttatccactcttttaagggctcttctaaaaggcaaccataagtcttgggatgagtatcttcctcatgtagaatttgcctacaataggggcgttcatagaaccaccaagcaatccccttttgaggttgtctatgggttcaatcccttaacacccttagacctcattcccctcccacttgacacttcttttatacataaagaaggggaatctaggtcagagtttgtaaagaagttgcatgagagggttaagacccaaatagagaaccaaacaaaggtgtattcaactaagggcaatagaggaagaaaggagctagttcttaatgagggggact

SEQ ID NO: 794 - DNA, 380 bp, Glycine max
  unsure at all n locations
ntgagcaaattgaattgactattactttatacacggatgtctggttgagtccagtaatatatcgagacggtccaaattgaaaatggaagctcgtaggaaattcaaacgacaataactttttactcggatgtccgattgaatcgggtaatatatcgacacgctcaaaattgagactagaagctctgagcaaactgaaacgacaataactttatacatagatttccggttgagtcccgtaatatatcgagatgctccaaattgaaaatggaagctcttagaaaattctaacgacaataacattttactcggatatccgacagagtctcgtaatatatcaagacactcgaaattcagaacagaagctctgagaatttcaaacg

SEQ ID NO: 795 - DNA, 411 bp, Glycine max
  unsure at all n locations
tctattgcaggaatttcatgccacaccaaccggtggctatataggagtcacgaagaccttagcaaggttacaagagaacttcacgtgcagctcaattcatcaggatgttcgcagattcatcgaacaatgcctcgattgtcaacataccaattatatcactaggaaaccagttggactacttgcacccttccctctaccaactcgaccatgggaagacttttcactcgatttcattgttggtttaccatcttactgngggtatacaaccatattggtggttgttgatagattnttgaagggcattcatttgggtcttcttcttccacactatactgcgtaccaagtcgcaaacctcttcctggatattggttctaaactgcacgacatgcctaagagcctagttntcgatag

SEQ ID NO: 796 - DNA, 404 bp, Glycine max
  unsure at all n locations
agcttgttgagggtctctgttagggcttctatttgtcgggacaacagcttgttctgagctaaggttgcatcttgagtggtgagttctagaaggcttctctttgttggtgcatatgtgcgatcaggaagaatggcgtgatcactagccgccatgttttctatgagttccattgcctcctccggtgtctttagcttaatcttccctcttgcggatgcatccaatatttgctttgattgtggtcgcaggccatctatgaagatgtttagttgcaccgattcactgtacccatgtgtaggcatctttctaagtagtccatggaaacggtcgagtgcctcgctgagggattcattanngaaatgatggaataaagagatttccatcttccctttagcgggcctttgatt

SEQ ID NO: 797 - DNA, 394 bp, Glycine max
agcttcaagaaaaatggcctcaacaaattccttatttccagaaggaaattctatcaatagacctccaatctttaatggagagggttaccactactggaaaacccgaatgcaaatttttattgaggcaatagacttaagtatttgggaagccatagaaatagggccttatatacccaccacagtggaaagaattacaatagatggtagcacatcaagtgaaagcataacaatagaaaaacctagagatagatggtcagaagaggatagaagacgagtacaatacaatttaaaagccaaaaacataataacatcagccctaggtatggatgaatatttcagggtttcaaattgtaagagtgctaaggaaatgtgggacactctacattaacacatg

SEQ ID NO: 798 - DNA, 416 bp, Glycine max
  unsure at all n locations
tgccaaagtgaaggctcaagtttctgaagtcaagggtgttatgatggaaaacattgaaaaggtaagacctatacaaaatgacattgtatagaggtctttaacagagtcgatgccatcatccatcaaatatatagtactaatttggattgaaaatttacattttctcgtaggttcttgatcgtggagaaaagattgagctgctcgtggataagactgacaaccttcggtcacaggtttcattttcttctttattcttttagatatatttttaatctaatttacacgactttgtgttcattttttttttatttttttgttaaatatttcttacattatttaaatttttggtgttagtatatgctgacatcattagntacttggttttaatttctatctcaacttgttatgcgatgact

SEQ ID NO: 799 - DNA, 408 bp, Glycine max
  unsure at all n locations
tttanatatgtatacactnttagggatcacaaacttattaatactgaccagagatgaaagtaaccctcaatagcagtcaattcacacaacataacccacaggacagaagattaagacatggtgtgaaggaacttaccgtaggtttgagcaattctataatttcttgagcttgccaaagccttatgtcaacaatattagcaagtaaatcaacctcaatcaaaatgtgggattgctcattgngatgctgcctggtcttcctcttaattttttcttcctttacgattgaaaggataataatcttagacattacacaagaataatatatagatcaataaaaataagcatcatatttatttcacactttntaatattagacctagaaaggtcatatcaggccttcattacctt

SEQ ID NO: 800 - DNA, 427 bp, Glycine max
tgaaccattatctcctttgggttcgcaggttcttccatgcacggaatccagtgatcatctctattacaatgcacccaagagaccatatatctaacgctggttcaatctgaccaacgaccgattctggtgacatgtaaaaaggtgtccctctaaacttgaccttcccatactcagcatttgcatcttctctagtcttggacaacccaaaatcagcaatcttcagttgataccttgcatgatcatcagatgaaggaaagagaaggatgttgtccggtttgagatcacaatggacgactccttttcgatgaatgcaagaaagccctttgagaagcatacgagtgtagactcttacttcactatccgatattggccccttcttgttactaaaccaagaagagaaccataaggagcacactccatgaaaaga

SEQ ID NO: 801 - DNA, 402 bp, Glycine max
agcttttggtatctttgttttccttggttcactccatatacaactaacaaacttcagaccaagtccgtaccatgtgtttcttatgttacaatcttactcaaagtgcatatcttttgttatgatctttcagagtctaagttgttcacctcccgtcatgttgaattcattgaagatgttctttcgttttcctccacttcaagtcaacaacacatgatccataaccctcaaattcaaaattcacaaccgaatcttccaaatccaacctccaccaattccaacaaacaattcagattccagcttatattttaatatcaacattgtacccacccaagcacctcaatatcaaccacctttaaattcaaattccaccttctcacaattccagcttatcttttaatatca

SEQ ID NO: 802 - DNA, 360 bp, Glycine max
  unsure at all n locations
agctttgcagcagatgccactctactcttaattcttgaaagatatgttaacaaggaagcataaatatattcatcaggaaaacatcatagtggaaggaaattgcagtggtgtgatccaaaagatccttccacctaagcataaagatcctgggagtgtaactattccttgttcaactagagaagtcaatgtgggaaaagctcttattgacctaggagctagtatcaatttgatgccactctccatgtgcagaagattgggagagttggagataatgcccactcgaatgacattacaattagctgaccgctccattaccangccatatggagtaattgaagatgtgttggtcatagtgaaaca

SEQ ID NO: 803 - DNA, 394 bp, Glycine max
  unsure at all n locations
agcttctaaactntgtacaagaatgaagctctgataccacttgttagacaagtggcctcagatatcttaagaagggggggttgaattaagatattccaaactgtttcccctaattaaaaatctatttttctttttacttaagttatgaattcccttaatgacaatcttcttaaatattaattcaaatgaagcaacttgaatatgaatataaagcaataataaataaaggagattaagggaagagaaaatgcaaactcagttttatactggttcggccacacccttgtgcctacgtccagtccccaagcaacccgcttgagagttacactaacttgtaaattccttttacaagttctaaacacacaaggacaacccttcctttgtgtttagagat

SEQ ID NO: 804 - DNA, 429 bp, Glycine max
tgaggtccctcattgcaaagatgtttttcaagatactatactcatctggcacttcaatattcaaacttcttgcatgatcgagaagagaggggaaagcaacttcaaacccgataggcatatgttctgcattttcatcctgaagcttgtacaaattctccttaaaaaatgacattcctgttacatatgaatgcatatatacacaatagaaacattaaattaacataaacgtgctgataaaaaaataacatttatatcataatactttactatttcccggtcctcttcttttactatggaatagaggtgtgaaagtattgcagaaaagaaatgattaagagtatgtatctaacaaaagaaatgattaagagtatgaaaatatctgggttaaaaaaaaaagagtacgacaatatcacagtcagcaaggaattc

SEQ ID NO: 805 - DNA, 353 bp, Glycine max
tcctctcagtcacctgcggcatgcaagcttgtaaaaagggaagcaagttaaaaactcttttcaaagtaaaaacgttgtttctacttcaaaaccctttgaactacttcacatagacttatttggtgcctctaaaactatgagtttgggtgggaattactatggcttagttatagtagatgattactcaagattcacatggactttgtttttgaaaaccaaagatgaagcttttgatggttgttgcacacttgccaaggtcattcaaaatgaaaaaaggtcttaacattgtttcacttagaagttatcatggaggtgaatttcaaatgagtctcttgaaatgtttgtgagaaaat

SEQ ID NO: 806 - DNA, 412 bp, Glycine max
tgttggtatgtgatcaaagaagatgtcatcttatctatctctgaatttcattctcatggttccattcctacgagtgggaacacgtcatttctagctctaattccaaaaaaggagaacccacaagaattaagtgaatacatactcttattaggtgcatttataaaattattgatgaacttctagcaaagagattgagatgtattataggggtgttggtggatgacaggcaattcacgtttctgggagataggaacatgttagatggagtggtcattaccaatgaagtgattcaagaggaaaatcgttaagttaaatcatgtgtggtgttcaagacaaatcctggagtggtcattgtcaatgaagtgattcatgaggcctaccagtttggggccgatgcttctagactaactac

SEQ ID NO: 807 - DNA, 383 bp, Glycine max
  unsure at all n locations
agcttgtttgaaacctgagggatgcctatagcagtcaccttcctagttaccaaccaaacctttgtgcccatgcttgttccacgtcggaccaaagaaaaaggaaacagaaaaggaaaaggccgaaacacccaaaagccaaattccccaccaaaattcaacttcctaaaagtcctattggcccatgattatgcatgttatcgttgatttgataggaaatgatttgcaaagtcaaatcatgacatatctatggtttggaattaggatgaaacacttgcatgtgtgagattttatacactntgagtggttttcctctatttcattcgcacccagtgtttcttctaaatgcccttttagaaatgaaatgctaatatcccacaatctca

SEQ ID NO: 808 - DNA, 390 bp, Glycine max
acaaagaataggttcattcataagcttatcttttaataaattataagttttctcatgcacatcagtccacttgaacaccacatccttttttacaagttcatttaaaggtgcagcaagtgaactagctaaaccacgaaaacttcttacctcattagcattcttaggtacaggctattccctaagtgcctttactttttcttcctcaacacttattccttttgagctagtgacaaaacctaagaatacaacaaattcatggcaaaaagaacacttttaaagattggcacacaatttattttctctcaaaacattaaaaataacatgtaaatgatcaacatgttcctctaatgtttgctataaatcaaaatatcatcaaaatacaccacaaca

SEQ ID NO: 809 - DNA, 394 bp, Glycine max
  unsure at all n locations
agcttgaaggcaaattggatgcattggttaacttggtaacccagctggccttgaaccaaaaatttgtacctgttgcaagggtctgtggtttgtgctcctctgctgaccaccatacagacctttgcccttccatgcagcaacctggagcaattgagcagcccgaagcttatgctgctaatatttacaatagacctcctcaacctcagcagcaagatcaaccacagcaaaataattatgacctctccagcaacagatacaaccctggatggaggaatcaccctaatctcanatggtctagccctcagcaacaacaacagcagcctgctccttccttcaaaatgttgctggcccaagcagaccatacattcctccaccaatccaacaacagcaacag

SEQ ID NO: 810 - DNA, 411 bp, Glycine max
tctgaaatatgaagtattaacctatcaaggctatcgttccctttaacatgaccctgaccattctcagaactccgcctaagtgaatgtacctcttgttcgtagtctcttattcctttggcaaactcatcacacaaattctccaaaaggatccgtgcttttctctctctttcaagatttctcaaacaaccagagaaggaagacttcacttcagaaagctccctagccagcttccgatgcaggctttctgaatgctgacgtaacctcctctcatcttctagctcttccctgattgattgaactgcagctttaattctaccatgttctttgttcttcctaataagtttgtcaattgtaatttcctttatcaagttctccacttcctgcctattcatttgattctctcgtagtaac

SEQ ID NO: 811 - DNA, 397 bp, Glycine max
  unsure at all n locations
tcaacattcaattntgagcgtctcgatatatgacgggactcaatcatacattcgagtaaaaagttattgtcgtttgaattggctcagagcttcaacattcaatttcgagggtctcgatatattgcgggactcaatcagacatccgagtaaaaagttattgtcgtttgaattggctcggagcttcaacattcaatttcgagcgtctcgatatatgatgggactcaatcagacatccgagtaaaaagttattgtcgtttgaattggctcggagcttcaacattcaatttcgagcgtctcgatatatgacgagactcaatcagacatccgagtaaaacgttattgacgtttgaattggctcggagcttcaacattcaatttcgagcgtctcgatatatta

SEQ ID NO: 812 - DNA, 339 bp, Glycine max
  unsure at all n locations
agctntgagccaattcaaacgacaatatctttntactccgatgtctgattgagtcccttcatatatcgagacgctcgaaattgaatgttgaagctctgagccaattcaaacgacaataactttttactcggatgtctgattgagtcccgtaatatatcgagacgctctaaattgaatgttgaacctctgagctaattcaaacgacactaactttatactcggatgtctgattgagtgccgtaacatatcgagacgctcgaaattgaatgttgaacctctaagccaattaaaacgacaataaacgtttactcggatgtctgattgagtcccgtcatatat

SEQ ID NO: 813 - DNA, 413 bp, Glycine max
  unsure at all n locations
agctcgaactcttgcacctccttgaagttcaaccatgacttctcccaaactttggcttcataaaccttcttttgcccaccatcttttgcctccaaagtgatggtgtacaaggtaccagaaaccacttgctgtttcgcagttaccaccttttcaaactccaaaagggcattctgcatagccatttacaattcaataaaaataaaatataattcatatttaccacaaaataaaaagaaaatagaagcccgttcgtggttattgaaattgaccctaccaatctatttattccttgacataatggaaatgcaaatttatcctaacaatcaattaatttttggtgaacaaaattttggnggaggggtaatgccccagtacaagacagaanaagcctccaagctcaaagaacattcaca

SEQ ID NO: 814 - DNA, 426 bp, Glycine max
tcttacatagtccgcctttgcttgaccttctttatgcttaaaaacagaaacattaggcataggcaaaagatcaagaggagttagtgggttaaaaccataaacaacttcaaaaggagaacaattagtggcattatgaacaactctattgtaagcaaattcaacatggggtaaacaagcttcccaagtttttaagttcttcctcaaaactgttctaagcaaagttcccaaagttctattaacaacttttgtttgcccatcggtttgtggctgacaagtggttgaaaataacaatttagtgcccaacttgctccacaaagtcctccaaaaatggcttaggaacttagagtccctatcactaacaatgctccttggcaaaccatggagtctcacaatctcctgttggatcaagtggcctcagaataatta

SEQ ID NO: 815 - DNA, 387 bp, Glycine max
agcttatcacctttatcggcaattgaaaaaagattttaatgtaagtcaagagcatgatagtgtgtcgataccattaactggtcacaggttcttaagcaggccgagggcatcaatattgtatttggaaagacccaagagaaggaaaaaactaaaacttccatatggaagaagaggtcgatattgtttgatcttccatactggtatgatctagatgtcagacattgtattgatgttatgcatgttgagaaaaatgtgtgtgatagtgtcattagcacactggttaacattcaaagaaagacaaaggatggtttgaatactcaccaggatctagtttagataggtatacgagaccagttacatccaaggtctgatggtaacaaaatatac

SEQ ID NO: 816 - DNA, 375 bp, Glycine max
gggatcctcttagtcacctgctgcatgcaagctataagaaattttgcaacatcgttttggatatttaacaagaacattctatttcttgacattggtaccttggtaattatattatttctcccatctctgatggaaagactggaatctttcatgtgaatatcatagccttttttgaggaattgtcccaaactcaaaatattgttcttcatatttgggacgtagtagacatttgatatgaattcatgtcttgcatccttcaaatggattatgatcttacctttttccttttataggaatattggaattattaccaaattaagcattgccacttactgactcatcaagatccacgaaacatgcttcttttccacacat

SEQ ID NO: 817 - DNA, 414 bp, Glycine max
  unsure at all n locations
ntaagctctgcagtttatcttattaatagagttccctctagtgtgttaaactttaagagacctcttgatgtcatttctcatcatttcacccttaatcttgtcaatcatttaccaccccatatttctggttgtcatatatgtacattcgcatcctcaccaacaaacaaaattagaatctagagcaatgaaatgtgtttttgtgggatacaacaccactcaaaagggatataaggcctatcatccatctacaaaaagattttttgtatcattggatgttacatttcatgagcatgaaatgttttttcccttgaaaacacttcattcttcaccttataggggaggtgatttggaggtgcagaatcatgatagacttgaccaagatatcaggttatttgatattatgccaacaacaac

SEQ ID NO: 818 - DNA, 390 bp, Glycine max
  unsure at all n locations
agcttgtagggttaaagtctcacgattgtcacgtgttgatgcaacaatggttagtcgtggctatacgagacatcttgccaaacaaagtcaagttagccataactcgcctgtgctttttcttccatgccatatgtagcaaagtcgttgatcctgtcaagtttgatgagttggaaaatgagaccgcaattatactatgccagttggagatgtattttccccctgctttctttgacatcatgattcacttgattgtgcatctggtcagagaaatcaaatgttgtggtcctggttatttgcggtggatgtacccggttgagcgatacatgaagatcttaanagggtatacaaagaatctatatcatccagaagcatctattgttgagaggtaca

SEQ ID NO: 819 - DNA, 416 bp, Glycine max
gtgcttgtacaatctccctctttttgatgatgacaacttctgaaatcaagaaacacacacacacacactttttcctagtcgatcactcacataaatttccattctccccctttgtttttgaatttatgcttcacttaaaattaagttaattactcatgtgagttcttgatttaatccctatttctctccccctttggcatcaacaaaaagccaaagtgcgtaacaagtatgaaacatacaaatacaactagtcattcacacaacaatcatggaaaaaatataaactaatcataccagagaacagaaaacaattaagcaagatattttaaccattcatcaaacttagaaacgttaagaaatataaaaaccatacataattgacataccccagaatagaaaaacaatcaaacagatat

SEQ ID NO: 820 - DNA, 388 bp, Glycine max
  unsure at all n locations
agcttgtcaaanagggaagcaagttaataactcttttcaaagtaaaaacgttgtttctacttcaaaaccctttgaactacttcacatagacttatttggtgcctctagaactatgagtttgggtggtaattactatggcttagttatagtagatgattactcaagattcacatggactttgtttttgaaaaccaaagatgaagcttttgatggtttttgcaaacttgccaaggtcattcaaaatgaaaaaaggtcttaacattgtttcacttagaagttatcatggaggtgaatttcanaatgagtctcttgaaatgttttgtgaagaaaatggaattcaccacaacttttctaccctaagaacacctcaacagaatggtgtcatgga

SEQ ID NO: 821 - DNA, 312 bp, Glycine max
agcttatgctgcaaatatttacaatagacctcctcaacctcagcagcaaaatcaaccacagcagagcaattatgacctttccaacaacagatacaaccctggatggaggaatcaccctaacctcagatggtccagccctcagcaaacacaacagcaacgctgctccttccttccaaaaagctgctggcccaagcagaccatacattccttcaccaatccaacaacagcaacaaccccagaaacaaccaacagtttaggcccctccacaaccttccctcgaagaacttgtgaggcaaatgactatgcagaaca

SEQ ID NO: 822 - DNA, 707 bp, Glycine max
  unsure at all n locations
ctctagcttcatgatgaatcaagattgattcaaagagttttgatgatcacaaagatgatgacaaaaggctcaaaagtcaagaacacttcatgataacaaagatgatgatctcaagaatcaaagaatgagttcaagattgaatcaagtacacttcaaggatcaagaggaaagttgaattcaataatcaagaatcaagtttcaagattcaagctccaagaatcaagatcaagattcaagactcaagattcaagaatcaagagaagactcaatcaagataagtattaaaaagttttttcaaaaactaagtagcacatgaatttttctcaaaaaccttttatcaaagagtttttactctctagtaatcgataaccaaattattgtaatcaattaccagtagcaaaatttttttcaaaaagctttcaattgaatttacaatgttccaattgatttcaaaatgttgtaatcgattacaatgatttggtaatcgattaccagtatgtttgaacgttagaattcnatttaattgtgaagagtcacatcctttcacaaaatagctttgtgtaatcgattacactgatttgggaatcgattaccagtgatagtttctgaacaaaatcaaaagatgtactctttccatagttttcaaggttttctaaaagtcataacttttccaaatggtttttaagtttttctaaaggttataactc

SEQ ID NO: 823 - DNA, 629 bp, Glycine max
agcttgaaggtaaactagatgccttggttaacctggtaacccaactggccatgaataaaaaatctgcacctgtcgccagactctgtggtttatgctcctctaccgatcaccacacagaccttttcccttctatgcaacaatctaaagccattgaacaacctgaagcttatgctgcaaacatctacaacagacctcctcaacctcagcagcaaaatcagccacaacagaataattatgacctctccagcaacatgtacaatcccggatggaggaatcatcccaaccttagatggtcgaatccttcacaacagcagcaacaacaacaacaaccttattttcaaaatgctgctggcccaagcagaccatacgttcctccaccaatccaacagcaacagccccagaaacaacaaacaattgaggcccctccgcaaccttcccttgaagaacttgtgaggcaaatgactatgcaaaacatgcagtttcaacaagagaccagagcctccattcagagcttaactaatcagatgagacagttggctacacaggtaaatcaacaacagtcccagaattctgatagattaccttcttaatctgtccagaatcccaaaaatgggagtgccattacattg

SEQ ID NO: 824 - DNA, 640 bp, Glycine max
  unsure at all n locations
ttcaataacccttcccactcacttacaggaagcaatgaatgatgaagggaacaaagttaacttgtcataaaaagtttgtgttctatttaatgtaactatgctaaattttccttatcataattgtcatgatgtagaattgtagttgattcagaggaattttttatttacattttatgcatacaatgcaatttgtcatccatactcctatctattcactgataataataaaaaaatactcctaagtcctatctattcatttaacataaaatttctaaaacgagaattattaggttgccgtttcggcggtttggttggctttattgtgtcgtgcaacacttttgtatgtcccctccttcaatctaagacgccacgacatagatattcaattcagttttcactttaactttgtattatactctcaagtctcaatcttttaaattatttttatttggtgtataatgccagcaacggaatttgaacttaagacctgaaaactacttgaatcctccaccactagtttgccttttcaattatttgatctttatctttcgctttcctcttatttctaatattntttttctttatatttctttaaaaatattccaaatccatttatgtatgatcaatggaacttaataat

SEQ ID NO: 825 - DNA, 632 bp, Glycine max
agcttgaatgtccaaagagcaaagtctccaacaaaaatgtagaaaaaattaacattcaattaaaccaaaaaccctaaaaatgtgaaaacacgtcttagaattctgcatagattttagattaatatgcaattttgaatatgtgatatatgtgaaaggaacttttaatcacaccgtaagttataaaacaatattatttagttgaaagttatagaatggtataataattgtcaatgttacactggtgtaatttgatccttccttatatattaaagttttagaactccccttgagtccaacatcttttatgtatgctcagtaagatatataagatcaaagtggacatgcatacatatgtaaaaagcatagttaagaggcgaaattgaataatccaaccaactcatttataaaagcaacataacatatgttacaacatatatattacaacaaagcatataaagatgaaagataagtctaagctcatgatacatcaaaattccaatttctccctcttatgtaatcaacaaatacaggtttgaaagatggaaaatgataaactatcattatcatttatggctgctgaggtggatcttcatttcgtggtgaatttggatgtggatgttaaagttgatcat

SEQ ID NO: 826 - DNA, 548 bp, Glycine max
tgtaatcgattacacacatactgtaatcgattaccagaggagtttttcagaaaacattctcaacagtctcatctttttatctgattcttaaatggccatcaaaggcttatatatatgtgacttgagacacaaatttgaaaagagttttcaagaacaaaaaggtcttatcctcttaaaaagcaaaatagttttatcctcttacaaattccttggccaatacacttgtgattcaataaggaattatttgagtgctcaaaatgttcaatctatctctttcaagagagattacttcttctcttcttctttattctgaaaagggattaagagaccgagggtctcttgttgtgaaaagaattctaaacacaaaggaaggattgtccttgtgtgtttagaacttgttaaaggaatttacaagatagtggaactcccaagcggattgcttggggactggacgtatgcacaaaggtgtggccgaaccagtataaatctgagtatgcactttctcttcccttaaactcctttatttattattgatttatattcatatt

SEQ ID NO: 827 - DNA, 544 bp, Glycine max
agctttgatacttacagctgatgcaataaccactgtctgcccaacttcaaggccatttattccagcatgtatattgatggaatttgtgcaaaaaacagccaagagccccatatatagtttatacatccatcctgccccataaaacaaagtcaaaatagtgaatctttacagtaattagtaataactcctcaagtatcatttacataaaggtacaccatcaatatggaagctcagaaatgacattatcttcaacaatcatccttttgtcatatcgaggctgttggacaatacaattttcctctcttggtcttggatgagggggtgggaaaaggattttaatgttccttttcaccaatggtcttcatctatggctttggtttttaagtagtgatagtgttgttgggttgggttgaattgtttctgctgggatgttgcataattttatttacttttctgtcccaggagaacctacctcctgtggcttcttgtaatacctctggtactatgtatcttctattctataaaaaacttcgtaccccattgc

SEQ ID NO: 828 - DNA, 536 bp, Glycine max
tgcatgatttacagaatttgtcttttatatttaatatcttgttttattttataaagaaaataattatttttatcattgtttgatataatatggtctctatttataaatcaagacatctagtttccttattttccaaaataagcaattttagtcctatcagttgaccatccaaagtctaatgttgacttctatgtgacatattggtgctgatatggaacttatgtatgcaaatgacatgacacttatgtgaaaaaaaattaaatgacgtgaataataaaaaaacatcttaatatgaattaaacttgtgaccctttattcatagacaatggaataaactactaatatactcaatttgtctacctaaatatattactattattctctatgtattcaatagtcaagagttatattttttttgcagattatcaaaatctataaattaaaaatatttaatatataaatctttttaatcctataatatataaatttatatgtttctattttgaataatttaccatctaatttttatttttacc

SEQ ID NO: 829 - DNA, 362 bp, Glycine max
agcttgttaaacgattctatgaaccatactttgttttggaccaaattggcaaggttgcatacaaacttctattgcctgaaagatcccgcatttctcctgctttccattgttccttccttaaacccttccaccaatcatctgaagaagattgtgtcccactagcattgccttccaatgatgttgaaaatcaaccagttatctctcttttaaccattctgggcactcattaggcctctgaatctactgatccaaagctaaggtattaattcaatgggcagggttgtctcttgatgacattacatgggaagattgtgaaaaactcaagactgtctatcaccttgaggacaaagtgtttttttgat

SEQ ID NO: 830 - DNA, 496 bp, Glycine max
ttggtcctattcaaatagccataacttttgacatgggggtactattgaggcccatgatatatcgagaggctcgaaattgaaaaatggaagttctcgagaaattcaaatggtcataacttttaacttggatgtccgattcacgcacataatatatccagacacacaaaattgaaaaatggaattctcgataaattcaaatgttcataacttttgcctccaatgtcagatttaggcgcataatatatcgagacgctcgaaattaaacaagaaagctctggtccaattcacacggccataacttttgacatgagtgtatgattgatgcccatgatatatagagacgctcgaaattgaataatggaagttctcgagaaattaaaattgtcataacttttcactcggatgtccgattcagacacataatatatcgagacgcttgaaacctaacaaggaagctctggtcccattcagagggccataacttttgacatgggtg

SEQ ID NO: 831 - DNA, 576 bp, Glycine max
  unsure at all n locations
tgaagganaacttgatgccttggtccacctagtaactcagcttgccatgaataaaaaatctacacctgttgcaagagtctggggtctatgttcttctgcagatcaccatacagatctctgtccttcttttgcagcaatctggagtcaatgagcaacatgaagcttatgctgcaaacatttataatagacctcctcagcagcaaaaccaacaatagcagaataattatgacctttcaagcaatagatacaatccaggttggaggaatcatccaaatttgagatggacaagtcctccacaacaacaacagtctgttcctcctttccaagatgctgctggtccaagcaagccatatgttcctcctccaatacagcagcagtcacaataaagacaacaagagactgaggctcctcctcaaccttacttagaagagttaatgaggcaaatgaccatccagaatatgcaaattcagcaagagacaagagcctccatttagagtctgacatatcatatggggcagatggctactcagatgaaccaagctcagtcccaaaattctgacaaattgtcttcacaaa

SEQ ID NO: 832 - DNA, 389 bp, Glycine max
tgaccaggaattatttgtatgggtcgaatgttgaattccggttgttcctggcgcggagatgatggtacagcgggtgaaccataatcggaagattcttttggtgaagtagccatggaaaagcagagcgtttggaatgatttcgtaaatctcagaaggctattgggaaatgctggtataaacacgaatgccaagcagatataaatttgaatgaggaatgtacagggtcgtgtgaagcaacggtcaaattttcctgggttcattagagaacgcgctataaatgttaagagatccgttggggcactttcacattgctggaggtgctataatccctctagcacacaaatgcccatcttgcccctcagtttttcaaactgatgcgcctccaaagc

SEQ ID NO: 833 - DNA, 194 bp, Glycine max
agcttccgttgttgtatttcgagcgtctagatgagttaggacagcgagtcggacatcctgtgaaaagttgtgaccattctaagctctcgagcgcttccgatgaacaatggccagcgtcatgatcataaatgatgctgaaacagacatccgagagatatgtgctgaccattctaccctgtgcagagctttcgctg

SEQ ID NO: 834 - DNA, 610 bp, Glycine max
  unsure at all n locations
tttcttctggttgctcggctagggtttccaagcattagagagaaggagaagggattggagcctcaatttcattgtctccgtgttgaatgcattgctctctctacagacattatttcccaaatctcaacggtgagaatgtgaggaaatgagttctaaaggtggtatccaaatttcatgatgatccaatggttaaaaggtttgggatcatatttttactgagatagatttgagtgtatgcgggaaagaaaagaaggttttgggagaggaaaaaaggaaaacgaatttgagaggaaaaaagagcatagagacgtatcgtaaatattaaaattgacctaatatgtctctatttatagctggactactctcagcctattatttactttatttttctttattttattattttataaaaagaaactctattttactctctcattgaataaataaccaattaanatatctttatattttctaaaacatcattttactctatttgctttctaatgctatgaaaccattattttaattaaaaaaaacccttttccctcaattatngtaattctaaaaactctataaattttagataaatctctatttattttacgaaaaa

SEQ ID NO: 835 - DNA, 423 bp, Glycine max
  unsure at all n locations
tgtggtgcaaaagattacatctatacaaaggaatttttgatggggcagcctccaagactccattaagattccttgggtgaggtgggacatagtctgcctacctaagagtaaaggtgggttagggatcaaagatttgattaaattcaacgaggctttgcttgctaaatgggggtgggagttggcaaataatcagaatcagttgtgggccacaattctattgtgtaaatatggtggttggagggatttgatttctcataggaactgcagtttagactctccttggtggaaagacctcaaggttatcttcaagcagcagcaaagcaacacaatttgtaaaaatagctttatttaggccatangtaaggacggtccatggaatacaaaccaagtacttattggcttgacaacaaaaaaaacactcat

SEQ ID NO: 836 - DNA, 470 bp, Glycine max
agcttcaaaggcttagacaagggagtataagtgttgaagaatatagaaaacaaatggaactactccttttaagagctggacttagggaggaggaaagaacaagcatagctaggttccttagtgggcttaatatggaagtgagggacaaggttgaactccttccatatatggacctagatgagctagtccaactttgtataagagtggagctacaacttaaaagaaagtcttctttaaaatcttaaggctttcactcttatccaaggaaggaccaagcccaaggaattttggaggctgcaccttgaaaacccaaggaagataagggtaagaccatagagaaatccacccctaagactagttcccaagaaaggactagcaacataaaatgtttcaaatgtcttggcagaggtcacattgcctcttaatgccccacaaagaaaaccttgattatgaggggtgaagacatttat

SEQ ID NO: 837 - DNA, 581 bp, Glycine max
agcttggaggaagaaggagatgaatgaagggagagggagagaagaacacgaaattttgtgctctaagagagctctgaaatttgaagtttaattttcaaatgatcaaagtttaaaaaatgcacacacatgacctttatttatagcctaagtgtcacacaaaattggagggaaatttgaatttatattcaaatttcacttgaatttgtggagccaaaatttcactaattatgattaatgaatttttgctatgggtcagcccactaatccaagatcaagtccaagattaagtgtgcttaggtgtcatcagacatgtaaagcaagaaggacatgcacaaagtgtgactatatgatgtggcaatggagtgtagcaagcaaatgctcacctccctttctaaaatttaattggattgggcttctcccaattctattaaatttatttctcaacacacacatcaaatattcacttaatgcatgtgaaattacaaaagtacccctaatacaaaaactagtctaggtgtcctaaaatacaacggttgaaaaatcctacttttctagggtacccttccttcattatggatccc

SEQ ID NO: 838 - DNA, 506 bp, Glycine max
attcaatggttcagatgcagctgcataagtggagtctcatcctgatgatgctcgtgtatatatgctgacccatcctaaataatttgctgtggtaagtggatgctactcttatgaacttgtgttccccctttaatataaggaaaatgcacttttcatgatcattacatgtgctgatttttcaggttgatcttgatccttatggctcaccttcagggtttctggatacatcagatcactctactgctgatggaggtatgctgatgtgtactgcaacaaacatggctgtgctctgtgggggaaatggggaggtctgctattcaaagtaatgtgcatactcttattcacaatcaactttcattttgtttgattggtggactgaacttttaacaactgctattcatactacatatggatcatacccattgagagggaaatcttgcccttcaaatggctttgaggaacaagccggcctgcattgacgtatggtatataacgcagaaactctt

SEQ ID NO: 839 - DNA, 512 bp, Glycine max
tacctgctgccaattcagttcccaaggctaacaacaatctcattactattaagtctgcgacgtcttgtaataacaaagtcattgacatttggcatttccatttgggtcatccttcatatgataggatgcaattgttctaacaaacttatcctatgttgacttgtgataaaacctttgtttgcgatacttgccctagagcgtaacagagaaaactttcatttcccaatagtgactcataagcttctagtcctttcaattttatacatgtagatatttggggtccttgtgccacaactgctttgaatggacataagtattttcttacaattatggatgatcatactaaaatggattggatttttataatgacttcaaaagttgagactcaaactcatttacaagcctttgttgcctatgttgagaggcaatttaatacaaaaatgaaagctattcgatcagataatggtgctaagtttatcatgaaacacgtttatcataatactggtatcata

SEQ ID NO: 840 - DNA, 572 bp, Glycine max
  unsure at all n locations
agcttgtaatcgattacacaaatcttgtaatcgattaccagaggagaatttcagaaaataatttccaagagtcacatctgttcaaatgattttttaatggccatcaaatgtctatttatatgtgacttggaacacgaatttgcttagagttttttagaacaaaaaggtcttatcctctcaaaagaaaaatcatcttatccacttaaaaattccttggccaatacacttgcaattcaataaggaattattttagtgctcaattgttcaatctatctctttcaagagagatttctttttctcttcatcttatttctgaaaagggattaagagaccgagggtctcttgttgtatagcaatctaaacacaaaagagggtttgtccttgtgtggtttaaaacttgtaaagggcttttgcaagatagtggaactctcaagcgggttgcttggggactggacctangcacaagggtgtggccaaacttgtataaatctgaatttgcaatttttttcccttgaacccttttattggttaatgcttattgcttctattcagaaagtttaaattcgcataat

SEQ ID NO: 841 - DNA, 603 bp, Glycine max
agctttgggggcatatgtactttaagtgagagataatatataaaaaaattggaataataattaatattacgagtaaataacatatacaaagatgattaatttttacataatcaatcacatattatcatataatgtaaattgattgatagtaataataaaaatataaaattcatattaattatgatttaagttctaaacattatagatgatatgataaaaaaaatgtgtataaaaatgagaaattaagcaataatgagagaaaataaaattgaataatgaaagagagaaagagtgtgaccgtcacagcttccaatagattggtgttgtcgtgcaagtacttgaggacccatgttagaacacttgctgtggtgtcatgtgcagcaaagatgacaccaatgagattatcaacaacttgagaatctgtgtgctgctgatagtacatcttgttcttctcacctcgagcttgcaatagaactcccaatagccccccaccataatttaacagattatagactcttataattacatttcaacagaaaaacccaagtcagtgtgaccatcaacaaatgttacatattatatataaccagtgctggataaaaa

SEQ ID NO: 842 - DNA, 606 bp, Glycine max
cttctggtgggacatcttgacttgctttccaatctgacattcatcacaaattctgccttcttctattttcagattgggaatgcctctaacagcacttttgtcaaggattttcttcatgcctcttaagtgcagatgtcccaacctttgatgccatattctgacttcatcttctttggaggataaacatgtggaggagtacctggtttcttggggtgtccataggtaacaattgtcctttgatctgctgccctctattagaacttcactcttctcatttgtcaccaagcattctgactttgtgaaagttacattgaatccttcatcaaacagctgactgatgctgatcaagtttgcagtcagtcccttcaccagcaatactttgttcagactaggaagtccatcatgaactacctttcccattccaatgaactttcctttagagccatctccaaatgtcacataactagtggagcccggctcaatgttcaccaggaattctttgactcctgtatgtggtgggaacaaccgctatctaagtacccatcttccttaactgatgctctaatggaggatgaacaacaagaatgaagtcttgtgtttaggaac

SEQ ID NO: 843 - DNA, 605 bp, Glycine max
  unsure at all n locations
tattctttatctagagtagttgagcacaacaacttactactgacatatattcgactttagtagtggacaatgtagttgagccttgcatcttgcatattcatgttactaagttagcaccgataaagtaatagcttccactagtgctttttctttcaactttatcaccaacatagtcaacatcataatagcttgtaagtctgaaactttctcttcttttgaacataagaccaagattagaagttccaattaaatatctacaaatatgtttaattttagttaggtgaacttccctttgttctttttgaaatcttgcacatagataaacattgaacataatatcagaaatggatgcagtgagatagaccagtgagttgcatccactttttttgatccttgtccaatccaaggtatgtcatggtgtgcattggagtcttcatttcttttcatcgcccatgttgaatttcttcagcaattctttcacatacttagtttgatgaatgtagatgcatttggctttttggtttatttgtaatccaagaaagaatntcatctctcccatcatgctcatttcaattttgtctgcataagcatagaaaaatcttcat

SEQ ID NO: 844 - DNA, 529 bp, Glycine max
agcttgacagtgtttgatgcatcagggaacaatttcactttagaagtgggtcctaattggattcctaattttcaacttacctatttggatgtgacatcatggcagataggtcccaactttccgtcgtggattcagtcacaaaacaaacttcaatatgttggactgtctaacacggggattttagattttattcccacttggttctgggaagcacattctcaggttttgtatttaaacctctctcataatcatatccgtggtgagcttgtgactacaataaaaaatccaatatctatccaaactgttgatctaagcacaaatcatttatgtggtaaattaccctatctttcaaatgctgtgtataggttagacctttcaaccaattcattctctggatccatgcaagattttttatgtaacaatcaggacaaaccaatgcaattagaaattctcaatcttgcatcaaataatctatcacgagaaatacctgattgttggatgaattggccatttctagtggaagtgaatt

SEQ ID NO: 845 - DNA, 548 bp, Glycine max
agcttgtagaactccccaaaagaaaatcagctattggagctaagtgggtgttcagaaacaagttggacgaaataggtaaagttgtgaggaacaaggctaggcttgtagccaaaggaaactcacatcaggaaggtataaattatactgagacctttgcttttgttgctcgtttagaggcaatacggattctactatcctttgtttcccattatggtatgatgttgtatcaaatggacgtataaagcgcattcctcaatgctattattaaggaagaattctatgtggaacaaccccctgggttttagagttctatttaccctcatcatgttttcaaacttaataaagctttgtatggtttaaagcaagctcattgagcttggtatgaaaagttaagttccttcttaactgaaaatggttttataaaacggaacgttaacactatttttttttgcaaagattatataaatccattcctaattgtccagatatatgacgatgatatattatttactgcttctaatgactttttgtgtgaggactctttcaaa

SEQ ID NO: 846 - DNA, 589 bp, Glycine max
agcttgaagacaagactatacgaggtatcttccttgggtatagcaatatctctaagggctaccgtgtctacaacttgcaaactaagaaactcgtcatcagtcgagatgttgaagttgatgaatatgcttcatggaattgggatgaaaaaaaagtggagaagaacgttcttatacccgcttaactacctcaagaagaatatgaggaagaagatctaggtgaaccaccttcacctacatcacaacaacaagatcaagaactatcatcaccagagtctactccaaaacgagtaagatctttggtggacatatatgaaacttgtaacttggccatacttgaacctggaagctttgaagaagcgtcaaagcacgaagtatgggtcaaggcaatggaagaagagatacagatgatcgagaaaagcaacacatgggagttagtaaatcgtccccatggaaaagatatcattggggttaagtgggtctataagacaaaagctaaaccctgatggcaccatacagaaacaccaagcgaggcttgtagctaaaggtttctcatagcaacccggaattgactacaatgagacatttgccc

SEQ ID NO: 847 - DNA, 525 bp, Glycine max
tggtgcatatgatttatatgatctcacttacagggggcttgttataaacttgaattgtcatgaaccaactcttgtcaaagaattaactgttaggctgttaagtgaagacacacatggctttatgttatatatctaacaataatgaatctattaatatagcttacaagttcattatgcatacaattttaggtccaagtcattgcatatattttcatgaacgaaatcaggacctgcatattcattattagattcatatataaatttttgtccgtacttccatagtgtccattgacacatttttagcatatgattctcttttctatctttttctccacaacaatgagcccaaggagcagagttttcttatgagcatcaatcaagaacgttcaattatttatattacatgatagacaaactaaatttagtttattaatattgaacacttttttggataatagaaataattttaatactttaaccaggtcatttttatttgtcttagaataggcattatgtgcactttct

SEQ ID NO: 848 - DNA, 468 bp, Glycine max
agcttctctcttttcttgtttaattattatattttgtttttaagtcttgtattttgctatgtttttatggcatttgaacacttagtatttctttttaatatttgttgagtatgactgaacatgataattatatttacttgcttttggttgtttatggttatgaattttaaacttaattattttgataatatatgatcagtggtatgtttgatcaaatattaattatgttatttgataatgtggttttttttatatatttgatctatttatggttcttgctatgatttggtttatatttttccatgaatgattgtatggatgcttaagttatatttgtatgtttttaatttgttacgcactttggcattttgttgatgcccaagggggagaaaaatatggattaaatcaacaactcacacgagtaatcaacttactttttagagaagcattaattcaaaaacaaagggg

SEQ ID NO: 849 - DNA, 572 bp, Glycine max
agcttctcatttgatctaacagagaaggagcatgcaacctatttcactcaagtcacacccacggaactctggcacaagagacttggtcattgccatcttgaaagaatgctaaacatgaaaaaaaggacatgtcaaaaggtctaccaatactttctgatagtttgccaaactataatgcttgtcaatttggtaaacaaaatagaaaatcattccccaaattagcttggagaacctctcaaaagttgcagctaattcacactgatgtggcaggacctcaaagaacaccatcactacaaggtagtctctactttattcttttcatagatgactttacaagaatgtgctggattttttttcttgaaattcaagcatgaagtggctgaagttttttgtaaattcaagaaaatggtggaaacttcaagggacctgaagattcaatgaaaatgggaaagaatatccatccccataattatttactttggggaacaccttggtttgaatattaactcacagccccctaccctctgaacattggggattttgaaggattaacaattcattgttgggaaggc

SEQ ID NO: 850 - DNA, 528 bp, Glycine max
agcttgaaggcaaactggatgcgttgatcaacttggtaacccagctggccttgaatcagaaatctgtacctgtcgcaagggtttgtggtttgggctcctctgctgaccaccatacagacctttgcccttccatgcagcaacctggagcaattgagcagcctgaagcttatgctgcaaatatttacaatagacctcctcaacctcagcagcaaaatcaaccacagcagagcaattatgacctttccagcaacagatacaaccctggatggaggaatcaccctaacctcagatggcccagccctcagcaacaacaacagcagcctgctccttccttccaaaatgctgctggcccaagcagaccatacattcctccaccaatccaacaacagcaacaaccccagaaacagccaacagttgaggcccctccataacctttcctcgaagaacttgtgaggcaaatgactatgcagaacatgcaatttcagcaagagaccaaagcctccatttagagcttaaccaatcagatgg

SEQ ID NO: 851 - DNA, 589 bp, Glycine max
agcttcttagtttcagatgatgcagatgggtttgtagctacctcatgcactcctctaatgactatggcatcatttctggcgctaaactgctgggagttggaagccatcttctcaattaaatttctggcttcagcaagagtcatgtctccaagggctccaccactggcagcatctatcatacttctctccatattactgagtccttcataaaaattttggagaagaagctactccgaaatctgatggtgggggcaactggcatatagttttttaaatctctcccagtactcatacaggctctctccactgagttgtctaatacctgagatatccttcctgatggctgtggtcctggaagcagggaaattttttttctaagaatactctcttaaggtcatctcagcttgtgatggaccttggagcaaggtaatacagccagtcctttgccactccctctaatgaatgaggaaaagccttcagaaatatgtgatcctcttggacatctgggggtttcatggtggagcagacaatgtgaaattctttcaaatgtttgtgcgggtcttcacctgcaaggccatgaaactttgga

SEQ ID NO: 852 - DNA, 603 bp, Glycine max
aacatgatcacgcttattaattactcagttttatttcattttgactagaatattttttttaagaatgaattttgactagaaaattaatcacatatttatgtttatctttacatttatatacatacaggacatatcatatgagagaaatatatattatatgagagtgagaaaattaaatctaatccatataactaaaatattgatcatcatcatttaatgtcatttgaccccttaagaaatcatgtgactttttgacattaaatcttaattttttatatatgattatataattcaaatttaatcatttcactctcatataatatgttttctcttaaaagatatgtcatatatatataaaaggagaagggtgggatatttttacatataaaaggagatggtgaaggtagttttgaaagaaaatcaaattcatgaggatcactttaatttatgagaaacacatttcattatgttaattgtcacctaatgtaaattcaagatttgggttaaaacaccagggaataaaaataaaaattttaatatattatgtacttaaaacaacaaaaaaattattttggactcagaaacaaaatcccttctttatta

SEQ ID NO: 853 - DNA, 539 bp, Glycine max
tcttgaacgtgatcaatatatttattggcacagaataaaggatgaagatgtggttcgtgatatcttttggtgtcaccctgattcactgaagttagtcaacgcatgtaatttggtgtttttgatagacagcacctacaaaacaaaccggtatagactcccattgctcgattttgttggggtgacaccgactgggatgacattctctgccggttttgcatatgtggagggtgaacgcgttaataattttgtatgggctttacaacgcttctgaagcctttttttaaagcgtgatgccctccctggagttattgtcactgatagagaccaagcattgatgaatgtagtgaaagatgtattccctgaatgcacaaatttgttgtgcatctttcacataaacaagaatgtgaaggccaaatgtaaatcactaattgcgcaaaaaaatgcttgggattatgtcatggattgctggggatctctgactgattgtccttcaaaacaacagtttgatgaatgccttgaataagttcgaaatagcttgc

SEQ ID NO: 854 - DNA, 558 bp, Glycine max
tgtgcatgggaaaatagttgtttgtgaaagaggtaaaaagggaataactaagatgggagaggtagtgaaagtggcttatggggcgggaatgatagtacttaatactaaaaatcaagctgaagaaatttatgttgatcttcatattttgctagccacttccttaggagcctccagtggtaagactattaagacctatattctatctgataagaaaccaacaacttcaatttcctttatgggaataaagtatattgaccctgcaccagtaatgagagcattttcttctaaaagaccaagtatagtgggactagatgtgactgacccaactgcgaatatcttggctgctcggccactaaaaactaacccaagttttatcatgaatgacataagagaagtactatttaacattctcttaggtgcttcaatgtctatgcctaatgttagtggcatagcaacactttttaaatatttgcacactgattggtcccctgcagctatcaaatctgctttgatgactactgcttacacattgaacaacagaggagctgcaatttcata

SEQ ID NO: 855 - DNA, 619 bp, Glycine max
tctagaatctagtgttttgcgaaatcaaattggaatttggaacagtgcgacgttgctcatgactttgaggtccctcaattaaaggtttagtgtaacatttgagtgagtaatttcagtgtaaactggaaaattaaatgtatagtatacttgtatacatttagttgtaattgtatagaatttttagtaaaagagaaccaaaactaatataagattaccagaaatgttaaaactaaaatatttaaaatgcaaaacacaagatacaacatttcacttgttattaaataattatgaacaaagtcactgagttgaaaaccaactctaattatacataacacaactcaacattcaaagttgtaaaaccccccaaaagtaaaacataagtcatccttgaaaagaataaatgaaaatcaaatctaataaaattgaaatacgtaatatattatatataataaaattgtctagttcaaaaatgatagtagaatcattcccaacatcatttctcacaaaatacaccaaagagttataaacataagtttatagagattgatagagtataatgtacttaaattacaaacaaatgcagaatagaacagagttagattttggatttgggaactca

SEQ ID NO: 856 - DNA, 503 bp, Glycine max
agctttatcaaatggatgtaaaaagtgaattctcaaatggctttattcaagagaaagtatatgtagatcaaccccctggatttgaaaactcagacaagcccaatcatgtttttagattaaaaaaggctttatatggcttaaagcaagcccctagggcttggtatgagcgtctaaataagttccttttagaaaaggatttctctagaggccaagtagatactactcttttcataaagagaaaattacatgatattttattggttcaaatttatgttgatgatattatttttggatctactaatgaattattgtgcaaggaattctctcatgacatgcaaaatgagtttgaaatgtcaatgatgggagaacttaatttctttcttggattacaaattaaaaaaaccaagactggaatttttgtcaatcaatccaagtactgcaaagagttaattcacagattcaggatggaaaatgctaagcacatggctacaccaatgagcact

SEQ ID NO: 857 - DNA, 401 bp, Glycine max
agctttgagccaattcaaacgacaataaatttttactcggatgtctgattgagttcaataatatatcgagacactcgaaattgaataccgaagctctgagcaaattcaaaagacaataactttttactcggatgtctgattgagtctcgtaatatatcgagacgctcgaaattgaataccgaagctatgagcaaattcaaaagacaataactttttactcggctgtctgattgagtctcgaaatatatcggaacgctcgaaattgaatatagaagctctgagcaaattcaaacgacaataacttttttttcggatgtctgattgagtcccataatatatcggaacgctcgaaattgaatgtagaagctttgaaccaattcaaacgaccagaactttttact

SEQ ID NO: 858 - DNA, 455 bp, Glycine max
agcttgtaatcgattacacacatactgtaatctattaccagaggagattttcagaaaatattctcaacagtcacatcttttcatttggttcttgaatgggcatcaaaggcctatatatatgtgacttgagacacaaatttgctaagagtttatctgaacaacaagtgtttattctctcaaaaagcaaaatcgttatatcctcttaaaaattccactggccaatgcaattgcaattcattaaggaatcatttgagtgctcaaattgtaaaatctatctcttcaagagagattcattcttcttctctttctaattcactaacggattaagagaccgcgggtctcttgttgtaaaagaattctaaacacaaaggaaggaatttccttgtgtgtttagaacttggaaaaggaatttacaagatatggtaactctcaagcgggttgctatgggactggac

SEQ ID NO: 859 - DNA, 620 bp, Glycine max
agcttgtaggtaaactagatgccttggttaacctggtaacccaactggccatgaataaaaaattttcacctgtcgccagactctatggtttatgctcctctattgaccaccacacagacctttgcccttctgtgcaacaatctgaagcaattgaacaacctgaagcttatgctgcaaacatctacaatagacctcctcaacctcagcagcaaaatcagccacaacaaaacaattatgacctctccagcaacaggtacaatcccgggtggaggaatcatcccaaccttagatggtcgaatccttcacaacaacagcaacaacaacaatagccttattttcaaaatgctgctggcccaagcagacatacgttcctccaccaatccagcagcaacaacaacaacaacaaccccagaaacaacaaacagttgaggctcctccgcaaccttcccttgaagaacttgtgagacaaatgactatgcaaaacatgcagtttcaacaagaaaccagagcctttattcagagcttaactaattaatgggacaattggctacatagttaaatcaacaacagtcctaaaattctgacagattaccttcttaatctgtccagaaatcccaaaa

SEQ ID NO: 860 - DNA, 532 bp, Glycine max
agcttctggtgggacatcttgacttgctttccaatctgacattcaccacagattctgccttcttctattttcagattgggaatgcctctaacagcacttttgtcaaggattttcttcatgcctcttaagtgcagatgtccaaacctttgatgccatattctgacttcatcttctttggaggatagacatgtagaggagtagctggtttcttggggtgtccataggtaacaattgtcctttgatctgctgcccttcattagaacttcactcttctcatttgtcaccaagcattctgactttgtgaagtttacattgaatccttcatcacacagctgactgatgctaatcaagtttgcagtcagtcccttcaccagcagtactttgttcagactaggaagtccatcatgaactagctttcccattccaatgatctttcctttagagccatctccaaatgtcacataactagtggagcagggctcaatgttcagcaagaattctttgactcctgtcatgtggctggaacaaccgc

SEQ ID NO: 861 - DNA, 591 bp, Glycine max
tgactcatttatttaaacaaacctaattataagcttgagtttggcttttttgaaaaaactaaagcatgagcttgagcttgaatggtttagctcatttaaaatttgattattttttaacttgcaaaaaaattattaaatcattttttaactgtcaatttattatttaataaaatattttaatactatgtaataatctacaaataaaatatgtgttaaacatatgatatgatattgtagaatctatgtaattttaatttttatattctatttataaacgagctatttatgagttattaatgtcaagcttgtaaaacttaggcttagcttgagtttgtttatttcattaaacaaacgagtttgatggagcatttagcaagttgaactcgagaagttcacgaataacttgactcatttacatctctatctagaaatacttttgaatttttaattaagtgtcgcattatatatagattgttaacatagtggtaataaatgacatttgtttatagtgataactattatttatggtgatgaaaattgaatgaaaaataattttcatttatagaaataagaaatattatattttatatt

SEQ ID NO: 862 - DNA, 501 bp, Glycine max
agcttctgacgagtgattatcgatcctctcatcaccttcaataatatctttgactatatatataattgatattttttcacaataaaccactaaaaataatataacttatagcacataatcaaaacactacgatttgaaacattttttcagcaatttattttatcccgtgattttaaactgctaccaattttaaatatttttgttcacctgttactatagtctttatttaaagaaccttgctatttggtacgaaatatacacgctagaaagtagctaagacatacctgaaccaatcacggttgtatggggtcacttaaaatctgatgattaatatttttttcttcaaaaatacaatttgtaactagtatgtaattttttcgtacaatattcatctttttcgttattataaatactcaaggacaaatatggtacatcataaatgaagcccacctctgtcagtataataaaaaattctaacacaagtgaataagatcgaggaca

SEQ ID NO: 863 - DNA, 617 bp, Glycine max
  unsure at all n locations
tcacagcaaatgatagaatgtctatagttttatcatttgacaatttattgttattatatgtcttatccttcatatatatagactcttttttttcatctttttcaactgtgaatttttacataattcataaattttatttgataccttgcatagcattgcatttagcaaatacaatttaacatgcttggtttataagtattgacacaaaaaaggcttatgaaaataccttgtattgcatgttgctagggcttattaaaaatatcaaataattttacatgtgtctgtgaaatcagacttattaatgatgcgataaattatgtaactatcatgtctctcgttgatgttgctaaaaaaattgtttatgaagtatagggattaaaagtgcattttgcaaaaagtttaaagatcgagaacataattaacccattaaattattatcaataaaataaccttaaatntaaaatacaaacataggtacatgtaatntatattatcaattattgataaaaaaaaatataataatgtttatgtgaacaaaatatttttttgaccaaaaaataaacgcatgttttttatattcaaaatcattttacagttaaatatttaatggttataaa

SEQ ID NO: 864 - DNA, 377 bp, Glycine max
ttgacagaaatccgacatcgtaacattgtaaagttacatgggttttgttcacattcacaatactcatttttggtgtgtgagtttctggagaatggcgacgtcaaaaaaatttttaaagatgatgaacaaacaattgcgtttgattggaataaaagggtggatgttgttaaaggtgtagcaaatgctttatgctatatgcatcatgattgctcacctccaatcgttcatcgtgatatatcaagcaagaatgttcttttggattccgattatgtagctcatgtcttagacttcggaacagccaaattttttaatccagattcatccaattggacctcctttgcagaacctttgatatgctgctcccggttaatttcctt

SEQ ID NO: 865 - DNA, 612 bp, Glycine max
  unsure at all n locations
tcatgggagagtcaaagatcaaattgagaggaaaaataatttctatgctaaacaagccaacaaaggaagaaagaaggttgtcttcgaacccggagattgggtttgggtgcacatgagaaaagaaaggtttccggaacagaggaaatcaaagcttcaacaatggggagatggaccatttcaagtgcttgaaagaatcaatgacaatgcttacaaagttgagctgcccggtgagtataatgttagttccaccttcaatgtctttgatttacctctttttgatgcagatgtagaatccgatttgaggacaaatccttctcaagagggagagaatgatgaggacatgaccaagagcaagggcaaggatccacttgaaggacttggaggacctatgacaagggctagagcaaggaaagccaaggaagctcttcaacaagtgctgtccatactatttgaatacaagcccaagtttcaaggagaaaagtccaaggttgtgagttgtatcatggcccanatggangangactaaatgacaccactttgtctcaatttttagagtgtttagtttgtctaaataatggcccaatccttgtaaagttgctgaccaaaaatatg

SEQ ID NO: 866 - DNA, 555 bp, Glycine max
agcttatgaccattcgaatttctcgagagtttccgttgttcaatttcgagcgtgtagatgagttatgtccccgaatcggacatctgtgtgaaaagttatgaccattcgattttctcgagagcttccgttgttcaatttcgagcgtctcgatatattatgaccccgaatcggacatctgtgtgaaaacgtatgaccattcgattttctcgagagcttccgttgatcaatttcgagcgtctagatgagttatgtccccgaatcgaacattcgagtgaaaacttatgaccattcgaatttctcgagagcttccgttgttcaatttcgagcgtctcgatatattatgttcccgaatcgggcatccgagtgaaaagttatgaccattcgaatttctcgagagcttccgctgttcaatttcgagcgtctcgatatattatggccccgaatcggacatccgtgtgaaaacttatgaccattcgaatttctcgagagcttccgttgttcaatttcgagcgtgtagatgagttatgtcctccaatggacattgggtgaaaagtt

SEQ ID NO: 867 - DNA, 554 bp, Glycine max
tgctcgtcttgctgatatttatcatgcagacttttctgatgatgaccgaggaacaattagggatcaacttgaaacttatgtgcttcaagtgagaagaaatgcttctttttccacttgtgaagatgttcaaagtttggctatgaagatggttcaaactgagaaacatttggtatttccattggtttataaacttattgagctagctttgatattgccggtgtcgacagcatccgttgaaagagctttttcagcaatgaagattatcaagtctaaattgcgcaataagatcaacgatgtgtggttcaatgacttgatggtatgttacaccgagcgggagatattcaagtcacttgatgatattgatattattcgaacatttaccgcaaagaagtctcggaaaggacacttgcctcgtaattttatttaacccgctattgtaagaatatgcttatctcttttattttaaactatatttttggtgacaaaatgacgagtctcttttattttgattgattactatttacatattatatacaaggtgaatttgctatctt

SEQ ID NO: 868 - DNA, 615 bp, Glycine max
  unsure at all n locations
ttttcaaagtcaactttgaaaaccatgcaggggttatttttgaatttagcttcagctaagacctcattaactatcattacacccgggaggatatgtctgcctttgaaaaaaacaatttgtctttaatcaattaaatgaagcagcacaagagccagcctattagccagactttggacattattttgtagacacaccctatgagagagatgggtctatagtcattaagagattgggggctattggttttggggatgagggctatgaaggatgcattacttcctttggggaatctgccattaatgaataattcatcaaagaatctgataaaattaggttttagagtttcccaaaactgtttgatgaaattgaaattcaaaccatccgagccaagacttttatctcccccgcaagcccaaactgcagacttgatttccagctcggtgaatctatcaacaaggctttccttctgcctttgatcaagggaagagaactagatcccttcaaggttggtctgcaaggattctactttgagaatctttctttanagtgctgaagaactgcaatcttgacactgttagggtcantggatccatcctccatcaatacacagacctt

SEQ ID NO: 869 - DNA, 558 bp, Glycine max
ttcatcctaagcctaaactgtattatttgatttgatcataggaaaagggggaaaaagatacaagatataaacatgaatacaaataagaaattgtaaactacattacttgaattcctattatatacaaccagcataccgagttgaatttggataatttcctcccaccaccaacttcaacctcaaggggagaattacaagaacaaatggtttagtgtcaaaaaagatagcacacagacaaattaaaaaagatagcctgaacagctactggagttctatgaatatgtcttggcacttaagatgacctgccatacttgttaactgaattcatatgattcatctacatctgcaagttgtttggtcttgaaaattgattatgcatggctgagttaacaacaaggttattatcacaaccaacaaattgctgactaaatgccggagaaacagtatcaggcagaataggtagctcagagttaccaattgtttgggtatcagacctattacggataaaacaaactcttggctaaaagtatctatttgagtgttaacattttgattaac

SEQ ID NO: 870 - DNA, 636 bp, Glycine max
tgttccggcgccaccagcgaccgctcgcaacgacgacacttgttgggtaccatgctgaattttactaatttacgggatcaaaccacgcggtgatgatatggtttgcctttaagaaagtcaaaaagtatattaccagtttgttggaaatccccattgggccttctgttgttaaaacgtgactccaagttctttcaaagataaatgataaagtgatattctcatggaacatgagaaattattgactattattttgaatgataaaaattatttccgtaaaatattaaaatttaatcaaacatattaaaagataaatagaatgtgatgggattaaaacaagaaaaaggttttacagcctaaaaaaagttacatagtatgtgtttagtcctttcaaaatgagtgaaatttaactttggtttctctaaatttctttttgaattttattcttaagaaatataatttggcctattcttatgaatttaatggttatacattattcatgtaaaacctaactctatatcattattgaatcattagtcatcatttaaattactttaggacaattattttgaaaataataaatttatcatacttaatttaaaattattttaaaagtaaccaaatttatcattgtgaatt

SEQ ID NO: 871 - DNA, 463 bp, Glycine max
agcttatcctgccattttattcattcacgctattctgcatcattcttcctttgaccatgttccttcctgaagccgagctcccagcctgggttgtttgttacattcctggaatcatgtccctcctaagtgttctcccagctccacggtcatttccatttatagttccttaccttctatttgagaacactatgtcggtaactaaatttaatgccatgatatctggattattacgctttggaagttcttacgagtgggtggttacaaaaaagttgggaaggtcatcagagacagatttggttgcctttgagaaagaagctgaacctctaatgcgatctactagtcttcatagatcatcctcagattcaggcattgaggaactaagcaaactagaattgtcaaagaaaactgggaagaccaataaaaatcgtcttttcaagaaagaactttatctcgcattaatttt

SEQ ID NO: 872 - DNA, 501 bp, Glycine max
acactatctagatctcaagcttacaacataaactaccctcattctttgattcatttaatataggggaacttattccaaggattaccaaatgaggacccctatgaacatttggcaacattcattgaaatctgtaacactgtaaagattgcaggtgtgccatatgaagccattatactcaatctatattcaatttccttagtaggagaagccaaaaggtggctacactcatttaagggtgacaatctgaaaacctgtgaagaagttgttgaaaagtttctgaagaaatatttcctatagtcaaagactgtgaaagggaaagctacaatctcttcatttcatcagttgcctgacgagtccttgagttaagcgttggaaaggtttacaggtctattgagaaagactcccacccatgggttctttgagccaattaagttgaatatgtttatggactggctgagaccacagaccaagcaactactatatgcttcataagggggaaaa

SEQ ID NO: 873 - DNA, 630 bp, Glycine max
  unsure at all n locations
agctttctccactaagttgcctgatgcttgaaatgtattttctgatggcagtggtcctagatgcagggaagaatttctccaagaacaccctcttaaggtcatcctagctggtaatggacctgggagcaaggtagtacaaccaatcttttgtcactccctccagagaatgaggaaaagcctttagaaagatatgatcttcctggacatcagggggcttcatggtggaacagacaatatggaactctttaagattcttatgaggatcttcacttgcaagaccatgaaacttgggcagcaaatgtattagtccagtcttgagaacatatggaacatcgtcatcaggatattgaatgcacaagctttcataagtgaagtcagctgcaaccatctccctaagagtcctctcacgaggtggagattgagccatgttcttagtatgaaaattagcagccgaatgctcaaaatcagaatgttcagaccaacaacagaatgctcaaaatgcacagaatgattaggatgcacagaatgataaggatgcccagaatgatcangatgcacactatgccttactaatatatgaaaggttctatcttattcagggatcaaggggtgtaaatcacctggattggc

SEQ ID NO: 874 - DNA, 634 bp, Glycine max
tgaaggtaaactagatgccttggttaacctggtaacccaactggccatgaataaaaaatctgcacttgttgccagactctgtggtttatgctcctatgctgaccaccacacagacctttgcccttctatgcaacaatctaaagtaattgaacagcctgaagcttatgctgcaaacatctacaatagacctcctcaacctcagtagcaaaatcagccacaacagaacaattatgacctctccagcaacaagtgcaatcctgggtggaggaatcatcccaaccttagatggtcgagtccttcacaacaacatcaacaataagattagccttattttcaaaatgctgctggcccaagcagaccatacgttcctccaccaatccggcagcaacaacaacaacagccccagaaacaacaaacaattgaggctcctccgcaaccttcccttgaagaacttgtgaggcaaatgactatgcaaaacatccagtttcaacaagagaccagagcctccattcagagcttaactaatcagatgggacaattggctacacagttaaatcaacaacaatcccagaattctgacagattaccttcttaatctgtccagactcccaaaaatgtgagtgccattacattg

SEQ ID NO: 875 - DNA, 458 bp, Glycine max
  unsure at all n locations
atatatttgagggactcatggtcactatgaatgacaaattccttgggataaaggtaagtgtgccatgttttcaaagcccgtactaaggcatacaactccttatcataagttgaatangtaagggtaggaccacttaacttttcactaaaataagcaattggatggtcttcttgcatcaacacagccccaatcccaacatttgaagcatcacactcgatttcaaaagatttttgaaagtttggcaacgcaagtatggnggcattaattagctnttgcttaataacattgaaagcttcttcttgtttctctccccatttgaaaccaacatttttcttgagcacttcattgagaggtgctgccaatgtgctaaaatccttcacaaatcgtctataanaactntctaagccatgagaactcctcacctcggtcacggacttatgtgtaggctattcttgaat

SEQ ID NO: 876 - DNA, 454 bp, Glycine max
  unsure at all n locations
agcttcttatccaaggctcatcttggtggtgaagctccttctttcatggcttattccctagtggatggcgccgcctcttacctcttctcctttgtcttccgctgcatctccatggtggaaaatcaccattaaaggacctcattgaagctcaaagatccagcttccatagaagctccacaagcaagtttccatcaggaatgatgcaatcctaccccgcaagggcattggatagaagactccaagtagattgggctagagatgcaagagaaggccctagggttctcatgagccttaggatagatttcgggcccatgggctaagtatgagcccacttatctttgtacatattagattaaggtttcattaattntgggtcttttatttaaggctccataatgtaggaagggtaccctagaaatataggaattttcagcccttgtattttagggcacct

SEQ ID NO: 877 - DNA, 396 bp, Glycine max
  unsure at all n locations
atcctctagagacacccgccgcatgcaagctntgcatacnccaaggatccattatgaaattacttgtgaaagagagccatgtgggtgggttcatgggccactttggaatagacaagacccttgtcttactcaaagaaaagttttattggccccatatgaagaaagatgtccataagcattgcactacgtgtgtggcttgtttacaagccaagtctagggtgatatctcatgggctatacacacccttacccatcccatctgcaccttgngtagacattaatatggactttgtncttgggctttctagaacccaaagaggtgtagactctatctttgtggtggtggataggtgtagcaagatggcacactntataccatgctacaacgtggatgatg

SEQ ID NO: 878 - DNA, 428 bp, Glycine max
  unsure at all n locations
tcgaaattgaacaacgtaagctctcgagaaattcaaatggacataacttttaactcgggtatccgatttaggctcatcacatatagagacgctcaaaattgaacaacggaagctctcgagaaattcaaatggtcataacttttaactcggaggtccgattcaggcgcataatatatcgagacgctcgaaattgaacaacggaagctctcgagaaattcaaatggacataacttttaactcggatgtccgattcaggcgcatcatatatagagacgctcgaaattgaacaacggaagctctcgagaaattcaaatggacataacttttaactcggaggtccgattcaggcgcataatatatcgagacgctcgaaattgaacaacggaagctctcgagaaattcaaatggacataacttntaactcggat

SEQ ID NO: 879 - DNA, 397 bp, Glycine max
  unsure at all n locations
agcttgtagcanatgcaaacggcaataacattttactcgaatgttctatttagtcacgtaatgcatcaaaatgctcgaaattgaaaacagaagctcggtgcaaattcaaacgacaattagtttttactcggatgtccgattgagtcccttcatatatcgagacgctcgaaattgaaaacggaagcttgtactatattcaaacgacaatcatnttttactcggatgtccgatggagtcccgtaatatatcgagacgctcgaaattgcaaacagaagctctgagcaaattcaaacgacaataacttttttttcgaatgtccgatggagtcccgtaatatatcgagacgctcgtaatggaaaacagaggctctgacataattctacaacaatacatttta

SEQ ID NO: 880 - DNA, 434 bp, Glycine max
  unsure at all n locations
agctnttcanaatatttatgtatttcttttataaccttccttctctcttcttcaacctanaagtttccaaaatcttgttctcaaactcgtgactcttccctcacgtcgatgatcatcttcttcaagaaacgccgtctgaacttgcgagcgtctatcgggtgcgggcgtagggggacacataaaattgcacctgccagtcatgggagcagttgtcgctatccatcacgtgacggaggtgcttgccggcgcggaggatctcgatcattccttggatcgctgacggaatgctgtggtcgggtgaggtgatgtatgtcgccgtatcccgattcccctacgacttcccatgccgtatcagtattcttaattttagaagcacaccaaccatatattctcttctctttgcattccattttctttcatgctgacaaatttaa

SEQ ID NO: 881 - DNA, 415 bp, Glycine max
atgcaagtcaattgtaggaaacatctcggagaggatcttttctgtgcatatttgcgcaaaatgtcttgaactaagaagatgttgtccatcatctttctgttcttgatgaaggcagtttgagtttccccaacaatagtctcacgcactgtggctatgcggttggccaaaattctagacacaatcttgtattacaaattacagcaagatatgggtctaaaatggttaacctgagaggtctgatcatgcttaggaataagcgcaataataacatggttgagttgctttaaaaatttgtcagtggtaaagaattcatttaccggctcatagatatcatcaccaatgatattccaagccttcttcgaaaataaatcattgagaccatctggccctacagctttattgttatccatcacag

SEQ ID NO: 882 - DNA, 462 bp, Glycine max
  unsure at all n locations
agctntgtccgcanaaatcactaataaccgttttaaggtccaacgccttanacggccctctttgcttttatcgattaacatggaccgttcaaaagcataaaatcaatatgtaactttactgcttttgcaagaactacgtaggtctgatttcctcatcgcaattgaggatatgtaggagcaaaagccccgcttttgtcgaccaccccaagagatcgttaatggttcaacgccttaacatttctctcctttcaaaaacaagagatcgttaatggtccaacgccttaacgtttctctcctttcaaaagaatcaaagatcgtttaatggtccaatgccttaaacgacttttgtgcggttaaaatcgatcttgcgaaaaaagatcaaaacaacttaactggaaatactgatcatacattagtatgattaaacattgtanacacaatcaaacaattttcaacaattat

SEQ ID NO: 883 - DNA, 353 bp, Glycine max
  unsure at all n locations
agcaagctttgtatattgcctctgtgctggatatagagactactttctactttctagaccaccaagatatcaagttgggaccaacatacactgctgcaccagagttagagtgcctatcaatagggtctgaagcccagtaagaatcacaaaaaccttacatgggaagagttttatgaggtgaggcaagatacaaaataagtcctgaatgtaaagcacccttaagataccttaaaattctttctactgttgtccagtgggattcaagaggtgcagacatgaactggcaactttatttcaacanaactaactctagatgagtgatagtacatactgacagctccacaacagatctg

SEQ ID NO: 884 - DNA, 370 bp, Glycine max
  unsure at all n locations
tcttacaagagactaaganatttctgacngaaaattntgagatgaaatatcttggggaagcctcttttgtattaggaatcaagatactaagagatcactctcaagcatnctaaggttgtcacaagagagtatatcgataaggcctagatagattcggcatgaaagatagtaaaccagtagatacccagatagctaaaggaaacaaatttagtctcaaacaacaccccaataatgaccttgaaagaatagagatgcaaaatatttcttatgcattagcattagaaagtctaatgtacgcttaagtttgcactcgtctcgatatagcatttgtagtaggagttctgggtagatattttgagtatcctggaat

SEQ ID NO: 885 - DNA, 495 bp, Glycine max
  unsure at all n locations
atctcagagtcacctgcggcatgcaagcttctaatatctcccacactnnttggngtgggccattcttggatggccttgattntctcagggtccacttggaccccatttctaccaactacaaaccctaagaaaactatattttctacacaaaaagtacacttctctatatttgcatagagggtgtttttcctaaggactgaaagaacttgtctgagatttcataagtgatcatctaggcttctactgtacactaaaatatcatcaaaataaacaactacaaatctacctatgaaatcccttaagacatgatgcataagcctcataaaggtgcttggtgcattagtgagcccaaaaggcatcactagccattcatacaaaccaaacttggtattgaaagcggttntccactcatcaccctttntcatcctgatttggtgatacctaactttaagatcaatntttgaaaagatattggcaccatgcaactcatcaagc

SEQ ID NO: 886 - DNA, 356 bp, Glycine max
  unsure at all n locations
gtactgaaccgtaccatgagacgtatgtcgtggtttgagatctcctttcttcttttgccacagtgccccgatcctcctagtgtcggcatttgtggaggagacgtgatgcaattctacctcgcaagggcattggatagaaaactcctagtacattgggccagagatgcacgagaaggccctagggttcttatgagccttacggtagatttcgggcccatgggctaagtacgagcccacttatctttgaaatattagattaaggtttcattatttttgggccttggatttagggctccataacgtacatagggtaccctaanatataggatttttcagcccttagattgtaggacatc

SEQ ID NO: 887 - DNA, 392 bp, Glycine max
tgttgaacctctcccattactcatataatgtctctccaagttgttgccttattgatgcaagctccattggagcttgtaggcctaggatcttcttcatcaatggattcctttgcttcttggaagatgaatggcagtggaatgaagaaggaagagagagaggagacgccacttcaaggagaagatgagtctagaagaagctcaccaccatatgaggccatggataaaagcttggaggaagaaagagatgaatgaagggagagggagagaagagcacgaaattttgtgctccaaatgagctctgaaatctgaagtttaatattcaaatgatcaaagttgaaaaaaatgcacacacatgacctctatttatagcctaagtgtcacacaaaattgga

SEQ ID NO: 888 - DNA, 472 bp, Glycine max
  unsure at all n locations
agcttaacatcagaccacttccagggtgctggaactacttcacatggatttgatggggcctatgcaggttgaaagccttggaggaaagaggtatgcctatgttgttgtggatgatttctccagatttacctgggtcaactttatcagagagaaatcagaaacctttgaagcattcaaagaattgagtctaagacttcaaagagaaaaggactgtgtcatcaagagaatcaggagtgaccatggcagagaatttgaaaacagcaggttcactgaattctgcacatctgaaggcatcacccatgagttctctgcagccattacaccacaacagaatggcatagttgaaaggaaaaacaggactntgcaagaggctgctagggtcatgcttcatgccaaagaacttccctataatctctgggctgaagccatgaacacagcatgctacatccacaacagagtcacacttagaaga

SEQ ID NO: 889 - DNA, 411 bp, Glycine max
  unsure at all n locations
tgtcattcgaatggaacccccaaggtcaaactctaaactntccaaccattttccttcttcctcctttctagttnttttatttttttttttatttttttatgcagctgaatagtgtgcttcatgttatgtttttgcagagttgctgtggataacatttcaagcggaacagacactgtcataaaggttccaaattcacctttcgttggctttgtcttttctgcattgccaaagggtcctttttctctttgtgtgaccaattttccgtgtgtgttgttgcaggttgatagcgcgaacaagcgtgggagcttgttggaggtggttcangttctcactgatatgaatctcagtgttagaagagcttatatttcctctgatggagaatggttcatggatggtacggatcccttcacg

SEQ ID NO: 890 - DNA, 471 bp, Glycine max
  unsure at all n locations
agcttgaaccttgagtcttgattcttgaaatcaaatttcctcttgaaccttgaagtgttcttaattcaatcttgaacatcttgaacatcttgattcaatcttgaacatcttgaacatattgaactcattctttgattatcatgaattgacctttgagctttttgtcatcacctttgttatcatcaaaacatctttgaatcaatcttgattcatcatgaagctttgcttctacacatacttagtaggatcaaaagttattgtttatactgaccatgaacccattaagtacctgttgaataaagctgattccaagcccagattaatcagatgaatcttgttgctttaagaatttgatctggttatccaagacaagaaaggatctgaaaatcttgtagctgatcacttatcaaggttagtcaatgaggaggtgactttgaaagagctatagataanggatgaatntcctgatga

SEQ ID NO: 891 - DNA, 452 bp, Glycine max
  unsure at all n locations
tgtaatcgattacacatatactgtaatcgattaccagagcagattntcagaaaatattctcaacagtcacatcttttatgtggttcttgaatggctatcaaaggcctatatatatgtgacttaagacacgaatttgctaagagtttttcagaacaaaaaggtcttatcctcttaaaaagcaaatcgttttatcctcttacaaattccttggccaaattacttgtgattcaataaggaattatttgagtactcaaattgttcaatctatctctttcaagagagatttcttcttctcttcttcttcattctgaaaagggattaagagaccgagggtctcttgttgtgaaagaattctaaacacaaaggaagggttgtccttgtgtgtttagaacttgtaaaaggaatttacaagatagtggaactctcaagcgggttgcttggggactggacgt

SEQ ID NO: 892 - DNA, 456 bp, Glycine max
  unsure at all n locations
agctntggagtttccaagtgccaattcgtcctcttctttagtccagtcttcttctggcttcaattcatcagtgggctttccttctgtgtccagcatcttgngatgttcccagcctatgatgacagctttccaggttctgctatccactgatttgaggaaggccaccattcttgctttccagtattcatagttgcttccatcaagaattggtggtctgttcactggtcctccttctttctccatgttcatcagaatttatctccccagatctcactctgtgatttcgagtgtttgctctgataccaattgaaattctgataccacgggacagatgtcgtacaggatgtcacgacatcacgcttcataacatgcagattgtatgtgtccgtatgaacagactacacaagtnaataacacaagagaattgtaacccagtcggtgcacctcacctacatt

SEQ ID NO: 893 - DNA, 348 bp, Glycine max
  unsure at all n locations
agcttgccgacagtagtaatggcggattgcatgtaaataacagacccgcaccggatattgttntgaaacggaccctctctcgtaaattggttctaaaaggaaccccatacagtaaatttgccaagaaattaatgctgtacccataaaataattttttaaaatgaatactaatgttatacgagataataaaaactgatattaattctatgattttattttttaatattatagtatcgaccatgaataaattatataatatttttgaaaatatatatacgcgtaaagaataattataatttgctacaatataagcattctgaatccttttatcatgagattatatatttt

SEQ ID NO: 894 - DNA, 467 bp, Glycine max
  unsure at all n locations
agctntagcacaatggcaaggttactttcttatgagttactaattcaattcttaacccccactatgtaagagccttgtccattgggtcacctcttttttattttgtaacatttatattaataaagcaaagtatgatacatagtaggaacacaataatatacaaaagttaaataatatattttatcgctcaatatataattcgctgataaatgaatccttgaacgatgaatatataaaatttagtccctaaaagtataaatagtgtgaaaagtaagtaatcgacaacgtgaccatgctgattagatttgatgaaaatgtcaacaagatacaacgtaaatgttaatcattntttggtggacaaaaaatgtcaatatttcttattgaagataatatcagtaatttgttatttacctaaatgtcaatacatttcattggatcaaaatatcaatacgttatcattattggac

SEQ ID NO: 895 - DNA, 452 bp, Glycine max
cctatcgcccttagactaatggctagattgaacggaccattcagtcgctggaggaccttttgagggcatgtgtcttagaacaaaagaggagttgggagagttaaagactactcaaagtaggcagaaaaactatcaggctgctcaagaaaaactgagaaggtcaagttaatccaagaaaggctaaagactgctcaaagtacgcagaagagctatcatgacaagaggaggaaagacctgaaatttgagattggtgatcatgtattcttgagagtcattccattgattgcgttggtcaagcattgaaatcccaaaaactcatacctcgttttatcaacccttgttaaattctcaacagagtcagtcctacggcataccatattgcattacctctgtctctgtacaatcttgacaatatctttcatgtgtctcaactcagtaattatatctgtgat

SEQ ID NO: 896 - DNA, 446 bp, Glycine max
  unsure at all n locations
agcttgaaccttgagtcttgattcttgaaatcaaatttcctcttgaaccttgaagtgttcttaattcaatcttgaacatcttgaacatcctgattcaatcttgaacatcttgaacatattgaactcattctttgattatcatgaattgacctttgagctttntgtcatcacctttgttatcatcaaaacatctttgaatcaatcttgattcatcatgaagctttgcttctacacatacttagtaggatcaaaagttattgtttatactgaccatgaacccattaagtacctgttgaataaagctgattccaagcccagattaatcagatgaattttgtcgctttaagaatttgatctgggtatccaagacaagaaaggatctgaaaatcttgtagctgatcacttatcaaggttagtcaatgaggaggtgactttganagagctag

SEQ ID NO: 897 - DNA, 459 bp, Glycine max
gacactatgaatactcagcttgtaggctagatatgaactgttggactctgttaacactgtgtcgctgtgtgagcattctggacatacacgcacactttctgattcatgctcttatgcacacacacacagagagattcgttctctcgtcagaaacactacgcatacgaacaggcagacgctcacgctgagaacctgtaacacagacacttgtcagactcacgcacttacacagacaccacagactgactatgacctattcagagacaagcgcactcccagatacacgcactctgatagacttagatggcagaacttttcacagaagcacacacacccacagattcactgtcacacagttgctgacacacagagaccatgcgctcatccacacttgtagacacacacatacacacacgcacactcacactgagaactagccccagacacacacacacgctg

SEQ ID NO: 898 - DNA, 451 bp, Glycine max
  unsure at all n locations
gtgaagctcctgttttagctttacccgattntactcaaccattngaagttgaatgtgatgctagtggagttggcattggggctgttttgatacaaaacaaaaggcctatagcttatttctcggagaaattgggaggagccagattgaactattgcacctatgacaaagagttctatgccattgtgagagctcttgatcattggaatcattatttgcgttctaatcactttatattgcattcagatcatgagtcattgaagtatatcaatgggcagcagaagttgagtccaaggcatgctaaatgggttgaatttcttcaatcttttaatttctcttcaaaatacaaggatggtaagagtaatgtggtggctgatgcactctcaaggaggtatgctttaatttcaattcttgaaactcgtttacttggttctgagactctgaaagattatat

SEQ ID NO: 899 - DNA, 376 bp, Glycine max
  unsure at all n locations
agctntgagcanattcanacgacaataacctttttactcggaagtcggattgagtcccgttatatattcagacgctcgaaattgaatgttgaagctctgagcaaattcaaacgacaataaccttcttactcagatgtcggatagagacccgtaatatattgagacgctcgaaatggaataccgaagctctgagcaaagtcaaacgacaataactttttactcggatgttcgattgagccccgtaatatatcgaaacgctcgaaattgaatgctgaagctctgagcaaactcaaacgacaataaatctttactcggatggccgattgagtctcgtaatatatcgagaagctcgaaatggaataccaaagctctgagc

SEQ ID NO: 900 - DNA, 453 bp, Glycine max
  unsure at all n locations
ctgaagcaatctctgctgcttgaatgcaatttcagagccaatcccttcaatagctttgtcccctgggatgataagagcaaagaaataataaatttggaaatctcttttgttagctcactaaaaggtgatacttaaaagcaaacacttttcaagtttcaaaactgtatataaagaatgtatacttacagtattctttgtcaatacattaagtgaatcctcatgaaaccacaatcgactgcgcttcccaggtttctttgttgaactttcacgaattatctctcttcccatgtctcgtagtaatggatgcattccaagttcgttgttctttgcaacttttacgaggctacgctccatgagaactgttattcctatatcagcatgtagtccacagccatntagtatctctgtaacataagctctatctttaccaataaagagacaacatacatcaag

SEQ ID NO: 901 - DNA, 396 bp, Glycine max
tactcattgactataagcctctcaatcattttcttaaagatgataagttccctatcccaaaggcttcatctttccccaccttgataagagaatcaaactcattctcaaagaatgatttaaaatcaggttctcggcaacttggcctaaaaccacataatcgatacaaaacagcatcctgtatgccaaatgctcaatatcaatggacaggcttacctttaggcttaaaagtagcttcttctctcttgcagaaagccatgaccaaaatctttgaacccattctggaaaacactcttgtctacatagatgacattctcctttgttcaaaagatattgcctctcactaaaaattgttgaaccaattctttgaaatagcacaccaacatgggatcatgcttt

SEQ ID NO: 902 - DNA, 364 bp, Glycine max
agctcgatgcaatcctaccctccatgggtattgtatagaagactccaagaggattgagctagagctgctaaagaaggccttggcgttctcatgaaccccaaggtagatttctgagcccatgggccatggttgggtccactcttctttgtaaatattagaatatgtttttccttcttttgggccttgtatttaggccattctagtagtataggattttagccttgtctttcatggcaatttgagtagactttgtagtagggacttttatttttcatgtattttggcatgggggcgagcttatctattatagggagtgcgtaactaagccctaccttttttaggaatcttcccaaggaatcttctt

SEQ ID NO: 903 - DNA, 461 bp, Glycine max
  unsure at all n locations
actatgaaactcagctgatagatttanaccacacctttatctctatagtactttataattgaagaatacacattcgtttatttattatttattattttaaaatgataacaaaattgaataaaagtgagtttattctttattcgttgcaagtgtaatttttttatattgtcaagtaactagaaatcatgttagatattatttttaagatcattttataaaattcaagaaacttatttaatctataattgaataattctgtaaatttaaattaaactttaaaagtaattataaacattcaatagataatttaacttcaaaccataattatgaatgcctccttttcataactataagatgttttagctntatttcttatcttanaataattgatattntagaaattcanaatttaattaatattttttccaattatatccttatttattatctcattattaatg

SEQ ID NO: 904 - DNA, 372 bp, Glycine max
aagtccaacgcagcacgcgtgtcgttaaagttgttatatgttatgctttgaaggagatgaacgtggagtgtagttaccactgtactctactctagcagtggttgtggtgttatcaaaggcaacaccaacaccacttgaatatgctcttgcagcaagacacccatgattaggttcttggttggcatgcaataacacatacattggtcgtcccggtgatatgcaaatgtattcccttgccaatggcttggttaacataccatcagcaccaacaacagcgaggttgtgttctgtatcatagaacaagagaatgagattcattgccgcattgtctacacggagataataagtcctgccttgctctacatgaaactc

SEQ ID NO: 905 - DNA, 469 bp, Glycine max
  unsure at all n locations
ggatggagaatatgggtccatacttgtcagccaagtcacccaatgttntatgaggtgtctttgaaccaagcaacaatgggaggtgaccaattattggccacgcacctgcaactgtgggaggaccctcttcgccactcttcgaggaacgacgacacaaaaacaagtataagaggatcagagaaacaacaccaactccaattgttgtggtgtttagaactaagtccattntgacttgtttttgtgttgttgcatgcagatcctcatcagtttaaataggaactgcaccgtgcatctgtgtgccgttgtacgacctgactagatcgagtagagatatttagatattntaatattntagaatatattcattacttgaattaactaanaaataaaataatgttgctgaaatgatgaaataatatagccaaataaaatcttgatattntaagatatnntttaattttatattaca

SEQ ID NO: 906 - DNA, 465 bp, Glycine max
  unsure at all n locations
taacgtctntcacagtanaaggaccactccatctctcaattntaattntccaggaaacaactttagttntaagttgtagagcaatacttgttgtctgggactaaattctttgtggaggatctttttgtcatggtccctcttataatccctgaacactttaaacttggagccaaacaggtaatgcctccacatcttaagggcaaaaactacagtagccaactccagatcaagggtgggataattcctctcatgagtcttgagttgtctagaagaataggccactccttggccattttgcatcaacactcctcctaaacgcatctttgatgcatcacaatacacctcaaggngttctcttgggttaggcaaaactagcatgggagcggccgtcaacttttccttaagggtttggaaactatgctcacattaggtatcccacacaaaagcttgacccttacgagttag

SEQ ID NO: 907 - DNA, 456 bp, Glycine max
  unsure at all n locations
agatggaccatttcaagtgaaagaatcaatgacaatgcttacaaagttgagctgcctggtgagtataatgtttgttctaccttcaatgtctctgacttatctctttttgatgtagatgaagaatccgatttgaggaaaaatccttctcaagagggagagaatgatgaggacatgactaggagcatgggcaaggatccacttgaaggacttggaggacctatgacaagggctagagtaaggaaagccaaggaagctcttcaacaagtgttgtccatactatttgaatacaagcccaagtttcaaggagaaaagtccaaggttgtgagttgtatcatggcccacatggaggaggactaaatggcaccactttgtctcaattntagagtggttagtttgtctaaataatggcccaatccttgtaatgttggctgaccaaaaatatgttttgggttaatc

SEQ ID NO: 908 - DNA, 449 bp, Glycine max
  unsure at all n locations
tgtaggcgttggatcttcttcatcaatggagtcattggcttcttgaagatcatggcagcggaatagagaaggaagaaagatgattggagaccccacttcaaggagatgatgagtcaagaagaagctcaccaccacaggaagccatggataagagcttgaaggaaggcgaagatgagtggagggagagggagagaaggggcacgaaattntatgcctcaaatgaggtctgaactttgaagtgtaattctcaaatgatcaaagttcaaaaaatgcacacacatggcctctatttatagcctaagtgtcacacaaaattggagagaaatttgaatttctattcaaatttcacttgaatttgaaattgaatttgtggagccaaaatttcaataattatgattaatgaattttagatatggttcagcccactaatccaagatcaagtccaagat

SEQ ID NO: 909 - DNA, 434 bp, Glycine max
  unsure at all n locations
nttataanaagcatttctaagcataaaactaaaatatgttgtattgagctcttggtattttttttatgataacatttttaattatgagtataattttataattattaaaagccatcagtttttttttaaataataatttgttcacattttgttcaaataaacttaatgtaagttctctgaatttattgcattctggcgactgaaattcacaatcaaaacttaaagtgtgctgaataaaagtttttcatagatgtaatctagtaaaataatgcttcataaataattaggtgtctaatagaagaataaagttaatacaactgttctcgaaattaaagtagaatcgatacattcacagatgtgtatacataataatggtgtagtattcaatacatattgttttgctttactgtcgaactatggaattccatatacat

SEQ ID NO: 910 - DNA, 330 bp, Glycine max
agcttgagctttgaattgagtgtcattgtcagtggcaatggcgtaaagaagaccatattttcatatgaagggtttgcatgagaacttctctacctcatctggtgaaatttctcgcaatggtcttgccttaatccacttagtgaaataatcaatagcgactaataagaatttgacctatcctgcggcttttgccaatggtcctagtatatccatcccccacatggaaaaagggccaggtcctagtatgaccaataagaatgtaccctttggctcgctcacgtagctcgtccatgctgctagggggtttcttgcatatactatcagggaact

SEQ ID NO: 911 - DNA, 444 bp, Glycine max
ctcagcttgaatgaagtccaacgcagcacgcgtgtcgttaaagttgggaaggttaggcaatgaaggagatgaacgtggagtgtagtttccactgtactttactctagcagaggttgtggagttatcaaaggcaacaccaacaccacttgaatatgctcttgcagcacgatagtaatgattaagttcttggttggcatgcaataacacatccattgtttgtcccggtgatatgcaaatgtattcccttgccaatggcttggttaacataccatcagcaccaacaacagtgaggttgtgttttgaaacagagaagaagagaatgagattcattgccgcattgacaacacggagaagataagtcctgccttgctctacatgaaactcgaacgtttctgaaaattaaaagaaagttttgtgtttagatgagcttaacctcatagatac

SEQ ID NO: 912 - DNA, 347 bp, Glycine max
ttagacctttgatggcatgctggcatcaccctcattcttgctcttgtcagcttcaaacttatcaattgctacctgcagttcatcagtgcctccaacagccctcatggtgtagaagtatgcaccaaagacaaaagctgtcaaacccccagcaactaccagattctttgccttaggtggaaggctcctatatcctaaaagtccagccatcttgatcaatgtgggaaaaaagggttagcacaatttcacacaattacaattacccttcaattgcagaaagcacaaaagatcacaaaacagataattcagatctgtaaagaataatgagtagacattttcacaaacagatt

SEQ ID NO: 913 - DNA, 464 bp, Glycine max
  unsure at all n locations
agctntaatggtgttaagaagaaatcacatgttttgtatcatcaacaagagggagaatgtgaatgtatgtatacatgattttgatgatgtcaaaagaagaatcaaacaaggctcattttgcttcaagattaatacaagattggttcatcaaacaaagccttgattcaagatttcttcaagatcaagccttgcctcacaatgaaaggtttcaagtcattcaaggcacatgtaatcgattaccaatacatgtaatcgattaccaatggtttgaaagtgtgtaatcgattacacatcatatgtaatcgattaccagagactctgaacgttgggaattcaaattttacatgaagggtcacaactgttcaagacaaacaactgtgtaatcgntacactaattatgtaatcgattaccagagaggattttcaggaatatcgccaacagcacatcttatcatttgaatttg

SEQ ID NO: 914 - DNA, 416 bp, Glycine max
  unsure at all n locations
agcttcttgacctgaatcaacacatcctcaatcacttcatatggtcttgtgacagagcgatcaaccaactggagggtcatgcatgtgggcattatctctatctctccaagtcgccgacacatggagagaggcattaaattgatactagctcccaagtctatgagagctntacccacaacaacctcaccaatagaacacgatatactgacacttccaggatctttgtgcttcgggggaaggatgcgttgaatgaccacactatagttaccttccacaactattgtgtcactgtggatataccggttattctttgtcagcatgtcttttaaaaatatggcataaagtggcatctgttggagagcttctccaaaaggcaaagtgatcttcatcttcttgaagatgtcaagaaatctggc

SEQ ID NO: 915 - DNA, 402 bp, Glycine max
  unsure at all n locations
taagctctttcaactgcacaaagctattaatattngaagagtatccatatggaaccttcacccgacgaagacactgacaaaaacttatcttctcctttttggacaaagcatggcaagctaggggcaagtaaattttcttcccatcagaccttggatgcaactgtgatcgtatccccatataagctagatcttgatgggtattcaagccatccttcgtctttccttgaatgttaaggagcatcccaatcacactgtcacaaacatttttctccacatgcataacatcaatacaatgtctaacgtctagatcagaccagtacggaagatcaaagaaaatggacctcttcttccatatgcaactcttacttttatccttcttttgggtttttccaaatataatat

SEQ ID NO: 916 - DNA, 350 bp, Glycine max
agaatcggacctcagtgtgaaaagttatgaccatttgaatatctcgggagcttccgttgtacattttcgagcgtctgtatatgagatgcgcctgaatcggacatccgagtgaaaagatatgaccatttgaatatgtcgagagctttcgatgtttaattttgagcgtttagatataagataagcctgaatcggacatcctggtgaaaacttatgaccatttgaacttctggagagcttccgttggggattttttaacgtctctttatgtgatgcgcatgaattggacatccgaattaaaagttatgaccattagaatatctcaagagcttccggtgtacaattctgagcgc

SEQ ID NO: 917 - DNA, 399 bp, Glycine max
  unsure at all n locations
agcttctatagaaggttcgttcctaatttctctacaattgcatcacctctcaatgagctagtgaagaagaatgtggcatttaactggggtgaaaaacaagagcaagcctttgctttgcttaaagaaaagcttactaaggcacctgttctagctcttcctaacttttctaaaacntttgagctagaatgtgatgcctctggagtgggagttggagctgttttgttgcaaggtgggcaccctattgcttattttagtgaaaaacttcatggtgcgacccttaactaccccacctatgataaagagctttatgccttaataagagcactccgaacttgggaacattaccttgtttccaaggaatttgtcattcatagtgatcaacaatcacttaagttcatt

SEQ ID NO: 918 - DNA, 399 bp, Glycine max
tagtatatggacttgggtgttgcccagtttcatcatatcttccgtaatacttatcacctctatcatatctaataattttcacatttatgtctaattgccattttacttcattgtagtaaatttctaaagcatccattgcctaagaaatctcgggcagtaagtagacataaccgtaacgtgaataatcatcaataatggtgataaagtattattcctttccgaaagaactaacatcaaaaggtccacaaatattagtatgcacaatttcaagaagctgagtgcttcttgtagctcttttctttgtatgttttgcttgttttccattaatacaacccacacaaatatttagatccataaaatctagataaggaagaatttcattctttattaatttttcca

SEQ ID NO: 919 - DNA, 381 bp, Glycine max
taaagcacaacattgaccatgagctcttcatatcgccctcagtccaatggccagactgagaatcttaataagaccattgagatgtatctaaggtgctttgtatttgaacatcctaagagttgggttactatgctaccttgggcttaattctagtataatacttcctttcaccaaagcttgggcatgacaccatttcaagcagtttttggtagacctccaccaacggtgatgcactacgaggttgatcctaaagatcccgatccactcaaggctttattacaactacgtgatcaacttttgagcaagcttaaaggtaatttactaaaggctcaacaatatatgaagatgcaagctgataagaaaagaagagaaagagaattg

SEQ ID NO: 920 - DNA, 402 bp, Glycine max
tgtaagatttgcaagatcatcttccttgacaactccttgaaaattattgccatcaatacgcagagatgacaatttagagagtgatccaatactttcaaatggatttccactgaatttattaatagacagattgagatatcttaatgatgaaagttttccaaatgatattggaagagcaccaccaattaagttgttggaaaaatctagcatgtcaatatttttaaaagccccaatttgatctatcagattgcctgaaagttgtgaactccgaactgcaagtgttgtgattccctaggaaatacaaagagcaagaatttctaaaagttcattaacctgttggttgagtttgagatatgataaacctatctcccttaagttgcagagattatccaaagaagttga

SEQ ID NO: 921 - DNA, 397 bp, Glycine max
ggacactatgaatactcagctcgattggagcggatgggccagtctgcctcgtttttcacgaatcaataaatgattcgccctgcctcgtgaccccacgggtcaaacgtgccgatccgcgacctaatttaaaagaattcgattttataaaaatacaatacaatgaaattaagttgaatacaaatgtaaataaaatctcaataattagtcaattacatcaataaaataaatattgtcttaataaaagaaaatccaagcaatacatctaaaatatgaaatttaaacatctccaacaacaaatgattccatatttgataatgtttaatgaattctgactttaataaaaatataatacaatgaaattaagttgaatacaaatgtaaataaaatatcaataatt

SEQ ID NO: 922 - DNA, 361 bp, Glycine max
tgaaggtacgagatgatgagaggatggataaagagtgtaggaactctatcgcctgtgcctcagagaaggtctaaacattgaagagtaatcctcaaataatacaaggtgaaaaatgcacacacatggcctctatttatagactcagtgtcgcaaacaattggaaggaatttataatttcttttcaagattcacttgaatctgaatttgaattggtggagcccaattttggagccgaaattgcagtaattattattagagaatttcagttatggttcagcccactaatacaagacctggtgcaagagtttggactaatagtgctgatgtggcatgacgaatgtatagcatgaaagacatgcac

SEQ ID NO: 923 - DNA, 380 bp, Glycine max
ttggagaatgatttctatacaaaagttagtcgtataaagcgactaacagtgtgttacattatggcatttgcctatgttcctgatgcaggaggcttgaggaagaagattttggaggaagctcatcattccttttacaccactcatccgagttctactaaaatgtatcaagacttaaaggagttttattggaagggagggatgaaaaggatgtagctgaatttgtatctaaatgcctagtatgtcagcaagttaagacagagcatcagaagcccgtaggtttgttttagaggattgatatacttgaatggaaatgggagagaattgtaacaccccagattctagttcaaaacattgctttgaaaactctcgttaattatttt

SEQ ID NO: 924 - DNA, 397 bp, Glycine max
tgttgaacctctcccattactcatataatgtctctccaagttgttgccttattgatgcaagctccattggagcttgtaagcctaggatcttcttcatcaatggattcctttgcttcttggaagatgaatggcagtggaatgaagaaggaagagagagaggagacgccacttcaaggagaagatgagtctagaagaagctcaccaccatatgaggccatggataaaagcttggaggaagaaagagatgaatgaagggagagggagagaagagcacgaaattttgtgctccaaatgagctttgaaatctgaagtttaatattcaaatgatcaaagttgaaaaaaatgcacacacatgacctctatttatagcctaagtgtcacacaaaattggagggaa

SEQ ID NO: 925 - DNA, 391 bp, Glycine max
taataagtgcatatgatgtagctccatgtagagcttgtaagccttggatcttcttcatcaatggagtcctttgcttcttgaatatcaatggtagcggaatggagaagggggaaaggtgattggagacgccacgtctaggagaagatgagtcaagaacaagctcaccaccatatgaagccatggataagagcttgaacgtatgagaagataaatagagggagagggagagaaggggcacgaaatttatgcctcaaatgaggtatgacctttgaagtgtaatttctcaaataatcaaagttgaaaattgcacacacatggcctctatttatagcctaagcgttacacacaatcggagggaaatttgaatttctattcaaatttcacttgaatt

SEQ ID NO: 926 - DNA, 304 bp, Glycine max
  unsure at all n locations
agcttaaaggatactagggtaatttgttcatccatcctggtgctaccaagatgtatcatgatttaaagacgatgttttggtggcccaacataaagagagaggttattgagtttgtgtatgcatgcctagtctgtcagaaggctaagatagaacattagagaccttcagggaagttacaacccttatagataccctagtggaagtgggacagtatttccatggatttnnnnggtggactacctangacccctatagggttagattctatctgggttattctcnatagattgactaagnctgctca

SEQ ID NO: 927 - DNA, 376 bp, Glycine max
  unsure at all n locations
ttgagccaattcaaacgacaataactttttactcggttatctgantgagtcctggaaaataacgagacgctcgaaattgaatgttgaacctcagagcgaattcaaaccacaataactttttactcggatgtgtgattgagtcccgtaatatatcgagacgctcgaaattgaatgctttagctttgagccaattcacccgacaataactttttactcggatgtctgattgagtcccgcaatatatcgagacgctcgaaattgaatgttgaagctctgaaccaattcaaacgacaataactttttactcggatggctgaatgaggcccgcaatatattgagaccctcgaaattgaatgttgaatctttgagccaattc

SEQ ID NO: 928 - DNA, 325 bp, Glycine max
agcttcaacattcaatttcgagcatctctatatgttacgggactcaatcagacatccgagaaaaaagttattgtcgtttgaattagctcagaagttcaacattcaatttctagcgtctcgatatgttacgggactcaatcaaacatccgagaaaaaagttattgtcgcttgaattagctcagaggttcaacattcaatttcgagcgtctcgatatgttacgggactcaatcagacattcgagaaaaaagttattgccgtttgaattggctcagagcttcaacattcaattcccagcgtctcgatatattacgggactcaatcaca

SEQ ID NO: 929 - DNA, 439 bp, Glycine max
  unsure at all n locations
agctntaacaaccatatgatgaaacactttgctatcttgtactggtttggttgtgtttggcactccttaaattatgacaaatgatgtagttccatgtagagcttgtaggccttggaccttcttcattaatggagtccttttcttctagaagatcaatggcagtggaatggagaaggaggaaaggtcattgaagatgccacttcaaggagaagatgagtcaagaacaagttcaccaccataggaaaccatggataagagcttgaaggtaggagaagatgagtagagggagagggagagagggggccacaaaatttatgcctcaaatgaggtctgaaatttgaagtataatttctcanatgatcaaatttccaaaaaatgcacacacaaggcctctatttatatcctaagtgtcacacacaattagagggaaatttgaatt

SEQ ID NO: 930 - DNA, 429 bp, Glycine max
  unsure at all n locations
agcttctaaactntatacaagaatgattctctgataccacttgttggacaagtggtctcagatatcttaagaagggggggttgaattaagatatcacaaactatttcccttattaaaattttatttcactttctattcaagttataaattcccttaaaaatgaacttcttaaatattgattcaaatagagcaatttgaatatgaatataaaacaataataaataaaggagtttaagggaagagagattgcaaactcatatttatactggttcggtcacacccttgtgcctacgtccagtccccaagcaacccgcttgagagttccactatcttgtaaaagcttattacaagatctgaaccacacaaggacaacccttcctttgtgttcagatttctgtacaacaagagaccctcggtctcttaatcctt

SEQ ID NO: 931 - DNA, 406 bp, Glycine max
  unsure at all n locations
actcaagctagtagcacattcaaaccacaataactnttaactcagtatgtctgattgagtccggtaatttatctagacgctcataaatgaatacggaagcacgtaacaaatgcaaactgcaataaattttaactcagatgtccgaatgaatcccgtaatatatcgagacactcgtaattgaaaacagaagctctaaacaaattctaacgacaataactttttactcagatgtccgattgtgtccagtaatatatcgagacgcttgaaattgaaaactgaagctctgagcaaattcaaacgacaataactttttactcggatgtatgattgagtcccggagtatatcgagacacttgaaattcagaacagaagctctgagcaaatttaaacgacaataacatttaac

SEQ ID NO: 932 - DNA, 431 bp, Glycine max
agcttctttcaaaatgctactcacaatattgcggattctcttgtccatctccgtgtctacttccctaggaattgttgcagggctagggttttcagcaatcttcactccctgttgtcttctgggaaccagtgtctcagggactgaagcttgaccaggaattacttgtatgggttggatgttgaaatctggttgttcctggtgcggagatgatggtacagcgggtgaaccagaagcggaagtttcttttggtgaggaagccatggaaaaacacagcgtttggaatgatttcgtaaatctcaaaatactattgggaaatgctggtgaaaacactaatgctcagcagatattaatttgaatgaataatgtataggggcgcgtgaagcaacggtcaaatacgtttcgcttaatagtgaacgtgctattaatgttaa

SEQ ID NO: 933 - DNA, 351 bp, Glycine max
  unsure at all n locations
tgatgctctgatacctgttgntaaacaagtggcctcagatatcttaagaagggggggttgaattaatatatgccaaacttttctctctaattaagaatctatcttactttttactaaagatatgaattcccttggtaacaatcttcttagatattgattcagctgaatcaacttgaatatgaatataaagcaatattccatcaaggagattaatggaatagagaatgcaaactcagttttatactgtttcggccacacccttgtgcctacgtccagtccccaagcaacccgcttgagagtttcactaacttgttaattccttgtacaagttctaaacacacaaggacaacc

SEQ ID NO: 934 - DNA, 350 bp, Glycine max
  unsure at all n locations
ntggagtttccaagtgccaattcgttttcttctttagtccagtcttcttctggcttcaattcatcagtgggctttccttctgtgtccagcatcttgggatgttcccagcctttgatgacagctttccaggttctgctatccagtgatttgaggaaggccaccatccttgctttccagtattcatagttgggtccatctaggattggtggtctgttcactggtcctccttctttctccatgttcatcagaatttatctccccagatctcactctgtgatttcgagtgtgagctctgataccaattgaaattctgataccaggggacagatgtcgtaccggatgtcacgact

SEQ ID NO: 935 - DNA, 398 bp, Glycine max
tgtagcatattcaaaccacaataactgttaactcggatgtctgattgagtccggcaatttatctagacgctcataaatgaatacggaagcacgtagcaaatgcaaactgcaataaattttaactcagatgtccgaatgaatcccgtaatatatcgagacgctcgtaattgaaaacagaagctctaagcaaattctaacgacaataactttttactcagatgtccgattgtgtccagtaatatatcgagacgctcgaaattgaaaactgaagctctgagcaaattcaaacgacaataactttttactcggatgtatgattgagtcccggagtatatcgagacacgtgaaattcagaacagaagctctgagcaaatttaaacgacaataacatttaactc

SEQ ID NO: 936 - DNA, 426 bp, Glycine max
  unsure at all n locations
gcttctttcanaatgctactcacaataccgcggattntcttgtccatctccgtgtctacttccctaggaattgttgcagggctagggttttcagcaatcttcactccctgttgtcttctgggaaccagtttctcagggactgaagcttgaccaggaattacttgtatgggttggatgttgaaatctggttgttcctggtgcggagatgatggtacagcgggtgaaccagaagcggaagtttcttttggtgaggaagccatggaaaaacagagcgtttggaatgatttcgtaaatctcagaaaactattgggaaatgctggtgaaaacacgaatgccaagcagatataaatttgaatgaagaatgtagaggggcgtgtgaagcaacggtcgaattcgttttggcttaatagtgaacgtgctattaat

SEQ ID NO: 937 - DNA, 387 bp, Glycine max
  unsure at all n locations
tgtaatcaattacacacatattgtaatcgattaccataggagatnttcagaaaatattctcaattgtctcatcttttcatttggttcttgaatggctatcaaaggcctatatatatgtgacttgagacacgaatttgctaagagtttttcagaacaaaaaggtcttatcctcttaaaaagcaaaatcgttttatcctcttacaaattccttggccaaatcacttgtgattcaataaggaattgtttgagtgctcaaattgttcaatctatctctttcaagagagatttcttcttcttttcttctttattctgaaaagggattaagagaccgagggtctcttgttgtgaaagaattctcaacacaaaggaaggattgtccttgtgtgt

SEQ ID NO: 938 - DNA, 298 bp, Glycine max
  unsure at all n locations
tgaatacatagctgcaagaagttgttgtgctcaaagtctttggatgaaacaacaatgatgtaagctccattggagcttgtaagcctaagatcttcttcatcaatggattcctttgcttcttggaagatgaatggcagccgaatggagaaaggaacagagagatgagactccactcgatgagaagatgagtctagagaaagctcaccaccatatgaggccatggataagagcttgtangaagaaggagatgaatgaacggagagggagagaagagcacganatattgtgctctaaatga

SEQ ID NO: 939 - DNA, 402 bp, Glycine max
tatcctttgaaagatcaatactctcagttcttttgaattcgttcactagaaaatccaataaagcattatcaaaatcctctcctcccaagaaagtgtcaccatttgttgctttcacctggacacaaaaaagttattagtgacaatttccaacattatttccaattactggctatgaaatataagcatagaataaacaagtgttaatacctcaaaaacaccattagaaatctctaagatggacacatcaaatgttccacctccaagatcaaaaactgcaatgagaccctccttgttgttcatcccataggaaagtgcagcggcagtgggctcattgatgattctctgaacatcaagaccagcaattctaccggcatcttttgttgcctgcctctgagcatcatt

SEQ ID NO: 940 - DNA, 375 bp, Glycine max
acaagtctcctttgatgagtctgatctcattcttccaaggaaggattttttagatgatatttcagataccttagaagatacacatattcatggaaatgactctgaagaacaagatgaatgaagctatgacgattctcaagataatggagttagaggaaataatgatcttccgcgagaatggatagcctcaagagatcatcccctcgacaacattattggtgatatatcagaaggggtaacaactagacattctcttaaagagttatgcaataatatggcttttgtatctatgattgcacctaagaatataaaagaagcgatagtatatgataactggataatttccatgcaagaagaactgattcaatttgaaag

SEQ ID NO: 941 - DNA, 391 bp, Glycine max
tgaaagtgcataccccaccatttttcatagtaaaacactggtaatgtgtctactattattgagatcatatctttctttgtcattggaggtgccacttgagctgccaggtctctccacctttgggcgtattctttgaaagattcgtgcccctttttgcacatgttctgtagttgcatcctatccggagccatattagaattgtattgatactgcccaatgaaggcaaccattaagtctttccaagaatggactcgagaaagttccaagttagtgtactaggtaacagctaccccgataagactttcttggaagaaatgtatcaacagtttctcatcttttgcgtatgcccccatcttccgacaatacatctttagatggttcttggggcaag

SEQ ID NO: 942 - DNA, 421 bp, Glycine max
agcttgtaatctattactagaagatttaaacgttttattacaacctttagaaatttgaatttaaattttaaagcctgtaattgattacaacttgtgtgtaattgattaccaacatgagaattcaaatttcaagtctgaagagtcacaactcttcagaaattaactgtgtaatcgattacaacagttatgtaatcgattaccaataaggaattttcgaaaataactcccaagagtcacaactgttcaaattttttttgaatggtcatcaatggcctataaatcaattaccagacatgaaaattcaaatttcaagtctgaagagtcacaactctttagaaactaattgtgtaatcgattacaacaattatgtaatcgattaccagtaacgaattttcgaaataacttccaagagtcacgacta

SEQ ID NO: 943 - DNA, 432 bp, Glycine max
  unsure at all n locations
agctntntattntcagtagatgaagatttatctgtggccacctcatggactcctctaaggacaataccatcatttcttgcactgaattgttgngagttggaagccatcttctcaatcaaattcctagcctcaacaggggtcatatcaccaagagctccaccactgggagcatcaatcatactcctctccatgttgctaagtcccttgtagaaatattgaagaaggagttgctcaaaaatctggtggtgaggacagcttgcacacaatttcttgaatctttcccagtactcctacaagctctctccactaagttgcctgatgcctgaaatgtcttttctgatggcagtggtcctagatgcaaggaagaatttctccaagaacaccctcttaaggtcatcccagatgaaaatggacctgggagcaaggtagtat

SEQ ID NO: 944 - DNA, 417 bp, Glycine max
gcttgttcagaaatgtgcatttgtgtgtaatacacaattaatggttcaccacaacaaaatggtgtatcagaaaggcggaatagaactttaatggatatgattaggagtatgttaatcaattagactttatccgtatccttgtggatgtataccttgaaaactgccatgtagttgttgaacaggattcctagtaaggtagttccaaagacaccttttgagctgtagacaaataggatacctagtataaggcacctgcatgtttggggttgccaggcagaaataaggatttataatccgcaagaaagaaaattggatgcaagaacaatcagtggatatttcattggttatccagaaaagtcaaaggggtatatgttctattgtcctaatcatagtatgagaattatcgaaactggaaat

SEQ ID NO: 945 - DNA, 371 bp, Glycine max
ctcaagcttaacaaaatataaatctaggagcttctacctatgtattataaacaaatttaaattaaaactcatggagagtttagtaagggaactcagaaaaatagccccgtaaaataaaactcatggggtgcctcctcacaaagggggtcgcagtgaccaggcttgggcgactggttatcaaaaacacaggtgttcacaaaggcataagatcatttatgggggcttagatgtaatctggaatatgagagatgtttaatgaaaggaaaatggactccatttggataaaaataactactttctttagacgccttttttttgcctagattcttcacaacctatctaagtggttaagctactttccgcgttttata

SEQ ID NO: 946 - DNA, 404 bp, Glycine max
  unsure at all n locations
agctntgaaggtgcgtagtccaccactttccctagtataatactggtaatgtgtctactatcattgtcatcgtttttttcgtcattgaggtgccacttaagttgccaggttctctccacctttgggcgtattcttttgaaagaatcgtgccccctttttgcacatgttctgtagttgcaccctatccgaagacattatactgacactgcctaacgaaggcaaccactaggtccttccaagaatggactcgagaaggttccaagttagtgtaccaggtaacagctaccccagtaagactntcttggaaggaatgtatcagcaattccttatcttttgcgtatgcccccatcttgcgataatgcatctttagatggctcttggggcaagtagtcctctcggacttg

SEQ ID NO: 947 - DNA, 294 bp, Glycine max
  unsure at all n locations
agctntgataaagaaggcgatgggatgttcctattgtgacaaaaccgcccccattccgactctcaacgcgtttgtttccactgtgaatggaaggctgaactcatgcaaggccagcacaggcgccgtcgacaatgcatgtttgagattgtcaaaggccaaatgagctngcggggtccagtggaagggatcaacantgatgaactagactaacggagttgcaatcgttgcatatccactaatgaagcgacgataaaatcctaccacactaangaagctttgcacagcttttatgga

SEQ ID NO: 948 - DNA, 393 bp, Glycine max
  unsure at all n locations
tactcccgcttaataagtgcatntgatgtagctccatgtagagcttgtaggccttggatcttcttcatcaatggagtcctttgcttcttgaatatcaatggtagcggaatggagaagggggaaaggtgattggagacgccacgtcaaggagaagatgagtcaagaacaagctcaccaccatatgaagccatggataagagcttgaacgtaagagaagataaatagagggagagggagagaaggggcacgaaatttatgcctcaaatgaggtatgacctttgaagtgtaatttctcanataatcaaagttgaaaattgcacacacatggcctctatttatagcctaagcgttacacaaaattggagggaaatttgaatttctattcaaatttca

SEQ ID NO: 949 - DNA, 421 bp, Glycine max
ttagaaaatgatttctataccaaagttagtcgtataatgcaactaacaaggatgaagctttaagtgtgattcctttctttttcttatcattctcctcatgttgattcagtctcattagatccatttcgtgttcctataactttccaaataaagttgcaagagacatgttagaaagatcccttgattctgtaatagttgttacctttggttgtcattccctacttaaacatcttagaactttattaataagatcctcattgggaaatatctttcctaatgatgcaagatgatttactatgtgtgtgaatctcttttgcatatcatgtatagtttcatttggattcattctaaacaattcatattcatgggttaaggtatttattctagacccttttacatctatggttccttcatgggttac

SEQ ID NO: 950 - DNA, 398 bp, Glycine max
tgaaggtaggagaagatgagtggagggagaaggagagaaagagcacgaaattttatgcctcaagtgaggtctaaaatttgaagtgtaattctcaaatgatcaaagttgaaaaaaatgcacacacatgacctctatttatagcctaagtgtcacacaaaataggaggggaatttgaatttctattcaaatttcacttgaatttgaatttaaattggtggagccaaatttggagccaaaatttcactaattatgattagtgaattgtagctatgattcaacccactaatccaagatcaagtccaagattctccactaagtgtgcttatgtgtcatgaggcatgtaaaacatgaaggatatgcacaaagtgtgactatatgatgctgtaatggggagtagc

SEQ ID NO: 951 - DNA, 383 bp, Glycine max
agcttcttggcaatccccattccagcgatcagtttggtttttgcgtaagagcttgaacaacggctcacaaatggcggtgagctgtgatatgaatctggcaatataattcaagcgtcccaggaagcctcggacttgcctctcagtacgtggttctggcatctcaaggatggccttcaccttttcggggtctacctctatccctttctggcttacaatgaaaccaagcaatttccctgatttgaccccaaaggtacacttggcggggttcaaccttaactgatatttcttaagcctttcgaacaacttccgcaggttgacaaggtgttcttcctcagatttagatttagcaattatgtcgtccacgtagacctcgatctcttgat

SEQ ID NO: 952 - DNA, 421 bp, Glycine max
  unsure at all n locations
agctntataagcaaaaagtaaaaatctatcatggcgaaaagctatcaaaaaggaatttttagcttggtcaacaggtattgttatttaattcttgattaagattgtttccaagtaagctgaaatccaagtggtctagaccattcatcatcaaagaagttatgccatatggagcagtgatattggaggacccaaccaccaaaaggacatggaccgtgaatggtagaagaatcaaacactacctaggtggagatttcgagaggataatcactgttgtccagatgcaaaaggcttgaaccataacgaagacgtccaattataaagacgttaaagaagtgctcttgggaggcaacccagtgttttttaaactttgtcttaacttgtgttactttaatcttatgccttatatatctaanacttactt

SEQ ID NO: 953 - DNA, 409 bp, Glycine max
  unsure at all n locations
agctttataagcaaaaagtaaaaatctatcatggcaaaaagctatcaaaaaggaatttttagcttggtcaacaggtattgttatttaattcttgattaagattgtttccaagtaagctgaaatccaagtggtctagaccattcatcatcaaagaagttatgccatatggagcagtgatattggaggacccaaccaccaaaaggacatggaccgtgaatggtagaagaatcaaacactacctaggtggagatttcgagaggataatcactgttgtccagatgcaaaaggcttgaaccataacgaagacgtncaattataaagacgttaaagaagtgctcttgggaggcaacccagtgttttttaaactttgtcttaacttgtgtactntaatcttatgccttatatatct

SEQ ID NO: 954 - DNA, 374 bp, Glycine max
agcttcttataccaatgtcacgaggagtgtggtagtcagattcatcaagaaggagctaatttgtcgatgcggactccctaggaagatcatcactgacaatggcaccaatctgaacaacaagatgatgtaggaaatgtgcgaggatttcaagatccagcatcataactccaccccttatcgtccaaagatgaatggggctgtagaggctgcaaataaaaatattaagaagattgtccagaagatgaccgtgtcatacaaagattggcatgagatgttgcctttcgccctacatggatatagaacttcagtacgaacttctactggggcaacgccgtattccttggtttataggatggaagcaatactcctatttg

SEQ ID NO: 955 - DNA, 338 bp, Glycine max
agcttggaaaatggcagggcaatcttgctaaaatcctggatgaatctcttctaaaaacttgcatgtccgagaaaagaacgtacttcctgcatagaagcgacgtaaggaagagaagtaataacatcgatcttggccttatcaacctcaatacctttactaaagaccaaatgccctaagactatacctttatggaccataaaatgacatttttcaaagttaaaaacaaggccaatctcaatgcattggtcaaaaaatctagagaggctactcaagcaacccacttgagatttttcactccctttgtaaaaatcgtttacaacttctgaaccacacaggga

SEQ ID NO: 956 - DNA, 423 bp, Glycine max
  unsure at all n locations
agctnttaggcagtaaaatagtataaaatctaatgaaagaaaaaataagttggaggaaaataatcataagctacaaatgttcaatttcataaaaaataacttttttcttagaaagaaaagcattttgtaaatttaatttaggattccaaatatccaacttaattgtttcggaaaaaacttaaaaaaaaacagttaaaattttagattatgagttctcccaaacattttaatcacataaccttatatttcctagattaatacttaacctttctactatttttgtcccttttttttctctcttcttcaatcaatttaattctctcacaatcttatctaatattatcaagtgtcttaatttagtcatatttactatatttttttaaataaaatgtttaataaaaaaattaatgaaacatataaagc

SEQ ID NO: 957 - DNA, 417 bp, Glycine max
agcttcttagtcttggctgatgaagatgaattcgtgtttacttcatgcactcctctaatgacaatagcatcatcacttctatcactaaattgatgggagtttgaagccatcttctcaattaaacttctggcttaagtaggggtcatgtctccaagggctccaccactggcagcatctatcatacttctctccatgttactgagtccttcataaaaatattggaggagaagctgctcaaaaatctggtggtgagggcaactggcacatagtttcttaaatctctcccagtattcatataagctatctccactgagttgcctaatgcctgaaatatcctttctaaaggttgtggtcctggaaacacgataatattttctaaaaagaatactctcttgaggccgcccatctcgtgatgga

SEQ ID NO: 958 - DNA, 418 bp, Glycine max
  unsure at all n locations
tagtaaatatggtccaatgaaggaggtgaagttttattgagaaggcaaatgggaagtcgaatggctattgtcaagttgagttatttgacccttttgctgctactacttgcaaggaagggatgaatggattttttttaattttaatttaatttttcattctaaattaattttaatttaattaaaatatgatgttatatcagatgacaagtggtcagcatacatgtcacacttaatctaacgtgatatcacaagtagtttgtcgacgtatcaaataaataaccacatcagcaattaatggatcctttntaacgacagagacctcatacaaaacttttaaattatagtgacccatctcannaatgaaaaattatgaggaatcaaatgtaaaattcaagtatatatcangggatcaaaatat

SEQ ID NO: 959 - DNA, 440 bp, Glycine max
ctcaagcttgtaggctacatttacaaccatacattggctttgaactctatgaggaaattcacactttaaactgaattagagacatggagttacaagatttgctaccactttcttaactttgcaaagattgcataagcaaaaggccaatcttagaaggatgtttaattcagatgaatggttgaagtctaaggcagctaaagagcccaaggggaagcaagcaacagatgttgttcttatgccatcattttggaatgatgttgtttatgctttaaaggctatggggcctcttgtaagtgtgttgaggttggtggataatgaaaaaaaacctacaatgggtttcatttatgaagcaatggatagggccaaagaagcaattcaaagagctttcaataacaatgaagggaagtataaggatatcctttgcatcattgataaaagat

SEQ ID NO: 960 - DNA, 366 bp, Glycine max
agcttatctgctataagttagaagctaaataactaaaagcttatattctctagctgatttaatttacagtatttaataagactaatatttaaaaaatataaatgtcaaatgatgaaaaattatatatttattatttctaacatttaaattttatgtctaataaatttcatcttaaaaagtaggtaaaattttaatctctttttgttggggtttcaatgctatacaatggattatgcataattttgatatttttatcatcaactctgatttagaaaccaaatattttaaccataaatccaaataaacaatgcaataattcattaaaataaatagtttgacattaaataaattaataaaaaagtagaa

SEQ ID NO: 961 - DNA, 278 bp, Glycine max
tgaattgaacaatggaagatcttgagaaattcaatcggtcttaacttttcactcggaagtccgattcacgcgcataatatattgagacgctctcgtgaaattcaaatggtcataacttttcactcagaggtccgattcatgcgcataatatatcgagatgcacataattgaacaacggaagctctcgagaaattcatatggtcataccttttaactcggagctctgatttaggcgcataatacattgagacgctcgaaattgaacaatggaagctctc

SEQ ID NO: 962 - DNA, 383 bp, Glycine max
  unsure at all n locations
agcttattggatagaatactccaagaggattgggctagagcagctaaagaaggccctaggattctcatgaacctcanggtaaaattttgagcccatgggccaaggctgggtccactcttctttgtaaatattagaataggttttctttcttttaggggttgtattttgatgcaatnctaccccttaagcttattggatagaagactccaagaggatcgggctagagcagctaaagaaggctctaggcttctcatgtacctcagggtagatttctgagcccatgggccaaggctgggtccactcttctttgtaaatattagaatagtgtttccttcttttaggccttgtattttgaccattctagtagtataggaatttaccct

SEQ ID NO: 963 - DNA, 374 bp, Glycine max
agctttggctattcaactatcataatttttgactcgaatgtatgatcgatgccgattatatatcccgacactcaaaatggaacaacagaagctcttgagaaattcaaatggccaaaacttttctctcggatgtctgattcacgtgcattttatatcgagaccctcgaaattgaacagggaagttttggcaaatatcaatggccatattttttagtcgaatatatgatcgacgcccatgaaatatcgagacgctcaaaaatgaaataagacagctcgcgagaaattgaaatggttataactgtttacctggatgtgagatttacgcgcataatatattgaagttttgaaattgaaaacgaaaagtgttggctaat

SEQ ID NO: 964 - DNA, 381 bp, Glycine max
  unsure at all n locations
agcttattttcatcaaatcttatgttaataacttcttcaactaccaaggttcttgagttatacactctgagtgcctttgaagtttgaaagtatccaagaaatatctcattatcacttttcgagtcaaattttcccaagttgtcctttgtgttgagaataaaatatttgcatccaaatggatgaaaatatgttatgttgggtttcatcccttccataattcataaggagtatttttaaggttaggtcttatgtaaattcttttttgaagataacaagtagtattcactgcttcaacccagaagtgtttaagggttgaattatcattaagcatgggcctagtcatctcttgtagatatctattaattntttcaattacccctg

SEQ ID NO: 965 - DNA, 421 bp, Glycine max
tatcataggtggggtagttgagggaggcactatgaattttttcactaaaataatttatagggtgcccaccttgtaacaatacagctccaactcccactccagtggcatcacattctagctcaaaaggtttagaaaagtcaggaagagctagaacatgttccttattaagcttttctttgagaaaagcaaaggcttgctcttgtttttcacccaagtaaatgccacattctttttcactagctcattgagaggtgatgcaattgtagagaaattaggaacgaaccttctatagaagcttgctaacccatggaagctcctaatatctcccacactttttggggtgggccattcttggatggccttgatattctcagggtccacttggaccccatttctaccaactaccaaccctaagaaacta

SEQ ID NO: 966 - DNA, 412 bp, Glycine max
agcttgaagagaatggaagagggaggatattaaaacttgagatagcaacatggaaagaaatgaaggtgtttatgaggaagacattcttaccaccttcttgtgagaaagatgcttatgaaaggcttcaaaacctcacacaaggtagcaagagtcttgaagagtaccatcaagaaatgataatgactatgaggagagctaattacaagagcctaaaacttccatggcaaggttcctatgtgggcttaatagagacattcaatgcattgtgaagttgaagcactatgaaagtttggaggatatggtgcagaaagccaagaaagtggagagacaacctgagaggaagcattcctacaagaagacctatcactatgacttttctagtggtaaagacaagtccaagaaggagggatct

SEQ ID NO: 967 - DNA, 361 bp, Glycine max
tgccgcgacacctaaattcgatgtacggcaaatcctcatgcgggatcagttggaacatggatgccagagtggcaagggcatcggccatctaattctccactctggggatgtggtgaaaggatacatcatcaaagtactctatcagttttctaatgtaggcctggtagggtatcaacttatgatccctggtctcctattctactttcaattggtggattaccaaggctaagtccccatataccttgagcaacttgaccttgaagtcaatttccgcttggatcccaagggcatacgcctcatattcagccatgttgttcgtgcagtcaaagcccaacctagtcgtgaagggtatacattgatc

SEQ ID NO: 968 - DNA, 403 bp, Glycine max
agcttgacacaatttatctttctcaaacttgagtttctgaagaccaattactaagtctttcgtaactagatgagttagattatgcatattagtatgtgcagtcctacaatgccacaaccatgaatcatctattttactcaccaagcaactaagctcatgaaaagatgcatgctcaatattcagcatatagatgttacctattctcttaccaaggtggacaactttaccggatatggcttcacttatcagacaacaatttttgttgaattcaatcttgacacctttatcacaaagttgactaatgcttataagactatgctgtagtccatccacatataacacattctttatctgatttttgaggtgatcccctatatttccttctcccattatattacctttg

SEQ ID NO: 969 - DNA, 377 bp, Glycine max
  unsure at all n locations
tcaatttgcttggatagcaacttgttatgtgccaacaatgcatcatatgatgaaagttccagcacgcttcttttggttgggatgtccttcagcagtcttggactctgtgaagtatttcttcaagaatctttcaaccacttcatcccaagtcttaagactattacctttaaatgaatggagccatctttgtgcctctccagacatggaaaatgaaaacaagctcaatctaacagcatcttcatgcacgccagccagtctgacagtgttgcaaatttcaatataagtggctagatgtgcatacaggtcttcttttggcagaccatgaaacanattgttcttaatcaactaaattaatgaatgtggataggttatatttt

SEQ ID NO: 970 - DNA, 412 bp, Glycine max
  unsure at all n locations
tatgctgcaaacatttataatagaccctctcagtagcttaaccaacaacaatataataattatgatctttcaagcaacagatataatccaggttggaagaatcatccaaatctgagatgggcaagtcttccacaacaacaacagcctgtccctcctttccagaatgctgctggttcaagcaggccatatgttcctcctccaatgcagcagcaacaacaacaacaaagacaacaagcagctgaggccccttctcaaccttccttagaggagttagtgaggcaaatgatcatccagaatatgcaattntagtaagagacaagagcctccattcagactctgacanattagatagggcagatggctacttagttgaaccaagctcagtcccaaaattctaacaaattgtcttcac

SEQ ID NO: 971 - DNA, 404 bp, Glycine max
  unsure at all n locations
agcttgttgatctcttcatgatgatcaacacaatattgcatttgctgcttcaattttgggctgcagatttcataagcaatgcatttagtatgtttacttggtaggtttaaattttcaataaaagtaattaatttttttagaatttaattttttatgcaaggtcaatgtgagttcttgttacacaaatgtaattcattttattaccatattacccaattcattaatatgatgcagtgaatttgtattaaaaaaatatacttttaattatatataatatagaagttttagcatttagcaactcactctttaacacatttttatataagaaattntattatacgttaaaatttattanaaaatataaaagaaaaaagactcacaaaaattatgaattttaattaatt

SEQ ID NO: 972 - DNA, 404 bp, Glycine max
tataatatattgatatgctcgaaactaaacatcggaagctctcgagaaattcaaatggtcataacttttcacacggatgtccgattcgggtgcataatatgtcgagatgcgtcaaagttgaacaacggaagctctcgtgaaattcaaatggtcataacttttcacactgatgtttgattcaggcttataatataacgatacgctcgtaattaaacatcggaagctctcgagaaattcaattggtcatcacttttcacacggatgtccgattcgggtgcaaaatatgtcgacacgctcgaaattgaacaacggaagctctcgagaaattcatatggtcataacttttcactcggatgtccgattcaggcgtatcacatatacagacgctcacaatttgacaacgg

SEQ ID NO: 973 - DNA, 398 bp, Glycine max
  unsure at all n locations
tggtcacctcctttntcaccacatctagaatgatggggttgagtcgttgctgtggctgcctcactggcttagctccatcctctaaaagtatcctatgcatgcaggtagatgggctaatgccaagaatgttttctaaagtccatccaatggatttcttgtgcttcttgagcactagcagcaacttctcctcttgctcagtagcaagggaggcanagatgatcactgtanattnttccttgtcctcacagtaagcatacttgaggtttactgggaaggacttcaactctggtgtgggtggtggctgaacagtgngaggaaccacngtaggagaagaagaaaaacgttctcggcttgtacctcataaagcaagtaagaagatatgtaccttctgcaacatg

SEQ ID NO: 974 - DNA, 365 bp, Glycine max
  unsure at all n locations
tattgggcattaaagtttttgaacttcgattcanatgcatctagtgaacacaggaagctcccactccatganatggaagaattgtggtttccagcttatgagaattcccagctttataagcaaagaagtaaaatttatcatgacaaaaaagttgtcaaaaaagaaaattttcagctttggtcaacaagtattggtatttaattatagattaagattgtttccaggtaatctgaaatccaagtggttcggaccattcatcatcaaagaagttatgccacatggagcagtgatattggaggacccaactaccanaaggacatggaccgtgaatggaacataataaacactagttagatgatatttca

SEQ ID NO: 975 - DNA, 380 bp, Glycine max
tgtaagaattgcaagatcatcttccttgacaactccttgataattattgccatcaatacgcagagatgacaatttagagagtgatccaatactttcaaatggatttccactgaatttattaatagacagattgagatatcttaatgatgaaagttttccaaatgatattggaagagcaccaccaattaagttgttggaaaaatctagcatgtcaatatttttaaaagccccaatttgatctatcagattgcctgaaagttgtgaactccgaactgcaagtgttgtgattccctatgaaatacaaggagcaagaatttctaaaagttcattaacctgttggttgagtttgagatatgataaacctatcttccttaagttgc

SEQ ID NO: 976 - DNA, 389 bp, Glycine max
  unsure at all n locations
agctngctccactatatttggattggatcataaagtttgcacccctgaatcaataacattntgttcactcattgatggcttggccagacatggcaaggtgaatgatgcctatatgctttatgaaaaaatgttagattatggtcagactccaaatgcagtgttgtatacatcccttattaggtactttttctcgtgtggtaggaaggaagatgctcacaaaatttataaagagatgatgtataagggctggtctcctattccttgctccttaataattacatggattgtcttttcaaagctggtgaaattgagaaaggtatggctctatttcaagagataaagcctcaaggtctaacttctgatgtaagacgtattcaatttttattcat

SEQ ID NO: 977 - DNA, 409 bp, Glycine max
agcttaaagataaattaagaataatgattgaatatcttatcttatattctgataatatattctatcaaatacaaactgattagttaggctaaaaatactgatataatatcttatcatatattctataactcgtaaattaccccacaaaaattatttacttcgaaatcttctagctgaaatttcttggacaaatttccaaattcaattgtaagcattattatcacagtttcagataaaacaaaaataacattacctctctactcttataatccatacaaaaattatcatattaaggctatgcaacttcttctgaattctttttaaccacttgatcaagcataattaaaatatccaatatccaatgtcaatggataaaaacatgtagaatgggagtataattctacatgtt

SEQ ID NO: 978 - DNA, 333 bp, Glycine max
tgtccaaaatgcagacaataataatttttaactcggatattcaattgagtattgtaatatatcgagacgctcgtaatggaaaacagaagctcgtataaaatgcaaatcgcaataacttttaactcggatgatcgagtgggtcccgtaatatatcgagacacttgaaattgaaagcagaagctctgagcaaattcgaacgacaataacttttgactcggatatccgattgagtcatttaataattcgagacgctcacaactgaatacacaagctctaagcttattcaaatgacaataacttttgactctgatgtccgattgaggcattatataa

SEQ ID NO: 979 - DNA, 305 bp, Glycine max
agctattgtattcaattttgatgcgtctttaactattaaatgactcaatcggatatccgagtcaaaagctattgtcgtttgaatttgctcagagcttctgcttgaaattcgagtgtcttgatttattacgggactctatcgatcatccgagttaaaagttattgtcttttgaatttgcttagagttactgttttcaatttcgggcatctcgatatactacaggactcacttccacttttcagtaaaaagttattgccatttgaattttgtgagagcttctatattcaatttcgagcgtcctgaat

SEQ ID NO: 980 - DNA, 396 bp, Glycine max
agcttgtgcatccaataccttgatgaggatgtcccatatgttcttaagactggactgattcatttgcttccaaagtttcatggccttgcaggtgacgacccgcacaaacatttgaaagaatgtcacattgtctgctccaccatgaaacccccagatgtccaagaggatcacatatttctgaaggcttttcctcattcattagagggagtggcaaatgactggctgtattaccttgctccaaggttcatcacgagctgggatgaccttaagaaagtattcttagaaaaatttttccctgcttccaggaccacatccattaggaaggatatctaaggtataagacaactcaatggagagagccttgttgagtactgggagagattaagaaactatgtg

SEQ ID NO: 981 - DNA, 240 bp, Glycine max
  unsure at all n locations
agcttntcggtatattatgcacctgaatcagacctccgggtgacaagttatgaccatttgaatttctcgagagcttccgttgttcaatttcgagcgtctcgatatcttatgcgcttgaatcggacctccgagcgaaaagttaagaccatttgaattgctcaatagcttccactattcaatttctagcgtctcgatatattatacgcctgaatcggacctccgagtgaaaagttgtgacca

SEQ ID NO: 982 - DNA, 257 bp, Glycine max
tctcgatatattatgcgcctgattcagagtttcgtgtgaaaagttatgactcttggaatttctcgagagcttccgatgttctatttcgagcgtctcgatatattatgcacctgaatcggacttccttgtgacatgttatgaccattttaggtactcccgagattctggtgttcaatttcacacttctcgatatattatgcggctgaatcagacttccgtctgaagagttatgaccatttgaatttatcgggagcttt

SEQ ID NO: 983 - DNA, 302 bp, Glycine max
agcttctcgatatattatgcgcctgaatctgactttctgtttcagaagttatgaccatatgaatttctccactgtattccgtgtgacaagatatgaccatttgaatttctcgatagcattcgttgttcaatttcgagcgtctcgatatattatgcgcctgaatcggacttccgtgtgacaagctatgaccatttgaatttggcgagagcatgcggtgatagatttcgagcggctcgatatattatgcgcctgaatcagacattcgtgtgacaagttatgcgcatttgaatttctcgagagca

SEQ ID NO: 984 - DNA, 414 bp, Glycine max
  unsure at all n locations
tcaagaataatggcctcaacaaacttcttattcatagaaggaaattcaattaataggcctcctacttttaatggagagggttaccattactggaaaacccaaatgcaaatcttcattgaggcaatagacttaaacatttgggaagccgtagaagtacggtcttatgtacccactatggtggctggaaatgcaacaatagaaaaacctacagaagagtggactgaagatgaaagaagattagtgcagtacaatttaaaggctaaaaacatcattacttttgccctaagaatggatgaatattttagggtttcaaattgtangagtgctaaggatatgtggcacactttacaagttacacatgagggcacaactgatgttaaacaatctangatacatactntaactcatgagtat

SEQ ID NO: 985 - DNA, 404 bp, Glycine max
agcttcatgcttaagtatgtatggcaaaatcttattactgttgttcaagacatacaagtgagcttgtaacaaatcttctagacttggagtgatcacatgtagtcctcttgaacccttaccacccactcaggaaggccaacaggtttagccttctcaatgtattttgaacaaaattcaatggcttcttctgcaatgtacctttcaacaatagatgcttctggatgatatagattctttgtatacccttttaagatcttcatgtatcgctcaaccgggtacatccaccgcaaataaacaggaccacaacatttgatttctcttaccagatgcacaatcaagtgaattgtgatgtcaaaaaaagcaggggggaaaatacatctccaactggcacagtataattggga

SEQ ID NO: 986 - DNA, 369 bp, Glycine max
gttttagtttcagatgatgcttatgggtttgtagctacctcatgcactcctctaatgactatggcatgatttctggcgctaaactgctaggagttggaggccatcttctcaattaaatttctagcttcagcaggagtcatgtctccaagggctccaccactggcagcatctatcatacttctctccatattactgagtccttcataaaaatattggagaagaagctgttctgatatctgatggtgggagcaactggcacatagtttcttatatctctcctagtactcatacaggctctctccactgagttgtctaatacctgagatatcctttctgatggctgtggtcctcgaagcagggaaaaaattt

SEQ ID NO: 987 - DNA, 332 bp, Glycine max
agcttgggggagccttgatgctctcatagggaggcttagggctgcttatgaggaaaatggtgggtccccagagactaacccttttgcaagtggctccatcaaggtgtatctcaaaaaggttagggagtgccaagccaaggcaagaggtatcccttacaagaagaaaaagaaggcctcaaatcaaagcaagggaaatgatgaatcatcctccaccatgcacttctcttgaacaacatcttcagtatcgatccctttggacctttcaagtcatggtaattaattaattaactaatcttgcttgccatcacactcatgatcataaactatgctta

SEQ ID NO: 988 - DNA, 412 bp, Glycine max
  unsure at all n locations
gtaaccccccttntaaatgataggcttagaatgcagattaagacgaagaagaagaagaagaagaagaagaagacgaagaagcaatcaatttaacaatgttcttttaaatgcgtaagatcaaattgattgcgataaaataaatgagataagggaagagagaaatgcaaactcaatttatactgggtcggccacttctcgtgcctacgtccagtcctcaatcaactcacttgatattttcactaacttcgtaaaaaaacctttttacaacttctgaacacccaaggaatccctttcccttgtgttcangaaactcacaattcaagagacaaccagtctcttgattacaacttactttctgagatgaatataaagatttctctcctttagagtggataatacaacttgatgttct

SEQ ID NO: 989 - DNA, 400 bp, Glycine max
  unsure at all n locations
tgtgagcaagctntcttggccttcatgaagactattgccatgccgccagtcctaagtcgactcaagccaggagtaccttcacttctatacctctcagtggctgacaaagttgtaagcttaaaccttgtacaggaggacgggaaacaccagcttcccatctattttaccagtcgtatccttcatgatgctgaaaagtggtaccagatgatagagaaggtagtgctggcactcataacctcagatcgacgcctcaggttgtacttccaaagtcaccaagtggtagtcaagacaaactaccctgtcaaacaggtgttgtgaaagcctgaactggaggaaatgatggtattatggtcctaagtcgacccaagctaggagtacctttacttttatacctctcaat

SEQ ID NO: 990 - DNA, 335 bp, Glycine max
  unsure at all n locations
cacctgcggcatgctgcttggcaaggcataagcatatgatcctaagtgggtaaaggcgcacgatctatgtgccgaanagggtttaaaactacagggtgggttaggctattttaattatatgctatcttgctattttgaattttcttcgaattggtatttttgttttgatatttgaaatagctcatctttgaagagtgatatgtacaaaccccaatttgctgggtttgtagatgtggatttggccgcagataagaacatttttcttaagagtttggtatgtgaaaattcaattcatttggtgcttatatatagccattatgagctcgaanatacta

SEQ ID NO: 991 - DNA, 316 bp, Glycine max
gctacctgaatgcccgcatcgagaattaatatgccaagagagatttttctgtctttgaagaaggatgtgcggctctcatcaatgaggacctgtataacatgcctcagcctatttgctaataacttagcgatcaccttgggcatacacccaatcaaagaaatggggttgtgatcatcaaaagactgatggtgattaactgtgggaagtaaagccaaaagagaaacattactgcctatagggaatcttccatgcacaagagaatcatgtacaaatcttctggagtcaattattaccactccccacaattacttaatga

SEQ ID NO: 992 - DNA, 318 bp, Glycine max
  unsure at all n locations
ntccctctntgaacaaatacctctcagccaaatagaattcatcttgtgcctttttcccacaactcttgtaaatgggagagaaatgttcatctaaagcatacaagtccctaatgttatcaaatcctaaaatttgagctcctatggagcaaaacaatgtgtgtctcctaaagagggcatcaactacaacattttgttttccctttttgtatttgataacatatnggaaatgctctangtactctacccattttgcatgccttttgtttaacttgctttgccatctaatgaactaaatgattgatgatcactatgaatgac

SEQ ID NO: 993 - DNA, 408 bp, Glycine max
  unsure at all n locations
gaaaaatctagtctttgtgggtgtcgtggatctaatttgttttncttcctgtgttgaaaatggagctntgcaaattagaggaaaaatgaactttatggtaatgcaaaggactaaagcaaggaaagttgtacatccttctanggtccactataacaggctctatcttaactatttcacaagctgggagccatgcgtccaatgataatttgttgtgacatctgtgtctagcccacatgagtgaaaaaggactggaaattatgagcaagcgaggcttacttggaaatcacaatgtggaacctctttagttttgtgagcactatgtctatatgaagcaacatcgaaagaaattcccaaagggtttgtagactaccaaagtcacattggactattgccattcttattgttggg

SEQ ID NO: 994 - DNA, 333 bp, Glycine max
  unsure at all n locations
tccgttgctcaattgcaagcgtctcgatatattatgcttctaaatcggaccttcgagtgacaagttatgatcatttgaatttctcgatagcttccgttggttaatttcgagcgtcttgatatnatacgcgctggaatccgacctacaagtgaaaagttaagaccatttgaatttctcaagagcttccattggtcaatttaacccgctcgatatttatgtgcctgaatcggacctccgcggtaaatgttatgaccctttgaatatctcgagagcttccattgtcaattgcgaccgtttctattgtgatgcgcctgaaatggaccaccgagtaaa

SEQ ID NO: 995 - DNA, 326 bp, Glycine max
  unsure at all n locations
agcttctgtattcaattttgagcatctgtatatattacgggtactcaatcggatattcgagtaaaaattaattgtcattagaatttgctcagaagatttattttcaatgtcgagcatctcgatatattacgagactcaatcagacattcgagtaaaaagctattgtcataagaattgcacagagcttctctttttaattntgagtgtctcgatatattacgggactcaatcagatatccgagttaatagttattgccgtttgcgtttgctacgagcttccggttcaattactagcggctcgatatattatggcactcaattggaca

SEQ ID NO: 996 - DNA, 312 bp, Glycine max
agcttatgctgcaaacatctacaacagacctcctcaaccttatcagcaaaatcagccacaacaaaataactatgacctttcctgcaacaggtacaatcctggatggaggaatcatcccaaccttagatggtcgaatccttcacaacatcaacaacaaccttattttcaaaatgttgctggcccaagcagaccatacgttcctccaccaatccaacaacaacaacaacaacagccccagaaagaacaaacagttgaggcccctccacaaccttcccttgaagaacatgtgaggcaaatgactatgcaaaacat

SEQ ID NO: 997 - DNA, 167 bp, Glycine max
tgcacccgaatcagacataagtgtgaaaagtcatgactatttgaatttctcgagaggttcgcgtgttgaaagcttagcgtctatacatagaattaccctgatctggacctgagagagaatagttgtgaacatgagaaatggacgagagcttccgaggttcttttata

SEQ ID NO: 998 - DNA, 361 bp, Glycine max
aagctggaatcatttattttatctccgatagtctatgggttatgtccgtccaggtagtgccgaagaatactggcctcacagtgatcataaatgagaaggaggagtttattcctactcaggtgcagaacagttggagagtctgcattgactattggaggctgaaccaggctaccaaataggaccatttctccctgccattcattgaccagatgcttgaacgcctggcaggttaatcccactactgtgtcctgatgagtttctggtatatgcaattactattgctctgagatcacgaaagaccacttacctgcccataggactttgctataagagatgccttctgctggcatgcccctgtcct

SEQ ID NO: 999 - DNA, 356 bp, Glycine max
  unsure at all n locations
tcgaatgggcatcgtttcatcttatttgccaatgatatctttaccaaagggtggaaaccggcctcatatgctaacctgactaagaatgtggtggttagaattcatcagaaggagataatttgcagatatgggttacccaaaaagataatcaccaataatgccaccaatttgaacaacaaaatgatgaacgagatgtgtgagggattcaagaaccaacaccataattcgacgccttatcggcccaagatgaatggggcagttgaggcttgccaataaaatatcaagaagattattcagaagatgacaatgtcatacanagaatggcatgaaatgctacccgtcgcattacatggtta

SEQ ID NO: 1000 - DNA, 387 bp, Glycine max
  unsure at all n locations
agctntntgttgtttttgaaaaatttattccagacttcggataaactttaatttatggctaattcaagaccaactttttgatatatttcttgctaggactatccctaatcctagggataattagtaggaccaaataaatggaggttgtcgaattataccacatgatttcagcaacaacaaaagttgcaataaagacaacaatgatattttttttattgcaataaagacaacaatgatatttatggacattatcaatgtttcccatgtgtaatcctttatataaaccttgagctggtcacacagtaagatgaaagagaccccgntaatatattatctaacattctgcaatgatgataaactatttctcttcttcttcaaaaaaaaaaa

SEQ ID NO: 1001 - DNA, 338 bp, Glycine max
  unsure at all n locations
ntgatgttatttttttatgcatcgctntgattttntgttttaatgttngtgctagtccaaatttttttttaataattttcttttaataaaactcatttcatgatattttgcaaagtgatgcatatcaagctattggctactaaaatttcttacctcaatgattattcaagtcaatagtgaaatagcaatgggtgcaaccatttccccaattctgcataccgaaactcccagttcaatattagtgtacttatctggaaggataatcccaagaatcttcctagtgattaatctgcaaatggaaaccagcctttaagcatctggggtctcatctcattatt

SEQ ID NO: 1002 - DNA, 360 bp, Glycine max
agcttagctaagccaaagtcagagatcttggcattcagatccttgtcaagtaagacattggttgccttaatgtccctgtgtactattttcaaccttgactcctcatgaagataagccaatccccttgctatccccacacagatcttcattcttgtgggccaatacaagtgcagcttctgttcatgttcacctacgggaaatgcggggggaaaggaaataagctttttctgttatatattgattttgaagcagaaacatacacacacaaacacaaggtatatgttgcccgtaaagcatttaccgaaaagtgcacgagcaagactggtggtctccatgtattcatatataagtagcaactgg

SEQ ID NO: 1003 - DNA, 222 bp, Glycine max
agcttgaccaggaattatttgtatgggttggatgttgaattccggttgttcctggtgcggagatgatggtacagcgggtgaaccaaaagcggaagtttcttttggtgaggtagccatggaaaagcagagcgtttggaatgatttcgtaaatctcagaaggctattgggaaatgctggtaaaaacacgaatgccaagcagatataaatttgaatgaaaaatgt

SEQ ID NO: 1004 - DNA, 296 bp, Glycine max
  unsure at all n locations
agcttctatgatccgtcaaaatttcaatgtggtgccccaataggtattgcctccacttcttaacagcagtggtaatggcagctagttcacgaacataggtgaaggagctgagtaacttatggcaaaactgtttgctaaagaaagctattaagtgtcttcctttgtgacaacactgtgcccattcctgagtcggaggcgcctgtttccaccacgaagggtttggtgaaatcaggaagtgctaatactggngaattattcacgacattcttcaagttttggaaggcaactgtagcttc

SEQ ID NO: 1005 - DNA, 279 bp, Glycine max
  unsure at all n locations
agcttcagagtgatgctntgcgtgaagccatttcangaatcatggcttattcccaggagaagaatcgcaaatttgtggagaccatcgaactccaaatcgggttgaaaaactacgatccacagaaagacaagcgtttcaagggctctgtcaagctgccccacattcctcgccccaagatgaaaatttgcatgcttggtgatgctcancatgttgaagaggtctctatttgccatattcatcaagactcttaatggatcataactatttcatgataattag

SEQ ID NO: 1006 - DNA, 386 bp, Glycine max
  unsure at all n locations
tcaaacttgcaacaaaggagttgagcaggtaaaaaagattcgtcttcaaactcttagaggtgactntgagcgtttgtttatggaggaatccgagtcaatttctgaatatttttctcgagtattggccgtagtcaatcaacttaaaaaaaatggtgaaaatgttgatgaggtgaaggtcatggaaaaatacttcgaactttaaatccaagttttgacttcattgtaccaacattgaaaaaacaaggattaaagaccatgactattgagcaactcatgggttccttacaagcatacgaagagnaataaaagagaaaaattaaacaaaatgaggctactgagcaactactacaactcaacgtaagggagcaaactatgcaaattacaag

SEQ ID NO: 1007 - DNA, 274 bp, Glycine max
  unsure at all n locations
tactcaagcttctttcgaattcaaactgccataactttctgctcggatgtttgattgcagaccataatatttcaagatgctcaaaattggagatggaagtcccagataaattcaaactgccacaacttttgactaggatgtctgactgcggcccatcatataacgagaccctcngaaatgattatggaagctccgagcanattcaaattgtcataacttttgaatcggatgtctgactacagaccatactatatcgagaaactcgaaatgaaca

SEQ ID NO: 1008 - DNA, 371 bp, Glycine max
  unsure at all n locations
cgggatccttaagcacctgagctgcagcttatgcttattatgtatggcaaaacttcattattggtggtcaagacatacaagtgagcttgtaaaaaatcttctacacttgaagtgatcacatgcaatcctcttgaacccttaccacccactctgtcatcatgccgagacttangaaggccaacaggtttagccttctcaatttattctgaacaaaattcaatggcttctttagcaatgtacctctcaacaatagatgcttctggatgataaagattctttgtataccctttcaagatcatcatgtatcgctcaaccgggtacatccaccatatgataacaggaccacaacatttgatttctctgactagatg

SEQ ID NO: 1009 - DNA, 377 bp, Glycine max
  unsure at all n locations
agcttgggggagccttgatgctctcatatggaggcttanggctgcttatgaggaaaatggtgggtccccagagactaacccttttgcaaggggcttcatcaaggtgtatctcaaagaggttagggagtgccaagccaaggcaaagaggtatcccttacaagaagaaaaagaaggcctcaaatcanagcaagggaaatgatgaatcatcctccaccatgcacttctcttgaacaacatcttcagtatcgatccctttggacctttcaagtcatggtaattaattaattaactaatcttgcttgccatcacactcatgatcataaactatgcttaactaggatgattaactcaatgcggtgctaggatctagttttttt

SEQ ID NO: 1010 - DNA, 314 bp, Glycine max
  unsure at all n locations
agctggcttaaagacgtctttgatcaattaattattntanaacctagtgaaatattaactaaaaaaagaaacttataaaatttagtatgagtaatgtacaaatccaaaaataattgataaacaaaatcatattaaattcaagtcattaaaacacaaagtatataaaaaaaatgaacaaaagagagcataatattaaaaaatacatacaaagacaaggaatgactntaactangatgggtaagactatttggtgtagatacaagaacttagagaaagaaaatgaattaaaagagtgagaatgcanagggatgtgt

SEQ ID NO: 1011 - DNA, 258 bp, Glycine max
  unsure at all n locations
cactaagcaatcactacgcatagctctcaactcgaaggtggaagacacatgaacgataacgcaattcatggggctccgaaatgatngagaatggagaatggcactaagcaatcactacgcatagcttcaaaatggaaggtggaggacacatgaacgaaaacgcaattcatggggctccgaanaaggttgagaatggagaattgcactaagcaatcactacgcatagctccaaactcgaaggtggaggacacatgaatg

SEQ ID NO: 1012 - DNA, 439 bp, Glycine max
  unsure at all n locations
agcttggtcactctaatgtttggggaccaacatctgtatcataagttggtgggaaacaatactttgtgacttttgtagaaggtataagtttactttctaaaacacaagtcaaaattatttaaggcttttaagatctaaaaagccatggttgaaaatgagacagggttgaagatcaaaacgctcaaaactgacaatggtggtaaatatgaagacacaaaatttaagaggttctgctataagtatggaatcaaaatgaaaaggatngtatcacgtactcctcaacaaaatggtgaagctaagcatgtgaacagagaacattgacctaaagaaacagcctcagaagtgaagtgttgaggagcaacnaaaagctcggcacgagcccgagcttggcttaaagaaacagccttagcaacaacattcctattgcggcatctggtgg

SEQ ID NO: 1013 - DNA, 289 bp, Glycine max
agcttgtgagcaattcaaatggtcataactttacactcggtggtccgattcatgcgcataatatctcgaaatgctcgaaattctacattggacgctcttgagcaatatatatggccataactattcactgggacgtgcgattcaagcgcataatatatcgagatgctccaaattgaacaacacaagctctcgagaaattcagacggtcataacgtttcactcagaggtcggattcaggcgcctaatatatcgagacactcagaattgaacaacgaaagctctcgagaaa

SEQ ID NO: 1014 - DNA, 429 bp, Glycine max
  unsure at all n locations
agcttataaaattntccaaccgcanatggaaaaagtagtgttagcagggatgttcactntgtggaagatgaagaatggaattgggataatccaaggatgataaatcaagcccctggacatttgaacttaaactttcctgcaccaagttcaaaaaattggcaagatgagcttgttgatgatgttctagtaagaggtactagacttctctctgatatttatgacaggtgcaatattgttgtatgtgaacctgaaaactatgaagaagccaagaaaaatcaaatttgggttgctgcaatgaaggaggagctctcaatgatagagaaaaatcaaacttggcatcttgtagaaagaacctcagacaggaatgtgattggagtcaaatgggtatatagaactaagcttaatgctgatgggtctattaataaacat

SEQ ID NO: 1015 - DNA, 452 bp, Glycine max
  unsure at all n locations
agctntgtagagattgttccaactcccaacaagctataacagcttccatggcatgaacacggacatgttgttgcaattgttctttgaaagcacagagcagtataacataatgcgtctacaacgaaaataagagcaaaacttgtaaattaaggagcatcatgtgaaataattgagcccattgtcctgaaaactaaattcaatcatgggaattcatgaaaattagagaaattctaacaataaaaacacaattttagtgaattcacctctcatttaatgagttttcttaattntatagttntcaatggattnntaattattgatcaaatattgccttgctagccgtccttttaagaatatccaaaccaacattcagaagaaaggaactggagtatatgatnaacagataaccatgagtgctaacttaacaataatctttatctattttttttttt

SEQ ID NO: 1016 - DNA, 429 bp, Glycine max
  unsure at all n locations
gctataccctaccgggatgaaaaagctttaatagaagtcaagagcatgaaagtgtaacgataccgttaactagccagtaggttcttgggcgggttgaggacatcaatagtatatttggaaagaccaaaaagaaggaaaaaaagtaaaacttggatatggaagaagaggtcgatattgtttgatcttccataatggtttgatctaggtgcctgacattgtattgatgttatgcatgtggagaaaaatgtgtgtaatagtgtcatcgacatgttttttaacattcaaggaaagacaaaggatagtttgaatactcgtcaagatctagttgagatgggtgcatcctctagcttgtcatactntgtccagaanagagaagataagtttttgttagtgtctgtaacatgtgaaagtgtcacaaggatactcttc

SEQ ID NO: 1017 - DNA, 156 bp, Glycine max
agcttcttctcaataggatcatagaacctgtgactaaattcattctcaccataaccaatgaagataccactgccttgactttgcatccaacttggatctcttatcctttggaacatgcacaaaagccttgcagccaaaaactcaaaagtgatcaca

SEQ ID NO: 1018 - DNA, 286 bp, Glycine max
  unsure at all n locations
atggcttattccttatgcgcctgaatcgaacatccgagtgaaaagttatgaccattctaatttctcgatatcttccgttgatcaatatcgagcgtctcgatatgtgatgttcctgaatcggaccttcgngtgaaaagttatgagcatttgaatttctcgagagcttacgttgtgcaattacgagagtctcgacatgtgatgtgcctgaatccgaccaccgtgtgcatagtatgaccatttgatattctcgagagcttctcgccgttcaattgcgagggtctcgata

SEQ ID NO: 1019 - DNA, 387 bp, Glycine max
  unsure at all n locations
agctggcactaagaattctgattcaagttcctaatgtatcgagacattggttattgaacaatggaaactcccgagaaattaaaatcgtcattacttttcactcggatgtccgattcaggcacttcagatatcgagacgctcgaaattgaacaacggaagctctcgagaatttaagatggtcattactttacacatggaggtncgattcataaacatcacatgtcgagatgctcgaaattgaacaacggaagctgaagagaatttcagatggtcataacttttcacttggatgtccgattcaggcgcatcatatatcgaggcgttggttattgaataattgaaactctccagaaaataaaatggtaataactttcactcggattccga

SEQ ID NO: 1020 - DNA, 384 bp, Glycine max
  unsure at all n locations
agctnttcctctagttgctctggtaaggtttccaaatgttagagaatgaaaagagattgaagccttcattntgtactgtcttcgtgcgattcacttttctctcttgataaatagtatttcgtaaatcccaacggtagaagtgtttacaattgaatcgggaaccaggtgtccaaatttcatgacgatccaatggttaatgattccgggatcgtagttttactggacaggttttgagtctccgtgggaaaagagaaagctacaatgcaaaggagatttctcttagctccgacattctttcgcaatttctgatggngagaatgctcggaactgagttgaaatcagtgctgaatatacaacgatccacggttaaaagttgagatcgtg

SEQ ID NO: 1021 - DNA, 406 bp, Glycine max
  unsure at all n locations
ntataattgaattgtgaatatttgattggaatcattctatttagaaattgatttaagtaaaatatgtaattcaattaagttgatttataaaagttagtaatataaaagagaaatattntactcaaaaaaaggaaaatattctttgaattaaggttaatatataatactttaattgttattattattntatttattaaattattaacatgtaatcaattaatatttatttaatgttaatactaatagtaatagtaacatattattctgattggaatttatttttaattattttaattattattgaatcaaataatctaacataatgattcaacatctaaaaaataatgagttttgtataataatngatattatatataacaattcattaaatattaatatacacata

SEQ ID NO: 1022 - DNA, 439 bp, Glycine max
agcttctaaactttgtacaagaatgaagctctgttaccacttgttggacaagtggcctcagatatcttaagaaggggaagttgaattaagatattacaaattattttcccaattaaaaattctatttaactttctattcaagttattaattcccttaataatgaatttcttaaatattgattcaaatagaacaatttgaatatgaatataaaacaataataaatgaaggagtttaaggaaagagaaagtgcaaactcagatttatactggttcggccacacccttgtgcctacgtccagtccccaagcatcccgcttgagagttccactatcttgtaaattccttttacaagttctaaacacacaaggacaatccttcctttgtgtttagaattctttcacaacaagagaccctcggtctcttaatcccttttcagaat

SEQ ID NO: 1023 - DNA, 271 bp, Glycine max
agcttccatcaagttatgaccatttgaatttctctgagatcttccgggttcaatttccggcgtctccatatgtcatgtgcctgaatcggaccttcgtaagaaatattatgaccatttgaacttctctagagcttccgttgtttaatttcgagcttctcgatatctgatgtgcctgaatcggacatccgagtgaaaaggtgggacaatttcaatttctccagagcttcccgtgttcaatattgagcgtctcgatatgtgatggtcctgaatc

SEQ ID NO: 1024 - DNA, 403 bp, Glycine max
  unsure at all n locations
agcttagctccaaactctntgggtggaggatgaatgaacagcgcttggcaatgacattcatgggtctccgaataaaagtggagaatggagaattggcgtatagagctaggcaatcacattcgcggngctccagactcgaaggtggaagacacatgaacagcgctaggcaatgaccttcatggggctccgaaaaaaagtggagaatggaggattgcactatagggtccacacttaggcaatcatgaagcatagctcaaaacacgaaggtggaggacacatgaacagcgctaggcaatgacattcatggggctccgaataaaagtggagaatggagaattggcgaacagcgctaggcattgacattcgtggggctccacactcgaaggtggaggacacatgaaca

SEQ ID NO: 1025 - DNA, 404 bp, Glycine max
  unsure at all n locations
gtggcattagagcacaagagcttcaagtaggtgctccttaaacctccattaattntttttctttaccttctcttccattgntgtttcttcatttttctccatgtatctcctcacatgtcttgttctaaatgttgttaacatgattctttagagtttccaccgattaaacttgctatagaagctagatttgattttctatggttcaaatttcttgttcttgttcttgaaccatgaattgtgttgagtttaagttcctttgagtcttgtcttggtatatcttgtggctgatgttagtgtttggctctactgagctntaaaagaatggctaagaatttgttaaacataagcacttagacaatgaaggaaagctggagttgctgcacatgatgtccaacgttatgtca

SEQ ID NO: 1026 - DNA, 355 bp, Glycine max
  unsure at all n locations
ggctgaaagtcggaaatntattntattaaatcataaatgttttgtaaaattatatattgaagtagctaaaaaatgtaatattacataatgggcatatntatgtaatgatttatacaaattnntaattgattnntgtgacaaaatatattttgtagtatttataattttggtattaaattaattttaaacacttgtagctttttatttataaaatatccaaagaataaacaaaaactacataaacttattatatatcattatcactatcatatngttnttttatanattcaatatcatatataataaaagggtaaaatgagtaatcatatatatgtaaaaaggataaaataataag

SEQ ID NO: 1027 - DNA, 425 bp, Glycine max
  unsure at all n locations
cgcttggtaaaatagagaatggatccatctcatttgagatattcacatgtgaagagagcatcctatctaagatatttgtttcattctgccatatgaatatatcatgtgaaagtctatatatgatcaattaccggtcaaatatttgaagccaaaaaaagagaaagggaaatggtaacaataacgcacctcaatttgatcaaatgaccttaatcttctaaaacaaggagaatggctaatttcataatttgtgtgcaggttgctaaagaaagtgcagatgtcataattctggatgataatttctccacgatagtgacagtagccaaatggggacgttcagtttacataaatattcaaaaattcgtacagttccagcttactgtaaatgtgngtgcattactggtgaactnctcatcagcatgcatgac

SEQ ID NO: 1028 - DNA, 284 bp, Glycine max
taagcttgggttttcaactgcaagtccaggtggtatttgcatatacacttcttcttcaagctctccatggaggaacgcattgttgacatccaattgtcgcaagtgccattgattttgcgcagccaatgccagaagaacaccaaccgtagtgagttttgccaccggagagaatgtgtcgaggtaatctaacccctccatctgagtgtaacccttggcgaccaagcgtgctttatacctttctatggaaccatcagcccgatatttaatcttgtaaattcatctgc

SEQ ID NO: 1029 - DNA, 309 bp, Glycine max
  unsure at all n locations
ggagattcggtcctatggttgctaatggaggagttggaatggatgatggagggatgtcatctgctctagcccattttcttgatgccatctgtaactaaaaagaactcaaaattccttagaccaaatttattcaagtttaaaaatagaaataaaggctgaaattaatgatggctgatgcaatcctactccgcaagggcattggatagaaggctctaagaagaatgggccagagatgcaagagaagaccttanggttcccatgagccttatggtagattntgggcaaatgggctaagtatgagcccgctta

SEQ ID NO: 1030 - DNA, 284 bp, Glycine max
  unsure at all n locations
actcggatgtctgattgagtcccgtaatatatcgagacgctcgaaattgaataccgaagcgctgagcaaattcaaacgacaataaccttttactcggatgtctgattgagtcccgtaatatatcgaaaagctcgaaatcgaatgttgaagctctgagcaaattcaaacgacaataactttntactcggatgtctgattgagtcccgtaatatatcgagacgctcgaaagtgaatgtcgaagctctgagcaaattcatacgacaataactttntactcggatgtc

SEQ ID NO: 1031 - DNA, 418 bp, Glycine max
  unsure at all n locations
agcttgccttacctgcaaagtctttggctaaatgttattaaaacaacaggctggcgtccaccaccatactcaatttctccacttgattcttgtgctatttgtcttatatgttgcaaggcctgcatagttaatttcacaattgtcactcactaagttttgaaaaagttaaacatatctaattcatttaacaagcaactaattaatcttacaacaattgtcaacttttgagtcaagaattctgatgattcatacagaagcctgagtacttcaagtacactctagagcttcattcaataagtcaaacaattgagggactataggtctacaatatnaaattcacaaaatgacttggatatatattacacatctaaatcaatatgcatttaacaagtactagttatttagttctcttcaattc

SEQ ID NO: 1032 - DNA, 373 bp, Glycine max
  unsure at all n locations
ntctccactaagttgcctgatgcctganatgtcttttctgatggcagtggtcctagatgcanggaagaatttctccatgaacaccctcttaaggtcattccagctgaaaatggacctangagcaaggtagtatagccaatcttttgtcactccctctagagaatgaggaaaatcctttagaaagatatgatcttcctggacattanggggcttcatggtggaacanannatatggaactccttaagatgcttataaggatcttcacctgcaagaccacgaaacttgngcagcanatgtattagtccagtcttgagaacatatggaacaccctcatcangatattgaatgcacaagctttcataagtgaaatca

SEQ ID NO: 1033 - DNA, 449 bp, Glycine max
tatgaggagaagcataagaagaagcaagagatcaccaagctactctttaagttgctactgaaggagaaggaagaaagtcaatgaaatgaaagaagtcattgacgccgaggtagaggttgaggtcacggtcgacgatacgttggaggtggcaatagtgtacgaggttcaaatttcatcaacaatagttacgagaaatgaaatagctcaagagaatgtggaaaaggctatacaagcacaaggcatgataaatctcaaactcgatgttataaatgtcaaaagattggccactatgcttcaaaatgtagattcgccaataatagagttgaggaggagactaactatgtggagcaaaatgatgagaagtttcaaatagtgctcctagagtgtggaataatgaacgtagccaaaaaacacatggtaccttgacactagtgcaaacaaccttatgt

SEQ ID NO: 1034 - DNA, 457 bp, Glycine max
agcttatgctgcaaacatctacaacagacctcctcaaccttatcagcaaaatcagccacaacagaataattaagacctctccagcaacaggtacaatcccggatggaggaatcatcccaaccttagatggtcgaatccttcacaacagcagcagcaacaacaacagacttattttcaaaatgttgttggcccaagcagaccacacgttcctccaccaatccagcagcaacaatagcaacagccctagaaacagcaaatagttgaggcccctccgcaaccttcccttgaagaacttgtgaggcaaatgactatgcaaaacatgcagtttcagcaagagaccagagcctccatttagagcttaactaatcagatgggacagttggctacacagttaaatcaacaatagtcccagaattatgatagattaccttctcaatctgtccagaatcccaaaaat

SEQ ID NO: 1035 - DNA, 345 bp, Glycine max
  unsure at all n locations
agcttgccgccacggagtttttcgactatgctcttgtgtggtggaacaagctacaaaaggagagagcacgaaatgaagagccaatggttgatacatggacggagatgaaaaaaatcatgaggaagcggtatgtgccggctagttactcaagggacttgaaattcaagctccaaaaactaacccaaggcaacaagggggttgaggagtatttcaaggaaatggatgtgctcatgattctggcaaatattgaacaacatgaggaggtaactatggctcgatttcttaatggtttgactaatgatatccgtgatattgntgagctgcaagagtttgttgaaatggatg

SEQ ID NO: 1036 - DNA, 269 bp, Glycine max
  unsure at all n locations
agcttgtagggttaaagtctcacgattgtcttgtgttgatgcaacaattnttagccatgactatacaagacatcttgccaaacaaagtcaggttagccataactcgcctgtgttttttcttccatgccatatgtagcaaagtcgttgatcctaccaagtttgatgagctggaaaatgaggccgcaattatactgcgccagttagagatgtattttccctctgccttctttgacatcatgattcacttgattgtgcatctcgacagacaa

SEQ ID NO: 1037 - DNA, 416 bp, Glycine max
agctttcttcaatcgacgatacgggtgatatgctgtcaaatttcttcggtgtctactatatgctgatttctttccatgtttcagttggatgaagctggtgtttgtctcacatacagggcatgcataatgtcctttcacactatatccacttaaattttcatatgttggaaagtcattaatagtacaaaacaccattgcgcgtaacctgaagatctactacaaatttgcatcccacacatcaactccatcttcccacaattttgtcaagtcttcaatcaacagactgagatacacatcaatatcattcctaggttgccttggacccgctatcattagacaaaacataatgtattttcgcttgatgcacaaccaaggagggagattgtaaatcatcatcataacacgccatgaactat

SEQ ID NO: 1038 - DNA, 448 bp, Glycine max
  unsure at all n locations
agctntctcaaaatccacttctcaaatgagactagctttattccctctcctagaatcatccaccatctcatttgctacaagtacactatcatgcatgtgtctcccccccaacccaccccacaattgcactctgcttatcatcaataattttttcaagcaccatctccatccttttggcaaacactttggatataattttgtaaacacacccaatcaaggatatatgccgaaactccacaagctcttgtgcgttgtctctttttggtatcaaagcaatgaaggaggaattaccacctcttggaatagcatcattctcccaaaattcatgcatcatactcaatactcctagtattaacagttcccaacatcttttaatatttattgataatctaacgaactcattaaattaaatcatcttatttaacccatctaattgtaaataataata

SEQ ID NO: 1039 - DNA, 458 bp, Glycine max
  unsure at all n locations
tctctaagcactctgcaggctgcagctttcaggtcaactggccaaggatgtgatttctaacgctctataacagcagtagntatagctttaagtattgaattattaaagcgtctctggtgttcaaaaagaccaattcttgcatcagtatgatacttataattaagtataagaagcagtggttaacttatatagaataatcgaaaaaactctttctctctgaaccctgctggaatctgtatttgtgagttgttattcacaatttgattatgatactatgctagaattatatatagagttaaccaagtttgcttcataaaatatattatatacaatcagaaattttggctgatgcatgattattcgcctaattatattatttatgtaactatgttttctctttatgtttgttacaacattacctaattgattttatacttttcttttttatggttcatata

SEQ ID NO: 1040 - DNA, 418 bp, Glycine max
ctgcagctagcagatataatttttagatggaatatactttaacataatttatgcaggtatccatcacaatccagaagaacattgatgcttctattaaagatctagaagttcaagttggacaactgtaaaaatagctatctgaacatggaagtggatctttctcagcaaccacacaggtcaaccaatatgaacattgtaatttaattacaacaaggtgggggactgtggttggtttgaaggataataatgagaaaaagaataaagaatgagttgaaaaggaaaacgagaaaaatgatgatgtggtgactagtgaaaaagtggtaagtgaagaagacagaagacatctatgaacaaccactaataaaagtgatctatagtaaatcatccaccattgagcatctttcttatccacatgctc

SEQ ID NO: 1041 - DNA, 294 bp, Glycine max
  unsure at all n locations
aatttcatatgctggatagtcattgatggtacaaaaaaccattgcacgcaacctaaaggtctctcgcagattcccatcccacatatctaccctgtgttcccaattttttgtcaagtcttctatcaacagagtcaagtagacgtcaatatcattccctggatgtcttagatccgctatcatcatgcacagcattatgtacttttgcttcatgcacaacgaangaggaaggttgtaaatcattatcaaaacaggccatgaactgtgattgctgcttaagttaccaaatggattcat

SEQ ID NO: 1042 - DNA, 424 bp, Glycine max
  unsure at all n locations
agctntagcacgagtattcatgtttcatctatgccttttgagtatgtgcattcaaatttatggggatcatctagagtgaaaactcatggtggaagctcatactttctcactatcatagatgatttctcaagaagagtatggttgtatgttttgaaaaataagtcaaaagtttttcaaaaattcagagaatggcatactctagttggaaatcaacttggtacaaaattaaaagttttaagaactgacaatggcctagagtttttttcagagcagttcaatgagttttacaggaaaataggcatcaaaaggcataaaatagtccctcacactccacaacagaatggcttggcagaaagaatgaatatgaccattntggaaagagtgaggtgcatgcttctaagtgtacgactgccaaagacctttt

SEQ ID NO: 1043 - DNA, 362 bp, Glycine max
  unsure at all n locations
catatgctggaaagtcattaatggtacaaaaaagcattgcacacatttgaaaagtctcattctgaaacccatcaaacactaaaaccccctcgtcccaaaactttctcaagtcttcaatcaacggacttagataaacatcaatgtcatttcctgattgtcttgggcccaatatcatcatagacaacatcatgtanttttgcttcatgcacaaccaaggaggcaaattggtaattactagcaaaactggccatgaactgtgttgagtgcttaaactgtcatatggattcattccatcactagctagtccaagcctaagatttcttgcctcttagccgaaatccggatacanactatcaatcttc

SEQ ID NO: 1044 - DNA, 415 bp, Glycine max
tctatagaaggttcgttcctaatttctctacaattgcatcacctctcaatgagctagtgaagaagaatgtggcatttaactggggtgaaaaaccagagcacgcctttgctttgcttaaagaaaagcttactaaggcacctgttctagctctgtctaacttttctaaaacttttgagctagaatgtgatgcctctggagtgggagtcggagctgttttgctgccaggagggcaccctattgcttattttagtgaaaaacttcatggtgcgacccttaactacaccacctatgataaagagctttatgccttaataagagcactccgaacttgggaacattaccttgtttccaatgaaatggtcattcatagtgatcaacaatcacttaagttcattagacggcccatcaagttaaa

SEQ ID NO: 1045 - DNA, 292 bp, Glycine max
  unsure at all n locations
agcttgaatcggaccttagtgtgaaaagttttgaccanttcnntttcgcgtgtgctttcgttgttcaatggcgagcaccncgacacgagatgcgctctaatcggacatccgtgtgaaaagcnatgaccacncgagagtctcgagagcttccgtggttcaatttcnagcatctggtcatattatgtgcccgaatctgaccttcgngngaaaaaggatgaccatttgaatttctcgagagcctccgatgtttaatttcgagcgcctcaatatattgtaggcccgcctcggagct

SEQ ID NO: 1046 - DNA, 427 bp, Glycine max
  unsure at all n locations
gcatggacactgganaagactaatttctattntcaaaattgtactaactggtttctctgtctcagggagttatgccagggaccaagggtacaggtggcttcggtttctttattntatccaccaaaatagcttgagtagttagaatgacaccagcaacagaaactgcactttgaagagcacatcttgcaacacgactaggatccgctactccagcattcaaaagatcttcatacgtgcctgtcattgcattatatccagttctccaatcatgtgttctagtcttccggacaacaatgtctccatcaactccggcattagttgcaattgattttgcaggttcaaggagtgcctgcaacgattcatgtgcaaccgcttacatatgttaaaagcactccagagtccagacaaagtcatacttcatatggaa

SEQ ID NO: 1047 - DNA, 416 bp, Glycine max
agcttatgcagcaaatatatacaatagaccttctcaacctcagcagcaaaatcaaccacagcagagcaattatgacctttccagcaacagatacaaccctggatggaggaatcaccctaacctcagatggtccagccctcagcaacaacaacagcagcctgctccttccttccaaaatgctgctggcccaagcaaaccatacattcctccaccaatccaacaacagcaacaaccccagaaacagccaatagttgaggcccctccacaaccttccctcgaagaacttgtgaggcaaatgactatgcagaacatgcagtttcagcaagagaccagagcctccattcagagcttaaccaatcagatgggacaattggctacccaattgaatcaacaacagtcccagaattctgacaagc

SEQ ID NO: 1048 - DNA, 446 bp, Glycine max
agcttctaagttctaacagggtgatggagagtataatttctgaatgtgaaccacaagtataaagttattataatacactgaagctccattaaaaactgaaccatgagtacataattattatactacattgcagctgcattaaacatgttattgttatttaatttcaggacctaaaggaccccttcccttatttttgagaaaactagcttaatataatctacttctataattaactaaggagttgagagaagctaacccaaaaacgcaatatcaccttcttatgtttgttcacaaagttcaattagagaatcttgataaagagaatagtatataatcactaattaatagtaaatattatagaggttcaaacctagttccagctttcacaatgattgcgagggtttcccaaaagcaagcagtagacaagatggcttcaacttatgata

SEQ ID NO: 1049 - DNA, 487 bp, Glycine max
  unsure at all n locations
gcttaacattcaattcggagcgtctcgtaatattacgggactcaatcagacatccgatatataatttattgtcgtttgaattggctcagagcttcaacattcaatttcgagcgtctcgatatatgacaggactcaatcagacatccgagtaaaaagttattgtcgtttgaattagcttagagcttcaacaatcaatttcgagcgtctcgatatatcacgggactcattcagacatccgagtaaaaagttattgtcgtttgaattagctcagagcttcaacattcaatttcgagcgtctcgatatgtgacgggactcaatcagacatccgagtaaaaagttattgtcgtttgaattggctcagagattcaacattcaatttcgagcgtctcgatatatgacgggcctcaatcagacatccgagtataaagttattgtcgtttgaatnggctcagagcttcaccattcaatttcgagcgtctcgatata

SEQ ID NO: 1050 - DNA, 431 bp, Glycine max
agcttcttagtttcagatgatgcagatgagtttgtggctacctcatgcactcctctaatgactatagcctcatttatggcgctaaactgttgggagtcggaagccatcttctcaattaaattcctggcttcagcaggggtcatgtctccaagggctccaccactggcagcatctatcatacttctctccatgttactgagtccttgataaaaatattggagaagaagctgctcagaaatctggtggtgagggcaactggcacatagttttttaaatctctcccagtattcatataggctctctccactgagttgcctgatgcctaaaatatcctttctaatggtcgtggtcctggaagcagggaaaagttttctaaaaatactctcttgaggtcttcccagctcgtgatggaccttggagcaaggtaacat

SEQ ID NO: 1051 - DNA, 408 bp, Glycine max
  unsure at all n locations
tgtgtctaccatcacgattatcgtgtccctttccattattgggggtaccacctgngccgccatatccctgcaccttttgggcgtgttctttgaatgatccgttcccctttttgcacatgttccgtagttgccttctatccagaaccatatcaaaattgtattgatactgtctaacaacggcaaccattacgtccttgctataatggactctggaagattccaagttagtgtaccacgtaacagctaccccaataagactgtcttggaaggaatgtatcancaattcctcatcttttgagtattcccccatcttctgacaatacatctttagatgggtcttgagacaagtatgtcccttgtacttgtctaagttcagcaccttgaacttgggaatgaccatgtttgggt

SEQ ID NO: 1052 - DNA, 412 bp, Glycine max
  unsure at all n locations
acctgcagctgcagctagagctacacctaccgctctcctttatctagagatctctattatgagcctcactttgagcctccagatctgctatgaccttcttcagttgtgcttcttgccgaagaaccatctcactattgacgcgtaatgctctatccgatgtaacaagctcatcaaaagtgatgtgcactgtctgtatcacttgaatcttcagcagactctaatctcccagtgagtgcatgcacatcgctgacagagtcgctttattgttcactctctgcatcggatcgacgtacaaaaagtcctttcctccgcttcttgagatgagcgggacattcatctgtgatgtgcccatgggcttcacacccatggcatagaattcacttgctgtgactgangtttacatctgaccttt

SEQ ID NO: 1053 - DNA, 438 bp, Glycine max
  unsure at all n locations
agctntatgacccatttgttttaactaagagtgcaagtaacactagtactcactattattggttgaaatttttttaaaactacaaaatcaggagagagactcattagataagaaacgggagccacatatttgtgattttcaataaatttgcgacctatttctcattcatttgtctatagtttatgcattttcaaaaatcttcaatccatatttggactgtggatctcactaatgctatgacctgctttggtttcaaaatgcagtggttacttggcaccagagtatgcaatgggtggccagttaaccatgaaggctgatgtatacagttntggggttcttatacttgaaataatcagtggcaaaagcagtgcaaggacaaactggngagggtccaacaaatttctattggaatgggtatgtaactttcagcttcccata

SEQ ID NO: 1054 - DNA, 240 bp, Glycine max
  unsure at all n locations
attgcgggaatagttttcctcctcttgggctcgaggtacangactgcgccgaatgaaaagacccttatgaccccctggaggaacttgtccttttgtgacaacagagctgtggaggaccccatctgtgcctcaagctgttcccaacccaccaaacactcttcttgtaccaagaggttgattgttacgcgctttggtgatgctcaaacgtaaaaaaagatgagaatggctccattcaacatt

SEQ ID NO: 1055 - DNA, 272 bp, Glycine max
  unsure at all n locations
tctgggaggatgtatcagctgattntatcacagggttgccttggtcgagaggctatgaagctattctggttgttgtggacaggctgaccaaatatagccattttgttccattgaaacacccttatacttgccaagggaattgttgagattttcgtaagggaagtagtgaggctacatggagttccaaaatctctcgtgagtgatagagatcctttatttatgagtttgtttggaagggaatttttaagttacaagggaccatgctcaagatg

SEQ ID NO: 1056 - DNA, 418 bp, Glycine max
  unsure at all n locations
gacactatgaaactcagcttaacattcaatttcgagcgtctcgatatattacgggactcattaagacatccgagaanaaagttattggtcgtttgaatggctcagagcttcaacattcaatttttagcgtctcgatatgttacgggactcaatcagacatccgtgaaaaaagttattggtcgttgaattggctcagagcttcaacattcaaattcgagcgtctcgatatattacgggactcaatcagacatccgagtaaaaagttattgtcgttggaattggctcagagcttcaacattcaatttcgagcgtctcgatatattacgggactcaatcagacatccgagaaaaaagttatggtngtttgaattggctcagagcgttcacattcaatttcgagcgtctcgatatgttacgg

SEQ ID NO: 1057 - DNA, 421 bp, Glycine max
agccttggagtttccaagtgccaattcgttctcttctttagtccagtcttcttctggcttcaattcatcagtgggctttccttctgtgtccagcatcttgggatgttcccagcctttgatgacagctttccaggttctgctatccagtgatttgaggaaggccaccattcttgctttccagtattcatagttgcttccatcaagaattggtggtctgttcactggtcctccttctttctccatgttcatcagaatttatctccccagatctcactctgtgatttcgagtgttggctctgataccaattgaaattctgataccaggggacagatgtcgtacaggatgtcacgacatcacgcttcagaacatgcagtttatgtgtgtccgtatgaacagattaaacaagtaataacacaagag

SEQ ID NO: 1058 - DNA, 289 bp, Glycine max
  unsure at all n locations
agcttatgaccatatgaatttctcgtgtgctttcgttgnacaactttgagcgtcgtgatatattatgcgcctgaatcgggcctccgagttaaaagataacccaaatcgcattttatgagagctttcgtctgttaatttcaagtgtctcgatatattatgcgcctgaatccgaccttcaagtgacaagttacgaccattagaattgctcgagagcttacgtggaacaactgctagcgtcacgataaattaagtgcctgaatcggacttccctgtgacaagttattacgat

SEQ ID NO: 1059 - DNA, 300 bp, Glycine max
  unsure at all n locations
actcctctaatgactatggcatcatttctggcgctaaactgctgagagttggaagccattttctcaattaaatttctggcttcagcaagagtcatgtctccaaaggctccaccactggcagcatatatcatacttctctccatattactgagtccttcataaaaatattggagaagaagctgctccgaaatctgatggtgagggcaactagcacatagttntttaaatcgctcccagtactcatacaagctctctccactgagttgtctaatacttgagatatctttcctgatggatgtg

SEQ ID NO: 1060 - DNA, 338 bp, Glycine max
  unsure at all n locations
tcctctaatgactatggcatcatttctggcgctaaactgctgggagttggaggccatcttctcaattaaatntcttgcttcagcaggagtcatgtctctaaaggctccaccactggcagcatctatcatacttctctccatattactgagtccttcataaaaatattggagaagaagttgttctgaaatctgatggtggggcaactggcacatagtttcttaaatctctcccagtactcatacaagctctctccactgagtagtctaatacctgagatatccttcttgatggctgtggtcctggaagcanggaaaattntttctaagaatactctctt

SEQ ID NO: 1061 - DNA, 364 bp, Glycine max
gtagtttcctcttccccatgtctaccacacagcttgcggtggacataaaaggtcttccaagaattatgggaatgtcagcatcttcttcaatgtctatcactattgaaatcaacttgtgatggagcgattagccaactggagggtcatgcgtgtgggcattatctctatctctccaagtcatcgacacatagagagaggcattaaattgatactaggtcccaagtctatgagagctttacccacagcaacattgccaatagaacacagtatagtgacacttccatggtctttgtgcttcacgggaaagatgcgttgaatgacagcactacaatttccttccacaactattgtgtcactgtgtatg

SEQ ID NO: 1062 - DNA, 426 bp, Glycine max
  unsure at all n locations
agcttctatgattagtcaggattataaagtggtgccctaaaagatactgtctccattttctaacagcagtggtgatcgcaacgagatcacgaacataagtggaagaggtgagtaacctgngacaaaactgtttgctaaaaaaagctatcagatgtcttccttgggacaacaccgcacccatacccgaacccaaggcttctgtctcgaccatgaaaggttttgtgaagtcaggaagtgctaagaatggagaatgtgtcatagcatgcttcaatttgttgaaggcaacgtcagcttcaagggtccaatggaactcttccttggttagcaggcttgaaagtggtgctgccaaagtagcgtagctccttataaatcttcgataaaagccagcaaggccgaggaacccacggagggctcgtgtcatgcgtg

SEQ ID NO: 1063 - DNA, 439 bp, Glycine max
  unsure at all n locations
agcttctaaactttatacaagaatgaagctctgataccacttgttagacaagtggcctcaaatatcttaagaaggggggggttgaattaagatatcacaaactatttccccaattaaaattttattcttctttaatgataatgtcaatgttcccttattatgaattactataattcaattcaaactaaacttccttaatgcaaaagataaataacaataaataaatgagtttatggaaagagaaagttcaaactcagttttatactggttcggccacacccttgtacctacgtccagtccctaagcaacccgcttgagagttctactatcttgtgaaaaccctttacaagatctgaaccacacaaggacaacccctcctttgtattcagatcgctntacaaaaagagaccctcagtcccttaatcactntccttaagta

SEQ ID NO: 1064 - DNA, 394 bp, Glycine max
agcttattaactgtactttataagatataaaagcatcattaaaaatataatgcccaattgtttagtaaacataaattagctagaattaaggtataacaacatttataaccaaccaaatagtgtttatatgttagttaaaaagttgattctgtcatacattaaaaaaaaaaaacctttgattgttataagaaatcattataaactttttaaaatttctcgattgaactatcttaccataaaaaaatgttatactaataatagcatattcctgtattaaagagaaaaaaattatgaaacatatagcaaatatgacaacttatttatttatagttaatggaacatttaaaatgttttcactatttagatacaaaatataaagattattcttaaattt

SEQ ID NO: 1065 - DNA, 288 bp, Glycine max
tgtttacctctacttttctgaatgtctcgaagatctctttctctgcctcttccatttttttgttggaaactgctcttggagggaatggaagatgagggatgtgctgcttctgcaaatcggaattaccagtggaagattcaccttgcacataaattgttagggaaatttttgtcatcacctttttctggagtagagtgaagtttggcaagttcatttgcagatgaagaaggtgctacaggttgaggtccatgacattgctttcccgacgtcaatgaaatggcactgaca

SEQ ID NO: 1066 - DNA, 401 bp, Glycine max
ctcggatgttcgattcatgcgcatatatatattgagacacttgatattgaataacaggaagcttctcgagaaattacaatggccataacttttcacaccgatgtccgattccggcgcataatatgtcgagacgctcgaaattgaacaacggaagctctcgagaaactccaatggccataacttctcactcggaggaccgattcaggcgcataatatatcgagacgctctgaattgaacaacggaagctctcgagaaatcaaacggtcataacttttcactcagaggggccattcaggcgcataatatatcgagacgctcgaaatgaacatcgaaagcttctagaaactcacatggtcataacttttcactcggaggtccaattatgcgcataatatatcga

SEQ ID NO: 1067 - DNA, 416 bp, Glycine max
  unsure at all n locations
agctntgcatccaataagatgttgctggcttttatatctctgtgaattattcttgttttggagttctcatgtagataaaccaatccttcagctgtcccgatgataatttcatatctattttcccagttcaattctttgcccttgtttttatcttccatgtataaattgagaaatattatatttagttcacattatgatgaattgataatcacttttagtgacccaaatgaggtgttataggtgaaaagggtagtcaagcgtactgcatcagttcagtaattaccaaaaatgtagcggtcaagacttcggttgggtagaaattcatatacaagcaggctttcaggtcctgaacaactgcatcctaacagtctgactagattcttgtgctccacgctactaattatgttgacttcatt

SEQ ID NO: 1068 - DNA, 370 bp, Glycine max
  unsure at all n locations
atattttgagaaaatttagagatggtttataaccataccaagcctcatatggtgtctgatccttaactgcttttgagaggagtctattttgcaagaaaatggctgtatgagctgcttctgcccaaaacttcttgggtagatttttttcatgcaacatgcacctagtcatctctaggatgtatttgtttctcctttcactcaccccattctgttgtggagtatanggagtggttagctgatgctcaatgtcagcttcctcacaaaactgattgaattttattgaggtgtactccttgccattatcagatcttagaatctgaatttgcttgccactgtgattntctactgcctttttgaattccaaaaagct

SEQ ID NO: 1069 - DNA, 431 bp, Glycine max
agcttcgaccaagagaggatggtccatttcatgtacttgaaaggataaatgacaatgtgtacaagattgaattgaccggtgagtataatgtgagtactacatttaatgtgtcagacttaactctttttgatgtagatggagaagccaatttgaggacaaatccttttgaagagggagagagtgatgaggacaaggcaaggaacctttagaaggacttggaggacctatggcaagggctagaacaaagaatgccaaggaagttcttcaacaagtgttaaccatgctatttgaatttacgcccaagttacaaatggagaagcttcggattgttaattgcaccatgttccaagaagagtagagggtgccacttttgttgagtggttttattagcattctgttagttgaaataaaggctcaaacttgtgttaaag

SEQ ID NO: 1070 - DNA, 424 bp, Glycine max
agcttgtcaagcattgttttaagtccaaagtcatcaagtacagcaccaaatttattcattgtattcggacgcatgatccgaaatttagtttcattcacccacttctcaaaattttcaatctagggagaccacaaatacattttaacatacacaaaacataagtatacaaacagccatctgcttacaatttccaatttaaaagatgagatactgcttgtatcataggtaatgatagttaaaatgatgaagtacctcagatagcaataactcacaaaagtgggtctgaaatatgtcaaatataaaaatgcctggagagggctcagacactatacttctaatactttgttccgtattatcattaattgctctcagaaatgtggggacaaagaatgtagcaggatccacagagtacaactcccgatgt

SEQ ID NO: 1071 - DNA, 402 bp, Glycine max
  unsure at all n locations
ggcaggaccgaatgtccaccgagttttttcacttaanaaggagaacatgctttagcaatgaaaaataaatcattcacgagagcaccatattttagagaaacaatatactcatgccaaaagtaattttccttgtaatcgaaaatgaagggcaggatgtcaacatttagcttttaaatgaacattcaggggaaacgtcgggtcaaactgaaactaggaataaaatcactcatagtgtataaaaactcacacaggtaagtgttttaccctaatcccaaaccatagctgcaccatgactttattttgcacatgatttcctatcgaaccaaaagatcacacgcacaatcatggatcaataggattttctcgagggtagtgtttttggagaggaagttgggtgtttcg

SEQ ID NO: 1072 - DNA, 253 bp, Glycine max
acatctttttacttgattcttgaatggctgtcaaaggcctatatatgtgtgacttgggacacgaatttgctaagagtttttcataacaaaatagtcttatcctcttaaaaagcaaagtcgtttatcctcttacaaattccttggccaaattacttgtgattcaataagggaatatttgagtgctcaaatggttcaatctatctctttaaagagagattacttcttttcttcttcttcattctgaaaagggatc

SEQ ID NO: 1073 - DNA, 388 bp, Glycine max
acagcaaaatcagtcacaacagaataattatgacctctccagcaacaggtacaatcccgggtggaggaatcatcccaaccttagatggtcgaatccttcacaacaacagcaccaacaacaacaacaaccttattttcagaatgcttctagcccaagtagaccatacgctcctccaccaatccagcagcaatagccccagaaacagcaaacagttgaggctcctccgcaaccttcccttgaagaacttgtgaggcatgactatgcaaaacatgcaatttcaacaagagactagagccttcattcagagcttaactaatcagatggaacaattggctacacagttaaatcaacaacagtcccagaattctgacagattaccttctcaatc

SEQ ID NO: 1074 - DNA, 364 bp, Glycine max
tagctttgcagcaaatgccactctactctaaattgttgaaagatatgttaacaaggaagcataaatatattcatcaggaaaacatcatagcggaaggatgttgcaatgctgtgatgaaaaagatccttccacccaagcataaagatcttggtagtgtaactattccttgctcaatcggagaagtcaatgtgggaaaatatcttcttgacctgggagccagtctcaatttgatgccactatctatgtgcacaagacttggagagttggatatactgcccactcgaatgactatacaattagttgaccgctccattaccacgccatatgcagtaattgaagatgtgctggtcatagtataacattt

SEQ ID NO: 1075 - DNA, 365 bp, Glycine max
gagagtttccgatgtttaatttcgagcgcatcgatatattataagcctgaatcggacatccgtgtgacaagttatgaccatgtgaatttctagagaggttccgatgtttaatttcgagtgtatcgatatattataaacctgaatcggaccttagtggtaaaagatatgaccatttgaattcgcgagagcttctggtgatcaattcgagtgtcactatatgtgaagcgccaaaatcggacattcgagttaaatgttatgagcattcgaatatctcaagagctaccaattgttaatactgagcggctgatatgtgatatgcctgaatggacatccgtgtaaaagtatgacatttgaattctcaagag

SEQ ID NO: 1076 - DNA, 426 bp, Glycine max
agcttgtgggaatttgtgatagtgattctgccggagatgttgatgatagaaaaagtactaccggatttgtattttttatgggtgattgtgtttttacatggagttctaagaagcaaggcattgtgacactttctacttgtgaagccgagtatgtagctgcaacttcttgcacatgtcatgccatttggctaagaagattgttggaggaacttcagttgttgcaaaaggaaagcacaaagatctatgttgataatagatctgcacaagagcttgccaagaatccggtgttccatgaacgaagtaagcatatagatacaaggtatcatttcattagagagtgcattaccaagaaagaagtagaattgactcatgtgaaaactcaagatcaagttgcggatattttcaccaagcctctcacatttgaag

SEQ ID NO: 1077 - DNA, 349 bp, Glycine max
  unsure at all n locations
gagacaaggaggancnnngagtctctgagcaccctgcgactctcgaaacactcgcaatgaagccgaaagagaaagagtgtatcatcaatgaccttgtgaagttcaagagtgggaaaacttattatgccaaaattgggaaagcttggaaaagaaggtacttgctgtatggccctccaagtaccgggaaatctaccatggtcgcggctatggctaatttcatgaactatgatgtgtatgatcttgaatagacagcggggaaggacaattcagatntgagacagctgttgattaacacttcaagtaagtcgattatggtgattgaagacattgattgctcccttgatctcac

SEQ ID NO: 1078 - DNA, 280 bp, Glycine max
ctactgcatcaatattcccagggttcactctgattgctccacttaaagatggggaacagccaatgaattcagacacaactaacatgcttttcttcttatgggaggaagctagacccaaaactttatccaaggtttcatttccttgacgactgatgatatattcatacggtatgagattcattccatcccttactgcagtgactaaacaacactccgcgacaacatagtaagcaactctctcataaaacttgagaggctcctcgatcagaatgacgggatc

SEQ ID NO: 1079 - DNA, 374 bp, Glycine max
agcttcaacctagaggagacggaccattccaagtgttggagaagatcaacgacaatgcctacaagattgacttgcctagtgagtataatgtaagtgccactttcaatgtgtctgatctatctctttttgatgcagatggaggagccttggatttgaggacaaatccttttcaagaaggagggagtgatgaggacataaccaagggcaaggaccatgaagcacttgaaggtcccatgaccagaggcagacttaaacaagcccaacacgtcatagagacaaggctggtcatttgtatagctgccattgatgatgattgaacgcccaagtggagaaagatgaacgcccagaggcagacgcactaccaagactactaa

SEQ ID NO: 1080 - DNA, 313 bp, Glycine max
  unsure at all n locations
cgagcggnttatatcgagacgctcgaaattaaccaacggaagctctcgagaaattcatatggtcataacttgcaactcggaggtccgattcacgcgcataatatatcgagacgctcgaaatagaacaacggaagctctcgagaaattcaaatggtcataacttttcacacggaggtccgattcaggcgcatcacatatcgagaccctctaaatntaacaacggaagctctcgagaaataccaatggtcataactnttcactgggacgtccgattcatgcgcataatacattgagacgctccaaattgaacaac

SEQ ID NO: 1081 - DNA, 439 bp, Glycine max
agcttatataagtaatgggggagtttatcagataattatatatcaggtaaaattttatattatttttcttatgtaaatatataatacattattttcttgtcacggataaaaaaataacattttcttgcccccactaaacaatttttctagattcgtccatactcatggttgcctttgtttatgtttctttaattattttgttggtatacatttataaatcattgattgatatttaatgactatggctggcatttttttttttaaatcattcctataataaatacaaatattaatttattcttggaatatcttaatgtagtaaatatgtattttgtgtcagtttggccgatgctaactcgagtgaaaatattctttaaagtgtattaagtgtgttggagttaggggtaggaataggccaggtcaggctttaaaaggcctg

SEQ ID NO: 1082 - DNA, 299 bp, Glycine max
ttgagtttgaatatatcgagacgcttgtgatggaaaacagaagctcgtagaaaatgcaaatcgcaataacttttaactcggatgatcgattgagtcccgtaatatatcgagacactcgaaattgaaagcagaagctctgagcaaattcaaacgacaataactcttgactcggatatccgattgagtcatttaataattcgagacgctcaaaattgaatacagaagctctatgcaaattcaaatgacaataacttttgacttcggatgtccgaatgagtcattatataatttgagacgct

SEQ ID NO: 1083 - DNA, 437 bp, Glycine max
  unsure at all n locations
agcttggcattgatagagtacaaaatttatgaaaccgatggattggcagatgcttcaactaaaactaaaactttggagtatctgattagagctgatgctagtaaagtgaacaactttaggattctggaggaggagggcatgcatatgtcgaccaacacgaggatgaaagcttcaaatttgcttatgcaactgatctcatgtggctcaatattagtgaaaaaccatagttttggccttattccttcctataagcccatgttttatagttcaaaatgtcctttcttttgtgttgggggagtttgattgcttagtgattgagcatttgtagtttaatatttttctattctttttatctcaattgacatctctttgacttttattttttcaccttaactcagttntggtctaaggcaaatgattgaggttaattgagaact

SEQ ID NO: 1084 - DNA, 412 bp, Glycine max
agcttctgttttcaatttcgagcgtctcgatatattaccggactcaatcagacatccgagtataaagttattgtcatttgaattttgtgagagcttctatattcaattccgagcgtctttaattattaaatgactcaatcggacatttgagtgcaaagttactttcgcttgaatctgctcagagcttctgttttcaattttgagcgtctagatatattacgggactcaatcggacatccgagtaaaaagttattgtcatttgaatttggtaagagctcctgcattcaattttgagcgtctcaaattataaaatgactcaatcggacatccgagtcacaagttattgtcatttgaatttgcttagagcttctgcttcaattttgagcgtctcaaattattaaatgactcaatc

SEQ ID NO: 1085 - DNA, 440 bp, Glycine max
  unsure at all n locations
atgctgtaatttgaatatctagaagataaaaatgctcaaatttccatcgtgaaattaaattaatcaagtagtgaaatgtgtgtatattcaatttttgacaatattcaaatttcaatccataatcacgataacatttatcatgtctttgatccaagagaaactcgttgaagtctctaaattaaaattgtaaattaagtcttgtagatagaaaaagtataattgaaagtgaagacctattataagtgattaagttctcaaaaaagattattcttgaacataaataatagatatttcacactaataagtaaaaatattatagtaatatttagaatcttttgttgttttaaaaattctagatgtaaagagataatcactctcttattaattagtaatcaagagtcattntcttaacatagaatacatcattacagatgaagtat

SEQ ID NO: 1086 - DNA, 412 bp, Glycine max
  unsure at all n locations
agcttcaatacagtgacactagtgttgcaacaaaggagctgacaaagtcttttggatgggatacatatgattctttcatgcagcatgatgttcaagaactaaatcgggttctctgtgaaaaacttgaagacaaaatgaaggtatggcaagagatttggaatgtttgttcatgattcttcttgatgagtgatcataccaaatggttgttgtatgttatttttcttcacgaaactgttgttgagggaactatacaaaagttatttgaaggacaccatatgaattacattgaatgcatcaatgtagactacaaatcaactagaaaggagtcattntatggtacttncttatgcattttgaattcaattatatggttagttcttctttgtatgaattctatttagttttgcatatg

SEQ ID NO: 1087 - DNA, 440 bp, Glycine max
agcttcaacatcagaccacttccagggtgctggaactacttcacatgtacttgatggggcctatgcaagttgaaagccttggaggaaagaggtatgcctatgttgttgtggatgatttctccagatttacctgggtcaactttatcagagagaaatcagacacctttgaagtattcaaagagttgagtctaagacttcaaagagaaaaagactgtgtcatcaagagaattaggagtgaccatggcagagagtttgaaaacggcaagtttactgaattctgcacatctgaaggcatcactcatgagttctctgcagccatcacaccacaacaaaatggcctagttgaaaggaaaaacaggactttgcaagaagctgccagggtcatgcttcatgccaaagaacttccctataatctctgggctgaagccatgaacacagca

SEQ ID NO: 1088 - DNA, 421 bp, Glycine max
  unsure at all n locations
agcttctaagtctcactgatgaagatgaatntgtggctacttcatgcactcctctaatgacaatagcatcatttctggcactgaattgctgggagttggaagccatcttctcaattaaatttttggcttcagcaggggtcatgtctccaagggctccaccattggcagcatctatcatacttctctccatgctgctgagtccttcataaaaatattggaaaagaagctgctctgaaatctggtggtgagggcaactggcacataattttttaaatctctcccagtattcatataggctctctccactgagttgtctaatacctgaaatatcttttctgatggttgtggtcctggaagcagggaaaatttttttaagaaactctcttaggtcatccagctcggatggccttgaacaaggtat

SEQ ID NO: 1089 - DNA, 410 bp, Glycine max
agcttgacggccatgagccatgggcgcttgtatcaacaaagaatgaagaatgtgtttgacaagaaggtgcgcttgcacaagttccatgagggggaccttgtgctgaaaaagatgtcccacgctgttaaagataatcgagggaagtgggccccgaactacgaaggacctttcgtcgtgaaaaaggcttttttcggaggggccctagtgcttaccaacatggatggcgaggagctacctttacccgtaaactctgatgttgtcagacgatactatgcttagaatctggggcaattgaggatatcgctgcatgttcttttatttttatgtgtgttcttcttggtttcccctagggattcctgtctgctgtatatttcttgtcacagacttttaaaagaagagaacatgagttt

SEQ ID NO: 1090 - DNA, 412 bp, Glycine max
agcttggagatgctccaacacttaagatacttatctcgcacttccttagccaatcttatgtcggctaaacggacttcatacttgacttgattgttcatcgtcccaaacttgaaccttagggattgctctaggattatttcatttgggctttctaggatgacaccagtcctactccctttttcattggatgaacccatctgcatacaaattccaccactcggattgtagttctgtagtcgctgtcaattccacgatgaagtctgctaagcattgagccttcgttagatcccttggtttgtacttgatcccaaactcgaacaactagaccgactaacatatcattcgcgttgcaagttctgggttcatcatgactggtaagatatggtgcgttggttaaactatcatttgatga

SEQ ID NO: 1091 - DNA, 425 bp, Glycine max
  unsure at all n locations
cacacatcctttctaatagctaagctcacctccttgagatgagaagctagagcttatctacaccccccctataatagctaagctcacccctatgccaaaaaaacatgaaaaaaacaaaaaaagtcgttgctacaaagactactcaaaatgccccaaaatacaaggctaaaaccctatactacttgaatgcccaaaatacaaggcccaaacgaaggaaaaacctattctaatatttacaaagataagcgggctcatacttggtccatgggctcgaaatctaccctaaggctcatgaagaaaaatgcctaaaattattacacacaaatggaagtttggaacctattggaagtcctaacacacttccatganaaggcctttgtacaaacttgaagcatgaagtagtaattgcaataaaaatacaacac

SEQ ID NO: 1092 - DNA, 442 bp, Glycine max
agctctgacgatttagatagattataagattaattcttagtccgatatttaatcaaatttaaagctttcaaattggtttcttattgtctttattgtacacaaaaatattattaagatataaatttatgatataacctcgcatgaaaacttattaaataagtatttaattaaatttagggttggccaacattattccaatgcaaactttggagtgagcttttacaaaagttttatattttgatttacgcttaaatgtaattttaatcatcttatcttatttaatatgtaatcttgattcctttattttaaaatagatatttggtctccttattttaaaaaataactaattttaatctctctattctaatatataaacatttggtcctcttactttaaaatttttataatttttgtcaaatctttaattctacatatattttat

SEQ ID NO: 1093 - DNA, 440 bp, Glycine max
  unsure at all n locations
agcttgcattccctaaggatccattaggaaattacttgtgaaagagagccatgagggtgggctcgtgggccactttgggatagacaagacccttgtcttacttaaagaaaagttttattggccccatatgaagaaagatgtccataagcattgcactagatgtgtggcttgtttacaagccaagtctagggtgatgcctcatgatctatacacacccttacccatcccatttgcaccttgggtagacattagtatggactttgtccttgggcttcctagaacccaaagaggtgtagactctatctttgtggtggaggataggtttagcaagatggcacactttataccatgccacaaggtggatgatgcttcctatatctcanaactcttttttagggaagttgtgagactccatggtttgcctaggaccattgtgtcag

SEQ ID NO: 1094 - DNA, 360 bp, Glycine max
  unsure at all n locations
agcttaatgaccctcaatctttcaatgattatagacccatctccctcatagggtgtgtctataaaatcgtggctaaagttctggccaagaggctggcccttgtgttacctcaacttatacatgaaaggcagacgactttcatgaagggaagacacattcttcatggtgttttgattgccaatgaggctatagctgaggctaaggctaaaaataaaccttgcatggttttcaaatcggatttcgaaaaggcgtatgattcggtttcttggggttttgtcaactacatgctcatgaggatgggcttttgtganaggtggaggaaatggattaatggttgtctgtccattgcaacccatatca

SEQ ID NO: 1095 - DNA, 325 bp, Glycine max
ctgcaagctttcatcggtgggatttcatgggatacgacggaggacaagctcaaggagcatttcggtaactacggcgacgctttgagcacttccatcatgcgggagaagaacactgggaagccaaggggcttcggtttcgtcgtttttgcagatcctaacattctagatagggttttggaagacaaacatgtcatagatggcagaaccggaacgcttctatcattttttttgtcatttctttacttcatgttccgattgaaaatattgtattgtactttttagcgtgattggtgctggttctgaattggggataatcttgaaaccc

SEQ ID NO: 1096 - DNA, 392 bp, Glycine max
  unsure at all n locations
aattccttcatctgacttatcatcaaattttcctaattnttcttttccattgtttaatacaaagcatttgcaaccaaaaacatgaaggtgtgaaatgttaggttttttttatcattaaacagttcatatagagttttctttaaaatgggtcttattaaagccctattcatgatatagcatgcagtattaacggcttcagcccaaaaatatnttggaagaggagtgtcatttaataaggttctagcaatatcttccaaagatctattnnttcctttcaacaactccatttgttgaggggttctaggtgcaaaaaagttatgttcaatgccatgcttatcacanaataattcaaattttttattttcaaattcacccccatgatcgctcctaat

SEQ ID NO: 1097 - DNA, 404 bp, Glycine max
  unsure at all n locations
agcttgtaggaggaagaaaccagcaatgattttcaaggtggactntgagaaggcttatgacacagtctcatggtctttcctggactatatgctgtatagattgggcttttgtcataaatggagaaagtggatctcagcttgtcttcactcagcaaccatctctatccttattaatggcagccctacaaaggagtttaccccatctagaggcttgaggcaaggggatcccctagcccctctactctttaacatagttggggaaggcatctcaggcctaatgagggaagcagttaggaagaatctatatagcagctacagggttggtatgaattatgagcccacaaatattctgcagtatgcagatgatactgtttttgtgggtgaggcttcttgngaaaatgtct

SEQ ID NO: 1098 - DNA, 286 bp, Glycine max
  unsure at all n locations
agcttaagctcctttttctgcacttggctcttataanncgaagagcatccctgtggaacctttacccgacgaagacactgacaaaaacttatcttcttctttgtggacaaagtatggtaagctgggggcaacgaaatcttcttcccatcaaaccttggatgcaaatgtgatcgtatgcccatatcagctagaacttgacgggtattcaagccatccttcgtctcgccttgaatgttaaggagccgcccaatcacactgtcgcacactattttcttcacatgcataa

SEQ ID NO: 1099 - DNA, 441 bp, Glycine max
  unsure at all n locations
ggtctaaactnttcactcggagctctgattatgcacatcacatatatagacgctcaagattgaacaacggaagctctcgatatattcaaatggtcataactnttaacttggaggtccgattcacgcacataatatatcgagacgcccgatattcaacaacggaagcacttgagaaaatcaaatggtcattacttttaactcggaggtccgattcangcgcatcacatatagagacgctcgaaattgaacaacggaagctctcgagatattcaaatggtcataactcttaactcggaggtccgattcatgagcataatatatcgagacgctccgaattgaaacacggaagctcttgagatattcaaatggtcataacttttcactcggaggtctgattcaagtgcataacacatcgagacgcttgaaattaacaacagaagc

SEQ ID NO: 1100 - DNA, 434 bp, Glycine max
  unsure at all n locations
gctntgaccatttgaattgctcaagcgctttctttgttcaatatcgagcgtctcgatctattatgcgcttgaatcggacctccgagtgaaaagttaagaccatttgaattgctcaagagcttccattaaccaatttcgagggtctcgatattttatgttcctaaatcagacctccgagttaaaagttatgtccatttgaatatctcgagagcttccgttgtttaatttcgagcgtctctatatgtgatgctcctgaatcggacctccgagtgaaaagttatgaccatttgaatatctcgagagcatccgttgttcaatttcgagcgtttctatatgtgatgcgcttgaatcggacctccgagttaaaagtaatgaccatttgattttcttaagagcttccgctgttcacattcgggcgtcttgatattttatgc

SEQ ID NO: 1101 - DNA, 448 bp, Glycine max
  unsure at all n locations
agtagggttaaagtctcacgattgtcatgtgttgatgtaacttcttgtcatacaaagtcaggttagccataactcgcctgtgctatntcttccatgccatatatagcanagtcgttgatcctgtcaagtatgatgagctggaaaatgaggccgaaattatactatgccagttggagatgtatttttcccctgctttctttgacatcatgattcacttgattatggatctggtcagagaaatcaaatgttgtgggcctggttatttgtggtggatgtacccggttgagcaatacatgaagatcttaaaagggtatacaaagaatccttatcatctagaagcatctattgttgagaggtacattgcaaaagaagtgattgaatcttgttcagaattcattgagaaggctaaacctattggccttcctgagtctcgcgatgatgacagaac

SEQ ID NO: 1102 - DNA, 468 bp, Glycine max
  unsure at all n locations
gctttaagaaaaaccttatttatcactcactagacgacattcttttgtgttaaactaaaactaattttctatcactagatgatatagtttatcttgttatcttgtgaaaaactcttctttgtgaaaaaagcttatatctttggttaacacacttttcgacccctttctaatatgatctttgatatttcaaaagtgtactagtcttcttcgtatattggcttatgactcacctgctgatagtgtggacatgtatattcagattactaaaagcactgtagtggaatgcttacaaaaaattgtatcaaacatgtgtgcaatatttggggatgagtacccgaggaggccaaataataaagacacatgaagactacaaattgaagcagtacatggttntctaggtatgttagggttcattgattgtatgcaatgggaatagaaaaaaaatgtccagttgcgtggaaaggtcta

SEQ ID NO: 1103 - DNA, 459 bp, Glycine max
  unsure at all n locations
tataatatattattacactcgaaattaaacatcagaagctctcgtgatattcaaatggtcataacttttcacccggatgtccgattatggcgaatcacatatcgagacgctcaaaattggacaacggaagctcttgagaaattctaatggtcataacttttaactcggatgtccgattcacgcgcatcacatatagaggcgctcgaaaaggaacaacggaagctctcgagaaattcaaatggtcataactttncacactgaggtccgattcacgattataatatatcaagacgctcgaaattgaacatcgaaagctctcaagaaattcaattggtcatcacttttcacacggatgtccgattcggcgcatatatgtcgaacgcttgaaatgaacaacggaagctcttggaaattaaatggtttaactttcacacggatgtcaattcaacgcatacatat

SEQ ID NO: 1104 - DNA, 224 bp, Glycine max
agcttgccgccacggagttttccgactatgctcttgtgttgtggaacaagctacaaaaggagagagcaagaaatgaagagccaatggttgatacatggacggagatgaaaaagatcatgaggaagcggtatgtgccggctagttactcaagggacttgaaattcaagctccaaaaactaacccaaggcaacaagggggttgaggagtatttcaaggaaatggat

SEQ ID NO: 1105 - DNA, 328 bp, Glycine max
  unsure at all n locations
tanagataaactaagaataatgactagaaatcttatcttagttcttgataananaggctatcaaatacaaactgattagctaggctaagaataccgatagaatatctcatcatatattctgagaatatattctatcaaatattaactgactagcttggctaagaaaaccgatagaatatctcatcatatagtctgataatatattctatgaaacacagactggattagtaagctaacaatactaataagatatctaatcatatattttatcattaggtaggcttagaatacagatagaatatcttatcatatattgtgatagtatatt

SEQ ID NO: 1106 - DNA, 353 bp, Glycine max
  unsure at all n locations
agctttccattctttcggaagtttatcatctttattggcttcttgaggaggagcttcattgcttccttttccttttcctttacaatctngtccatgaatatgcatttgttctaaagattctgcaacatcatctaaaatatcctttcttgaagaaatagcattagactcatcaaaggaaacatgaatagattattcaatagtcatagttcttttattatatattctataagctttactatgcaaggaataaccaaggaaaattccttcatctgacttagcatcaaattttcctaagttttcttttccattgtttaatacaaagcatttgccaccaaacacatgttgatgagaga

SEQ ID NO: 1107 - DNA, 349 bp, Glycine max
  unsure at all n locations
cggaagctctcgagaaaatcgaatnntcatatcttttcacacggatgtccgattcggngacataactgatctagacgctcgaaattgaacaacggaagctctcgacaaattcgaatggtcataacttttcacacggatgttcggttctgggacataacacatctagacgctcgaaatgaaccaccaaagctctagagaaattcgaatggtcataacttattacacgaatagtcgattgggaaaataatatatcgagatgctaaaaattaacaaccgaagctctagagaaattccaatgggcataactcttcacacagatgtccgattcggggatagaatatgttgagac

SEQ ID NO: 1108 - DNA, 373 bp, Glycine max
  unsure at all n locations
agctntgatgcaacattnggagaggttaatgtatcaactatatgatgcgctccatgagaggttggatcaaatggagaatagagatcataatgaagaagaaaggaggagaagagggaatgatggtgttcctagacaaaaccgaattgatggtattaaactcaacattcctccatttaaaggaaagaatgatccggaggcctacttggagtgggagatgaaaatagagcatgttttctcatgcaacaactatgaggaggaccaaaaggtgaagcttgccgccacggagttttccgactatgctcttgtgtggtggaagtgattatgcaagttgaagtggacgtttccattgggaaatacaatgataagggacttt

SEQ ID NO: 1109 - DNA, 411 bp, Glycine max
  unsure at all n locations
agcttgagggaaaaattgatgccttggtcattctagtaactcagcttgccatgaattagaaatttgcatctgcacttgttgcaagagtctgtaatctatgttttctgcagatcaccatacagatctatgtccttctttgcagcaatctggagtcaatgagcaacctgaagcttatgctgcaaacattcataatagaccccctcagcagcaaaaccaacaaaataattatgatctttcaagcaatagatacaatccaggttggaggaatcatccaaatctgagatgggcaagccctccacaacaacaacaacagcctgtccctcctttccagaatgttgccggnccaagcaagccatatgttcctcctccaatgtagcaacaacagcaacagtcacaataaaaacaacaagc

SEQ ID NO: 1110 - DNA, 427 bp, Glycine max
  unsure at all n locations
gagatggtatctggtcttagaaaataatttgctaagagccaattcggtgcgattggccaacctgaggaatggtgtagtcttgctgctgactacttgcattgtggccccctgcagctcccattcatatacctagggatgcctataggtgttaaccctagaaggaaggtggtgtgggagcctataatcagaaaatttgaagccaaattgaacaaatggaaccacagaagcatctctatggctggcagaattaccttaatcaatgctgtcttgacagctntgcccttgttntatatgtctttnttcagggccccttcagcagtcatcaagaggctcactactatccaaagacaatttctttgnggtggaaacttggaaggaaaaaagatagcttggatctcatggcagcaagtgtgtgctcctagagaaa

SEQ ID NO: 1111 - DNA, 450 bp, Glycine max
cgattgtcacgtgctcatgcattatttgttatccgtggctatacgagacatcttgccaaacaaagacaggttagcaataactcgcctgtgctttatcttccatgctatatgtagcatagacattgatccagtcatgtttgatgaaatggaaaatgaggccgcaattatactgtgccagttggagatgtattttccccctgctttcttagacatcatgattcacttgattgcgcatctggtcagagaaatcaaatgctgtggtcctgtttatctacggtggatgtacccggttgagcgatacatgaagatcttaaaaaggtatacacagaatctatatcgttcacaagcatttatcgttgagaggcacattgcagaagaagccattgaattctgtctgactacttacagaatgctaaacctgttggacttcttgagtctctgcatgatgac

SEQ ID NO: 1112 - DNA, 447 bp, Glycine max
  unsure at all n locations
tgctctacattacattgatgtttgtatttattggaggatgttgtatgccattnttgttttaagggtagcatttcttggtaaaactaactttccaaatgtttgcattcgcaggaaacggccccgaggaagtgatgcaatcctaccccccaagggcattggatagaacactccaataagattgggccaaaaatgcaagagaaggccctagggttctcatgagccttagggtagatttctgagcccatgggccaaggttgggtccaattatctttgtacatattagactaggatgtcattatatttggtccttgtatttagggatccatattgtaggtagggtaccctagaaatataggattnttcagcccttgtatttttgggcacctagactagttnttgtattaggggtagttntgtaatttcacatgcactaagtggatatttgat

SEQ ID NO: 1113 - DNA, 346 bp, Glycine max
  unsure at all n locations
tgtactatnggtcatatgcatatgatacaatcaaagccttctcttcaccaaccaggattccgaatgcttgcagtgcaaacaccgctgatatcaacgctccgcgcgtcttgttgctggcatatttatacatgattgtggctgaaagagggtagtctccaccgatggcaaacgctagacagaatctgaagaagcatagagaggccatgacaccctgtggagctgacccacaggagagttgctgggcaagggaccacactaccatgagaatgagcgttagtgcccatactctatatctccccatttaggcaccaagccaaccaaataataatggtccgtattatgcgcc

SEQ ID NO: 1114 - DNA, 409 bp, Glycine max
  unsure at all n locations
atgctttaatcagtgttttctctaactcatcttttctttaaatcaacctcccggtgtcaaaaatcacttgatccatgacatgcactctaaaatactttgtcttatgtttaaggtgtttcatggaaatacattaaactgtacttcatcatcttgtaccttgacagtgagtgttccatcatccacatcaatcacaactttagaaatcttgatgaaagatctactaagaatcaattgaacttcattgccttcatccatatccatcactgcaaagttgactggaaagacagatttgtcaacttttatcaatacatctacaacaatgccataaggaagctgtgttgttctgtcagctaactgcaaacccatccttgntggtctgatttcaacttctcctatctgcttgatcatg

SEQ ID NO: 1115 - DNA, 474 bp, Glycine max
  unsure at all n locations
ctcagcttataaggcacctgttctagctctttctgactcttctatatcttttgatctagaatgtgatgcctctggagtgggagttggagctgtattgttacaaggtgggcaccctattgcttattttagtgaaaaaattcatagttcccccctcaactaccccacctatgataaagagcgttatgccttaataagagccctccaaacttgggaacattaccttgtttccaaggaatttgccattcatagtgatcatcaatcacttaagtacattagagggcaaaacaagctaaacaaaaggcatgcagaatgggtagagtacctatagcaattttcatatgttatcaaataccaaaagggaacaacaaatgtggtagctgatgccctatctacgagacacacattgtnttgctccctangagctcaaattttaggatttgatcatatcanggacttggatgctttagatgaaca

SEQ ID NO: 1116 - DNA, 341 bp, Glycine max
  unsure at all n locations
agcttgtaatcgattacacatatactgtaatttattaccagaagagagtttcagaanacattctcaacagtcacatctttttgtgtgattcttgaatggctatcataggcctatatatatgtgacttgagacacgaatttgataagagtttttcaaaacaaaaaggtcttatcctcttataaagagaaatcgttttatcctcttacaaattccttggccaaattacttgtgattcaataaggaattatttgagtgctcacattgttcaatctatctctttcaagagagatttcttcttctcttcttcttcattntgaanagggattaagagaccgagggtc

SEQ ID NO: 1117 - DNA, 374 bp, Glycine max
agcttatgcagcatatatatactatataccttctctgcgcagcagcagactcatacgctggctgacaattatgacgtttccagcagccgatacaaccctggatggatgaatgcccctaacctcatatgtgacaggacctcacaacaaccacagtagtctggtgcttccttacaaaaagctggtgggccaagctgaccatacattcatccaccaatccaacaacaacgaaccccccggacacagccaacagttgaggcgcctccacaagctttcctcgaagaactagtgaggcaaacgactatgcacaacatgcagttttagcaagagaccagagcctccatttagagcttaaccgatcagatgggacaattagc

SEQ ID NO: 1118 - DNA, 423 bp, Glycine max
  unsure at all n locations
atcttagagcacctgcagctgcagcttggtagggagggatgttcattgttctttgcctgaattntggaagcaacgggtgcaactccgtgacccgaaaccacatgacccaagtactcaacttgtggttgggcaaatgaccatttagagaacttgagcacgaattggttgtgaaggagggtctcgaatgcttgctcaagatgaatgagatgctcaggcaatgtacgactataaattaaaatgtcgtcaaagaaaacgatgatgaatcgccggaggtaaggccggaaaatgtcattcatggtggcttggaacgacgaatgtgcgttacacaaaccanacggcatcactttgaattcatagtggccgtggtgagtgcaaaacgcagtcttggccacatcggattcatgcatncttatctgataatat

SEQ ID NO: 1119 - DNA, 372 bp, Glycine max
  unsure at all n locations
ctcactcggaggcccgattcaggcgcataatatatcgagactctcgaaantgaacaacggaagctatcgagaaattcaaatggtcaatacttcgaactcggaggtcctattaaggtgcataatatatctagacgctcaaaattttacaatggaagctctatggctatacaaatggtcataacttttcactcgaaggtccgattaaggcgcataatatatcgagacgctcaaaattgaacaatggaagctcttgagcaattcanatggtcataacttgtcactcggaggtacgactcagctgcataatatatcgtgacgctcgaaattgaaaatggaagctcttgagcaatgcaaatggtcataacttgtcac

SEQ ID NO: 1120 - DNA, 378 bp, Glycine max
  unsure at all n locations
gctntgatgtaacatttggagtggttaatgaaacaacgagatgatgcgctccatgagaggttggatcaaatggagaataaagaccatatgaattgctcaagagcttccattgtttaattncgagcgtctagatatataatgcgcctcaatcggacctncgagttaaaagctatgaccatttgatatgctcacgagctttcattgttcaatttcgagcgtcacgatatagtatgcacctgaatcggacctgcgagtgacaacttatgaccatttgaatcgctcaagagcttccattgcccaatcttgacgcgcacgatatattatgcacctgaatcggacctgcgagtgacaacttatgaccattcgaattgctcaaga

SEQ ID NO: 1121 - DNA, 355 bp, Glycine max
ttctgctggatcttcatggtggaaaatcaccattaaaggacctcattgaagctaaaagatccagcctccatagaaaccccacaagcaagctttcatcatcacgataccgggttctattggtgaggttgatgtaagcaaagctcttatacttgggagctagtatcaatttaatgcctctctccatgtgctggcgactttgagagatagagataatgcccacacgcatgaccctccaattagctgaccgcttcatcacaaggccatatggagtcattgaagatgttttggtgaaaggtaaaccccttatatttccagatgatttcattgcatagatatataagaagatgctgacatt

SEQ ID NO: 1122 - DNA, 345 bp, Glycine max
  unsure at all n locations
cggatccttaagcacctgctgcttgcaagctaacagtttttttttcttagtgcatacttttcaaaattagtatcaaaataatcttcaaatgattcatattntagtgtattttaaatttctttgaatttttatctacatatgaattaattatcaaataattgtttattaatgcaaaatttgataaatatgatatgcctgaaaggacactttcatctaatttgaacttttacaatagaattattcaattagaagttattaaaaggtattaaatgatgtgatattgaacgcattacattcatgtcatctgatctctcctatatatgcattaattgttatatattaata

SEQ ID NO: 1123 - DNA, 402 bp, Glycine max
tgttactgcatgatggcagcaatttcgacagatagatgacatgtaacatgttgagtccacttctcaaatttctggaaatccagagggaaaactgaaagatgataagtaaattatgcagtataaaccttttatgcagtaacaagccccaaacacatgacttgtaaataacaatttgaatagtaaaatttgattacactgtgaacaattatataatccagagaaattttggaactctcaacttccatttcaaattgttatgacaagctactacttccatttcaaattgttatgacaagctactgtggtgaaccatctgcttgaaaaaattaaattaaatgtcatatgagccaatggcccacatatcacatataaaactgctaagaacagatatgcacttgatct

SEQ ID NO: 1124 - DNA, 214 bp, Glycine max
gagcacctcgatgtattatgcgcctgaatcgaatctcctagtgaagagctactaccatttgaattcctgcagagctttcattgttgaatctcgagcggatcgatatattatgcacaagaatccgacctatgagtgaaaagctatgaccagtttaattgctggagagctttcggtgatgaatttctagcacctcgatatattatgcgcctgaatc

SEQ ID NO: 1125 - DNA, 463 bp, Glycine max
  unsure at all n locations
cactaagcttctttgagagacttgcttgagaagctagagcttagctacacacacccctctcataactaagctcacctccttgagaagcttccttaagaagattcctaaagaagctagagcttagctacacatacctctctaatagctaagctcacctccttgagatgagaagctagagcttagctacacaccccctataatagctaagctcacccccatgacaaataacatgaaaataatataaaaaaagtccttattacaaagacaactcacaatgccccgaaatacaaggctaaaaccctatactactagaatggccaaaatacaaggcctagacgaaggaaaaacctattctaatatttacaaagataagcgggctcatacttagcccatgggctcgaaatctaccctaaggctcatgagaaccctanggcctttccttggatctctagcccaatctact

SEQ ID NO: 1126 - DNA, 331 bp, Glycine max
ttctggcttcaattcatcagtgggcttgccttgtgtgagcaacatcttgcgatgtatccaggctttgatgacagcgttgcaagggctgctatccactgatatgatgaaagccaccattcttgctttccaatgtacatagatgatgccatcatgaattggcggactgatcactggtgctccttctatctgcatgttcatcagaattgaactgcctagatctcactcgaggatttctagtgcacgctctgataccaattgaaattctgatactgaagacagatgccgcacatgatgccacgacattactctgaatgacatgcagattgtgatg

SEQ ID NO: 1127 - DNA, 413 bp, Glycine max
  unsure at all n locations
gganactgagcagccatcattccanatcttggtgggaagccaaagacaaaaccatcagcatcacggagctcatttctggtgatgattggtacatcactcttgggcggtgctctcaatgcctcaagctcctcagttgatagtgtctcgggtacctgctcatatgtttagttaagtaaaaaaggaaatcctttaaataccctattnttattctcaataatgaagttgttttctacccttgactaaatgaatgcttacaacatccctttagctagagtaaatttgggaaattaagtcttagtcacagagatcatacagaatanagcacaggggccattggactaaaagtgacataagttgaattaatgcatatacagcattaggaattntgatggattaaaaatgaaaattacatg

SEQ ID NO: 1128 - DNA, 445 bp, Glycine max
  unsure at all n locations
cttctctatggatcaagctggtgaggaaagaaagttgcaactgagtgagttagatgaaatccgcctagaagcctacgagaacgccaagttctacagagaaaagaccaagaagttccatgatagcatgatagttaaaaaagacttcgtggttgggcaaaaagtgttattgtataattctaggcttggactcatgagtggtaagttgaggtctaagtggattggtcctttctgtgttactaatgttnttccttatggtacagttgagatcagaagcgactccacaaacaagagcttcaatgtcaacagacatcgacttaagccattcctcacgaacccttctttagtggacgtagtggtggaagagacttcttactccccctactctttctcaccatgacttagggagttttatttctatctcctttttgttttattacactgctga

SEQ ID NO: 1129 - DNA, 411 bp, Glycine max
  unsure at all n locations
tgcagcttaacattcaatttcgagcgtctcgattatgacgggactcaatcagacatccgagtaaaaagttattgtcgtttgaattggctcagagcttcaacattcaatttcgagggtctcgatatattgcgggactcaatcagacatccgagtaaaaagttattgtcgtttgaattggctcagagcttcaacattcaatttcgagcgtctcgatatatgacgggactcaatcagacatccgagtaaaacgttattgtcgtttgaattggctcagagcttcaacattcaatttcgaggcgctcgatatattacgggactcaatcagacatccgagtaaaaagttattgtcgtttgaattggctcagaggttcaccatttcantttcgaccgtctcgatatattacgggactc

SEQ ID NO: 1130 - DNA, 480 bp, Glycine max
  unsure at all n locations
ctaagctttagccaatgaactntgttagtgcttagctctactggagtttataagattggctaagattttgttaaaacataagcacttagacaatgaaggaaagctggagttgctgcacatgatgtccaacgttatgtcaaagaataagatcgggctgcacaatgcacaaggcaagatgaaatgtctaatgaagaattgaagctgcaggattcacgatgtcggatacaatgtccaggacatcctgcctgaaaatactggaattgctaaaagcattgaagctgcaggatccacgatgtcggatacaatgtccaggacatcctgcccgaaaatactagagttgctaaaagcattgaagctgcaggatccacgatgtcggatacgatgtccaggacatctggcccgaaaatactggacatataaatctgttatatctttaacagattattgtgcagttagcaagagataagatgatctattctt

SEQ ID NO: 1131 - DNA, 357 bp, Glycine max
tcttgtacggtaaagtctcacgatagtgacttgctcatgcaacaattgttagtcgtggctatacgatacatcttgccaaacaaagtcaggttagcgataactcgcttgtgctttttcttccatgctatatgtagcaaagtcattgatccagtcaagtttgatgagttggaaaatgaggccgcaattatactgtgccaagtggagatgtattttccccctgctttctttgacatcatgatttacttgattgtgcatctggtcagagaaatcaaatgttgtggtcctgtttatctacaatggatgtacccggttgagcgatacatgaagatcttaaaagggtatacaaagaatctatat

SEQ ID NO: 1132 - DNA, 496 bp, Glycine max
  unsure at all n locations
actcagcttacacaatntaattttctcaaacctcgagtttggaagaccaattactaagtctttcttaactagatgattaagatgatgcatgtttatgtgtgcagtcctacaatgccacaaccaagagtcatctatcttaccaaacaactcagctcctaaaatgatgcatgttcaatatttaacatatagatattacctactctcttgccaatatggacatcctgaccagacatagcttcactaataagacaataattcttgttgaattcaattttgaagcctttgtcacatagttgactaatacccaagaggttatgctntagtccatccacatatagaactntctttatctgagttntgtactgatttccaatatttccttcttccattatctttcctttgttattggctccaaaagtgacatatcctccttcttttgacacaaagtaatgtagctccatgtggagctngtaagccttggatcttcttcatcaac

SEQ ID NO: 1133 - DNA, 388 bp, Glycine max
agcttgtaggcctaggatcttcttcatcaatggattcctttgcttcttggaaaatgaatggcagcggaatggagaatgatacgagagaaggagacccacttcaggagaagatgagtctagaagaagctcaccaccataggaggccatggataatagcttgggggaagaacgagatgaatgaagggagagggagagaagacacgaaattttgtgctccaaatgagctctgaaatctgaattgtaatattctaatgatcaaagttgaaaaaaattcacacacatgacctctatttatagcctatgtgtcacacaaaaattggacggaaattcagattctcttgaatttgtggagccaaactctggcagccaaattcactaattatgatta

SEQ ID NO: 1134 - DNA, 450 bp, Glycine max
  unsure at all n locations
tcagcttagctacacaccacccctctcataactaagctcacctccttgagaagtttccttatgaagattcctaaagtagcttgagcttanctacacatacctctctaatagctaagctcacctncttgagatgagaagctagagcttagctacacaccccctataatagctaagctcacccccatgacaaaaaacatgataatacaaaaaagagtccttactacaaagactacttataatgccccgaaatacaaggctaaaaccctatactactagaatggccaaaatacaaggcccagacgaaggagatacctattctaatatttacaaagataagcgggctcatacttagcccataggctcgaaatctaccctaaggctcatgagaaccctangaccttcccttggatctctagcncaatctacttggagtcttctacccaatgccct

SEQ ID NO: 1135 - DNA, 305 bp, Glycine max
  unsure at all n locations
tacttcacatggacttgatggggcctatgaagttgaagccttggagaaaaaggttgcctatggtgttgtggatgatttctccagatntacctgggtcaactttatcagagagaaatcagacacatttgaagtattcaaagagttgagtctaagacttcaaaaagaaaaagactgtgtcatcaagagaatcaggagtgaccatggcagagagnttgacaacagcaagtttactgaattctgcacatctgaaggcatcactcatgagttctctgcagccattacaccacaacaaaatggcatagttg

SEQ ID NO: 1136 - DNA, 441 bp, Glycine max
  unsure at all n locations
tgcttctcacacgttactctgatgacaacatctcttcctgagactcttgcttcaactctgggacatatcttgataggtgtatcatcacatgcgcaaacgttgtcagcaacattggttgtatttattttgaaacatcctacggattctgtctttctcttcttgttatctttttccaaatcctttacacgctgctgaagatatttcacatgctctatagcgttgganagaacagaagccttgtccatctacacattagagatatcttacatattattttataagctaatgatggattggtgtgatctaaatntcttaagtttggctttgaaattacaataacaacaagaataaattttattccagtggatgactcagatatatgaatatcgatcacaagagatcattaaactagcttaaaatcaaattctgggaatatattat

SEQ ID NO: 1137 - DNA, 384 bp, Glycine max
  unsure at all n locations
cctcttcacgttaggaatatgaatgtagcatatatatccatagattcttacgtgctntgctgatggcttcttcccgttccaagcttcaattggagtcttgacttttacagacttagttggacatctgttgagtatgtaaacagcagtgtagactgcttcagcccagaatgtgttaggtaatcccttctccttgagcattgatctagccattatcataactgtgcgattctttctctcgaacactccattttggtgaggagaatatgcgactgntagttgtcgcttaatgccttcatcctcacataatctttcaaactcgcgagaggtgtactctttgccgtgatcacttcttagtacttttatacattttccactgtgattttc

SEQ ID NO: 1138 - DNA, 422 bp, Glycine max
gacaatataatccatatcttgtgataaataataatgtataatatataaagagacatctaattacttagcagatcatagtccattaggtaacattatatgatataagcaatttatttcattttaccttccttaaatttctcacattccttatttggaagcattagtaatggtgcctcttttaaccaatcttgagtgcaaataatagtatccactatttttggtgttagggagttgcagtatggatcaagcactcttccaccattgctgaatgttgacttagaagtcacaatggtgacatgtatagccagaacatctctcgcaatatgttcaaggaccaagaattgcccacactttaatctgcaccaatgtggatatccaaagccttagcctctaaggattccttcatgtatctatctaactca

SEQ ID NO: 1139 - DNA, 421 bp, Glycine max
  unsure at all n locations
tgacaatgactntntactcggatgtctgattgaggcccgtaatatatcgagacgctcgaaattgaatgtggaagctctgagccatttcaaacgacaataactatttactcggatgtctgattgagtcctgtcatatatcgagacgctcgaaattgaatgttgaagctctgagcaaattcaaacgacaataactntttactcggatgtctgattgagtcctgtcatatatcgagacgctcgaaattgaatgcggaagctctgagccaattcatacgacaataactttttactcggatgtctgattgagtcccgtcatatatcgagacgctcgatattgaatgttgaacctctgagctaattcaaacgacaataacttcttactcggatgtctgattgagactcgtcatatatcgagacgctc

SEQ ID NO: 1140 - DNA, 390 bp, Glycine max
tctctctcttgtgcaactgtctcatcctattctcaggtgtataatgaagctttgcaggttcaggtgcaggtgttgctactggtggaggcacttgaatttggttgctatacctcaacgtgatggcactcacatgtttcggattttgcacagtttgtgaatgcaatttgtcagaattctgggactgagctcggttcatctgagtagccatctgccccatctgatttgtcagactttgaatggaggctcttatctcttgctgaaattgcatattatgcatggtcattgtgcctgactaacttctttaagggaggttgatgacgagcctaaatagttgttgtctttgtgggactgctgctattgctgatgctgttttgaggatgaacatatggc

SEQ ID NO: 1141 - DNA, 428 bp, Glycine max
  unsure at all n locations
tggatntcctgttagtacggaatctttccttcctaagatggagccaaacccagtccccctcattaagaactagctcctttcttcctctattgcccttagttgaatacaccttctgttggatctctatttgtgtcttaaccctctcatgcaacttctttacaaactctgacctagattccccttctatatgtataaaagaagtgtcaagtgggacgggaatgaggtctaatggtgttaatggattgaacccatagacaacctcaaaaggcgattgcttggtggttctatgaaccctcctattgtacgcacattctacatgatgaagatactcatcccaagattatggntgccttttagaagagcccttataagaggggataaagacctattcactacctctgtttgcccatcagtctgtggatgacaac

SEQ ID NO: 1142 - DNA, 475 bp, Glycine max
  unsure at all n locations
tattaggacctataatactcagcttatgagagagtcaaagatcaaattgagagganaaatataagctatgctaaacaagccaacanagggagaaagaaggttgtcttcgaacccggagattgggtttgggtgcacatgagaaaagaaaggtttccggaacaaaggaaatcaaagcttcaaccaaggggagatggaccatttcaagtgcttgaaagaatcaatgacaatgcttacaaagttgagctgcccggtgagtataatgttagttccaccttcaatgtctctgatttatctctttttgatgcagatggagaatccgatttgaggacaaatccttctcaagagggagagaatgatgaggacatgaccaagagcaacggcaatgatccacttgaaggacttggaggacctattgatgatgacatgccaagagcaatggcaacgatccacttggaggacttggatgacctatgac

SEQ ID NO: 1143 - DNA, 284 bp, Glycine max
  unsure at all n locations
agcttgaaccctaacaatggaagctctctatattttcaaatggnnntancttctcagacggatgtttgatttggacacataatatatcgagacgctagaaattgaacgattgaacctgtcgagaaattcaattggtcataacgttacacacggatgtgcgattcgggcgcattatatatcgtgactgttgaaattgaacaatggacccttttgagatatttcaatggtcattactatatcacacgaatgtgcgattcagggactaaatatatcgagacgtgtga

SEQ ID NO: 1144 - DNA, 312 bp, Glycine max
agcttactgggggacatcttgacttgctttcctatctgacattcaccacagattctgccttcttctattttcagatagaggatgcctctaacaccacctttgtgaatgatttccttcatgcctcttaagtgcagatgtccaaatctttgatgccatattctgacttcatcttctttggaggatagacatgtggaggagtacctggttttttgaggtgtccataggtagcagttgctctttgatctgctgcccttcattagaacttcactctactcatctgtcaccaagcattctgactatgtgaagttactt

SEQ ID NO: 1145 - DNA, 168 bp, Glycine max
  unsure at all n locations
gtccgatncnggcgcataagagatcgagacgcttcaaattgaccatcggaagccttagagaaatttcaatggtcataacttctcactcggaggtccgattcaggcgcataatctatcgagacgcccaaattgaatcatggaagctcttgagcaattcacatggtcata

SEQ ID NO: 1146 - DNA, 348 bp, Glycine max
  unsure at all n locations
ctatgattgtcacgtgctcatgcatttattgttcgtcttgtctatacgagacatcttgcctaacaaagtcaagttagccataactcgcctgtgctttttcttccatgctatatgtagcaaagtcattatatcctgtcacagttgatgagttggaaaatgaagccgcaattatactatgtcagntggagatgttttttccccctgctttctttgacatcatgaatcacttgattgtgcatctggtcagagaaatcaaatctcgtggtcctgcttatctacggtggatgtacccggtngagcgatacatgaagatcttaaaagggtatacaaagaatctatattgtccag

SEQ ID NO: 1147 - DNA, 367 bp, Glycine max
  unsure at all n locations
agctatacatttgctattactaatatttgattttgttttaagcatctgcttacttgacaagacgtgcaacttgagtaataaactgagagaccgattcttgagttgccaacactgaagaagatggttctgctaaaggctttgcgggtggttcctcctttgatttggctttcataggaggagaagtagcattggaggaactatcaagggcaaccttgttgaagccaaaaagatgagaccaatatgtgtgtcacaggagaagattttaacaagtttacacattctagtgatgtttggatgaacttcttcaacaacacttgaggaagatattaataaggtaaaatggattaaactanaatcaacttatgca

SEQ ID NO: 1148 - DNA, 338 bp, Glycine max
agcttctcaatgatgtgaggtctgaatttgcttttctatcacgcgttggcgtcttccagaatttgattggatgaccacgagcggttgttggaacaggatctgactgagcttggtgagcccaggtgcagcgtgatgtcaaacatggaaaatttgaatgacgcacacattgaagtggacagtgagagaaagaaactcagggttgcagagtctcctaacagacagcttgaacgggatctgaatatggaatacgagcttattgtgagtcggaggatgagctgataaagagacgacttttttggagcaggcagtcaacgaagtggcttttttttagaggaatt

SEQ ID NO: 1149 - DNA, 352 bp, Glycine max
catgcaagcttaccattcatagaatacctcttctctattttatattgacgtaccacagctccatcttgaacatgtcctaattgcgcaaacgctgtaatatcaattaacaaggttctatcatcacgcaccacatgtgtcgaccttttcatataataaaatattgtcaaagcctcgatgctacaaccattctgatcatatccagccattatcgtattacaagaattaacatctcctctgcgcatttcatcaaataaccgcgtggctgcaagaacgctaccccgatttcgcttaaccatctatcaaactccacgccctttttccacttaacataccctaccgacattgaattcca

SEQ ID NO: 1150 - DNA, 385 bp, Glycine max
  unsure at all n locations
tgagcgtctcgatatactacgggactctttcggacatctccagaaaaagntattgtcgtttgattttgctcagagcttctgttctgaatttccagcgtgtcgatataccacttgtcacaatcagacatccgagtaaaaaattattgtcgtttgaatttgctcagagcttttggtttcaatcttgagtgtctcgatatattacgggattaattcggacatccgagtaaagagctattatcgttagaatttgctcagagcttctattttcaattacgagcgtctcgatatactacgggacacaatcggacatccgagtaaaaagctattgttggttgaatttgcttcaagcctttgttttgaattttgagccgttctgtttactatg

SEQ ID NO: 1151 - DNA, 386 bp, Glycine max
aaatttaggaggctggaggggggtatcccatgaaagcaagctgagaggactaccattatttaatctccccgctcgctattgttaatgatgtgtacttgtctagaagtttagaactaaatgctcacaagagttcaacatcacatctttcacgccccccgagctattacacgttttcgtccgtgggccaagataaccccaagctcagtacgaaataataaatattacctctatatcattgattatttttcaagataaacatgggtctatttcttaaagcacaaatcataacgtctttccaccttcaagaagttcaaagctgcagtaacaaaagatagtggctgagagatcacagtcattacgactgatcgaggatgagaattcacttg

SEQ ID NO: 1152 - DNA, 444 bp, Glycine max
  unsure at all n locations
gcaaacttcttatatccataaggaaattcaatcaataggcctccaatctttaatggagagggttaccactactcgaaaacccgaatgcaaatttttattgaggcaatagacttaattatttgggaagccatagaaatagggtcttatatatccaccacagtagaaagaattacaatagatggaagcacatcaagtgaaagcataacaatagaaaaacctatagatagatggtctgaagaggataaaagacgagtacaatacaatntataagccaaaaatataattacatctgccctgggaatggatgaatatttcacggtttcacattgtaagagtgctaaggaaatgtgggacactctacacttaacacatgaaggaacaacatatgttaanagatctangataaacacattaactcatgaatatgaactatttacgatgaat

SEQ ID NO: 1153 - DNA, 404 bp, Glycine max
gatccttagagataacctccacgcatgcaagcttgtagaacttcccaaaggcaaatatgttgttggagcatagtgggtggtcagaaacaagctagatgaaatatgtaaggttgtgaggaataaggctatgcttgtagccaagggttattgagaataagaaggtgtaaattataccgaaacttttgctcatgttagtcgtctatagacaatacatattttactatcctttactgctcatcatggtatgatattttgtctatagaaaaaagaattgtattttttctatattttgaaaaacgcacaatggtgtgtataaatacggttacaagactgattgtatacactaattctgagctaaaaataaggaaccaaaatccctataattgctgtaactatgaaaggaa

SEQ ID NO: 1154 - DNA, 332 bp, Glycine max
gtagacaatataatcaatatcttgtgataaaaaaaaatttataaaatataaagagacatctaattacttagcaaatcataatttattaagtaacattatattatataagcaatttatttcattttaccttccttaaatttctcaaattccttatttgtaagcattagtaatggtgcctcttttaaccaatcttgagtgcaaataagagtatccactatttttggtgttagggagttgcagtatggatcaagcactcttccaccagtgctaaatgttgagttagaagtcacaatggtgacaggtatagccaaaacatatttcgcaatattttc

SEQ ID NO: 1155 - DNA, 433 bp, Glycine max
  unsure at all n locations
actaagcttaatttacaccagattgttgaagctgttaataaagataaaggtggtatgttttttctctatggatatggaggtacaggaaaaacatacatttggaaaacacttgcaagttcactaagagctgacaataaaattgtaataatggtagcctctagcggcatagcttctctactatttcctagaggtagaactgcacattcaaaatttaaaattctagttccagtttttgaagactcaacttgcaatatccatcaaggaactcaattagctgaactattaaatcagacaagtctaatcatttgggatgaagcacccatggctcacaaattctgttttgaggcacttgatcacagtcgtagagatatcatcaaacacaactcanaggacaataaaatctttggaggtaaagtcatggtctttggtggag

SEQ ID NO: 1156 - DNA, 337 bp, Glycine max
  unsure at all n locations
agctntggaaaatgatatctatacaaaagttattttatgaagcgactaacactcatgcctcttgtccttcatcgtaagttgatccttagctacctatgaagttgtttgaggatgcaacacaaatttagcgctaagatgggtgagggtaatctcattacttaggtctttataaatgaccttcctatcaagctgccatgaccttactaaaagaatatgccctacctccatgggaactatatcataattaaattcatccttatatgtcctaatggagaaaggcaccttcacttgctggtaacaatcattatccctttctcactgagccattaaagtttat

SEQ ID NO: 1157 - DNA, 397 bp, Glycine max
agcttgagcttggctcattacttgtcataggttttttttaaggctcggctcggcttatataaaagtctggtttggcccacgagcctatttaaaagcttgcttaaagacgtatttgattaattaattattttaaaacctagtgaaatactaactaaaaaaagaaacttataaaatataaaatttcgtataaataatgtacaaatccaaaaataattgataaacaaaatcatattgaattcaagtcgttaaagcacaaagtatatcaaaagaaaataaaaagagcataatattaaaaaatgtatggattagagatgattggtagaaaatgaattctattctacgtgaacagtgtgcatgaacagtaataaaaactgaaattctaaaatcctaaaattat

SEQ ID NO: 1158 - DNA, 305 bp, Glycine max
cactttgcatgtctaacatgagttctcatactctcggttacatccctataagcgcaaaaaccattctctaggtctttctctactacatatctacgacgaacacattgaggaatcttcttttggtgatacttctccaaacctgatttggcaagggctatatcaattatacccagcttctgcctctctcttctgcacccatatcatgcaatatggtgtatcagacacaattgtccttcttttcttgtccttttgagacctataatcattgtgtactctatgtattatgatagactgaagactatgga

SEQ ID NO: 1159 - DNA, 438 bp, Glycine max
  unsure at all n locations
ctatgttctaatgcaggcacttagagcttgtcatgatgctctcaaatcatttatattatcatatggtttcacaaccagaagaagcaacccttctctctttatctacatctcgggtaacataactgtctattttttggtgtatgttgatgacctccttctcacaggaaataacactacattcatagacacattcattgagttcttatctaatcggttgtcactcaaaaacatgggggcaccatactactttatgggtattgaacttatacccatgaactcaagcatgttcctctcacaacacaaatacatcaaggatgtacttgagatatttgagatgcangatgtgaagtcgtcacccacaccacttgcctcgacgactacactcatgtngcatgatggtacaccaaccaataatgctactcaatatcatagaattat

SEQ ID NO: 1160 - DNA, 429 bp, Glycine max
agcttgtttaccccatgttgaattcgcttacaataaagttgttctttttcaccactaattgctctccttttgaagttgtttatggttttaacccactaactcctcttgatcttttgcctatgcctaatgtttctgtttttaagcataaagaaggtcaagcataggcggactatgtgaagaagcttcatgagagagtcaaagatcaaattgagaggaaaaataaaagctatgctaaacaagccaacaaaaggagaaagaaggttgtcttcgaacccatagattgcgtttggatgcacatgacaaaagacaggtttccggaacaaaggatatcaaagctttaaccaaggtgagatggaccatttctagtgcttgaaagaatcaatgacaatgcttacaaagttgagctgctcggcgagtataatgttagtt

SEQ ID NO: 1161 - DNA, 377 bp, Glycine max
tgcaagcttgatgtttgtgttgaatgcattaaaggtttacaatctcaaaaacaagaaattaagtgcatatagggctacagacgtcttggaattgatacatacaaacatttgtgggccatttcatacaccttcgtggaatggttaacaatattttatatcattcatagacggttactctagatatgcatacttgtttcttatacatgaaaagtcacaatctctggatgtgttcaaaacatttaaagttgaagttgaaaatcaactcaacaaaagaataaagtgtgtcaaatctgaccgtggtggtgaatactatggcaaatatgacggttcaggtgaacaacgtctggcgtctttttcctggtacctagatgaatgtt

SEQ ID NO: 1162 - DNA, 292 bp, Glycine max
  unsure at all n locations
agcttatgaatgcttactgtgaccgattattctgtttatntcaactacattgcttttctgtttgatggacaccgcctcctagctgagcagactccagatgaggtttgtgtttcctacatgtattcatgaattccccttgtattctttattcttataatctacatttttcggtttgacttgaatttctttttgttgcagttggaaatggatgacggtgacgagattgatgccatgcttcaccaaacaggaggttctgttgtctgaaggatgtgattacctttgctcctcatta

SEQ ID NO: 1163 - DNA, 430 bp, Glycine max
  unsure at all n locations
tttgagcaattcanatggtcataactnttcactcggaggttcgattaaggcgcataatatatcgagacgctcgaaattgaacaatggaagctctcgagaaattcaaatggtcataacttttaactcggaggtccgattcaggcacataatatatcgagacgctcgaaattgaacaatggaagctctttagcaattcaaatggtcataacttttcactcggaggtccgattcaggcgcataatatatcgagacgctcgaaattgaacaacggaagctctcgagaaattgaaatgatcataacttttctcacggaggtcagattcacgcgcataatatagcgagacgctcaaaattgaacaacggaagctctcgatatattcaaatggtcataactcttcacacggaggtccgattcaggcgcttaatatat

SEQ ID NO: 1164 - DNA, 435 bp, Glycine max
  unsure at all n locations
tgaaggcgtgtagcccaccatcttttcatagtagaatatttgtaatgtgtctactatcattgttatcatntttttcttcgtcattgaggtgccacttgagctgccagatctctccacctttgggtgtattctttgaaagaaccgtgcccctttttgcacatgttctatagttgcatcctatccgaaaccatatcaaaattgtactgatactgcctaacaaaggcaaccattaggtccttccaagaatggactcgggaaggttccatgttagcgtactatgtaacagctaccccagtaagactttcttggaagagatgtatcaacagttcctcatcttttgcgtatgcccccatctttcgacaatacatctttagatggttcttggggcaagtagtccccttgtacttgtcaaagtccggcaccttgaacttggga

SEQ ID NO: 1165 - DNA, 429 bp, Glycine max
ctctatattttaacaatcccatcctccctccagataatgagtttctggtggagagtagatggcacagccccgactccatggatccattcccttcctaatagcacgtcaaaattagccttggactgtatcaccaggaataaagttggtcgaactatactgcctacagcaacatctacttgaatggctcccacagaatagccagtgttaccctcataattcgaaagcacaatgttgtgggcagatagatcagtgtcatgtttcccgatcttgtagagcatacatcgaggcattaagttaacagacgctcctccatctatgagcacatttgtgattccaacattctcaactcttgccctgatgaaaagaggttcgagatgacttttcactcgaaaatctggcttatgaagaacgctaattgttcatccacac

SEQ ID NO: 1166 - DNA, 394 bp, Glycine max
tctagccaaatggacttaccttgaattaattcctttgatttctcctttgagccttgtttccctttccttgttttgaagctcactacaagccttaagtgaaaaaccatgatattaccatatccttaaggaattttggagctctggaattgttttgcgaataagtgtggggggtatttgtttcattggacaacttgtgatgcaatcctactccgcaagggcattggatagaaaaactccaagtagattgggccagagatgcaagagaaggccctagggttcttatgagccttagggtagaattcgggcccatgggctaagtacgagcccgcttatctttgtaaatattagattaaggtttcattatttttgggccttgtatatagggcttcataat

SEQ ID NO: 1167 - DNA, 516 bp, Glycine max
agcttgtcaatgcagccttatcttgagatacacccaatccccctccttaatctttgaaggtaggcgatgattattggcatactatgtcatgtgattttgggctctgtttagatgaaacttcaactgattaagtgcttcatctctttctataagatcctaagccactgcctcaactaggacttcccctagaatgaaccttgccaaagatggggatggtcgaccataacctatttcaaatggggtacacctggcagctccctggtaatatgtattataccactattctgcccacgggataaactcaacccaagatttggattgctttgcacacatctcaaatatctctccatggttatgtttagtaccttagtttggccatttgaccgagggtgataagcaatacttattttcaaagttggtccttgttttttgaataactcctgctaaatataactcaaagcatccttgtcccttcactattgaaaaaaggaattccaagctgccttattacttcct

SEQ ID NO: 1168 - DNA, 678 bp, Glycine max
tcccaagtttttaagttcttcctcaaaactgtcctaagcaaagttcccaaagtcctattaacaacttccgtttgcccatcggtttgtgggtgacaagtggttgaaaataacaatttagtgcccaacttgctccacaaagtcctccaaaaatggcttaggaacttagagtccctatcactaacaatgctccttggcaaaccatggagtctcacaatctccttgaaaaacaaatcagccacatgggaagcatcatcaatttttttacatggaataaaatgagccattttagaaaacctatcaacaaccacaaaaatggaatctctaccattgcttgtttttggcagccccaaaacaaaatccatggataaatcaatccaaggatactccggaattggcaatggagtatacaatacatgaggctttaccttagactttgcctttttacatacaatgcaatgttcacaaaatttctgcacatcctttttcatatgaggccaataaaaatgttcttgtaatgtttctagagtcttttggaccccaaaatgccccatttaacctccttcatgtgcttcacaaacaagcaaatttctagtagaacattaggcacacacaattgttttcttgaaaagaaagcttcatgtctaaaaaacatttctgaaaaatttcacaattttaaaa

SEQ ID NO: 1169 - DNA, 578 bp, Glycine max
  unsure at all n locations
agcttcttcttgtttctctccccatttgaaaccaacatttttcttgagcacttcattgagaggtgctgccaatgtgctaaaatccttcacaaatcgtctataaaaacttgctaagccatgaaaactcctcacctcggtcacagacttaggtgtaggccattcttgaataaccctaaccttctcctcatccacttgcactccttttgaactcacaacaaaaccaagaaacacaacatggttagtacaaaagatgcatttttcaagattgacatacaattgttcttctctaagcacagtcaagacagattttaaatgatcaatatgcaaatcaagtgaagtgctatagataagaatatcatcaaagtacaccacaacgaactttcctatgaactctctcaagatatggttcattaatctcatgaaagtgctaagagcgttagttaggccaaaaagcataaccaaccattcttacaaaccatattttgttntaaaagccagttttcattcatcccctttctaatctaatttgatggatccctttttaaatcgattttaaagaatacatgccccatgcaatt

SEQ ID NO: 1170 - DNA, 552 bp, Glycine max
atatgttatatttaatcattttaatatataatactatatatggagaaaaatacttattttaatacataaatattaaattaataacattaaatgcaaccttaatatttttgtttaaatctcgtttaaaattttaaatttaattacttaaaaaatatgtattaaaaatattttttttacatatatagttaaatataaattaaaatatttttttggttaccatgcaatttatataaaatattcacctgctttaactttaccgaaaccttaaagtttttattttttaaatccgcaaacaaattatatatattagaagtaagtatcagagataccttaagaacaaaatataagcccaacattcagcaactcggttaatcaatattaatatctgatcaaaagatataagattaatttgataaataaaaattaaaatttaagagtgaaaagagaaattgtgagtttaaatttctgtcattaatatttctaacaaaactaataaaataactcatttactgaaaaaagaacacctcatccgattaaatataaactaaccca

SEQ ID NO: 1171 - DNA, 420 bp, Glycine max
tgcaagcaaactggatgcgttggtcaacttggtaacccagctggccttgaatcagaaatctttacctgtcgcaagggtttgtggtttgtgctcctctgctgaccaccatacagacctttgcccttccatgcagcaacctggagcaattgagcagcctgaagcttatgctgcaaatatctacaatagacctcctcaacctcagcagcaaaatcaaccacagcagagcaattatgacctttccagcaacagatacaaccctggatggaggaatcaccctaacctcagatggtccagccctcagcaactacaacaccagcctgctccttcctttcaaaatattgttggcgcaaccaaaccatacattcctccaccaatccaacaacataaccaccccataaacagccaacagttgaggcccct

SEQ ID NO: 1172 - DNA, 496 bp, Glycine max
tgccttccaagaatgatattgcggttatcatgtacacaagtggtagtacaggtctgccaaaggtttgtttcttcgtcaagttttgttaaaggtgtccctttctgtgtgtctgtgaatgtataatctcttattcatatttgtgatttgatgcaaagtgcttttgtccagagtcatgcttgtgaataatgattttgggtgataaaatatcaacaagaaccatatcaagacattgtattaatataatgaaaattttcttgtctgcaacattgagaaccaataggatctccctcagctcagttctatgattccctttgatttgacagggtgttatgattactcatggaaacattgtagcaacaacagcagcagttatgacaattattccaaatcttggtagcaaggatgtgtacatggcctacttgccccttgctcatgtttttgaaatggcagcacaggtaatttcttcttagccttctaactgtcaaagtagttgatg

SEQ ID NO: 1173 - DNA, 486 bp, Glycine max
ctaattaacctaaaattgagagaaaatgattttttaacacacaaaccggaagtactaaatatttattaccaaataaattggaataatctcatacaatttacacaagttttatacataaaaggtagtgattttcaccgactaacagaggcctctacaatcacctttcctccttctctattatactgccattgatcttcaagaagcaaatgactctattgatgaacaacatccaaagtctacaagctccacatgaagctacatcatgtgggatcaagaacagcttcatctacgagaagctcttttgcttcctctatcttttgcttgggcaattcaatttaataacgtattcttaacaatttctccatgtatctgcttcattgccttgcggtttggttctgctgaaagtttattccaataaacacaccgatttaatcctacatctacacttgttattggatttctatgggtcaaatttatccatatact

SEQ ID NO: 1174 - DNA, 615 bp, Glycine max
gaaagatagaacagccaaaaagactgacaaactgacatgaataatgtactattgttgtaagcttttcaaggaatcaccgcatcctgatgaaaagcagaggcaacaactcagcaaccaacttggccttgctccaaagcaagttaagttttggttccaaaatcgtcgaacccaaatcaaggtatctaaatttatttacctaaatattactcaagaatatatgcaaacttaatttatttaattagaaattatgtaagcattatgcaatattattgccttttgcaggcaatacaagagcgccatgaaaattcattgttgaagacagaattagacagacttagggaggaaaataaggccatgagagagaccataaacaaatcttgttgccccaattgtggcatggtaacggctaccatagatgcttccatgtccactgaagaaaaacaacttcttattgaaaatgccaaactcaaagccgaggtaataaatttgtataaaactaaatctaaatacaaggaacatgaaactttaaaaaaagaaaatgtattaatgctagaataatggtggatctatgtgtcaaagtacaaactacaatcttaatgaaaagattccctaata

SEQ ID NO: 1175 - DNA, 684 bp, Glycine max
  unsure at all n locations
tatatcgttgctagcaagcagtatatcatcgacatataacaccaagaatgagtatttactcccactaaacttgtggtatacacaatcatcaactgcatttgcctcaaaaccatatgaggtaatgacttgatggaacttgtaataccattgacgggaaccttgcttcaaaccatagatggacttatttagtttgcaaaccatagactttgagtcacctgatacaaagttttctggttgcatcatataaattgtttcttcaatgtcaccatttagaaacatagtcttaacatccatttgatgtagctctaaatcataatgagctaccagtgtcattattgttctaaaagaatcctttgaagatattggagaaaaggtttctttatagtcaatgccttccttttgggtaaatccttaggcgagccttatatctctcaacattgccctttgaatcccttttgattntaaatatccatttgtaaccaataggtttcacacttttaggcaattcgacgagatcccaaacgtcattgtcttgtatagatttcatctcatctttcatggcattgatccaattttgagagttagaactacgcatgacttgtgataactgctaaataattgtgaataaatgtagaaaattagccaaatttttgctttaaaatattatttagcagttatttgtga

SEQ ID NO: 1176 - DNA, 506 bp, Glycine max
agcttgagcttggctcattacttgtcataggttttttttaatgctcggctcggcttatataaaagtctggtttggcccacgagcctatttaaaagcttgcttaaagacgtatttgattaattaattattttaaaacctagtgaaatactaactaaaaaaagaaacttataaaatataaaatttcgtataaataatgtacaaatccaaaaataattgataaacaaaatcatattgaattcaagtcgttaaagcacacagtatatcaaaagaaaataaaaagagcctaatattaaaaaatgtatggattacagatgattggtagaaaatgaattttattctacgtgaacagtgtgcatgaacagtaattaaaactgaaattctaaaatcctaaaattattctcctctccgaaaaaaaactccttacctaaaacttgggggctggtatataagtccacggtcctcaaacttacaaatttatttaagttccaccccttaacgaaatttaa

SEQ ID NO: 1177 - DNA, 559 bp, Glycine max
agcttctaaactttgtacaagaatgaatctctgataccacttgttagacaagtggcctcagatatcttaagaagggggggttgaattaagatgtcccaaactgtttcccctaattaaaaatctatttcactttttactcaagttatgaattcccttaatgacaatcttcttaaatattaattcaaatgaagcaacttgaatatgaatataaagcaatgataaataaaggagattaagggaagagaaaatgcaaactcagttttatactggttcagccacacccttgtgcctacgtccagtccccaagcaacccgcttgagagttccactatcttgtaaattccttttacaagttctaaacacacaaggacaatccttcctttgtgtttagagatcctttacaacaagagactcacagtctcttaatcccttatagaatgaaaaaaagaaaaagaaccaatctctctagaaagagatggattttacagattgaccactcaaataattccttaatgaattgccatttgaatggccaacgaattctttagaagattaaatga

SEQ ID NO: 1178 - DNA, 369 bp, Glycine max
tctattctgaatgtcaagcgtctcgatatactacaggacactatcaaatatccgagtaaaaagttattgtcgcctgaatttgcttagagctttcgttttcaattttgagcttctcgatatattacgagactcaatctgacatccgagttaaaagttatcgtcgttagaaatttctcagagctttcgttatcaattacgagttactcgatatattatgggattcattcggacattcgagtaaaaaattattgccgtctgattttgctcagagattccgttatcaatttcgaggatctcaatatatcacaggattcatttcgacatctgagtaaaagttattggcctttgatttgctaacagcttctattc

SEQ ID NO: 1179 - DNA, 511 bp, Glycine max
  unsure at all n locations
ntatgcttgctctcttattcacaccaaaaaaaggagaccaaatctaccaaagccaaaatctcctacaggtccaaactcaaaaagacccattgatctgtgatgattatgcgcattaccccttgatttgatgggaaatgacttgcaaaatcgatttatgacgtgtttgtgatttggaattgagaggagacacttgccagtgtgagattttatacacctttgagtggttttcctccattttattgaatctagtgtttcttctaatgtttctgtagaaaagaaatgcaaaatgtcttaatctcattcttggttatgagaaattctatctttgtgctttcattcctcattcgtggcattatttttgaaaaaaaaagtgtgttctgatcggtttgggagtttgatttctttaccaagtgtgttcgcattttaatggaagttttcacaaactccaatgccttctgtcttttacatttcaaagactgtaatgtcttcagtcttttacaatttcaaagac

SEQ ID NO: 1180 - DNA, 531 bp, Glycine max
  unsure at all n locations
tcctcaatttttttggattgatgctcttaagacggttgcgtatatattaaaccgagttccaaccaaaattgtctcaaagacaccttttgagctattcaagggttggaaaccaagtttgcgacatatacgcatttggggatgtctgtctgaagtaagaatttataatccacaagagaagaaactagaccctaagaatattactgggtatttcattggatatgctgaaaggtctaaagggtataggttctattgtccatcccacaacactangattgtggaatcaaggaatgcaaagtttcttgaaaatgacttgatcagtaggagtgatcaatttcagaacatttcttctgaaagggatcactatgaagcttaaccttctaggacaagtaataggttggtagtcattcccacccctcaagttaaaatgggtgttagacaaccagtgattgaagttccacaagctgttgaaagtgatcatgtagatcaagttgtttgtgaggaacaaaatgatgatattgaaacaactagtga

SEQ ID NO: 1181 - DNA, 361 bp, Glycine max
  unsure at all n locations
tatagagctctgtagtgggttgtaaatggaataacgatttaaacaaatgaattaatatattcttggacttgannagaagattannaaatagtaccatattttaatttaagatgcccgaaacttcgacaaaataccgacaacaatttatttaacgaaaaaaataagtatttctattaaaaaaacttgttttattcaaatattatattttatcaaaaacaagaaatttggaaaagtaagtaattgaatttctttatccaagcataaaattctaaaaatgaagcaatttattttattaatccaagcacacaattttgaaaatgaaataatttcatatgaagcatttaaaattctatagaatttt

SEQ ID NO: 1182 - DNA, 444 bp, Glycine max
ggataatgtgagtgtatgtatacatgattttgatgatgtcaaaagaacaatcagacgaaggtgcttcaaaggataagcatggcttcaagattaatacaagactgattcaacaaacaaagccttgcttcgagattaactcaaagatcaagccttgccttaaaacaaatagctttcaagacatgcaaggctctagtaatcgattaccaggcgttgtaatcgattaccacgcagtgtaatcgattactagcagacagggttgaaaaatagctggtgaaaagagttttacatttgaattttcaacatgtaatcgattaccatatgtgtgtgatcgattaccagcaacgaaactcttgaaattcagattccaaagtcatgacccttcaaattataactgtgtaatccattacaccaacattgtaatcgattactagtggagagttttca

SEQ ID NO: 1183 - DNA, 494 bp, Glycine max
agcttgctaacccatggaagctcctaatatctcccacactttttggggtgggccattcttggatggccttgattttctcagggtccacttggaccccatttctaccaactacaaaatctaagaaaactatattatctacacaaaaggtacacttctctatatttgcatagagggtgtttttcctaaggactaaaagaacttgcttgagatgtcctaagtgatcatctaggctcatactatacactaaaatatcatcaaaataaacgactacaaatctacctatgaaatcccttaagacatgatgcataagcctcataaaggtgcttggtgcattagtgagcccaaaaggcatcactagtcattcatacaaaccaaacttggtcttgaaaacggttttccattcatcaccctttttcatcctgatttggtgataaccagttttaagatcaattttttgaaaaatattagcaccatgcaacttatcaagcaaatca

SEQ ID NO: 1184 - DNA, 597 bp, Glycine max
tcatgatgatgaatcaagttgattcaagtatttttgataatgacaaagttgatgacaaaaatcccaaagaatgatttcaagattaagtcaacaagaagaaatcaagaagattcaagaatcaagtgaagtttgatttcaagattcaagaaaagatgaattcaagattcaagagaagaaatcaagaagacttcacaagggaagtattgaaaagttttttcaaaaaacaaacatagcacaattttgttttttcaaaagagttttctcaaaattttctaagttaccagagtttttactctctggtaatcgattaccagtttcttgtaatcgattaccaatggcaaagtttgatttcaaaaagctttcaactgaatttgcaacgttccaattgatttcaaaatggtgtaatcaattacaagatattggtaatcgattaccagtgtatctgaacattgaaattcaaaatcaattgtgaagagtcatatcctttcataaaaagctttgtgtaatcgattgcatggttttgggtatcgattaccagtgacaagtttgaataaaaatcaaaggatataactctttccatgggttttagtttttttt

SEQ ID NO: 1185 - DNA, 590 bp, Glycine max
tcataaggctatctatgggctaaggcaggcacttagagcttggcatgatgctctcaaatcatttataacatcatatggtttcacaaccagaagaagcaacccttctctctttatctacatctcgggtaacataactgtctattttttggtgtatgttgatgacctccttctcacaggaaataacactacattcatagacacattcattgagttcttatctaatcggttgtcactcaaaaacatgggggcaccatactactttatgggtattgaacttatacccatgaactcaagcatgttcctctcacaacacaaatacatcaaggatgtacttgagaaatttgagatgcaggatgtgaagtcgtcacccacaccacttgcctcgacgactacactcatgttgcatgatggtacaccaaccaataatgctactcaatatcaaagaattattggtgcattacaataccttaccctaacaagacctggcctctcattctccatcaacaaactctcaatattatgcacaaaccaaccttccttcatcttccacatctcaggcgccttctcgaatacttgaagccactattaac

SEQ ID NO: 1186 - DNA, 424 bp, Glycine max
agcttgtacggccagccgctctaacatctaatccatgaaaggaaggggaaagtgatccatccttgttgccttgttaagatttttataatctatgtacattctccatccggtcattgttgttgtgcgaattaattcatttttctcattcttaacaattgtcatgccacccttcttcagatccacttgcactcaactaacccatgcactatccaaaattgggtaggtcattctagcttctagaagtttcaaaacctctttccttaccccttccttcatcacaagattcaatcttctttacgattgagccactagtttaaagtcttcctccataaaaattttatgcatgcaacaagaaggatgatgtagctccatgtagagcttgtatgcattggatattcttcatcaatggatttctttgtttctt

SEQ ID NO: 1187 - DNA, 436 bp, Glycine max
tctggtgggacatcttgacttgctttccaatctgacattcaccacagattctgccttcttctattttgaaactgggaatgcctctaacaacacctttgtcaatgatattcttcatgcctcttaagtgcagatgtgcaaatctttgatgccatattttgacttcatcttctttggaggatggacatgtggaggagtaactgggttcttgaggcgtccataagtagcagttgtcctttgatctgctgcccttcattagaacgtcattcttctcatttgccaccaaacattctgactatgtgaagcttacattgaatccttcatgacacaactgactgatgctgatcaaatttgcagtcagtcccttcaccagcagaactttgtttagactaggaactacatcctggactagctctaccattgcaggatctttccttta

SEQ ID NO: 1188 - DNA, 514 bp, Glycine max
  unsure at all n locations
tcattctacacctgaaaaagaggatgagatagttgcacaaaaaaaaaagcttcttaacaaaaattttcatgcaggtggaccttcttctagtaattccgacttacagcagcctcgtatccctcttccattcccacctagagcgattccaaacaaaaaaaatggaagaagtggaaaaggagatcttggagaccttcagaaaagtagaagtgaacatacctctgctagatgccatcaagaagattccaagatatgccaagtttctaaaggagttatgcacccacaaaaagaagctcaagggcaatgaaaggattagcatgggtagaaatgtgtcagcattgataggtaaatctgttcctcacattcctgagaaatataaggacctangtactttctgtataccttgcatcattgggaacattaaatttgagaatgccatgctagatctangagcatcagttagtgtcatgcctctgtccattttcaattctttatctcttggatccttgcaatctac

SEQ ID NO: 1189 - DNA, 511 bp, Glycine max
agctttgagaatgcaaatttagctctattgtctctttgtttgcattcgctgaacctttgatgtattatctgatatgttatcgaagattttcttgtttactaacttactctccctttatatctcaattttttatgtgtgcacgtgagctgatgagcatgccaatgactgattactattgtttgaattttacttgattgagatataggaggtgaagatgtcgaccccggcaaggaagagactgatgagggattttaaaagattgcaacaagatcctcctgctggcatcagtggggctccccaagacaataatattatgctttggaatgctgttatctttgggtgtgtaggagtatataaatcatgaaatttttgttttcttaagagtgtgtttctcttaactttgggggtttggatgatttaaggtatgataacaatctaattgtgcctttcttggtctttttttccagaccagatgaccccccttgggatggaggtacaattttatctatct

SEQ ID NO: 1190 - DNA, 363 bp, Glycine max
agctttgcagtagatgccactctactctaaatttttgaaggatatgttgacaaggaagcacatgtacattcatcaggaaaacatcatagtggaaggaaattgtagtgctgtaatccaaaagatccttccacctacgtgcaaagatcctgggagtgtaaccattccttgttcaataggagaagtcaatgtgggaaaggctctgattgatctgggagccagcattaatttgatgccactctctatgtgcagaagactgggagagttggagattatgcccactcgaatgactttgcaattagctgaccgctccattaccaggccctacggagtgattgaagatgtgttggtcaggggtaaacattt

SEQ ID NO: 1191 - DNA, 498 bp, Glycine max
agctttgatgtttgtgttgaatgcattaaaggtaaacagaccaaaagcaagaaattaggtgcatataaggctacaggtgtcttggaattgatacatacgaacatttgtgggtcatttcatacaccttcatggaatggtcaacaatattttatatcattcatggacgattactccagatatgcatacttgtttcttatacatgaaaagtcacaatctctatatgtgttcaaagcatttaaagttgaagttgaaaatcaactcaacaaaagaatcaagagtgtcaaatttgaccgtggtggtgaatactatggtagatatgacagttcaagtgaacaatgcccagggccttttgccaggtacttagaggaatgtggaatcgtcccaccatacaccaagtctgggtcaccttacatgaatggtgtgggtgaaagatgaaaccaaattcttaaggatatgggaaaaaatatgaattgtcattttaactgtaccaaagtcact

SEQ ID NO: 1192 - DNA, 440 bp, Glycine max
agctttagttcactacttcaagtagtgcacgatatgcttccagaggaaaacacgttgcctaaaagttattatcaagcgaagaagatactgtgtccgataggtatggagtatcaaaagattcatgcttgcctgaattattgcatattgtacagacatgaatttgaagaattgtccaaatgccctaggtgtggggtatcacggtacaaagtcaaggatgatgaggatcatagtagtgatgaaaactcaaagaaggccccccccagcaaaggtgttgtggtatctatcgatcgttccaaggattaagcatctttttgctaatggagacgacgctaaagaccttacatggcatgcaaatgggagaaactgcgatggaatggttcatcatctgattgattgctcgtagtgcaagaaaatagaacgtttgtttcggatttcgggaa

SEQ ID NO: 1193 - DNA, 621 bp, Glycine max
aaatggattttaaacccccaaaattgtaatactaaatatttattacctatacttaatagaaaatacttataacactacaaaataaccattaattggaagaagttgatacaatttacacaagttttatacacaaaagttagtcgtattcaccgactaacaccttttacataacaaaaatatgtttatgctttataatttttttataaaaaaattgcgattaattgcataaataagttttttatctataggaattaaacacaatgccaaaggatttataatactcacatcctgctcaacaaaaatatgtttttgatttataattttttacaaaaaaaaaattgttattaattacataaatatgttgctttatttacaattgatgatataagctaccctttttaatccttcttgaattaattatgatacacgacacaaactatcttaataatgactcattacttttttaatagtaatagaataaaatggtcgataattatttttatttaaatttgtattattaatgacacttagtaccctttatttataatcaattaattgacgtacaaaattaagtaactatgatacaattagttgtattcaataaaaaaattactcttttta

SEQ ID NO: 1194 - DNA, 526 bp, Glycine max
agcttatgtcgcaaacatctacaatagacctcctcaacctcaacagcaaaatcagccacaacaaaacaattatgacctctccagcaacaaatacaatcccgggtggaagaatcatcccaaccttagatggtcgaattcttcacaacagtagttacaacaacaacaaccttattttcaaaatgttgctggcccaagcagaccatacgttgctccaccaatccagcagcaacaacaacaacagccctagaaacaacaaacagtcgaggcccctccgcaaccttcccttgaagaacttgtgaggcaaatgactatgcaaaacatgcagtttcaacaagagactagagcctccatttagagcttaactaatcagatgggacaattggctacacagttaaatcaacaacatgttggatcgagtggcctcagaatattaagaaagggggttgaattaattattcctaaacctttacccaattaaaaattactcttttaaggcttttacttatgttgttaagaaaatatggag

SEQ ID NO: 1195 - DNA, 347 bp, Glycine max
tctcgatatattatgtccccgaatcagacatctgtgggaagagttatgaccatttgtatttctcgagagctaccgtagttcaatttcgagtatctcgatatactattttcccaaatcggatatccttgtaataacttatgaccaatcgaatttctcgagagcttgtgttgttaaatttcaagcgtgtcgatatattatgtcctataatcagacatccgagtgaaataatatgactagtcgattttctcgagagcttgctttgtccaatttcgagcgtctcgatatattatgttccaaattcggacatgcgtgtgaaaagatatgaccattctaatttatcgaggagc

SEQ ID NO: 1196 - DNA, 469 bp, Glycine max
agctttcgagaaattcgaatggtcattacttttcacacggatgtctgaatttgggacgtaatatatcgagaggctccaaattgcacaacgaaagtactcgagaaattcgaatggtcataacttttcacgcggatgtcaaaatttgggagataatatatcgagatgctcgaaatggaacagcggaagctctcgagaaattcgaatggtcataactattcacacagacgtccgaatttgcgacataatatatcgagacactcgaaattgaacaacggaagctcaccagaaattcgaatgagccataacttttcacacggatgtctgattcgcggacataactcatctagacgctcgaaaattgaccacggaagctctcgaaaaaattcaatgggcattaacttttcaaaccgatgttccgaattggggggactaattattttgaaaccccccaaaatttgccccacggaaa

SEQ ID NO: 1197 - DNA, 371 bp, Glycine max
agcttataatatatcgatacgctcgaaattaaacatcgaaaactctcggaaaattcaaatagacataactattcacacggatgtccgattcgggcgcataatatgtcgagaggctcgaaattgaacaacggatgctcttgataaattcaactggtataacttttcacaccgatattcgattcgggcacataatatgtcgagaagctcaatattgaacaaccaaagttctttagaaaatcaaatgggcataacttttcacacggatgtccgattcaggcttattatatatcgatacgctcgaaattaagcatcggaactcttccgaaaatcaaaagggcggaaattttcacaccgaaatttccctttggggc

SEQ ID NO: 1198 - DNA, 494 bp, Glycine max
agctttggagtttccaagtgccaattcgtcttcttctttagtccagtcttcttctagcttcaatccatcagtgggctttccttctgtgtccagcatcttgggatgttcccagcctttgatgacagctttccaggttctgctatccagtgatttgaggaaggccaccatccttgctttccagtattcatagttggttccatccaggattggtggtctgttcactggtcctccttctttctccatgttcatcagaatttatctccctagatctcactcagtgatttcgagtgcctgctctgataccaattgaaattctgataccaatgacagatgtcgtaccggatgtcacgacatcacgcttcagaacatgcagattatatttgactgtatgaacagattaaacaagtaaataacacaagagaattgtaacccagttcggtgcaacctcacctacatctgggggctacccagccagggaggaaatccactaaaat

SEQ ID NO: 1199 - DNA, 535 bp, Glycine max
taataaatctatatatggtttaaaacaagcctcctgtcagtggtaccttaagtttcatgggataatttcttcatttgattttgatgaaaaccccatggattaatgcatataccacaaggtaagtgggagtaaaatatgttttcttgttttatatgttgatgatattttacttgacaccaatgatcgaggtttgctacatgaagtgaaacaatttcaatctaagaattttgacatgaaagatatggatgatgcatcttatgtcatcgacattaagattaatagagataaacctcgaggtattttgggtctatcacaggaaacctatattaacaaaactctagagagatttcggatgaaagattgttcacgaagggttgctcccattgtgaagggtgataggtttagtttgaaccagtgcccaaagaatgactttgagagggaacaaatgaaaaacatttcttatgcttcagttgttggaagccttatgtatgctcaagtgttcacaaggcctgacattgcttttgcaattggaatg

SEQ ID NO: 1200 - DNA, 463 bp, Glycine max
  unsure at all n locations
tgtataagcgagtgcaagaatgcaggatagttttgaaaccagtgtctgtgacacgacaaaagccaccaaggcatatgctctccatgtttgcacacttgtcagccattagaagtaatcccagatcattcactcttcggaagtaagtaatttggaactcttggcttcgaaccaatgaaagatgtttcaatctcccaagttgattaatttgttgaagaccagcattggttaggtcaaatgtaattcttggttcaatcagtggtgcatcttgaagatccaaatgggtcaaaagcatgagacctttggatattgtaccaaccatagcatcagttatatagtctacattaagacacagtttctgaatgcttggaagtatggatggttgagcangatttgagggcagctgggatcccaaatttgggctaagcagttcagtcactgtcactgaagaaatgtagccaatctc

SEQ ID NO: 1201 - DNA, 439 bp, Glycine max
tggaatgatctgcaaaagctaaacccttcttgctggacaatgtctgcttttaaagtaaacacaaagtgtgatttgcaagtaaataacatgtataaagcattcaataatgtaataatgtagtacagacataagccaattattacactattggagggaattcaattttacataagttctagaattgtgaagttgaggactaccttgatgaagtatgaggggtcaatctgtcctaaaattaagcaaatcatggaaaagaataaaaaagcatgtgaaccatggcgggcacattggtgtggtgatgataatctgtttttgtttgaagtgtcaaaaggcatggaaaaatatgttgtcaatcttaaacaataaacatgttcttgtacaaagtgggagtgtactggaattccatgcactcattccataacatgcatgtggatcaatg

SEQ ID NO: 1202 - DNA, 395 bp, Glycine max
agctttggaaagacttcttagttcttttcagtcttgctttggtcattgggcctttcatccattgcaaaagatatttgaagtcattggactcttgttggatcatatcaacaagactttggacatttttcatgagattttcttttggcctaaaatgaaacatgatgttaataaatattatgccaaatgcattgtatatcataaagctaagtctaaggtcttaaaccatgaattgtatacccctttgcctattcccacctctccttgaactaacatatccatggattttgctcttggtcttccaaggtccaagagaggtaaaaattctatttttgttatggttgataggttctcaatgatggttcactttattccttgccataaaggggatgatattt

SEQ ID NO: 1203 - DNA, 238 bp, Glycine max
ttcgagaaattcaaatgggcaaaacttttcacactgtagtcctattcatgcgcataatatatcgaaacgctcgaaattgaacatcggaagctctcgataaattcacatggtcataactcttaactcggatgtctgatcttggcgcataatatatcgagacgctcgacattgaacatcagaagctctcattggtcatatacggtcactcgggggtgataaaaaagcgcattatatacct

SEQ ID NO: 1204 - DNA, 437 bp, Glycine max
agctttccctctttgaacaaatacccctcagccaaatagaatccatcttgggcctttttcccacaactctcataaatgggagagaaatgttcatctaaagcatacaagtccctaatattatcaaatcctaaaatttgagctcctagggagcaaaacaatgtctgtctcctagagagggcatcagctaccacatttgtttttccctttttgtatttgataacatatggaaattgctctaggtactctacccattttgcatgcctcttgtttaacttgctttgccctctaatgtacttaagtgattgatgatcactatgaatgacaaattccttggaaacaaggtaatgttcccaagtttggagggctcttattaaggcataaagctctttatcataggtggggtagttgagggtggcactatgaaatttttactaaaa

SEQ ID NO: 1205 - DNA, 461 bp, Glycine max
  unsure at all n locations
agcttcataacctgtcttggcacctctggaggatttgcacaacggatcagtgcccagttaacattctgaaagaatggatgctgttttatctctgtcgcaccacgtctataggcaagacgatgctgaggctctttcacaagcaagcccctgatcaagtccctggcagcaaagctgacactaggagattctggaaaccgtagaggctgcccaattacgttaaacagtgttgcacgattcactgaacctttgaatggtgttctgccaaacaaaagctcatacaagaatatcccaaatgtccaccagtccacggcacttccgtgcccttcacccttgatgatctccggcgccaagtactcgtgtgtccccacaaaggacattgatctggcatttgttggctcancaattagctcaggaagaggggtcacttggtgatgcatgtcattctttggtttgaacttttt

SEQ ID NO: 1206 - DNA, 527 bp, Glycine max
agcttgacattaagaaaagataaacatcttatatgtctgagtataatcataaacaaaaatattaattttggataaagaaaaaatacttagtaaattttacttgtcttaaaaaaatagcattatctaatttttatgttcacgtttcattatactttctttcttctctttattttatttcattttttacaagtaaatgtctattaaatagttaataaactttaaaatacttcaaaaatatatttgataaattagaataatcaagttataaatgagtaacaagctaaatttaaaactttttatttgtataacttcgtttatttaaattaattgaacttcaacataatatcttacaagtgaaacttgaatattaaatactcaaccatgttcaaaacatttacgccatagatgcagtcactcaaattaattagcactagatcgtttgaatttaaccgatagttttgagccaatattgattatatttgattgaacataactatatatgtgatagaactggagcaggcaaaatg

SEQ ID NO: 1207 - DNA, 503 bp, Glycine max
ttactatgcaaggaataaccaaggaaaattccttcatttgacttagcatcaaactttcctaagttttcttttccattgtttaatacaaaacatttgcaaccaaaaacatgaagatgcgagatgtttggtttcctgccattgaacagttcatatggagttttctttaaaatgggtcttattaaatccctattcatgatatagcatgcagtattaacggcttcagtccaaaaatattttggaagaagagtgtcatttaataaggttctaacaatttcttccaaagacctatttctcctttcaacaactccattttgttgaggagttctacgtgcagaaaagttatgttcaatgccatgcttaccacaaaataattcaaattctttttttcaaattcacccccataatcactcctaatagatataattttgagatttttattgtcttgaatgatttatgctagtttcctaaatacttgaaatgcatcattcttatgagtgataaat

SEQ ID NO: 1208 - DNA, 511 bp, Glycine max
tgagggaaaacttgatgccttggtcaacctaataactcagcttggcatgaatcataaatttgcacctgttacaagagtctgtggtatatgttcttctgcagatcaccatacagatctttgtgcttctttgcagtgatctggagtcaatgaacaacctgaagcttatgctgcctacatttataatagaccccctcacagcaaaaccaacattagcgaactaattatgatcttccaagctacagatacaatccacgttggagaaatcattcaaatatgagatgggcaagtgcttcacaacaacaacagtctgtccctcctttccagaatgttgctggtccaagcaaaccatatgttcctcctccaatacagcagcaacaacgacaacagtcacaacgaagacgacaagcaactgagacttctccttaaccttccttagaagagttagtgaggcatatgaccatccagaatatgcaatttcagcatgagacaagagccttcattcagagtctga

SEQ ID NO: 1209 - DNA, 570 bp, Glycine max
tcagctgcagcaattaccctgccagaaataaggtttcccccactattctgtgtattattctccaaagaaaggtctttccagaagccggatgaataatttctagctaggatgcgccaaatatgcacagcttttgagctcattcctttacttgcacataagaaggcaagtgtccttaggtgcccagactcttctaacatctgctccaattcctcctgaaaaagagatgtatttcacacggtcatttttcaggcaacccccaggtaattaccattatgtcatgcaaccaaagttttctttaaggagcagcatggatttaaaaaagggaatttttttcattttcctgtatatgcttgtgcttgacattcaaagaaggttaggttttgggttttcatgtttattttgctgctgaggctattctctttctgcagagcttcaatatgatcatatcaggaaaaggaaaaaagtatttctcaaatctacatagaaataatgggtataattcaattcacgacatatttattttacagtattaattatgaaaaatgtattgaaattacttcattcaataac

SEQ ID NO: 1210 - DNA, 561 bp, Glycine max
ggtgcgagcttgtaaagatccttgcagctgatttatcatcattttttctaagactttggtttcctcgattggcacaaccatgtgcttgaatttgggatctatcgagtgtagagtcttctccataattcttacatcttctaacttctcaccatttatttttagtttatttgaaacagcgagaattcctgaaaaataatcggaaatggacgctgactctttcatatgtaaggattcgaactcacctcttatagtttggagatgcaccttctttactttgtcttctcctttgtgagaggtttgaagcttatcccatgcctccttagcagatgttgcataagaaatcttctcgaatgcatcattctttaatgcttgatacatgaagaagagagctttattgtctcctctttttgagtcccttaatggctccttttgtacttgggataatgaaagcccatcttgggactccttttagcatttttcaacctttccccaacattatgtgcttcaagaaaggcccttcttttgatgctccatttgcaatagggcctccccttttgaagt

SEQ ID NO: 1211 - DNA, 504 bp, Glycine max
agcttgttaaagaacttcgaaaaaatcaagaacaagcttgttcgcacatcgttcgcgtgtatgacatccactccacaaggtttgaagttgaggagaccttcaatcctattacacaacgtggccgacaaaagtgggcagttaacttgaatggtcattattgtcaatgcagaaggtattctgcgcttcactatccatgttcacatattattgcagcttgtggttacgtgagcctgaactactaccaatatatagatgttgtttatacaaatgagcacatcgtaaaagcttactccgcacaatggtggcctcttgggaatgaagcgactattcctccttctaatgacgcatggacacttatccctgacccaacagcaattcgtgcgaaaggtcggcctaaatcaacaaggataaggaatgagatggattgtgtcgaaccccttgagcaccgacaaaaatgcagtagatgtggagccgaagcgcataacaggcgtcgatgtccaatgc

SEQ ID NO: 1212 - DNA, 364 bp, Glycine max
  unsure at all n locations
agcttcggcactgttaagggtaaagactcttcccgtggccttcagatgtccagtntggtcattcaggcccctaccattctgctccttcttgggatatggacaatctctctgaatattgttggatcaagtggcctcagaataattaagaagggggggttgaattaattattcctaaacctttactaattaaaaatttactcttctaaggattttactatgttgttaaataaatgaagaatagaaaagaaacttaaccaaaagtaaaagcggaaattaaagtgcacagcggaaattaaaagagtagagaagaaggagacaaacacacaagagttttatactagttcagcaacaacctgtgcctaca

SEQ ID NO: 1213 - DNA, 390 bp, Glycine max
agcttattactgcttcttggatggatactctggatacaattagattactgtggaccccaaggatcatgagaagacgaccttcacatgcccttttggtgtctttgcctacagacagatgttgtttggattatgtaatgcacctgccatatttcagatgtgcatgttggccattattgcagatatggtggagttggagcataaagcctaatgggccctcaaactgcttaactttgattaagctacatctagagagaagatgaagttacagttgctagagttagaagaaataaggatgaacgcatatgaatcatccaagatttataagcaaaagatgaaggcgtatcatgacaagaagttactaagacaaaacttccagccaggacaacaagt

SEQ ID NO: 1214 - DNA, 244 bp, Glycine max
tcaacattcaatttcgagcgtctcgatatatgacgggactcaatcagacatccgagtaaaaagttattgtcgtttgcattggctcagagcttcaccattcaatttcgagcgtctcgatatatgacgggactcaatcagacatccgagtaaaaagttattgtcgtttgaattggctcagagcttcaacattcaatttcgagcgtctcgatatattacgggactcaatcagacatccgagtaaaaa

SEQ ID NO: 1215 - DNA, 314 bp, Glycine max
  unsure at all n locations
agctttgagccaatttttacgacaataactttttactccgatgtctgattgagtcccttcatatatcgagacgctcgaaattgaatgttgaagctctgagccaattcaaacgacaataactttntactcggatgtctgattgagtcccgtaatatatcgagacgctctaaattgaatgttgaacctctgagctaattcaaacgacaataactttatactcggatgtctgattgagtgcccgaacatatcgagacgctctgaaatgaatggtgaacctctgagccaattcaaacgacaataactttttactcgga

SEQ ID NO: 1216 - DNA, 406 bp, Glycine max
agcttgtagaagcaaaaggccagctatggtgttcaagggtggatttgaaaaggcctatgactcaatctcatgggtttttttggattatatgctgcaaagaatgggtttttgccacaaatggagacactggatgtctgcctgtctcaagtcagcaagcatttctattcttatcaatggcagtcctacaaagggaatttgctcctactataggtttgaggcaaggggatcctttagcccccttactctttaatatagttggagaaggcatcacaggattgatgagggaagcagttcataagaacttatatagaagctatatggctggaaagaaaaaggaacccattaatattttgcagtatgcggatgacacaatttttgtgggtgaggctgagtgggagaatgttat

SEQ ID NO: 1217 - DNA, 221 bp, Glycine max
  unsure at all n locations
tgtgagtatctacatgagatgaagcatagagggttgcaacctaatgttgtaacttatagtacctaattgattcattttgcaaggcangcatgacactggaagcaaataaatttttttgttgacatgatacatgttggtcttcaacccaatgaatntacgtatacatctctaattgatgcaaatcgtaaaatacgtgatctcaatgaagcattttatctgga

SEQ ID NO: 1218 - DNA, 260 bp, Glycine max
tcaacctagaggagacgaaccattccaagtgttggagaagatcaacgacaatgcctacaagattgacttgcctagtgagtataatgtaagtgccactttcaatgtgtctgatctatctctttttgatgcagatggaagagccttggatttgaagacaaatccttttcaaggagggagtgatgaggacataaccaagggcaaggaccatgaagcacttgaaggtcccatgaccagaggcagacttaaacaagcccaacaca

SEQ ID NO: 1219 - DNA, 295 bp, Glycine max
tttgagctagagtgtgatgcctctggtgtaggtgtgggagttgtgttatggtagggtggacaccctattacttaatttagtgagaaacttcatggtgccgctcttaactaccccacatatgataaggagctttatgccttagttagagccctccaaacttgggaacattaccttgtttccaaggagtttgttattcatagtgatcatgaatcacttaagtacattagaggacaatgcaagttaaacaagaggcatgcaaaatgggtagagttccaagagcaatttctatatgtta

SEQ ID NO: 1220 - DNA, 370 bp, Glycine max
  unsure at all n locations
actctagtctcgctctcaacaactgcaaaatcaagtggaatattgttcctactacaatcttgtccgatgggagttaacaaagtaccatggtatttgccagttaagaatgtcccatctaattgcacaagtggcttgcaatatttgaagccttcaatgcatggattaaagttgtgtgttcatggtttggggattaaggcttgaggtttaggatttagagtttactgatacttgaggtaaagttgtgtgttaggatttacgatacaatgagaaagatatttggactattaatgagatatttaatcaaatggacttattagatataaatagggaaagaaggatatganatattctctactatattatgaccttt

SEQ ID NO: 1221 - DNA, 374 bp, Glycine max
tgtacacatgctaaggtttctccttatcttcaaatctatgtggctgcttcacataaacctcttcatttatgaatccatttataaatgcactcttgacatccatctgatatagtttaatgtctttgtgtgctgcataggctaagagtattctgacagcttcaagtcttgctactggtgcaaaggtttcatcaaagtcaatcccttctttgttgattgtacccatgagcaactagtctagccttattcctaaccacttctcctttttcattgagcttgtttttgaatacctacttagttccaatcaccgactaaatcttatgagggggaacatgattttagaccttgatctaacgaactggctggttcttcttcat

SEQ ID NO: 1222 - DNA, 380 bp, Glycine max
  unsure at all n locations
agcttatgattccatttcctgggaattcttgtattggatgcttaagtccattggctttccagcccagttctgtacttggatcatggaatgtgtttcttccacttcctttagtgtggcagtcaatggatccatttatggtcacttcaaagggcagcggggtcttagacaaggggatcttctctccccttatctgtttgtgctctgtttggagtacttttccagagatatgagcagcctcaaggaagatgccaattntaaatttcatcccaactgtgcaagtattcagctatctcatttggcttttgcagatgatattatgcttttatctagaggagatatcccttctgtgtcaactaatgttgccaagcttcaacacttct

SEQ ID NO: 1223 - DNA, 398 bp, Glycine max
agcttcacccaaacctatggtattgattactcataaacttttgttcctgttgcaaaacttaacaccattagagtcctcttataattggctgcaaatttagattggccattacagcaacttgacgtaaagaatgtctttttaaatggggacttagaggaggaagtctacatggactcaccttctggttttgaatctcagttcaatcaaaagatttgcaagcttcaaaagtctctctatggcttgaaacagtcacctatagcatggtttgagagatttgcccagtttattaagaagctgggatattctcagtgtcagagtgatcacaccttgcttgtgaaacactcttttgaaggaaagatggttgtattaattgtctatgtggatgatattataattac

SEQ ID NO: 1224 - DNA, 386 bp, Glycine max
  unsure at all n locations
agcttgaacactgcatccttgttcaataggttgctcaatggtttggtaattntggagaaatccttgatgaacctccgataaaaacctgcatgtccaacaaaactcctgatacccttaacatttactggtggtggtaacttctctatgacatcgatttttgctttgtccacctcaatgccttgggctgaaattttgtggcccaacattatcccttcttgaatcatgaagtgacacttctcccaattcagcaccagattcgcttcaacacatctttgcagctgtcataccctaatttcgtccggggactatcgtttgttgatcttttgatccttgctagtcgacttacgatgttcaaacgccagttacagtgcanaacagatgatcat

SEQ ID NO: 1225 - DNA, 321 bp, Glycine max
ctttgcaagctggaatcatttatcctatctccgacagccaatgggtgagtcccgtccaggtagtcccgaaaaagactggcctcacagtgatcagaaatgagaaggaggagctgattcctactcgggtgcagaacagttggagagtctgcattgactataggaggctgaaccaggttaccaaaaaggaccattttcccctgccattcattgaccagatgcttgaacgcctggcaggtaaatcccactactgtttccttgatggtttttctggttatatgcaaattactattgctcctgaggatcaggaaaagaccacattca

SEQ ID NO: 1226 - DNA, 458 bp, Glycine max
  unsure at all n locations
agctntactgcctcatcattgctgaagaagtttaataaaccatcactccctactataacaaattgatcggaatttgaaattctatggacattcaatgatggttgcgtggatatgtatggtgggcttttaagatcccgaactcgaaggattcccatcaaagcatcattcagatttttctgcaggagaataaaataagaaaattaaatctatgtttggtacttggtaggacaaagatttattctttgcaatcgtccattcacagacacagtcagtagattgaattttaagggtttataattatcacatttacttgctaaaatatcagtacccaaaatcttatagaaacctattggctgaagtgtaagagagaatactaacctttttcaagtagccaactccaaaagctcgagtaaccttcaatttacctttcacttttcctnctataacgatcttgggat

SEQ ID NO: 1227 - DNA, 306 bp, Glycine max
actcagcttcgtgatcaatttcgagcgtctcgatatattacgggactcagtcagacaaccaagtgaaaagctattgtcgtttgaatttgctcagagcttcgatattccatttcgagcgtctcgatatattacgagactcaatccgaccaccgagtgaaaagttattggcggttgaatttgctcagagcttcggcattcaagttcaagcgtctcgattattacgggactaaatcagacatctgagtaaaaagtattggcgcttgaattgctcagagttcggaatccattttgagcgtctcgatatat

SEQ ID NO: 1228 - DNA, 294 bp, Glycine max
  unsure at all n locations
ttgagctagagtgtgatgcctctggtgtaggtgtgggagttgtgttatggtagggtggacaccctattacttaatttagtgagaaacttcatggtgccgctcttaactaccccacatatgataaggagctttatgccttagttagagccctccaaacttgggaacattaccttgtttccaaggagtttgttattcatagcgatcatgaatcacttaagtacattagaggacaatgcaangtatacaagaggcatgcaaaatgggtagagttccaagagccatttctatatgtta

SEQ ID NO: 1229 - DNA, 355 bp, Glycine max
  unsure at all n locations
tataaactntatacaagaatgaagctctgataccacttgttagacaagtggcctcagatatcttaagaagggggggttgaattaagatattccaaattatttcccctaattagaaatctatttcactttttaaccaagttatgaattcccttaatgaaaatcttcttaaatattaattcaaatgaaacaatttgaatatgaatataaagcaataataaataaaggagattaagggaagagaaaatgcaaactcagttttatactggttcggccacacccttgtgcctacgtccagtcctcaagcaacccgcttgagagttcactatcttgtaaatccttttacagttctaacaca

SEQ ID NO: 1230 - DNA, 361 bp, Glycine max
  unsure at all n locations
tgtaatcaattacacacatactgtaatcgattaccagaggagattttcagaaaatattctcaacagtcacatctttttatttggttcttgaatggctatcaaaggcctatatatatgtgacttgagacacgaatttgcgaagactttttgagaacaaaaaggtcttatcctcttaaagagcaaaattgttttatcctcttacaaattccttggccaaaacacttgtgattcaataaggaattatttgagtgctcaaattgttcaatctatctctntaaagagagatttcttcttctcttcttctttattttgaaaagggattaagagaccgagggtctcttngtgtaaagaaatctgaaca

SEQ ID NO: 1231 - DNA, 274 bp, Glycine max
agcttctcgttcattgccataggtgtggcaagtggtttgcaatcttgcatgttgaacttctttaataagtcatccgcatatttttcttgcgagaaaaatatttgtccaagtctttgcttgacttgcatcttcacatatagtgacggctcacttggacttttgaggaatctatgctcgacgaaggatttgtctattttgttgtccatgctcggggagcttgtttgagaccataaaatgcatttttcaagcgatatactttggcttcttctccctg

SEQ ID NO: 1232 - DNA, 220 bp, Glycine max
tggatctgtgtttcagaggaatttgatgttttcaacgtatcaagagcaattcttgacacgattactgattcgactgatcatggtagagagctagaaatagttcagagaagactaaaagaaaaattggcagataaaaaatttctcgtcgttttggatgacgtttggaacgaaagcaggcctaaatgggaagctgtgcagaatgctcttgtttgtggagctc

SEQ ID NO: 1233 - DNA, 358 bp, Glycine max
  unsure at all n locations
agctatgagttggtttctggccttagaattaattntgctaagagccaatttggtgcaattggccaatctgaggagtggtgtactcttgcagcagatatcttgaattgtggtcctctgcagttcccatttatatacctagggatgcctataggtgttaaccctanaaggaaggtggtgtgggagcctctaatcacaaaatttgaggccaaactgaacaaatggaaccagagaagtctatctatggctggcagaattactttaattaatgctgccttgacagctttgcctttgttctatatgtccttttttagggcccctacagcaatcattaagaggctcactgctattcaaagacaat

SEQ ID NO: 1234 - DNA, 448 bp, Glycine max
  unsure at all n locations
agcttgtgataaggagacttttccttccttgtttgtccattaaggaggaagcaatacaagttcctgcaacaaaataaaacttcaatcagaaacaatatcttgtttgcggaacatatacaataaccttcttttactgaatgcacaataaacatttttaagaataaaaaataccaaccaaaaacatttgatgcaccaaccaaggcacttgctgcaacatcagaagcaattccagcactacggaacacagaagttgaataataaactacagcatttattccagccaactgctggaacaagaaaagtgctgccccaacactgacaactgaaacaaggcatantttaaggaagtgctatatactatttcataaaagaatacatttaatcaactaaatagtaaactaaaaaaaagttgtcagtgaaattaaaacatgaacaatgataatattat

SEQ ID NO: 1235 - DNA, 310 bp, Glycine max
taaggattgtcaacattccaatttctcgaggaatgtgaccgataaggttattttctgcaatacgcagaaatcccaacttgttcaacttcccaatctctggaggaatgtggccagaaaatttggcggtacttaagtctagatatgacaggttggacaagtttgctatggaattaggaattgctccacttagttgaagacattgggaaagatcaagagcatgtaaactccttagtgaccacatttcttgagggatggaaccatggaaagaatctaaagaaaaattcacaacatttactttggacatgttacc

SEQ ID NO: 1236 - DNA, 307 bp, Glycine max
  unsure at all n locations
agctctgataccacttgttatacaagtggcctctgatatcttaagaaggagtggttgaattaagatattacaaactattttcccaattaaaattctactttgattttaatgcaagttccaagttcccttaatgacgaatttctaaatgatgattcaaattaaacaatttgagtgtaaatttaaaacaacaatagataaaagagtttaagggaagagaaagtgcaaacttagttttatactgattcggccatacccttgtgcttacgtncagtccccaagcagctcgcttgagagttccactaacttg

SEQ ID NO: 1237 - DNA, 307 bp, Glycine max
agcttcgacctatgttcatgaattgtgtgccatcacaactgccgttaagaagtggagacaataccttcttggccatcaattcatgatcttgactgatcacagaagtcttaaggagctcatgactcagattgttcaaactccagagcagcaaatgtattttgccaggcttatggggtatgactactccattcaatatcggtccgggagcactaatttggtagctgatgccttatcgcgcttgaaggagggatcagaaggaaccatgttattactatctgtaccttgcctgacatttctagatgaattg

SEQ ID NO: 1238 - DNA, 346 bp, Glycine max
  unsure at all n locations
tggatttccttttagtagggaatctatccttcctaagatggagccaaacccagtcacccttattaagaactagctcttttattcctttattgcctttagttgaatacacctttgtttggttctctatttggttcttaaccctctcatgcaacttctttacaaactctgacctagattccccttctttatgtataaaagaagtgtctagtgggaggggaatgtgtctagtgggaggggaatgaggtctaactgtgacatcctggaaatatttacctggaattttgtaagcgatatattntaaataaatatatatatgtattattcagtggatatatatatatatact

SEQ ID NO: 1239 - DNA, 293 bp, Glycine max
taaaacaagcttcccgtcagtggtaccttaagtttcatgggataatttcttcatttggttttgatgaaaaccccatggatcaatgcatataccacaaggttagtgggagtaaaatatgctttcttggtttatatgtagatgatattttacttgcaacccacgattcgggtttgctacatgaggtgaaacaatttctcttctaaaattttgacatgaaagatatgggtgatgcatcttatgtcatcggcattaagattcatagagatagatctcgaggtattttaggtctatca

SEQ ID NO: 1240 - DNA, 357 bp, Glycine max
agcttgattgcctattcatcaaagggagaattctcctgagataatatatgagagatgcagcaacaacctcagatttcattcctttcacttcaatggctataatcagtcgtttatatagggagaggcttaacatagacacatcataaaaccaccaatcatggagttgagatggtttctcagaagaaattccattccacaatgcactgttgtctgcttgattttgcttgcaattgcttccaaccacaggccagtggaataaggttggatctgaacaagcctttatagccaaggaatcaatgcatcttgaaactatatggagatcttttgtcaagggctgcacttccttcacatgtttaa

SEQ ID NO: 1241 - DNA, 396 bp, Glycine max
tgttggttacagtgacaacaattgggctggagatgaagatgattggaaaagtaccagtggatttgtgtttttcataggaaacacaaccttcacttggatgtcaaaaaagtagccgatattcactcttttgactcgtgaggcagaatacgtagcagctacttcatgtgtttgtcatgcaatctagcataagaatttattaaaagagttgggcatgtcacaagaagagttgaccaagatctttgtggataataagttagtcattgctctagcaaggaatccagtgttctatgatcgaagcaagcatattgataccccttaccactacataagggagtgcatagcaagaaaggatgtacatgcagaatatgtgaagtctcaagaccaagaagctgacat

SEQ ID NO: 1242 - DNA, 323 bp, Glycine max
  unsure at all n locations
tcaaccctacgtcctgctcttacatctctatatatagagaatgcttcttccattatcttagcttgngccagcaattctgctctctgtattccagaaggatgagtagagaaataatccccgaaggtagaataaccagcaaattttcctaactcctcatacactttatgtgccacccggggatcataaccggctaatgcaattatgtactaagttatgtcacgcctattttgaacactcagtccatctatttatcacttgctcatttgctaaattcattcgcgtattaactcatgtagatgttaattgtgaagcatcgggataca

SEQ ID NO: 1243 - DNA, 333 bp, Glycine max
tgtaggcctaggatcttcttcatcaatggattcctttgcttcttggaaaatgaatggcaacggaatggagaaggaagagagagagagaggagacgccacttcaaggagaagatgagtctagaagaagctcaccaccataagaggccatggataagagcttgggggaagaaggagatgactgaagggagagagagagaagagcacgaaattttgtgctccaaatgagctttgaaatctgaagtttgatattcaaatgatcaaaagtgaaaaaaaatcacacacatgacctctatttatagcctaagtgtcacacaaaaatggagggaaattcca

SEQ ID NO: 1244 - DNA, 376 bp, Glycine max
  unsure at all n locations
agcttcatggatntccttctacaattatatcttataaggatgcaatttttctcagcagtttttggagggagatgntaaattggctagaactagtcctaagcatagcacttcttatcatccccaaacggatggtcaaaccgaagttgctaatcggtgcttaaagacctatcttaggtgctttgctggccctaagcccaagacttggtttgaatggttgcattgggctgagttctggtttaacagtaactacaatatctttgctggaatgacaccttttaaacctttatatggacgagatcctccattgttgattaagagctgcaccattccatcaaagttggatgatgtaaatcagttggcccaacaacgagatgat

SEQ ID NO: 1245 - DNA, 314 bp, Glycine max
tcaacctagaggagacgaaccattccaagtgttggagaagatcaacgacaatgcctacaagattgacttgcctagtgagtataatgtaagtgccactttcaatgtgtctgatctatctctttttgatgcagatggaggagccttggatttgaggacaaatccttttcaaggagggagtgatgaggacataaccaatggcaaggaccatgaagcacttgaaggtcccatgaccagaggcagacttaaacaagcccaacacattatagagaacaggctggtcatttggatagctgtcattgatgatgattgaaggc

SEQ ID NO: 1246 - DNA, 287 bp, Glycine max
ttgagaaaactcaactttcataactttggactcaaatgtctgattacggaccataatatatcaagacgctaaaaattgaacacggaagctcgggcccaattcaaactggcataacttttgacttagatgtctgattgtggaccatattccaactgccatgattggtgattctgatgtttgactacggcccataatatatcaagactcttgaaattgattacaaaagctcctcacaaattaaactaccataacttttgattggatgtctgattgtggccgataatata

SEQ ID NO: 1247 - DNA, 384 bp, Glycine max
  unsure at all n locations
agctattcttcgtgggttgatgggttctgtctcgtaaaatggcatgatcactggatgacatgttctcaattagctcagttgcttcttccggggtcttcagttttatctttccccctgcagaagcatctagcagttgcttggtttgtggtctcagcccatctataaacatattcaattgaattagctcggaaaacccatgggtgggagtttttctcaataaacctttgaacctctccaatgcttcacctagagattcatcagggaactgatgaaatgaagagattgcagctttcccttccacagccttggactttgggaagtatttctttaggaacatttcaacaacttcatcctangttntcagattgttacccttaaatgagt

SEQ ID NO: 1248 - DNA, 272 bp, Glycine max
tggatttccttttagtagggaatctatccttcctaagatggagccaaacccagtcacccttattaagaactagctcttttattcctttattgcctttagttgaatacacctttgtttggttctctatttggttcttaaccctctcatgcaacttctttacaaactctgacctagattccccttctttatgtataaaagaagtgtctagtgggaggggaatgtgtctagtgggaggggaatgatggctaactgcgacatcctggacatttcta

SEQ ID NO: 1249 - DNA, 356 bp, Glycine max
  unsure at all n locations
tgtgtcacactttcaattgtcgaagctgaatacatagctgcaagaagttgttgtgctcaaagtctttggatgaagcaacaatgatgtaagctccattggagcttgtaggcctaggatcttcttcatcaatggattcctttgcttcttggaagatgaatggcagcggaatggagaaaggaagagagagaggagacgccacttcaaggagaagatgagtctagaagaagctcaccaccataggaggccatggataagagctnggaggaagaaagagatgaatgaagggagagggagagaagaagcacgaaatttgtgctctaaatgagctttgagatccgaagtntaatattcaaatg

SEQ ID NO: 1250 - DNA, 414 bp, Glycine max
  unsure at all n locations
agcttgttgtcattaaatcttacatgaatggccttttctacagtcaaggttctggagttatgcactctgtatgccttggacaattcaaagtattcaagtaagattctagaatcacactaggagtcaaactttccaagtttatccttggtgtttaagatgaaacgctgacatccaaatgagtggaagtaagagatattgggcttacgtctcttccataattcatagggacttctttaagataggccttatgtaaattttgttctataaataccaggaaacatttacagcttcaacccataaatctttgggagttgagtgatcgttaagcattgttcatgccatttcctgaagagatattnttttcctctcaacaacttcattctgttgtgctgttcttggagtgggaaaaatatg

SEQ ID NO: 1251 - DNA, 357 bp, Glycine max
  unsure at all n locations
tcaataataacatagaattcccaagtatatgtagatagtttctgcattctaccagacaatttttttttagaaataagcaataggatgcttgttttggcttaacacaacaccaactcccctccctgaagcatcagtttctaatacaaaaagtttattgaaattaggaatagccaagacaggtgcagaagtcatggctatcttaagtttttggaaagcctgggcagtagcttgaccccatttgaaagagtccttcttcaatagaacagtcagaggtgttgcaatggtagcataggtcttaacaaatcttctataataacctgtaagtcctaggaagccccttaatntctttagattcat

SEQ ID NO: 1252 - DNA, 419 bp, Glycine max
  unsure at all n locations
atggacactgaggtatctaaatggatctttgaaagctggattaaggtacaagaagacagcacatgaggcagcaatcacaggctatgtagatgcagattttgcaggaaatgtagacataagaaagtccttaactggatatgtgtttactttgtttggaaaaacaatcagttggaaagcaaataaacaattagttattgctctttcaacaactaaagtagagtacatggccctaattgaaggagtgaatgaagcaatctggctaanaggaatggtaaatgaacttggaatagcacaaccttgtgtacaattcactatgacagttagagtgctattcatttagcanatcaccaaatttaccatgagaggacaaagcacatagatgtngaaatacacttcatcagagatctgattgaatctga

SEQ ID NO: 1253 - DNA, 389 bp, Glycine max
  unsure at all n locations
agcttaatanatctatatatgatttanagcaagtctcccatcagtggtaccttaagtttcatgggctaaattcctcatttggttntgatgaaaaccccatggatcaatgcatataccacaaggtaagtgggagtaaaatatattctcttattttatatgtagatgatattttacttacagccaatgatcaagttttgctacataaggtgaaacaatttctctccaagaattttgacgtgaaggatatgggtgatgcatcttatgttatcggcattaagattcatagagattgtagaagcangcttcatgatgatgaatcaagtagttttgatgatgacaaaaagcccacaagaatgatgtcaagattgagtcaacaagttcaagatcaa

SEQ ID NO: 1254 - DNA, 321 bp, Glycine max
  unsure at all n locations
gcttatgctgcaatattacaatagacctcctctacctcagcagcaaaatcaaccactgtagaacaattatgatctctccagcaacagatacaaccctggatggaagaatcaccctaatctcagatggtctagccctcaaaagcaacaacaacagcctgctccttccttccaaaatgttgttggcccaagcagaccatacattcctccaccaatccaacaacagcaacagcccctgaaacagccaacagttgaggctcctccgcaaccttccctcgaagaacttgtgaggcanatgaccatgcagaacatgcagtttcaaca

SEQ ID NO: 1255 - DNA, 445 bp, Glycine max
  unsure at all n locations
ctgcagcttattctttntactcttgtgccaagtctttgatgccacatggttgaattattgacagcctccgtaattgctaccatatcctcatctacaatcatgtaaagagatcctcacttttttccacgagccccaacgagattgccttttgttaccttccaagctccatctccaaaagtggtgtgatgcccctcatcatcctaccatcctatagatattaaatttttttttaaggcaggaatatgtctaacattgtgcaatgtccatagggatccactagaggtcttgatgttgatatcactntttccaacaatgtcaagagattntccatctgcaagggaaactttcccaaatcttccagaaatatagttagacaataaatctatagagggagtagtgtggaatgaggcacctaagtccattaatcatgaatcaacgggactat

SEQ ID NO: 1256 - DNA, 358 bp, Glycine max
  unsure at all n locations
ggacagtggaagagctactttgctaaaatctcttataaagcgcctgtataatcctgcatgagtaagataagatcgcacctctcacacgcaagaggggtaatgcaattgtgaaataacaaaaaattttgcaggatctacttcaatgcccttattggaaataatgtggcctaaaactataccttgctcaaccataaaatgacatttttcataatctagaacaaggttagtttcagtgcatctattcaaaaccttttccagactatccagacaaatatcagaagagtatccatatacagtgaaatcatccataaacacctctatgcaattttctcaaaaatcactatnaatactaatcatg

SEQ ID NO: 1257 - DNA, 463 bp, Glycine max
  unsure at all n locations
tctggatcttgaatttggtttgccactgggttggatggaaaagtgtcaaacaaacaattttttatttcaggaaaaaattagaggtagggcaggaagttttacttttttattatgtgtggntgaatgaaataaaaaatctttgatttggtttgtgctgaatttgatgagtttggttttctattttttaaaacattttcttgcatttcttagttgtcaaaaatcatttaacacattttaaacaagtcaaacaattatattttaaaaaatcttaacggtcaaaaaattaatcgcaacaaaatgcaataaaagtttaaggattaagattaattaaatntttggttaagaattaaaaatcaaaatataaaaaagttaatggattanaaacgtagttaatcttattntatataatanatacanagaatattttaactattttattgtaataaataatgcatgaaatata

SEQ ID NO: 1258 - DNA, 371 bp, Glycine max
  unsure at all n locations
tgtctctctatgggtgaaagaataaccctcattaattcagntntaacaacattacccatttacttgctgtctttttttagaatccctaanaaagtggtgcaaaagatagttgctattcagagaaattttctatggggaggtgatattgaggccaacaagatcccttgggtgaaatgggacacagtttgtcttcctaagaacaaaggggggttagggattaaagacttgatcaaatttaatgaggttntgcttggcaaatggcgttgggagttgactaataatcagaaccagctataggcaagaattctattgtctaaatatggtgggtggaatgcattgctctctggtagaaatagtagtgatctctccca

SEQ ID NO: 1259 - DNA, 362 bp, Glycine max
agcttatcaaggttgcttaatatctccaacatatttactgcaattaatccataatatttataattagctgacagtcggatcatgctgatatatatcaataagttaaatttgatagtgatactgttgtatatattaaactacattgagatttggcaaaagcaaaaagctattaaacattgtcttgtgttgcattctcattcaggaaacaggtttcaacttctgtacaaaacagaaatttcttacaataaaagaagacggcttctgttcaaaattgcctcatctgatctgtctgtgtctccattagcatgatttacaggtcattcaagtgacacgtgacagttaggaactcatccttcttacat

SEQ ID NO: 1260 - DNA, 441 bp, Glycine max
  unsure at all n locations
atctctgagtcacctgcggcatgcaagcttgctcgagataatagctcanacttaggaatccagganagccccatctttaaagttctaattaaggttagattaagaattttaaatgcaaattacattattataagtaatattgaatacctaattaaattatattttttaaggaacctaaataatctaattagatttattctatttaattttaattaatattcattagttaaagttgatcttagttgattggataattaaaattagtttcaagtgagaataaggacttacattntttgtttaagttaaaatcattctanattactatgcttggagaacctgaaataactaattaatacatnttttatgaattaaatanaccacacttatanttctattaaatttgagttaactttttttaagagaaatttgagttactaagta

SEQ ID NO: 1261 - DNA, 404 bp, Glycine max
  unsure at all n locations
gcttgctaacccatggaagctcctaatatcttccacactntnntgggtgggccattcgtggatggccttgatttcccaaggtccacatggaccccatttctaccaactacaaaacctaagaaaactatattatctacacaaaaggtacacttctctatatttgcatagagggtgtttttcctatggactgaaagaacttacctgagatgtcctaagtgatcatctangctcctattgtacactanaatatcatcaaaataaacaactacaaatctacctatgatatcccttaagacatgatgcataagcctcataaaggtgcttggtgcattagtgagcccaaaaggtggtcttgaaagcgattttcactcatacccttntcatctgatttcggataccacttt

SEQ ID NO: 1262 - DNA, 305 bp, Glycine max
tgattacacaagatgatgacgaaggagatgacaaaaagctccagattaaccctatgacagatcctccgaggtaaagatgtccagactacaactattggctacaaaggtcgaaaatctgaagatgaatgaggaagagtgtattcatgacttccacatgaacattcttgatattgccaatgcttgcactgccttgggagagaagatgacagatgaaaagctggtgagaaagatactcagatccttgccttagagatttgacatgaaagtcactgcaatagaggaggcccatgacatttgcaacatga

SEQ ID NO: 1263 - DNA, 444 bp, Glycine max
  unsure at all n locations
agcttttngaatttnntttttattttactattttanaattcagaataactattattttccgtcttttaattaatttacaagtgaattttcaatactaaagtaatggttcatacttcttaatctaacaactattntgatacattattattttttattttacgaaaattacaaacaacaaagattaattaaaaattagaagacatataaacaagttgcatagaaaaataatacggtagattntacaaaagtttaaactgtttgacacttcttatttactttcacacataaatacaacaaaaatgtgtattatcttgaaaatgattacaagtatgacaacttaacataagttgtctatcacattaatacaaatcggaatacctaagaagtatataagaaatgataaattaattttcacaagagttcctctcagtgtcaccacaagca

SEQ ID NO: 1264 - DNA, 426 bp, Glycine max
  unsure at all n locations
ctggcaagggtttgggcagtgtattttgagctctaccagatgggactcaattagcagtgaagaagttggaaggtattggacaagggaagaaagaattcagggccgaagttagcatcattggaagcattcatcatcttcatttggttaggcttaggggattctgtgctgatggaactcataggctccttgcttatgagtacttgtctaatggctccttggataaatggatattcaagaaaaacaaaggtgagtttctgttggattgcgatactangttcaatatagctctgggaacagcacaaggacttgcttaccttcatgaagattgcgactctaagattgttcattgtgacatcaagcccggaaaacgtgcttctggatgaccacttcatgcgcatggttcggatttcgactggctaactcatg

SEQ ID NO: 1265 - DNA, 350 bp, Glycine max
  unsure at all n locations
agctntgagcaaattcaaacgacaataacttttgaatcggatttccgactttgtctcatagaatatcgagacactcgtaattgaaaacggaagttctgagaaaaatcaaacgacaataagttttaactcggatgtcctattgagccctgtcatatatcgagacgctcgtaattgaagaccgcagctctgacaaaaatcaaacgactataatctgtaactcggatgtgcgatagagacccgtaatatatccggactctcataattgaaaactaaagctcttaacaaatatcaacgactatacaatcttgactcggatgtccgactgtgtcccgcaagatatacagacgctc

SEQ ID NO: 1266 - DNA, 384 bp, Glycine max
tgagttgatctttatccttcataacaaggttcattttgtctgtagtctcgtggcatctcacttctatctcttttaagtgcttattttttacctgaataatgttagttaaattcgagacaagcttatcttgccttcgagcttcttcttccataagctcagatatggttttgacatcgcccatccttcgcagatgttctccatagatactattgatcttgtagtcatctgcccgggcaacccatgcataaaggccagacttcagcccagaattagtaaaccaatccttttttccatgatgatctaattcatatgctctttcaaatgccaatgcattatgtaagcctggccaagttttattgaattccacaagagcagtttcagagt

SEQ ID NO: 1267 - DNA, 346 bp, Glycine max
  unsure at all n locations
tgtagagaggcattngaggagctgaggaggaggcttaccacctttcccatcatgcaaccattagattgngagcttccatttgaatttatgtgtgatgcctccaattatgcacttggggatgttntgtcgtagagagttgatagactatcacatgtcattgcttacgcctcaccactctggatgcaacccaagtcaactacaccaccaccgaanaagagcttttagctattatttttgcattagataaattcagatcttatttgtttgctcctatattactatttgtactgaccatgcagccttgagatacttgttgaagaaacctaatgctaaacccaaattgatc

SEQ ID NO: 1268 - DNA, 392 bp, Glycine max
  unsure at all n locations
aactggatgcattggtttacttggaacccagctggccttgaatcagaaatctgtacctgtcgcaagggtttgtggttggtgctcctctgctgaccaccatacagacctttgcccttccatgcagcaacctggagcaattgagcagcctgaagcttatgctgcaaatatttacaatagacctcctcaacctcagcagcaaaatcaaccacagcagagcaattatgacctctccagcaacagatacaaccctggatggaggaatcaccctaacctcagatggtccagccctcagcaacaacaacagcagcctgcttcttccttcaaaatggtgctgggccagcagaccatacatntctccaccaatcaacaacagcaacaaccccagaaacaac

SEQ ID NO: 1269 - DNA, 405 bp, Glycine max
  unsure at all n locations
aagctcctaatatctcccacactntnntgggtgggccattcttggatggccttgattntctcagggtccacttggaccccatttctaccaactacaaaacctaagaaaactatattatctacacaaaaggtacacttctctatatttgcatagagggtggttttcctaaggactgaaagaacttgtctgagatgtcctaagtgatcatctaggctcctactatacactaaaatatcatcaaaataaacaactacaattctacctatgaaatcccttaagacatgatgcataagcctcataaaggtgcttggtgcattagtgagcccaaaaggcatcactagccattcatacaaaccanacttggtcttngaaagcagtttacactcatcnacccttttatcctga

SEQ ID NO: 1270 - DNA, 418 bp, Glycine max
  unsure at all n locations
actcagctcttgcccaattcgcttctgatctcgaaaaagctactcaaaattcattatccagaggtccaccattgcgcgagttgcttaaacaattccaatcagcttctcttacccgggaagaaccgataataactatttatactggaaccaatgggtatcttgattccttagaaattggacaggtaaggaaatttcttggtgagttacgtgcctacttaaacaccaataaacctcaactccaagaaatcatatcttctaccaagacattcactggggaagcagaagtcctttttgaggaagctattcaagaacagatggaactctttttactacaggaacaggtagaaaaaagatgattaatcatttaataactttataattcactctcaattcttataatangnatcttttaatatct

SEQ ID NO: 1271 - DNA, 402 bp, Glycine max
  unsure at all n locations
agctttgcttctgttcaatatataatgactgtagctaactatgcgtggntaatccgatccgatcatcgatggtcggcaagtatgatggtcttaatgatgatcctacacgtattttcgtgtgtatctcacaggcggttttaaaaaacctcgccaattaacttgggttacgggtgtagttatggctgtattgactgcatcttntggtgtaaccggttattccttaccttgtgatcaaattggatatagngcagtcaaaattgtaacaggcgtacccgacgctattcctgtaatangatcagctttggtaagctattacgcggaagtaccagtgcaggacaatctaccttaactcgttgttataggttgcatacttgttgcatacctcttctactgctgtattat

SEQ ID NO: 1272 - DNA, 341 bp, Glycine max
  unsure at all n locations
cagcagccaatccttgaagcttcctgtttctccctgtgaaataaaagaaagagagaaattaaacctaatnttggtcacgtaaggaaaagtangacaaacttacctaatgcaaaatggcaaggtaaaggtgtgccacatctcttcaatgtggtcatttcatcatctgttagtttacgattcacaccatatggaagaaggcaaaagggcttactataaccatgaataacagcaggcagaagatcagcatcaacaggcaaaggatcacactcccaccaatcaatatatcgaggcccaagccctgttagcaaacagtctgtatcttctgcaagctctgcttcatc

SEQ ID NO: 1273 - DNA, 328 bp, Glycine max
tggttaccccatgttgaatttgcttacaatatagctgttcatagcaccactaattggtctccttttgaagatgtttattggtttaacccactaactcctcttgatcttttgcctaatgtttctgtttttaagcataaagaaggtcaagcaaatgcggactatgtgaagaagcttcatgagagagtcaaagatcaaattgagaggaaaagtataagctatgctaaacaagccaacaaagggagaaagaaggttgtcttcgaacccggagattgcgtgtgggtgcacatgagaaaaaaaaggtttccggaacagaggaaatcatagcttc

SEQ ID NO: 1274 - DNA, 339 bp, Glycine max
  unsure at all n locations
agctagcaacaaacataatgtcttgtcttgttgctgacagatacaacaaactaccaattatacttctataaacaaaatcatccgctttatcaataccatcgttcattgataacctttcattcacaacaattggagaggccacacgcttgcattgctccatgcaaaacttcaatatcaccaaagcatatttcttttgtgaaatgaagatcccgtcattacattgagaaatctccattctaagaaaatacttaatttcacccaagtcaaccatttcanattcgttgtccatgtcccttatttcacctaagtcagtcattttcccacttcttcacgtaccag

SEQ ID NO: 1275 - DNA, 283 bp, Glycine max
tttgcaaggtgaaatcatttatcctatctccgacagccaatgggtgagtcccgtccaggtagtcccgaagaagaccggcctcacagtgatcagaaatgagaaggaggagttgattcctactcgggtgcagaacagttggagagtctgcattgactataggaggctgaaccaggttaccaaaaaggaccattttcccctgccattcattgaccagatgcttgaacgcctggcaggtaaatcccactactatttccttgatggtttttttggttatatgcaaatt

SEQ ID NO: 1276 - DNA, 287 bp, Glycine max
ttgtgctaatatgttctattgacactctttgtttctgaacttcttctttcacggcaaagtacttcaattccatatgcttagcacccgtagagtacttgtcgttcttagaaaagaatattgttgcggagttatcacaatacattttcagcggcctagcaatactgtcgacaattccaagccctgaaataaagtttcgcagccaattagcctgaattgtagcctcaaaacatgctacaaattcatcttccatggtggatgcagcaacaactgattgttttgcactcttc

SEQ ID NO: 1277 - DNA, 408 bp, Glycine max
agcttggtcataattataaaaagatagatgcttgtccaaaacactgcatgttgtatttgggagatgatgaaaaaagtttggatgcttgtaagcattgtggtacatctaaatggaaaccccacaagaagaagaaaatagctgcaaaggttttacgctactttccattgaaaccaagattgcaaagattgttcacatgtcgtaagactacaaaagatatgagatggcatgttttggaagacaataaagatgggttgttaaagcatccaagagatggagagacatggaagacatttgatttaatccatcctgagttttcttcaaatcctcgaaatgttcgtttaagccttgctactgatggttttaatcctgctaggaccttgagttctacctatagcatctggccagttt

SEQ ID NO: 1278 - DNA, 594 bp, Glycine max
agcttaagccttttatacatgcttagtaaggatcaaagatgttaaaaaaatggattgatctctaagtttctaaaaagcaatgagttcaacacactataattgattacaaagttttgttatcaatcacaaagtgttagaacaaacaacaaatctctcttctacttgaaatttttggcaagttttgacaaattaatcgattacttgtttcaataatcgatcatagaagtcagtttcaaaagaagaaagactttgtagcttaagctaatcgattaccttttattgtaatcgattaaattgtatctagaaataatcaaagttagtttcaaaagaagaaagactttgtagcttaagaagttctctacatgatgaaataatcaattaccacacctgataatcgattattccagaaaatacagaagcatgagaagctctttatttgaaacaagataatagattatcatttcctataatcgaatacaagatttatgaaaatgcataacaaaaaggattttgacgtattaatcgattaccataatctataattagttaaaattggtttacccatcaaaattataaatacccttttatcttatt

SEQ ID NO: 1279 - DNA, 507 bp, Glycine max
  unsure at all n locations
agctagtaatacattaattgataaaataaaactttggcatttgagattaggtcatgttagtgaacggggattacatgaaattgagaaataaaatctgttaggtggcgataaactagataaacttgaattttgtgatcattgtgtgcttggtaaatcacatagaataagctttggcactggtattcatgttttatctaggccttttgagtatgtgcattttgatttatagggaccatttagagtgaaaattcatggtggaagctcatactttctcaccatcatagatgatttctcaagaagagtatgtctgtatgttttgaaaaataaatcagaagcttttcaaatattcagagagtggaaaactcttattggaaatcaacttggtacaaaactaaaaattttaaggactgacaatggcctgtagtttgtttcaaagcaattcaatgagttttgcaggaaagtaagtatcanaaggcccaaaacaatcccttacacaccacaacaaaa

SEQ ID NO: 1280 - DNA, 284 bp, Glycine max
tctgttatgaatttcgagtgtctcgatatactacgggacacaatcggacatccgagtaaaaagttattgacatttgaatttgctcatagcattcgttgtcaattacgagcgtctagatatattaaaggattcattcggacatccgagtaaaaagttattatctttttattttgctcagagcttctgttttcaatttcgagcatctcgatatattacaggactcaatcggatatccgagtcaaaagttattgtcgtttggatttgctacgagcttccggtttcaa

SEQ ID NO: 1281 - DNA, 278 bp, Glycine max
tgtaatcgattacagcatttgtgtaatcaattaccactaaggaattttcaaaaaataactcccaagagtcacatctattcaaaagatttttgaatggccatcaaaggtctataaataggtgacttgggacacgaaatttcttagagttttcctgaacaaattgtcttatcctctcaataccaaattgtcttataactctcaaaaagaattccttggccaaaacacttgcaaattcaataaggaatcttaagtgatcttcaattttaatatctttctct

SEQ ID NO: 1282 - DNA, 493 bp, Glycine max
agcttggaagccaaggccttgaggtttgtttttatgttgttggattgattttatatccttcattcatatcatggctctgagttggtatcttccttgtcttgtgtgaatcatttttggctgtaaggtttccaagttgggattcgggtgtatgggcctgaccaaagtgtacaatgatcctgttcctaaagaggttggcatctctttgatcaaatacacattcagtaaagggatcactttctttgttactgtagatttttatcgaccccatgccaacaaagttttggtcgaaaaggttaattaccttaacactttgtaacatatttgtttcactttaacaataacaacccataatataatgtaacataacattttaattaactctgaggtggtcaggggcttgcctcaagatcaaattcagattcccccaaagtttggtattgtcaaaatggataatggtaatgtgatagtgaaccggttcccctgaatatgtctg

SEQ ID NO: 1283 - DNA, 434 bp, Glycine max
agcttcttgcaacattatggtcaatgagctgcataatgaggggaaaaagcaattttcctgttataaaaaatatattagccaattttgatgatgctttctgagaattgagaagcttgcctcctaaaagggattgggatcatgctatcattttgaagaaggctcaaattcctaatatttgcccccacatgtatatgcattatcaaaaaaatgagatagagaagattgtgaaggatatgctttgtgctgtaaggcccaacactaaccctttcagtagccctgttatacttgtcaagaagtattgtgtgtggagattttgtatagactatcaggccatagacaagtaaacaccggataaatttccaattcccataatagatgaactactagatgtattgggtgatgcagtgatttttgtaagatgaactactcttttg

SEQ ID NO: 1284 - DNA, 168 bp, Glycine max
tataatatatcgaggcgctcgaaattgaacaacggaagctcttgagaaattcaaatggtcataacttttaactcggagttcaattcatgcgcatcacatatagagacgcttaaaaatgaacaacggaagctctccaaaagttaaaatggtcataagttttcacactga

SEQ ID NO: 1285 - DNA, 282 bp, Glycine max
tgaaattgaacatcagaagctctcgacaaattccaatggtcataacttgtcacaaggaagtccgattctggcgcatcacatatcgagacgctctaaattgaaaaccggaagctctcgagaaagtcaaaaggtcataacttgtctcacggaagtcagattcgggcgcataatatatcgagacgctcgaaattgaacaacgtatggtctcgagaaattcaaatgttcataacttgtcacacgaaagtccgattcaggcgcataatttattgagaagctggaaat

SEQ ID NO: 1286 - DNA, 195 bp, Glycine max
  unsure at all n locations
tgaaggtaggagaagatgagtggagggagagggagtgaagaggcacgaaattttatgcctcaaatgaggtctgaactttgaagtgtaattctcaaatgatcaaagttacaacaagtgttacacatgcttccatttatagcctangtagcttccttgagaagcttccttgagaaacttccttgagaagcttttttg

SEQ ID NO: 1287 - DNA, 276 bp, Glycine max
tacatcgactgccagaaggtgcataacaaactcgttgaaattagttgcaacttgtaactgtttctcggaggaagaaagaaagaaaaaacggttataacaaacttttttttctgctacggctgctgctgttgcaagttggggcgcctccggaaatagcgcgtttgttggaggaaatccggcgagaaaacgacctatgcaagagcgacgtcgtttcttcttccacgtgctttggagccgatcccgagcttgacgagttcatggtccccccttctttct

SEQ ID NO: 1288 - DNA, 419 bp, Glycine max
agctttactagtgttccaagacatgatgtctgctggagaatgtccaaactatgtaaccttcattggggtactttctgcttgtgttcatttagctcttgtacaagaaggattctactattttgatcagataatgaagaaatttgacgttgagcctggactggagcactacacatgtatggttgcacttttgggtagggctggtttacttgatgaggctgaaaactttatgaagacaacaacacaggtcaaatgggatgttgttgcgtggcgtactttgcttaacgcgtgccacattcatcgaaattacaatttagggaaacaaattacagaaactgtgatacagatggaccctcatgatgtgggaacatatacattgctatcaaacatgcatgccaaggcaaagaaatgggatggagtgg

SEQ ID NO: 1289 - DNA, 288 bp, Glycine max
tgtcgaaaaggcaaagccgttttacaaactgctcaagaaaactgagcccttcctgtgggacgagacatgtgaacgagccttcctggctttcaagaaaaccataactacaccaccgatcctgagtcggcctaggctaggagtacccatactcctatacctttcaataactaacaaagctgttaactcgacccttctgcaagaggaagggaagcattaactccctatctatttcaccaaccgcatacttcatgaggccgagaagtgctaccaaatgatagaaaatatggt

SEQ ID NO: 1290 - DNA, 440 bp, Glycine max
agcttgcagtgattcactctgatgtgtgtggcccatttgaaatcaaatctcatggaggtaacttgtattttgtctcttttatagatgactttacaaagaaaatgtgagtttacctattacaaagaaagagtgaagtatttgtaacatttaaatcattcaagttactagttgaaaaagcaatctggttgttcaatcaagatgcttagaactgatggtggaggagagtacacttcacttgaatttgagaatttctacaaggaagaaggaataattcatgaagtaatggctccatacactcctcaacacaatggaactgctgagagaaagaatagaatagtgcaaaatatggttagatgcatgctgagaaagaagcatcttccatatgatttttgggcaaaggcagtatccacaacttctcacatcttgaatagatgtcctac

SEQ ID NO: 1291 - DNA, 441 bp, Glycine max
  unsure at all n locations
agcttgaatntgagaataaaaatcataagacattaagtttctcttggcctagaagtcagatgcaaattcagtagaacagataaatatatgatgctctaatttacaaaacgaaataaaaaaaataaattggctttcatgttgattgtaaaccttttgagtttggacacttacacattctggtgaagctgacaaatgcagtatatgtagccgaagacaaggcaggcaaaagaaacattggcaaaactcggattgccctcattttccaattcatatccattgatcttgttgtcataatagcataacctacagcaatgacctgaaagttgaaaccattttaagcaaaatccatttataaaaacaccctcaataatcaataagaatatattaatttgtcagagaaaaaatttaaaatttcagttaaccctccattgtcactcaata

SEQ ID NO: 1292 - DNA, 289 bp, Glycine max
tatcagaacaacattttttttcaaaatgcaacaatgagaaaagaaagcacaaagaggaaattcacagaaccaaatgagattaacatcaattcacattttgtttctaaagaatataagagaaaacacccgattcactcaggcagaggaaaacctctcaaaggtgcataattctcatgcaggcaattgttccatcacaattccaatcactgatatgtcataaatcaatttttgcaagtcatttcccatcaaatcaaagataaattgcataatcatcatggatcattagggc

SEQ ID NO: 1293 - DNA, 407 bp, Glycine max
agctttctccactaagttgcctaatgcctgaaatgtcttttctgatggtagtggtcctagatgcaagaaagaatttctccaagaacaccctcttaaggtcatccctgctgaaaatggacttgggagcaaggtagtgtagccaatcttttgccactccctccaaagaatgaggaaaagcctttagaaagatatgaccttcttggacattagggggtttcatggtggaacaaacaatatggaactccttaagatgcttataaggatcttcacctgcaagaccatgaaacttgggcagcaaatgtattagtccagtcttgagaacatatggaacaccctcatcaggatattgaatgcacaagctctcataagtgaaatcaggtgcaaccatctccctaagagtcctctca

SEQ ID NO: 1294 - DNA, 439 bp, Glycine max
  unsure at all n locations
agcttctggtgggacatcttgacttgctttccaatctgacattcaccacagattctgccttcttctattttcagattgggaatgcctctaacagcaccttggtcaatgattttcttcatgcctcttaagtgcagatgtccaaatctttgatgccatattttgacttcatcttctttggaggatagacatgtggaggagtaactggtttcttgaggtgtccataggtaacagttgtcctttgatctgctgcccttcattagaacttcactcttctcatttgttaccaagcattctgactttgtgaagtttacattgaatccttcatcacaacaactgactgatgctgatcaagtttgcagtcagtcccttcaccagcaatactttgttcagactangaagtccatcatggactagccttcccatccaataatcttttctt

SEQ ID NO: 1295 - DNA, 304 bp, Glycine max
attacgagtgcctgtatattgatgcgcctgagtcagacattcgagtgaaaagttatgaccatttgaatttctcgagagcttcctatggttaattttgagcgtgtcgatatattatacgcctgaatcgaacctcatggtgaaaagttatgaccatttgaatttcttgagagcatccgttgctcattatcgagcgtctctatatgtgatgcacctgaatcggacctccgagtgaaaagttatgaccatttgaatttctcgagagcttccgttgttcaatttcgagcgtctcgacatattatgcgcc

SEQ ID NO: 1296 - DNA, 402 bp, Glycine max
agctttcaatatattgagacgctcgaaattaaacatcggaagctgtcgagaaattcaaatggtcataacttttttcacggatgtccgattcaagcgtatcacatatacagacactcgaaattgaacaacggaacctctcgagaaattcaaatggttataacttttcacacagatgtctaattaaggtgcatcacatatagagacactcgaaaatgaacaacggaagctttcgagaaattcaaatggtcataacttttcacactgaggtccgattcacgcttataacatatcggggcgcctaaaattgaacaacagaagctcttgtgaaattcaaatggtcataacttttaactcggatgtccgattcaggcgccttacatatagagacgctcaaaaatgaac

SEQ ID NO: 1297 - DNA, 276 bp, Glycine max
tagagccaattcaaacgacaataactttttactcggatgtctgattgagtcccgtcatatatcgagacgctcgaaattgaatgttgaagctcttagccaattcaaacgacaataactttttactcgaatgtctgattgagtcctgtaatataacgagacgctcgaaattgaatgttgaagctctgagccaattcaaacgacaataactttttactcggatgtctgattgagtcccgtcatatatcgagacgctcgaaattgaatggggaatctctg

SEQ ID NO: 1298 - DNA, 418 bp, Glycine max
agcttaaacattcaacttcgagcgtcttgatatattacgagtctcaatcaaacatccgagaaaaaagttattgtcgtttgaatttgctcacaagttcaacattcaattttgagcgtctcgatatatgacgggactcaatcagacatccgagtaaaaagttattgtcgtttgaattaactcagagcttcaacattcaatttcgagcgtctcgatatgtgacgggactgaatcaaacatcccagtacaaagttattgtccgttgaatttgctcaaaggtttcacattcaatttcgaacgtctcgttttattacgggactcaatcagaccatccgagtataaagatattgccgtttgaatttgctcagaacctcaacattcaattttgagcgtctcgatatatgacggggactcaatccta

SEQ ID NO: 1299 - DNA, 378 bp, Glycine max
agcttctggtgggacatcttgacttgctttccaatctgacattcaccacagattctgccttcttctattttcagattgggaatgcctctaatagcacctttgtcaatgatattcttcatgcctcttaagtgcagatatccaaatctttgatgccatattctgacttcatcttctttggaggatagacatgtggaggagtaactggtttcttgaggtgtccataggtagcagttgtcctttgatctgctgcccttcattagaacttcacacttctcatttgtcactaagcattctgactttgtgaaagttacattgaatccttcatcacacagctgactgatgctgatcaagtttgcagtcagtcccttcaccagcagt

SEQ ID NO: 1300 - DNA, 276 bp, Glycine max
ttgagcaaattcaaacgacaataacttattagtcggatgtctgattgagacccgtcatatatcgagacgctcgaaattgaatgttgatgctccgagcaaattcaaacgacaataacttttaactcggatgtttgattgagtcccgtaatatatcgagacgctcggaattgaataccgaagctctaagcaaattcaaacaacaataactatttactcggatgtccgattgagttccagaatatatcgaaacactcgaaattgaatgttgaagctctc

SEQ ID NO: 1301 - DNA, 478 bp, Glycine max
  unsure at all n locations
agcttaacaaaaggcatgcgaagtgggtggaattcctagagcaattcccttatgttatcaaacataaaaagggaaaaggtaatattgtagccgatgctctttctcggcgtcatgcattactttctatgcttgaaacaaaattgattggtcttgaatgtttgaaaagcatgtatgaaaatgatgaaacttttggagaaatttttaaaaattgtgaaaatttttcagaaaatggtttctttagacatgaaggctttcttttcaaagaaaacaaattgtgtgtgcctaaatgttctactaaaaaattgcttgtttgtgaagcacatgaaggaggtttaatggggcattttggggtccaaaagactctagaaacattacaagaacatttttattggcctcatatgaaaaaagatgtgcagaaatnttgtgaacattgcattgtatgtaaaaaagcaaagtctaatgtaaagcctcatggatt

SEQ ID NO: 1302 - DNA, 290 bp, Glycine max
agcttatgagaattccaagctttataagcaaaaagtaaaaatctatcatgacaaaaagctatcaaaaaggaatttttagtctggtcaataggtattgttatttaattgtcaattaagattgtttctaggtaagcataaatccaagtggtctggaccattcatcatcaaagaagttatgccacatggagcaatgatattggaagacccaaccaccaaaaggacatggaccgtgaatggtagcaagaggataatcactgttgtccagctgcaagaggcttgaaccataaaaa

SEQ ID NO: 1303 - DNA, 500 bp, Glycine max
agctttttattgtaatcttgaaattcaggacaacactctgatttctgaaatttttgggatatttatggtcattgaccagtcccttttccatgacttaaccaaattacccagtgacggtgtaccatttgaaagcacactaaatgacgactggaaatttgatttctctgcccatgatgcccgccagttggtttgcaccaacaatgcagatatgaccggacgtcttcttgtcgggtcattggcttttgaaagccgcatccttcactatttaattgtgcgtattctgcttccacggtcttccaaccttgcccaggtttctgaggaagatctaattatcatgtgggcccttcatacagggcgtcaacttgactgggcacacttagtcagatatcccatgcataaggcattgcgaataaatgctccactaccatatcccacacttgtcactctctttttccgccatttcaaaatccctcttgatctgaacccttatgttccaatca

SEQ ID NO: 1304 - DNA, 276 bp, Glycine max
tccatcaagttatgaccatttgaatttctcgagatcttccgtggttcaatttcgggcgtctccatatgtcatgtgcctgaatcggacctccgtaagaaaatttatgaccatttgaacttctctagagcttccgttgtttaatttcgagcttctcgatatctgatgtgcctgaatcggacatccgagtgaaaagttgggacaatttcaatttctccagagcttccgttgttcaattttgagcgtctcgatatgtgatgttcctgaatcggacctccg

SEQ ID NO: 1305 - DNA, 517 bp, Glycine max
agcttcttcttgtttcttcccccattttaaaacaacatttttcttaattacctcattcaaaggtgcttgcaaggtactaaaattcttcacaaatcgtctatgaaaacttttcacctcagtcacacttctaggtgcaggccactcttggatagccttgaccttttctttatcaacttgaacccctttggaacttactacaaaaccaagaaacacaacatggtctttgcaaaaaaatacatttttcaaggttagcatacaattgttccttcctaagcacacacaacaccgattttaagtgtgcaacatgcaaatcaagggttgtgctataaacaaggatatcatcaaagttcaccaccacaaatttaccaatgaattctctcaagacatggttcattaatctcatgaaaatgcttggagcattagtcaaactgaaaagcataaccaaccattcatataatccatatttagttttgaaagcgggttttcatttctctccttctttaatccttatttgatt

SEQ ID NO: 1306 - DNA, 461 bp, Glycine max
gcttaaggactatgattattcaacatcacagaggtttgtgactactggtggtgatttcggcaacccctgttcgcaaaccgtggcgaattggtctccccattgagaagtatgaggatgcttacaagttggtctactgtccaagtgtgtgcaacgattgcagttatccatgcggtgatattggaatataccaagatgaatatggcaagcgtcttgctctaagttctgaaccatacaaagtgaagttccagcgggcttaattattgaattgataacaaaactaattaaagaataatgaataagtgtaatgaactactttatgcttttgctgcatatatggtaattctcatgttgagttccttgccacggacttgataataaataaacaagttactttctatttttagtctttccaaaatttcttgtttctgttcgtctttgtcattgtttgcatttgggatgca

SEQ ID NO: 1307 - DNA, 271 bp, Glycine max
tggacaatggtagggcaatcttgcaaaaatcctagatgaatttcctataaaaacctacatgtccaagaaaagaacgtacttcctgcatggaagcggggtaaggaagagaagtaataacatatatcttggccttattgacctcaatacttctactagagaccaaatgccctaagactataccttcatggatcataaaatgacatttttcaaagttaagaacaagattagtctcaatgcatcggtcaagaactctagagaggctatccaaaca

SEQ ID NO: 1308 - DNA, 326 bp, Glycine max
agcttgtttcagaggcgtggagtttactatcagataaggtcaaaagactagcatataaccagaacaggagattggaaggatttcacgataatgctcccaacaagaatggttatataaaacttaacaagaatgcaacttccagcatgagaacaggaaataatgatgctcgggcacatccacatccgcatacaccctccattcctcctccacatacaaatgctggtaccttttggactatctgtaataagtgcaagacacattatgaatatctcaggacatatttgaatcaaacccttttatgtcccaattgtaaacaagcttttgtg

SEQ ID NO: 1309 - DNA, 280 bp, Glycine max
tcaaaaaatttgaatggtcataacttttcacacgaatgttccattttgggacataagatatcaagacgcttcaaattgaacaaccgaaactcctgaaaaattccaatggtcataacatttcacacgaatgttccattgggggacataacttatgtatacgctcgaaattgaacaaccttagttctccagaaattcgtaatgtcataacattttactccgatgttccattcgtgggcctattatatggagacgctcgaaattgaacagcgtgatgttaatt

SEQ ID NO: 1310 - DNA, 716 bp, Glycine max
  unsure at all n locations
agctntgatgcaacatttggagaggttaatgaaacaacgagatgatgcgctccatgagaggttggatcaaatggagaatagagatcatcctgaagaagaaaggaggaaaagaaggaatgatggtgttcctaaacaaaaccgaattgatggtattaaactcaacattcctccatttaaaggaaagaatgatccggaagcctacttggagtgggagatgaaaatagagcatgttttctcatgcaacaactatgaggaggaccaaaaggtgaagcttgccgccacggagttttccgactatgctcttgtgtggtggaagtgattatgcaagttgaagtggacgtttccattgggaaatacaatgataaggtactttgtgatgttgttcctatggaggccagtcacttacttttggggagaccatggcaatttgataaaagagcccatcatgacggttacaccaaccagatctctttcattactttggtgttgcataaaaaatgtacacatgtagtcggctaggttttttgtcccaaccttacccactttttgtttctagccaaattggcttgttccattattttgcccggaaaaatttaccccctttgcaaaaaaatattgctttcaacttatgccttttttttagggatgaactgaacctttttcccgcattgtcggtaaataccccaattaatctttcgcccccttgccaatttttt

SEQ ID NO: 1311 - DNA, 444 bp, Glycine max
agcttataatatatcgataggctcgaaattaaacatcggaaactctcgcgaaattcaaatgggcataaattttcacacggatgtccgacccgggcgcataatatgtcaagagtctcgaaattgaacaacggaagctcttgagaaattcaaatggttataaaatttcacacggatgaccgattcaggcaaatcacatatcgagacgatcagaattgaacaacggaagctcttgagaaattcaaatggtcataacatttatctcgaatgtccaatttaggcgcatcacatatagtgatattcgaaattgaacaacagaagctctcgagaaattcaaatggtcataacttttcacactgaagtccgattcacggttataatatatcgatacgctcgaaattaaacatcggaaactctcgagaaattcaaatggtcatgaacttttca

SEQ ID NO: 1312 - DNA, 417 bp, Glycine max
agcttggttatctccttcttcactacatcaataatcaccgggttgagtcttctctgttgctggcttactggtttagctccatcctctccatttattcgatgcatacatgtggatgggctaataccacgaatgtccgccagggtccagcctatagccttcttatgcttcttgagaactaacaacaacttctcctcttgctcatcagcaagggaggcagatataatcactggaaaactcttgctatcatccaagtaagcgtattttaaattttatggcagaggcttcaattctggtgtggtcaactggacagtggtagaaagagatggtttcttagcctttacctcataaagaaaagcagatgtatgtgtactttttgaaactggttagtcctatctgactctataaaatcaatctcaa

SEQ ID NO: 1313 - DNA, 462 bp, Glycine max
agcttgctaacccatggaagcttgataacccattcttctttccttaagacatgatgcataagcctcataaaggtgcttggtgcattaatgagcccaaaaagcatcactagccattcatacaaaccaaacttggtcttgaaagcggttttccactcatcaccctttttcatcctgatttggtgataaccacttttaagatcaatttttgaaaaggtattggcaccatgcaactcatcaagaaaatcatcaagtctaggaatggggtgcctatactttacagtgatgttgttgatggccctgcaatctgtacacattctccatgtaccatcctttttgggcaccaacaacactggcacaacacatgggcttaggctctcttggacccaacccttctccaacaattctttaacctgagactctatctctttagtctcccgagggttagtcctattggctggccta

SEQ ID NO: 1314 - DNA, 552 bp, Glycine max
tcatgatgatgattcaagtatgaatcaagtagttttgatgatgaaaaaaagcccaaaagaatgatttcaagattcagtcaacaagttcaagatcaagattaatttcatgtttcatgagaagaaatcaagaagattcaagtttcaagagaagtttgatttcaagattcaagagaaggtgaattcaagattcaagagaagaaatcaagaagacttcacaagggaagtattgaaaagatgtttcaagaaacaaacatagcacaattttgtttttcaaaagagtttttctcaaaattttctaagttaccagagtgtttactctctggtaatcgattaccagtttcctgtaattgattaccagtgacaaagtttgatttgaaaagcttttaactgaatttgcaacgttccaattgatttttaaatggtgtgatcgattacaatatattggtaatcaattaccagtgtatcattgaaattcaaattatattgtgaagagtcacatcttttcataaaatgctttgtgtaatcgattacatggttatggtaatcgattat

SEQ ID NO: 1315 - DNA, 365 bp, Glycine max
gtatgggttggatgttgaattccacgtgatcctggtgccgaaatgatgggacagcgggtgaaccaaacgcggaaggtttttttggtgaggtagccatggaaaagcagagcgtttggaatgatttcgtaaatctcacaatgctattgggaaatgctggtaaaaacacgaatgccaagcagatataaatttgaatgaagaatgtataggggcgtgtgaggcaacggtcgaattcgttttggcttaatattgaacgtgctattaatgttaagtgattcgtttgggcacgttcagattgctgtagctgctataattcctctagcaaacaaatgcccagcttgcccctcagtttttcaaactgatttgca

SEQ ID NO: 1316 - DNA, 501 bp, Glycine max
agcttctagtatacgatttatctgaagaaattcattttctatcgcacaacttccaccaccaccaagagcagctaagtactgcaatgcaattttagctgtttctgttttcccagatccactctcgccactgcgaacaaatttctaacaatgattattaacaagcacaccagtgaatgtatcttattactactatgaaaatccaatgatattggtttaggaacatatattaagtgtcatgcacaaaatgtagcccataaatgcagtaaggagctgaccttatgataatggactgatttacttcatctgtaagatacaaaaagaaaaagaaaacctttataaatgtctcattcaagtagaatgcaaagattgcaaagaagggaagagaaagggagaatttcattcacctcttatcaccttgttataaagccgatctgccacagcataaacatgaggactatcaataattctctgcctataagctgagacagaatcatttccata

SEQ ID NO: 1317 - DNA, 435 bp, Glycine max
tgcttctacaattgacatatactttgacaatgttgggggagacatacttgaggcagcccttcttaacatgagaaggcatggacgaattgcagtggccagaatgatctcacagtaagatcttgatgagcctcaaggcataaagaacttagtgaatatcatatacaagcagatcaaagtagaagccttcacagtttatgattactatcacctctatcctaaattcttggatactgttttgccttacattagggaagggaagataacatatgttgaagacataactgagggtcttgagaacggtccaattgcactagaagcaatgttccaaggtcgtagtgctggtaaacaagtcattatacttgctcgtgaataatttagtacaaccttactgtttgatctttcaattcattttgggtgtgttgtaactctcatttg

SEQ ID NO: 1318 - DNA, 470 bp, Glycine max
ctgatggtgtcgagaagaaatcacatgtttggcatcatcaaaaagggggagaatgtgaatgtatgtatacatgattttgatgatgccaaagaaaaatcaaacaaggttgcttcaaatgataagcatttgcttcaagaataattcaagagtgcttcaacaaacaaagccttgtttcaagattcactaaagaccaagccttgccttaaaacaaagtgctttcaagacatgcaaagctctggtaatcaattaccacgaagtgtaatcgattaccacaagacatggttgagaaatagctgttgaaaaaggttttgaatttgaattttcaacatgtaatcgattaccatatgtctgtaatcgattaccagcaacgaaactttggaaattcaaattccaaagtcataacccttcaaattataactgtgtaatcgattacacaaacattgtaattgattaccagtggaaagttttca

SEQ ID NO: 1319 - DNA, 391 bp, Glycine max
agctttcactcggaggtccgattcaggcgcataatatatcgagacgctcgaaattgaacaatggaagctcttgagcaattcaaatggtcataacttttcactctgaggtcggattcaggcgcattgtatattgagaagctcgaaattgaacaatggaacctcttgagcaatttaaatggtcataacttttcactaggaggtccgattcaggcgcataatatatcgagacgctcgaaattgaacaatggaacctcttgagcaatttaaatggtcataacttttcactcggaggtccgatccaggcgcataatatatcgagacactcgaaattgacaatggaagctcttgacaattcaaatgtcataacttttcactctgaggtccgatttag

SEQ ID NO: 1320 - DNA, 389 bp, Glycine max
tcaacatcagaccacttccagggtgctggaactacttcacatggatttgatggggcctatgcaagttgaaagccttggaggaaagaggtatgcctatgttgttgtggatgatttctccagatttacctgggtaaactttatcagagagaaatcagaaacctttgaagtattcaaagagttgagtctaagacttcaaagagagaaagactgtgtcatcaagagaatcaggagtgaccatggcagagaatttgaaaacagcaggttcactgaattctgcacatctgaaggcatcactcatgagttctctgcagccattacaccacaacagaatgggatagttgagaggaaaaacaggaccttgcaagaggctgctcgggtcatgcttcatg

SEQ ID NO: 1321 - DNA, 513 bp, Glycine max
agcttgtgctaaaggaagtaagacatgtgtttgagatgcgtttaaaccttacctcaacatgaaagctagatgaagatgggatgataaaccagttcgatacagatagatggaagcttactagaggaagcatggttgttgcttaaggtaagaaggaaggctcattatacatcatgcagggaaagatatgcaaagggaagacaaatgttgctcaagatgcaaccaaagaattgtggcacaagatattgggtcacttgagtgagaaaggtttgaagtttctagcaaatgatcactttccaaacataaagaggcaaccacttgaatccttgaagattgtcttgcaggtaaataatgcagagtgtctttccaaagattgaatgaactagaaggagaaagcaaatccttgatcttgtccacttagatatttgctcaatgtctaaaaagtcccttggtggtgcccaataccttggtaccttctttaatgattactccaacaagctgtgggtggattcgttg

SEQ ID NO: 1322 - DNA, 525 bp, Glycine max
  unsure at all n locations
tgtggtggtcattctctacgccattttcatcgctgccgcatgtaaaatgacggtcaaggctcttaagacagcaatgtaaagatgtagggtatgataatagcaaggcaaattgaaatagaatatgtatattgttatttcattgatcctttgcatgatatatataatacatgtacaagaatgttctataccaattctaaggcatgacagacgtgatccataatcagtggcatctgatttattctatgcattataaggtaaataaatatagaatcaaggtaacatangaaagtaaatatatacacagcatatttgcaatcatgtagaagatatttcctaatactccccctcaagttggtgagtgaatatcgtgaagtcccaacttgttgcgcaatgtcacaaattgatctttttccaaagcttttgtaaacacatctgctagctagaattttgttggcacataagaaaagattgatcatcccagcttgtagttttttcccgactatatgacaatcatttccatatgtt

SEQ ID NO: 1323 - DNA, 385 bp, Glycine max
ttcctcgagcacgttcatcatccacactgcttgacaagcaccaagtgatgctgccacatactcaacttcagaggtagacaaggccaccacatcctgcttccttgaactccaagccactggtgcatcatagtacatgaacaaataccctccagtactcttcttctgttctggatctcttttccaatcagaatttgtgtaaccaaacagatctgattcatatgattcaacttcaaaagggaacaacacaccattgtcaattgtccctttaacaaacctaagtattcttttggctgcttgcatgtgtgaaagtctaggtttttgcatgaacctgctaataaacttacttgcaagcagatatcatgtatgctgctgcataagtacctca

SEQ ID NO: 1324 - DNA, 376 bp, Glycine max
ttgcatcagacaaagatgatagcaaatccattttaggatatgtttacactttaaatggtggtgcaataagttggaaaagttccaagcaagctatggtagcagattcaactactgaagcagaatatatagcgacaagtgaacccgctaaagaagctgataggataaaaatgttcatagttgaacttggtgtggttacttcaatagaagagacgggcccattaacgtgcgacaataatggggctattgctcaagcaaaggaaccaagatcacaccaaaagttcaaacatattgtgcgaagggatcacttgattagagagataatacaacgaggtgacgttaagattgaaaatgtttatggaaaggagaatgcaacaga

SEQ ID NO: 1325 - DNA, 464 bp, Glycine max
acactatacaatacctcagcttcactgaatagcttgtgttattgaagaatattcttcttgaatagaacacgttacccaaaaatcagtacgaggcaaataagatattatgtcttgcacatatggagtaccaaaaaatacatgcatgccctaataattacattttgtatagaaatcagtttgtcgaaacacacaaataccccacaagtgggtatcacagtacaaattgaaggataacacatgtggtgatgatgcaacgaaaaacaacaactatttatcaaaggtgtgctaatatctttcaattattccaaggttgcagtgattgttttctaatggacatgataccaaaaaacttaacatggcatgcagctggtagaaaaagtgatggattgctccaacatccccgtgattatccctaatagaagacaattgatcatttgtatcctaaaattgcataggacctatga

SEQ ID NO: 1326 - DNA, 550 bp, Glycine max
agcttgtcagcataagcattgccttcatggtagatatgtaaaattctaaaactaaactttttagttggatctatacaattcacctagcagttgtaaaaagtccagggggctgaaaaaggatgattatataatgcacaatattgaaaatattgttgtatgattgtgctaatcctaattgtattgagaatattgctacatgattgtgctgatcttaattgattctatttgtattaattctgattgtatgtattaattcttattggattttaattttattttgtatcttgatctcttgattattgggatcacttatttttaggatagatagttgtatcagatatgtcaggaaaagctataagagaaatcttagttaggtggttggatgaccttgtatatatatctatcaattgtttttaatagaggcagaacaacaaggaggaggtgaagcaaaagctaaggagaatgaaactcgagatgtcattgaagatcaaggaggaggtgaaaaagcagttcgacgtcgatttcttggcggtggcttgataccccgaat

SEQ ID NO: 1327 - DNA, 527 bp, Glycine max
agcttggataatcctcaccttacaattcagttttctggggttgaattaggtcctaagcctaaattctaacagtaagttaacaaggcttgccagacttccaacaaaatttgtccatcctctacaactttcaagaacacattttctctcaaaatatcaagctgacacatgccacattgttattcaaagtagatttttcattcacaggaatttcaggcacattattgcataaaaagttatagacaccttgatcagttaataaagacattagaagctgctttactgccaaaattaaacgaaagattttcttttttattggtttgaattacagatagtttaacagcttgtggataatatcaaccacaggtttctttttcctgtcatcatggcatagcaaaggccaagtatgagaactgaaatatggaaaacatgttggtaatcaataccttaatacattgatgtattccgaagcaattccttcccacattatttgttggaaaaagaggatcatctatgtgaattggatcaat

SEQ ID NO: 1328 - DNA, 523 bp, Glycine max
agcttgcccagagaaggagtccacagaggaaatgcttaccacctcaaaagactggaaagcggtttctaatgactcctctgcggcctccacataaggcatagaagatgggcagctcaccaagatgtcttcctcgcctgacacgatgaccaaatgcccctccactacgaatttcaacttttggtggagtgtagagggcacaactcccattgagtggatccacggacgccccaacagacagctgtagggggggttaatatccattatttggaaggtgacttgacaggtgtgagggcctatttgtactgggagatcgatctctcccctaacctctcggcgagtgccgtcgaaggcacgaaccaccattgaactcggctttaagtgggaagcattgaatggtaatttctccaaagtgctctttggcatcacgtttaaactggaaccattatcgatgagcactttggctacgatatggtccatacacttgactgataccgtgaaagcctttgtattgccctctccccct

SEQ ID NO: 1329 - DNA, 430 bp, Glycine max
tttgcaagctggaatcatttatcctatctccgatagccaatgggtgagtcccgtccaggtagtcccgaagaagactggcctcacagtgatcagaaatgagaaggaggagttgattcctactcgggtgcagaacagttggagagtctgcattgactataggaggctgaaccatgttaccaaaaaggaccattttcccctgccattcattgaccagatgcttgaacgcctggcaggtaaatcccactactgtttccttgatgatttttctggttatatgcaaattactattgctcctgaggatcaggaaaagaccacattcacctgccccttcggcacttttgcttataagaagatgccttttggcctgtgcaatgcccctggtaccttctagcggtgcatgattaatattttcagtgattttttagaaaat

SEQ ID NO: 1330 - DNA, 237 bp, Glycine max
tgaatcggacatccgtgtgaaaagttataaccatttgaatttctctagagcttccgttgttcaatttcgaacttctcgatatgtgatttgcctgaatcggacatccgtgtgaaaagttataccagttgaatttctcaagagcttccgttgttcaattttgagcgtctcgatatgtgatttgcctgaatccgacatccgtgtgaaaaggtatgccccctgaatttttcacgagctttc

SEQ ID NO: 1331 - DNA, 358 bp, Glycine max
agcttatatatatcgattcgctcaaaattaaacatcagaaactctcaagaaattcaaatagtcataactattcacacggatgtccgattcgggcgcataatatgtcgagaggctcgaaattgaacaacggaagctgttgagaaattcaactggtataactttttacaccgatgtcccattcgggcgcataatatgtcgagaagctcgatattgaacaacgaaagttctttagaaattcaaatggtcataacttttcacacggatgtccgattcaggcttataatatatcgatacgctccaaattaagcatccgaaactctcgcgaaaatcaaatggtcataacttttcacacggatgt

SEQ ID NO: 1332 - DNA, 286 bp, Glycine max
cgaatcagacatccgtgtgaaaagttatgaccatatgaatatctccagagctaccgttgttcaatttccagcgtctcgatatgtgatttgcctgattcggacctccttgtgaagagatctgagcatttacatttgacgagagctttcgttgttgaactttcagcgtctcgatatgagattggcttgaatcggacatccgtttgaaaacttacgaccatttgaatttctccagaactatctggtgagaatttccagcgtctggacatattatgtgcccgaatcggat

SEQ ID NO: 1333 - DNA, 349 bp, Glycine max
agcttataatatatcgatacgctcgaaattaaacatcgggaactctcgagaaattcaatttgtcatcatttttcacacggatgtccgattcgggcgcataatatgtcgagaggctctaaattgaacaacggaagctcttgagaaattcaactggtataacttttcacaccgatgtccgaattaggcaaatcacatatcgagacgctcaaaattgaacaacggaagctcctaaaaaattgaaatggtcataacttttcactctaaagtccaattcatgcgtatcacctatagggacactcggaattgaacaacggaagctctcccgaaattcaaatggtcataacttttc

SEQ ID NO: 1334 - DNA, 345 bp, Glycine max
agcatctcaatatgtgatgtgcctgaatcggacctctgtgagaaaagatatgaccattagaatatgtggacatcttctgaagttcaagtgatagagtgtctcaatatgagatgtgcctaaatccgacctccgagtgaaaatctatgacaatttgaatttctcagaatcttacgctggtcaataaagagcgtccccatatgtgatgtgcctgaatccgactaccctgtgaaaacttatgaccattttgaatttctccaaaagaatttgtccggccatatggagcatccatgatatattagtgcgactgattcccacattcgatggaaaagttatgaacttttaaat

SEQ ID NO: 1335 - DNA, 443 bp, Glycine max
agcttctggtgggacatcttgacttgctttccaatctgacattcaccacagattctgccttcttctattttcagattgggaatgcctctaatagcacctttgtcaatgattttcttcatgcctcttaagtgcagatatccaaatctttgatgccatattctgacttcatcttctttggaggatagacatgtggaggagtaactggtttcttgaggtgtccataggtagcagttgtcctttgatctgctgcccttcattagaacttcacacttctcatttgtcactaagcattctgactttgtgaagtttacattgaatccttcatcacacagctgactgatgctgatcaaagttgcagtcagtcccttcaccaacaggactttgtccagactaagaaagtcatcatggactatacttcccattccagagatcttttctttaaa

SEQ ID NO: 1336 - DNA, 521 bp, Glycine max
  unsure at all n locations
tcactgaatagcttgtgttattgaagaatattcttcttgaatagaacacgttacccaaaaatcagtacgaggcaaataagatattatgtcttgcacatatggagtaccaaaaaatacatgcatgccctaataattacattttgtatagaaatcagtttgtcgaaacacacaaataccccacaagtgggtatcacagtacaaattgaaggataacacatgtagtgatgatgcaacgaaaaacaacaactatttagcaaaggtgtgctaatatctttcaattattccaaggttgcagtgattgttttctaatggacatgatacaaaaaaacttaacatggcatgcagctggtagaaaaagtgatggattgctccaacatcccgttgattatccctaatagaagacaattgatcatttgtatcctanatttgcataggacctatganacctaaggcttggtcttgcttcagctggaatgaatcatgttggtaacttaagcaccaaccataattcatggcatgtt

SEQ ID NO: 1337 - DNA, 451 bp, Glycine max
tggaacatataaactgaatcctaggcccccttaaggacttaatcaaaatatttgctggctgatcattagaattaatgaactcagtgataatttctttggacagtagcttccccgaataaagtgacagtcaatctctatgtgcttgagcctctcatggaagactgggtttgaagcaatgtgaagagcagcctgattatcgtagtataacttcatttgcaccactctgcagaatttcaactcttcaagaatttgtttacccacataagttcgcatgtaaccatacccatagatctgtattcagcctttgcactagatcgagcaacaacaattcgcttcttgcttttgcaagaaataatatttcctcgaatggagacagacacaatatcctgatgtggatctcctatccatgggatatccaacccagtgtgcatcacagtacccacatatttgt

SEQ ID NO: 1338 - DNA, 483 bp, Glycine max
  unsure at all n locations
tgcttctatgtccttttcattgctttaattgttgagtaatccttgaaaaattgtcttgttaaaattccattggtttagctttcatttcattttatttggtctttggttattacttgtctctttgtttccttgtttgttggttgccatatagggaattggaaggaggattggtgccatcccttgaagaatttgagttaagaagaaaggggccaaccaccttaagagctattggactaagaagcactccaaattgagtgaatcaccaaagagagaacaaccaccaaaattgaggactgttctgtaattttgtaatttgcaatttacttaccttcattgctttcaagttttgtaacaaaaaggcgtttcattggaagtgtgttgggagcctccaattggttaccaaacttccatttgtgtgtaataattttaggcaatntttccttangatagtgagtgttttgttgggaaccttgaatgtggtca

SEQ ID NO: 1339 - DNA, 521 bp, Glycine max
  unsure at all n locations
agcttgcccagagaaggagtccacggaggaaatgcttaccacctcaaaagactggaaagcggtttctaatgactcctctacggcttccacataaggcatagaggatgggcagctcaccaagatgtcttcctcgcctgatacgatgaccagatgcccttccactacgaatttcaacttttggtcgagtgttgagggaacaactcctactgagtggatccacgggcgccccaacagacagctgtagggggggttaatatccattatttggaaggtaacttgacaggtgtgagggcctatctgtactgggagatcgatctctcccctaacctcttggcgggtgtcgtcgaaggcacgaaccaccattgaactcggctttaagtgggaagcattgaatggtaatttctccaaagtgctcttatgcatcacgtttaaactggaaccattatcgatgagcacttttgctacgatatggtccatacacttgatngatacgtgcaaagctttattatgccctctcccct

SEQ ID NO: 1340 - DNA, 586 bp, Glycine max
agcttgcataagacccatatatagtttataatttgtcctattgtcttattgaacatgagcaaaaattgcatcccattttgatacaattaatctttctttaatcactttggtttgttgttgtagtctttcattatgaaaaaaatctgaactacatagataacaattagaaaaagtggtgattgtggcaatgatcactttaaaatagtcaataaaaaaaaatcccttaaactcccacatctaattctcttggaccatgaaaaaacatgacagttaaaaataaaacaatttgaatatgtgatccctggactatattaatgatctaatgattaaattaatgttatgattttcttttatgtgtagaaatcaaatataatattaaaaatttataataactcacacactctactcaatcaaactaataagattttttaaaagattaaatattaatgatgataagagaaaattatgtatttctttttatttattctccatgaagataagggatttgataacagacgaaatccccttaatcatacataacatcaacattatatcaaggaaaaaaaaactatatgaatttcaataa

SEQ ID NO: 1341 - DNA, 478 bp, Glycine max
ctaagcttctatgaaggttcgttcctaatttctctacaattgcatcacctctcaatgagctggtgaagaaaaatgtggcatttacctagggtgaaaaacaagagcaagcctttgcttttctcaaagaaaagcttactaaggcacttgttctagctctttctgacttttctaaaacttttgagctagaatgtgaagcctctggagtgggagttggagctgtattgttacaaggtgggcaccctattgcttattttagtgaaaaaattcatagtgccaccctcaactaccccacctatgataaagagctttatgccttaataagagccctccaaacttgggaacattacctttgttccaaggaatacgtcatccatagtgatcatcaatcacttaagtacattagagggccaagcaagttaaacaaaaggcatgcaaaatgggtagagtacctagagcaatttccatatgttatcaaata

SEQ ID NO: 1342 - DNA, 514 bp, Glycine max
ctcagcttgcattcctctcttcccttaaacttcttttatttattgctatttatcttttgctttaaagaagtttattttgaattgtcttttgagtaattcatgttaagggtgcattgttaatccaaaaagaaagagtgatagttcaattggggaatagtctttgcatcttaattcaacccccctttttcttaaggtaactgaggccatttgtcccacatcctattcttgataactcacttctctctaaaaagacaaaatgaggtcacatgaacgtctatatttttacttgaaaacacagtcaatcaaatgcctttttatttttttattttgaaacttattttgaaacttatttgctttgaactttactcgctgttttacgacacccccaccaacgtgcaagacgagtaatctctgattgaacagtcttagaagtcaacactcaagaacgcaagtcgcttgagccaacagaaccatggctttgccccacattccagtgaaagttgaataaccaaca

SEQ ID NO: 1343 - DNA, 372 bp, Glycine max
  unsure at all n locations
gctttgaaanataataacttgaattttaaaatacccattttctctccccctttggcaacatcaaaaaggccaaagtgcgtgaaacatgaataatttaatcatacacaaagcataatttgtaaaacaaacatataagattctaaaaacatacataaagcataattttaataaaaccaaattgagatgcaaaccacttagtcatatatcacaaaataaccaagtctaagtataaaacataagcatctaagtgccaaataaagacaccaagatcagtcataattaactaagtaccaaatacctaaaacataactaatgttcacagaataaataaataacataatggtgtaaatcattcacaaaacataataaaag

SEQ ID NO: 1344 - DNA, 505 bp, Glycine max
ttgcaatcactaagagactcttttaacaacgatagactaagacttagctttcttattgatctttggtttcttggtcttgatttggacttaaaataaaacttgtgtttcttttgtcttggcatcatcaagaccatcatacacatacattcacaaacatcgctatattgtcgtaacaacccattgtcttttgaaccatggatccctcccactcaagttttggtgttatgcattgtaaatcgcaacgtgtctcatcaatcggatgccctctctcacactaaacgaaaagtctccattagaagtcttgtttcatcgtccatcaaattatagtaaactaaaagcttttggttatctttgttttccttggttcactccatatacaactaacaaacttcagaccaagtccgtaccatgtgtttcttaggttacaatcttactcaaagtgcatatcttttgttatgatctttcagagtctaagttgtcacctcccgcatgttgaatcattgaa

SEQ ID NO: 1345 - DNA, 481 bp, Glycine max
tgcttctacatatgggttctatcgcacagaatggcatgatcactggctgacatattctcaattagctctgttgcttttttggggtcttcagctttatttttccccctgcagaagcatctagcaatttcttggtttgtggtatcagcccatctataaacatattcaattgaattgtcttggaaaacctatgggtgggagttcttctcaataaacctctgaacctctccaatgcttcactcatagattcatcacggaactgatgaaatgaagagattacagctttcccttccgcagtcttggactctgggaagtatttctttagaaacttttcaacaactttttcccaagttttcagactgttacccttaaataagtgaagccacctcatttgctctcctgccaatgagaatgagaatatgctgagtctaatagccttatctggcacaccggcaatcttaacactgttgcatattttaatgaa

SEQ ID NO: 1346 - DNA, 637 bp, Glycine max
gcttgtcttaagttctgagagacaaaaggagtcatgtacttatgaagatctcttaccaagtttatgtagtattttgctaccttttgtcctgtctcatacctatctgctttgtattggatcatccacaggttcccggctctatgagggaaagcagtttctgttgatggattctcagccattcttccaccataagggttgaaatacattactgctttctctaattcaatcatcttcttccaaatccctcccaaccctccttgggtattggtctcttcacatagtcagatttccttttcaagtacttgagagaccaaggttgtctctctagcaaaatctcaactggggttgcaatgtccatgttgtaccaaaacagcacggattgaagccagcttgtttcgatgcattcagattgcttcaaccccaattaaggagacctctcctccatgacagaaaacagagttttggagtcgctgaggaagagagctatgaaggtagcccctcactgtctttatgatcttctgttggagataattctgttcgagacattgttgatcaactaatatggacacttcttcaaatttaagtcttgattcatcacgttgctggagactattaaccccttttgttggtctcaact

SEQ ID NO: 1347 - DNA, 585 bp, Glycine max
  unsure at all n locations
tgaagtttgcatcttgcttgattctattattgaagaagctaattaagaactctattcaaaatggcttttgttactgtcaactatttgaggttcaaatgaatcaggttccacagatcttttgtcatttgtttcaatagttcatttcatttgtatataacttccgtgtgatttaatcatgatgtgatacatgtgcatttgaataaattcttataagcttgttcaactcatttgaagtttttgtttgtttgaagtccgtgaatcataaaattcatgtttataatactattgtctggctcaatgcagtgcatacagaggactatacattctcaactggatctatcgctactttactgagccccactttgtccattggataagtatgattctctcttattgtgttttatgggtactattttttttgcttctacgcttattataattattaagtaactacactctgcattattcactactatgtcttgtggaaccttttcatcgcatatttttaagttcatacttntaaaattcttcatacctgagatgcatttgtgacgttgttcaaaatgtttttcccttatcatacaa

SEQ ID NO: 1348 - DNA, 464 bp, Glycine max
tctagccaaatggacttaccttgaattaattcctttgatagcccctttgagcctattttcccctttctttgttttgaagctcattacaagccttaagtgaaaaaaccatgatatcaccttacccttaaggaattatggagctttggaattgttttgggaataagctgggaataagtgtgtgtggggggggggggggccatggatccctcccactcaagttttggtgttatgcattgtaaatcgcaacgtgtctcatcaatcggatgccctctctcacactaaacgaaaagtcttcattagaagtcttgtttcatcgtccatcaaattataggtaactaaaagcctttgggtatctttgttttccttgggtcactccatatacaactaacaaacttcagaccaagtccgtaccatgtgtttttaagttacatcttactcaaaggcatatcttttgttatgatctt

SEQ ID NO: 1349 - DNA, 457 bp, Glycine max
  unsure at all n locations
agcttcacaaggatgtgttatggtacactttttaagaaagagtatattagcaagttatactttgagtatgtagcttttaagataatcggaattataactttctaacttattaaaaaatgaggatactttaataaatctttgattagaatttataataagcaaatattttttaatatacatatatatatatatatatatatatatgaagaattttaattatgatataagattctctaactattgataatttgttttaaagaatattaagatgtaatctacatataaagataaatatagaaggtcgaaagaggtaaactattaagtatattaaatatgtaaataaagataaaaagagaatagtttgaaatagttgatagaaaaaatagttgactagttttagaaataggctgtgaaatgtatgtgtgaaatgcntctccnacgatgagaagagagagag

SEQ ID NO: 1350 - DNA, 407 bp, Glycine max
ttgagccaattcaaacgacaataactttttactcggatgtctgattgagtcccgtaatataacgacacgctcgaaattgaatgttgaagctctgagctaattcaaacgacaataactttttactcggatgtctgattgagtcccgtcatatatcgagacgctcgaaattgaatgttgaagctctgagccaattcaaacgacaataactttttactcggatgtctgattgagtcccgtcatatatcgagacgctcgaaattgaatgttgaagctctgagccaattcaaacgacaataactttttactcggatgtctgattgagtcccgtaatatatcgagacgctcgaaattgaatgttgaagctctgagccaattcaaacgacaataactttttactcggatgtctg

SEQ ID NO: 1351 - DNA, 375 bp, Glycine max
catgcaagcttggttaagaagattcctaaaaaagttagagcttaactacacacacctctctaatagctaagctcaccttcttgagatgagaagctagagcttagctacacacccctataataactaagctcacccctatgccagaaaaaacatgaaaatacaaaaaaagtccttactacaaagactactcaaaaggccccgaaatacaaggctaaaaccttatactactataatggccaaaatacaaggcctaaacgaagaaaaaacctattctaatatttacaaagataagcgggctcatacttagcccatgggctcgaaatctaccctaaggctcatgataaccctaaggcctttccttggattatctggccc

SEQ ID NO: 1352 - DNA, 383 bp, Glycine max
agcttgcttaagaagattcctaaagaagctagagcttagctacacatacctctctaatagctaagctcacctccttgagatgagaagctagagcttagctacacaccccctataatagctaagctcacccccatgacgaaaaacatgaaaataacaaagaaaagtccttattacaaagacaactcaaaattccccgaaatacaaggctaaaaccctatactactagaatggccaaaatacatggcctagacgaaggaaaaacctattctaatatttacaaagataagcgggctcatacttagcccatgggctcgaaatctaccctaaggctcatgagaaccctagggcctttccttggatctctagccaatctaattggagtc

SEQ ID NO: 1353 - DNA, 510 bp, Glycine max
tgtgcggtgaactaacctcctttaacatggaattgtggtgcaattgtgatttgatacaaattgatttaactaagaagggcaggaaaaataagggaaagatcatatttgatgtggacatccccacagatagtgttttcagattatagcttacacagaatgttagcataaatatagttcaaatggctgaaatattttacttcttagaattcattcattatattattactaatttaaggatcctggtgacaaatatgattgttttaaatgacatcaaaagtggatgaatttgaggtgtaaatctatattgtatgtttgacttgaaattggtgagaacgacaagaggggtcatgtgataaattattggcttttcaactattgatagattagttttgcgaattcctgcataagtagattattatattgacgtggtgatttgtttagcagacatttgtcatggaacctgcatttcttccttcacttattattgatatatttaaaagagtttggaaa

SEQ ID NO: 1354 - DNA, 582 bp, Glycine max
  unsure at all n locations
cttggatcttcttcatcaatggagtcctatgcttcttgaattttaatcacaggggaatggaaaagaagaagagttgagaggagacaccacttcaaggagaagatgagtcaagaagaagctcaccaccatagaaagccatggataagagcttgaaggtagaagaagatgaatggagggagagggagagaaggagcacgaaattttatgcctcaaaagaggtctgaactttgaagtttaattctcaaatgatcaaagttgaaaaaattcacacacatggcctctatttatagcctaagtgtcacacaaaattggagggaaatttgaatttctattcaaatttcacttgaatttgaaattgaatttgtgaagccaaattttggagccaaaatttcactaattatgattagtgaattttagctatggttcagcccactaatccaagatcaagtccaagattctccactaagtgtgcttaggtgtcatgaggcatgntaagcatgaaagacatgcacaaagtgtgactatatgatgtggcaatggggtgtagcaagcaaatgctcacctcccctctcaaatttaatt

SEQ ID NO: 1355 - DNA, 426 bp, Glycine max
  unsure at all n locations
tgcaaaccaaatgctcaccactattagaggagaaatctttaagttgtttcatataaacctcctcctctaaatcaccattaagaaaagttgttttcacatccatctgttgcaactcaaggtcaaaatgagaaactaatgccaagataatacgaagagaatctttcttagatactggagaaaatgtctttgtgtaatctattccttccttttgagtaaatccctcaacaacaagtcttgccttgtatctctcaatgttgcctaatgaatcccttttggtcttaaatacccatttacatctaatggcctttgccccattangcatctttacaaggttccaaactttgttactctgcatggaattcatctcatccttcatggcatcataccataaatttgactctttacaactcgtggcttgatccaaag

SEQ ID NO: 1356 - DNA, 470 bp, Glycine max
agcttgggacattcttgcaaatacctatgctagttctgataagttgaaaagagtcaagatgcatactttgaagcagcaattcgagctattacagacgaatgagaaggaaggtatagccgaatacctaaatcgtgtgcaaaatctgtcgaatcaagtgatggcttgtggtgaaaccttgaacgatcaagatcttgtagaaaaggttttaagaaccttaagttcaagatttgattatgtggttgctgcaatagaagaatctaaggattttgcataaatgaaattggatgagcttcaatgctctcttgaagcacacaagctaagaataaaagagagggaaacagataggtcatctgaacaggctttacttgctcagagtggaaaaatattccacaatggctcacgcagtagtaaagggaaggctaaacccaaataccctaaattgaaaaaacaagagatgatggtactgttga

SEQ ID NO: 1357 - DNA, 418 bp, Glycine max
agcttttgatactaacaagtgtatgtataccttaatttctcttaacaacaaccatattgcttattgtaggcatggacttaaacaatatcgtaatggttgggcggatggaccaacttatattacacagtgcccaatacagacaggaggcagttatacttatgatttcaatgttactgagcagagaagaacactatggtggcatgcacacattctttggctgaaggccactgtgtatggtgcaataataattatgcctaaagctggaacaccatttcctttcccacagccagctagagaatttgaaattctcctacgtcagattgaatttcaagcgtataatcttaatattggaaggataaaagggtaagaaatatgctataagtaattttttgtgcatgcaatacgtgaatggtggaac

SEQ ID NO: 1358 - DNA, 490 bp, Glycine max
  unsure at all n locations
agcttatttatttgattaatgaatcatattgattattaattaatgctttatttgtttttttaataagcaaaagtgatgatatatattatacacaaagggtaagcaacctatttacaagtattgaaaactgaaaatactatctccataccttggttacaaaatattaacataacaacaatataaatattaagtaaccaaggaatccaaaaagagaaagttcacctccctgcaagtcactgtaatactactagtgacaatcctacccaatcaccaaaaaaacataaataatgccttaccctcccacatgttgttcccaaaatattaatgctttatttgttgttgatgtatgcaatgcaaggcaattgtgaatcccaatgaatgaatgatttcatgaatgagagcaagctgaatgatcctctgaacagctctgattatgtcccaacctatgaggacaangatggtgactggatgcttgccgcgaatgcccatg

SEQ ID NO: 1359 - DNA, 417 bp, Glycine max
taagctcggcccacaaggtgttccaacatttgatccatgaaatgaaaacgaaaatgatctttacttgtggcttgatttaacttacaataatcaatgcacattctccacctcatcaaaattcttgtggggatcaactcattcttcacattcttgatgactgtcataccccctttctttagtaccacttgtaagggactaacctatgcactattagagataaggtatatcatataggcttcaagaagatctagcatctttttcctcaccacgtccttcataacatgactaagtctcttttcaagatgagctattggtttgaagatttccttatgcataatcttatgcataaaaaatgatggacaaataccttttatattagaaatagtcaagccaatggattccttattctctttcaag

SEQ ID NO: 1360 - DNA, 363 bp, Glycine max
  unsure at all n locations
ctaagcttaagaattatggcctcatcaaactacttgtttcccgagggaaattctataaatagacctcccatctttaatggagtgggttaccactactggaaaacccgcatgcaaatctttatagaggcaatagatttaaatatctgggaagccatagaacaaggaccttatgttccctctatagtggccggaagtgcaacaatagaaaaacctagagcagattggactgatgaagaaagaagattatttcaatataatttaaaggccaaaaatattattacatctgccctaggaatagatgaatactttaaggtttcaaatngtaaagtgctaggatatgtgggatcactacagtaacacatg

SEQ ID NO: 1361 - DNA, 408 bp, Glycine max
  unsure at all n locations
agcttaagctccttcaactgcacaaggctcttaatatttgaagagtatccttgtggaaccttcacccgacgaagacactgacaaaaacttatattatccttctttgacaaagtatggcaggatagggacaagtaaattttcttcccatcagaccttggatgcaactgtgatcgtatacccatatcagctagatcttgacgggtattcaagccatccttcgtcttgccttgaatgttaaggagcgtcccaatcacactgtcacaaacatttttctccacatgcataacatcaatacaatgtctaacgtcaagatcacaccagtacggaagatcaaagaanatggacctcttcttccatatgcaactctgactnttatccttcttgtgggtcttcccaaatacagtattc

SEQ ID NO: 1362 - DNA, 402 bp, Glycine max
  unsure at all n locations
tccatcagtgcataacgtgacttcaaaagtatttgctnttccctttntatattnttatanttttttgggttcgacaagggttgatgcaatcctaccccgcaagggcattggatagaagactccaagacaattgagccagagatgcaagagaaggccctagagttctcatgagccttanggtagatttcgggctcatgggctaagtatgagcccacttatcttagtacatattagattaaggtttcattatttttgggccttgtatttagggctcaataatgtaggtaaggtaccctagaaatgtatgatttttcagcccttgtattttagggcacctagactagttnttgtattangggtagttttgtaatttcacatgcattaagtgaatatttgatgtgt

SEQ ID NO: 1363 - DNA, 364 bp, Glycine max
agctagtgcgctcttggcactgtcatttagttgagaaattctgaaggagacctattccggagatggatttattgatgatgacatacctgttagtaacagcatacttatagctagctgtatagaacaaaagggatgataaaggcttaaactatacataagaatgtataattatattttatatataacttactgaaataatttattttatatgcagatagaacgtaattacggtacaacttataatattattaaagagataaaatatatagtccaaaaggttctgatatacttagacatcttaataatatcaataccttaatgagatccttcatttctctctattatctgttcttaacacatcata

SEQ ID NO: 1364 - DNA, 422 bp, Glycine max
  unsure at all n locations
cacttctgtagggtttcagggctttccatcagctctgtttaatctgccatatactcagccggtattaggcctcatgagctttctcatattcagcagcttattggatttagcttgngtgacttccctttcagatacttgggtgttccccttttatcatctagattaaatgtatgtcattatgctcccttactttccaagattactggcctgattcagggatggagcaaaaagtatttatcttatgcaggtaagttagagttgatcagagcgcgtattcaacgaattgtgacattttggatggggatttttcctttgccgcaatctgttctggaccggatcaacgctntgtgccgtaattntctgtggngcaaagcggatattggaaaaacaagcccttggttgcttggtcagtagtttgttct

SEQ ID NO: 1365 - DNA, 378 bp, Glycine max
accctgatgaggatgtcccatatgttcttataactggactgattcatttgcttccaaagtttcatggccttgtaggtgaagacccgcacaaacatttgaaagaatttcacattgtctgctccaccatgaaacccccagatgtccaagaggatcacatatttctgaaggcttttcctcactcattatagggagtggcaaacgactggctgtattaccttgctccaaggtccatcacgagctgggatgaccttaagagagtattcttagaaaaatttttccctgcttccaggaccacagccatcaggaaagatatctcaggtattagacaactcagtggagagagcctgtatgagtactgggagagatttaagacactat

SEQ ID NO: 1366 - DNA, 427 bp, Glycine max
  unsure at all n locations
atgtgttaactctcaagctntntatgattatatctgtgtgaaatataaaaaattcataaaattactaatatttaaggtagtatatgcttatcatttaaggtaaaatatgttnttaatttttatacttttgatcaaatttaattttagtcctttgtaatatgttaaaaatttaaagggatgtcgcgaaaaggatatataaacgaaataatataaattttaacatttatagtcatattaaaattcacatttaatgtcatctaataaatattattaattttcaatactatttagcaagccttcttctcaccacatttaatttaatgtcatctaataaatattattaattttcaatactatttagcaagccttcttctcaccacatttaatgtcgatcaattaacnaattaaaataataaacaattaataa

SEQ ID NO: 1367 - DNA, 330 bp, Glycine max
  unsure at all n locations
cttctcgatctattatgcgcctgaatcggacctncgagntattagttatgactattaagatatctcaagagcttccggtggttaattgcgtgcgtctcgatatattatgtgcctgaatcggacctctgagctaaaagntatgaccatttgaatttctcgagagcttcctgtgttcaatttcatgcgtctcgatatattatntgcctgaatcggacctccgagttaagagttatgaccatttgaatttcttgagagcttccgatgttcaatttcgagcgtctcgatatattatgtgcctgaatcggacctgcgagtgactatttatgacca

SEQ ID NO: 1368 - DNA, 403 bp, Glycine max
  unsure at all n locations
agctttcaagaaattcanatggtcctaacttttaactcggaggtccgattgaggcggataatatatcgacacgctccaaattgaacaatggaagctcttgagcaattcaaatggtcataaatagtcactcggaggtccgattcaggcgcataatttatcgagacgctcgaaattgaacaacggatgctctcaagaaattcaaatggtcataacttttaagtcggaggtccgattcaggcacataatatatcgagacgcacganattgaacaacggaagctctcgataaattcaaatggtcataacttttaactcggaagtccgattcaggcgcataatatatcgagacgctcaaattgacatcggaagctctcagaaattaaatggcataacttgtactcgga

SEQ ID NO: 1369 - DNA, 360 bp, Glycine max
  unsure at all n locations
tgccacaatntccatgaaatgtaaggccatcgtatgagttgtataatgggaagggagcattcccaagtgaattcctttagaanagcaatcaacgatgactaanatagtagtatgtctgcagtacactagtaaaccaacgatgaagtccaaagaaaggtcctccacagccgggacggcactggcagggggcagagcaacctggcgggctttcgggcttcatatttagtgtgctggcaattgatacaagctgcaacaaacgtttgcacatcctttcttaaccctatccaagtgaaatttttgcacacccgtgcaagggtcttcataatacccatgtggccacttgtgggcattgaatgaaac

SEQ ID NO: 1370 - DNA, 274 bp, Glycine max
caaagaaatgaaaagccctcaattgtggtggctattatctctatagtgattcactcaatttggagtgcttcttagtccaatagcgtcttaatgtggttggcctcttgcttcttgactcgacttcttcaagggatggcaccaatccttctttctaattgcttatatggcaactcacaaaccaggaagcatagagacaagtaataacccaagacccaaaagatgaaatgaaagctaaaccaatagatctttaacaagagatattatcaaggattat

SEQ ID NO: 1371 - DNA, 382 bp, Glycine max
  unsure at all n locations
actaagctggtacaaaccttcactacatcaaccgtaataatcatcctctgactgctatcctgaatcaaacatgaattaggaaagaaggttaacttgcaattcaatacagaaaccaattttgatatagagattaaattgaaattaaaagatggcaagtatagcacatcttctaagtgtaaaaactcagtaaatttgactgttccaaagtgtgtgactatgacttgntgaccagtaggcaggcgaactactatgggatttatttctctatatgtagaataacaagtcaatgaggatgcaacatgaattgtagcaccaaagtccaaaatccatgctgcagcttcanacttgtgaatattacaaacaaaggatagtatattaccta

SEQ ID NO: 1372 - DNA, 419 bp, Glycine max
  unsure at all n locations
agcttgtgcatgagagcgagaatgctagtggttttgatagttcttggaggaccctaaaatgggagggttagaaattaagattaaaaattgagaaagtggaaatagttaatttaaggggtgaaatgagagaactacagataaaatgagattgtgcatgttgttgttgcgagcgatgacttggagcctggagacggcgtcctcattgacgacagcgtcggcgaccttgatgggatgatacttttctacccatggaacgttgtaggcattgcttgatgatgacaatgacatgcttctgccaacggtgaacaaagggtttcaagtttcagaccagagcggagaataaacgttctaaagcccaaaccctattttgcctaaaccacttcaaaggttcatcacttcttatttcanacggcatgttc

SEQ ID NO: 1373 - DNA, 451 bp, Glycine max
  unsure at all n locations
cattacatagtttatttgatcttctacacataatatacattgatgtctagcttactatcgccatatagtttggcgaattatatcaaattcaagttagacaacattattttcaatatttgactcattgtattaagttgaatatgacaattctattattatttgtatctaaagataattattataaaattcaatacatttacattacattccctacaagaattataatacataatattctataatattttataatttgatgaccataataatgataaaatgcattacgctagttaactccactgaaaccttntcaatgaaacttatgtctctaacatataatatcatattaaatatgaataattttagtctcatgtacgtatgatataatatggacttaactcataaaatnttgacttttacattanctcacgcttataaaaatttcttgccc

SEQ ID NO: 1374 - DNA, 416 bp, Glycine max
  unsure at all n locations
ngaaggcatgtaacccaccatcttctcatattagaacactgttaacgtgtccactatcanttttatcatctcgctttccatcattgngggcactacttaagctgccagatccctccacctctgggcgtattctttgaatgattcattatctctcttgcacatgttctgtagctgcattctatctgcggccatattggaattgtaccgatactacctaatgaaggcaaccattaggtccttccaggaatggatccaagaaggttctagattagtataccaggtgacggctgccccagtaagaatttcttggaataaatgcatcaacacattttaatctttcgtgtatgcccccattntcctacagtacatcttcaggtgattcttggggcaagtagtccccttgtacttatcgaaat

SEQ ID NO: 1375 - DNA, 476 bp, Glycine max
  unsure at all n locations
actcagcttaacattcanattcgagcgtgtcgttatattataggactcagtcagacatccgagtaaaaagttattgacgtttgaatctgctcagagcttcaacactcaatttcgagcgtgtcgctatattacgggactatatcagacatccgagtaaaaagttattgtcgtttggaattgctcagagcttcaacattcaatttcgagcgtctccatatattacgggactcaatcagacatccgagtaaaaagttattgtcgtttgaatttgctcacagcttcaacattcaaattcgagcgtctcgttatattatatgactcagtcagacatccgagacaaaagtattgacgttgaatttgctagagcttaacattcatntcgagcgtgcgctatatacgggacatatatacatccgagtataagttattgtctttgaattgctacagctcaacattaattcagcgtgcgatatata

SEQ ID NO: 1376 - DNA, 431 bp, Glycine max
  unsure at all n locations
taagaattggaggtcctaatgattccttgaggaggtccaaacattaagcctttgaattgccccaagtattacgtgtaatatcgcttgacgatgtcaaaattcacagacgaaggtagctcttcatcatccatgttcataagaaacaacgctcctcctgagaaagtcttcttcaccataaacgatccttcatagtttggggcccatttacctcggtgatccttttggacatgcgacactntcttcagaacaagatccccctcgctgaacttacacgggcgcactcttcaatcaaaaacgttnttcactctgcactaatatagtctcccatggcttatagtagccaatctcataccctcgataagaattaattggtcaaagcatgcctgggcccactctgcttcttccaatcctaactctgctaagaatcttaa

SEQ ID NO: 1377 - DNA, 265 bp, Glycine max
agcttgagtataggatcttgcccgctgaatacctaggcgcgatgatgaacataggtggagcctgtgagaacgggctataaccttaccgatatcacccacatacaagccgcagacactcctcggctagcactgtgtgcctaaagagagatctatctcacattacttgcgatacactaactgctcgcgggccagaaccctaaacctgtccagttctccgcctatatgtataaaacaacgcgagacgcttgccacccacctcgcccag

SEQ ID NO: 1378 - DNA, 418 bp, Glycine max
  unsure at all n locations
agcttgtttaccccatgttgagtttgcttacatatagagttgttcatagcgccactaattgttctccttttgaagttgtttaaggttttaacccactaactcctcttggtcttttgcatatgcataatgtttctatttttaagcataaagaaggtcaagcaaaggcgaactatgtgaagaagcttcatgagagagtcaaaaatcaaattgagaggagaaataaaagcttaaacaagccaacaaagggagaaagaaggttgtcttcgaacccgaagattgggtttgggtgcacatgagaaaaggaaggtttccggaacaaaggagatcaaagcttcaaccaaggggagatggaccatttcaagtgcttgaaagaatcaatgacaatgcttacanaagtgagttgcccggtgagtataat

SEQ ID NO: 1379 - DNA, 424 bp, Glycine max
agcttcacaaaagtttatatgacttgaaacatgcaccgatgcagtggtacaagaagtttaatgagtttatgagcaactcaggattcaaaagatgtgacatggaccattgatgctatgttaagaaatatactaatagttatgttattcttgtcatgtatattgatgacatgttgattgcaggatctagtatgacagacattaacaagttgaagcagcagttggcagaaaactttgaaatgaatgatcttggtccagctaaacaaatccttggtatgagaattcttagaaacagatcagaaggaatcttgaagctgtcttatgagaaatatatacacaaattgcttgacagggtttaccttggagattctaagaccaggaatactcctttaggatctcatttgatagtttcaaagaagcaatcttt

SEQ ID NO: 1380 - DNA, 415 bp, Glycine max
  unsure at all n locations
agcttgtgttttcaggagacgtcttagtaactgcaaaatgagatttcaggccaatccaacactggtaataatcttggtccaagaacggtgattctgaggcccattgactgatacggngtatcaaactcgattcaaacataaaagccattgtgtcagtgatcttgcaaggtcctacatcatttcctcgtgcaatggtagcctgtaaaccaagtaccaacacatacattactagaagattgaatccatcaattcatattttttgcatctttagtagttagtacttaaaccaaatcaacaaatggcacataactaggttttgcacttggagtaaacctcattatagtttccgatattgtaagaatttgttactaacactgctaaaaaatgattcattcctatcattntcatatttatt

SEQ ID NO: 1381 - DNA, 356 bp, Glycine max
agcttataatatatcgaggcgctcgaaattgaacaacggaaggtcttgagaaattcaaatggtcataacttttaactcggatgtccaattcatgcgcatcacatatagagacgctaaaaaatgaacaacggaagctctccacaagttaaaatggtcataagatgtcacaaagatgtccgattcacgcttgtattatatcgagacgctcacaattaaacatcgaaagctctcgagaaattcaaatggtcataacttttcactacgatgtccgattcatgcgcatcacaaatacagacgcttcgagttgaacaacggaagctctggagaaattccaatggtcataactttttacactg

SEQ ID NO: 1382 - DNA, 342 bp, Glycine max
  unsure at all n locations
ttggagaggttaatgaaacaacgagatgatgcgctccatgagaggttggatcanatggagaatagagaccatatgaattgctcaagagcttccattgttcaatttcgagcgtctagatatataatgcgcctcaatcggacctccgagttaaaagttatgaccatttgaaatgctcaagagcttccattgttcaatttcgagcgtcacgatatattatgcacctgaatcggacctgcgagtgacaacttatgaccatttgaattgctcaagagcttgcattgttcaattttgagcgtcacgatatattatgcacctgaatcggacctgcgagtgacaacttat

SEQ ID NO: 1383 - DNA, 223 bp, Glycine max
gagctctcactcggaggcccgattcaggcgcataatatatctagacgctcgaaattgaacaacggaagctatcgacaaatgcacatggtcaatactgccaactgcgaggacctattaaggcgcattatatatctacacgctcaatattgaacaaaggaagctctttgaatattcaaatggttctaacgttggactcaaatgtccgagctatgcgcataatata

SEQ ID NO: 1384 - DNA, 409 bp, Glycine max
agcttgcctcctaccaaagttcaagcccatgtgcaaaatgtaaggctttgggaacatgcaagcccaatgcccgcaaaccatgattgtcgaatgctttcacggctcgggcctttttgggccttttcgagcattttaaggatcctatcttgcgaagaaaatgctgtgattgttctgaggttggaaacagcttcaacagctatcttgctactatcatcttgggccttgatggccttactagacatgctcttgagaaggacacgccttgtgtagaaacatgctatgataatgggttgaactgctatcataacaatggccaacctccatgcaatgattaagcccattgtaaaagctattaccactgctgaaatggattgtaccactagagccattctatctcccactaaagacc

SEQ ID NO: 1385 - DNA, 289 bp, Glycine max
  unsure at all n locations
tctcgaatattatgcacctcgaatggacttccgtgtgactagttatgaccattntaattnttcgagagcattcggtgttcaatttcgagcgtctcgatatattatccatctgaatcggacttccgtgtgataagttatgaccatttgaatttctcgagagcttccgttgttcaatttcaagcttctcgatatattatgcacctgaatcagacttccgtgtgaaaagttatgaccatttgaatttctcgacagattccgctgttcaatttcgagcgtctcggtatattat

SEQ ID NO: 1386 - DNA, 396 bp, Glycine max
agcttgccgccacggagttatccgactatgctcttgtgtggtggaacaagctacaaaaggagagagcaagaaatgaagagccaatggttgatacatggacggagatgaaaaagatcatgaggaagcggtatgtgccggctagttactcaagggacttgaaattcaagctccaaaaactaacccaaggcaacaagggggttgaggagtatttcaaggaaatggatgtgctcatgattcaagcaaatattgaagaagatgaggaggtaactatggctcgatttcttaatggtttgactaatgatatccgtgatattgttgagttgcaggagtttgttgaaatggatgatttgctctacaaagcaatccaagtggagcaacaattaaaaaggaacggag

SEQ ID NO: 1387 - DNA, 310 bp, Glycine max
  unsure at all n locations
tactcaattgaatcaacaacagtcccagaattctgacaagctgccttctcaagctgtccaaaaccccaaaaatgtcagtgccatttcattgaggtcgggaaagcagtgtcaaggacctcaacccgtagcaccttcctcatctgcaaatgaacctgccaaacttcactctattccagaaaaaggtgatgacaaanatctacctaacaatttctgtgcaggtgaatcttcttccacaggtaattctgatttgcagaagcagcacattccccctcttccattccctccaagagcagtttccaacnaaaaaatg

SEQ ID NO: 1388 - DNA, 387 bp, Glycine max
  unsure at all n locations
agcttncttaagaagattcctaaagaagctagagcttagctacgcatacctctctaatagctaagctcacctcctttagatgagaagctagagcttagctacccacccnctataatagctaagctcacccccatgacaaataacatgagaatacaaaaaaaaagtgcttactacagagactactcagaatgccccgaaatacaaggctaaaaccctatactactagaatggccaaaatacaaggctcagacgaaggagaaacctattctaatatttacaaagataagtgggctaatacttagcccatgggctcgaaatctaccctaaggctcatgagaaccctagggcgttcccttggatctctagcccaatctacttggagtcttc

SEQ ID NO: 1389 - DNA, 408 bp, Glycine max
  unsure at all n locations
agctntgagcaaattcaaacgacaataacctttntactcggaagtcggattgagtcccgttatatatccagacgctcgaaattgaatgttgaagctctgagcaaattcaaacgacaataacctttttactcagatgtcggatagagccccgtaatatattgagacgctcgaaatggaataccgaagctctgagcaaattcaaacgacaataactttttactcggatgttcgattgagtcccgtaatatatcgaaacgctcgaaattgaatgttgaagctctgagcaaattcaaacgacaataaatttttactcggatgtccgatggagtctcgcaatatatcgagacgctcgaaatggataaccaaagctctgagcaaattcaaacgacaataactttttactcggat

SEQ ID NO: 1390 - DNA, 356 bp, Glycine max
actgtgataataaatcagccatagagatttctaatcttcctgttcaatgtgattgtacaaaacatgaggaaattgacaggcatttcatctaagtgaatattgaagatggtattattgtctttcctttggttaaattataacaacaacttgttgatatgttaaccaaggtatttgcattccaaggtccgcttatatactttattcttagattacgttgggaaatataatgacaattgattgcactcaactttgaaagcggggatgttagcaatccatttaattgttagggatcagctatgactttgaatttaaattataaatgattcacatcccctgatatttattcctttttattt

SEQ ID NO: 1391 - DNA, 438 bp, Glycine max
  unsure at all n locations
agctntgtgagtgattcttataaatcgatctctagctacaatgaacgattgggctcctcctctcatagctgcggctntgttttggctcttgagcccgggaatgatctttcagttgccggggaagaatgcaccctttcagtttatgaacatgaagaccactgttgcatccatgtttgcgcacactgttatttatggtctgtttctgatgttgttcttcgttggtcttagtatccatctttatatttaagcagcagcaaagggtatttaaagaaaacttatgtgttgctttatcttttaaagtagatcatgtaacaaccttctcttgttgatcaatatgtatgtgctcttttcgaatttccacttgatcaggcttctactaatactttcacgagtgatatgctcgtcgttcattatttaaaagtgacgtgaattactatg

SEQ ID NO: 1392 - DNA, 437 bp, Glycine max
tgaagacaagactatacgaggtatctttcttgggtatagcaatatctctaagggctaccgtgtctacaacttgcaaactaaaaaactcgtcatcagtcgagatgttgaagttgatgagtacgcttcttagaattgggatgaagaaaaaatggagaagaacattcttatacctcgtcaacctactctctaagcaagaaagcctgatggaagtaagacctcagtgtgaaccactcttcactctccaccacaacaacaagatcaagaactatcatcaccagagtatactccaagaggagtaagatctttggtggacatatatgaaacctgtaacttggccatacttaaacttggaagctttgaagaagcgtcaaagcaggaagtatgggtcaaggcaatggaagaagagatacagataatcgagaaaaacaacacatggg

SEQ ID NO: 1393 - DNA, 402 bp, Glycine max
tgaatcggacatccgtgtgaaaagttatgagcatttgaattacttaatatcttccattgttcaatttcgagcatctcgatatattataagcctgaatcggacattcgtgtgaaaagttatgaccatttgaatttctcaagagcttccgttgtttaatttcgagcctctcgacatattatgcgcgttgaatccgtgctatcctgtgtgaacaagttatgaccattttgaatatttcgacagcttctgatgtgtaattctgagcgtattaatatattataagcctgaatcggacctctgtgtgaaaagttatgaccattttaatttccctagaactttcggtttttatattctagcgtgtctatatgtgatgcttcttaatataacatccttgtgaaaagtttt

SEQ ID NO: 1394 - DNA, 380 bp, Glycine max
  unsure at all n locations
agcttatataaatcgatacgctcgaaattttacatcgaaaactctcgacaaattcaaatggccatatcttttcacacggatgtctgattcgggcgcataatatgtcgagaggctcgaaattgaacaatcgaagctcttgagaaattccaatggtcataagttctcacacggatgtccgattcaggcttataatatatcgatacgcgcaaaattaaacatcggaaactctcgagaaattcaaatggccataacttttcacacggatgtccgattcgggcgcataatatgtcgagaggctcgtaattgaacaacggaagctcttgagaaattcanatggtcataacttttcacacggatgttcgattaaggcgcatcacata

SEQ ID NO: 1395 - DNA, 448 bp, Glycine max
agcttggatttcctttgctccggaaacctcttctttctcatttgaacccaaacccaatctccgggttggaaaacaacctttttgcgccccttgtttgcttgtctagcatagctctcatttctcttttcaatttgggccttgactctttcatggagctttttcccatagtccactttggcttgtccttccttatgcttaaaaactgaaatattaggcattggcaacaaatcaagaagagttagtggattgaaaccataaacaacctcaaaaggagaacaactagcggtgtcatgcacaaccctattataagaaaattcaatatgaggtaagcaaacttcccaatttttaagattttttttaaatggtccttagcaaggtacccaaagtcctattcacaacctctgtttgtccatcccattgagggtgacaagcagtagaaaatagtaac

SEQ ID NO: 1396 - DNA, 369 bp, Glycine max
cctgctgcatgcaagctttgagcaaatacaattacttaactttttactcggatgtctgagtgagtgctggaatatatccaaaagctcgacattgaatgtctaagctctgagcaaattcaaacgacaataactttttactcggatgtctgattgagtcccgtaatacatcgagacgctcgaaatggaataccgaagccctgagcaaattcaaacgacaataactttttactcggatgtctgattgaggccggtaatatatcgaaaagctcgaaattgaatgtagaagctctgagcaaattcacacgaccataactatttactcggatgtctgactgagtcccgaatatatcggaacgctcgaattgaatg

SEQ ID NO: 1397 - DNA, 451 bp, Glycine max
  unsure at all n locations
agcttcaagaaaaagatggcctcatcatatttcttatttccagaagggaattctatcaatagacctccaatctttaatggagagggttaccactactggaaaacccgaatgcaaatttttatcgaggcaattgatctaaatatctgggaagccattgaaatagggccttatatacccaccacagtagaaagagtttcaatagatggtagttcatcaagtgaaagcataaccatagaaaaacctagagatagatggtctgaagaggatagaaaacgagtacaatacaacctaaaagccaaaaacataataacatctgccctacgaatggatgaatatttcagagtttcaaattgcaagagtgctaacgaaatgtgggacactcttctattaacacatgaaggaactacagatgttaaaagatctangataaatgcactaactcatgagtatg

SEQ ID NO: 1398 - DNA, 379 bp, Glycine max
agcttcaagaaagtcctctccaagagtgactaatgaggctgttcataaggctgtgagtgcttattttctgtagttttctgttcaactgcttaattcagttgagcaagatttgttaggaaatttattgtcttgttcactgttattgatgacatcttttattctcttctcaggctgctgcattgaagggttctgatcatcgtcgcgccacaaatgtcagtgctagattggatgctcaacaaaagaagttcaaccttccaatcctcccaaccaccacaattggatccttccctcagactgttgaactgaggagggtgcgtcgcgcatacaaggctcacaagtaagatatgccttgagttgataggttggcttgtctcttgac

SEQ ID NO: 1399 - DNA, 401 bp, Glycine max
  unsure at all n locations
tgaaagtgcataancttctaaacaagggatgtctcttattcaatgtcgaatttaaccagctgggctgtaataatatattttcttgatatgataattaattctacgtgcatatcagcgtgtatgccaaattttattaattttttttacttaaaatcccatttacactaataaccgcaataacacatactaattatgtaatgagtacttcaattagcctttttgctttcttaatcaattcaaactattatcctttatccctatttctaaaagaaattctgatagtttttaaagaaaaacttaatttaaaataatcttttgttttataaacttgaaatacaatgcatattttaaaaaatatttatgtgtattatgaactttaattttaatatatgttatatatt

SEQ ID NO: 1400 - DNA, 378 bp, Glycine max
  unsure at all n locations
agctnttaactcggaggtccgattcaagcgtattatatatcgagacgctcgaaattaaccaacggaagctctcgagaaattcaaatggtcataacttttaactcggaggtccgattcaggcgcataatatatcgagacgctcgaaattgaacaacggaagctctcgagaaattcaaatgatcataacttttcacacggaggtccgattcatgcgcataatatatcgagaccctcgaaatttaacaacggaagctctcgagaaataccaagggtcataacttttcactgggatgtccgattcaggcgcataatacattgagacgctccaaattgaacaacggaagctctccaaaaattcaaatggtcataacttttcac

SEQ ID NO: 1401 - DNA, 395 bp, Glycine max
cggttcttctatttgctattgccgctgcagcattttacacaggctcgttgattaaaagatgtatggacaagaattcgaacattaaaacctacccagatataggtgagcttgcatttggaaagatggaagctatatatcaggtcatgtacacggagcttattgtttaatagggttcttgattctggaaggcgataacttgaataacttgtgccccattgaagaggttcagatagctggcttcgtaattggtgggaagcaactgtttgtgatattggttgcccttatcatcttgcccacagtttggttggacaacttgagtatgctttcttatgtatctgcaagtggagtgtttgcttctgctggaatcatcctatcaatatcatggactggaacat

SEQ ID NO: 1402 - DNA, 383 bp, Glycine max
agtgcactgccaaagcttttattccatcatgtgtttgtgcattgaagaactccaattgaggcacatacatgaaaacctctgatgctcctgtgagcacatattgtggcacttgccagaaaatggaaagtgaacttgacccatcacaattgctacaatcttttattgcaaacttcaacctgaatttctctaccaaccctgctgagaccatggccatgattgcaaggactagaccaattcccatcctttgaagctctgtgagtttggatttcattactttggccacaaaagggtcgagggcgtgcctatagatgaagatgaagaatgccacgcccaaaatgtcgaagctggacatgcttgctggagggattttgaaacttgaaatt

SEQ ID NO: 1403 - DNA, 286 bp, Glycine max
ggctcctccacctgctctaatagcccaaaagagaccttctccctttgcttttctatcaaggatttggccatttgcatcaactattcttgcatctaagacattgtcagctccaaggacatactttcatattatggattcatatgcacctaccgtgaaggctcttcacaccttaacttgtgcaaaggtcttgctggaaaccatgaaccgaacttttctcatatattttgtaatagaccttccccatagtggcacccgcttgaatccaagccgtgctggcttctatatt

SEQ ID NO: 1404 - DNA, 274 bp, Glycine max
agctttataggaagcactatggttaagaggtttggtttcaaaactacttcaagtgaaagagccaaaaatcactgtagtacactatgacagtcaaagtgcaatgagtttgaacaaaaaccaagtgtatcataacaaaacaaagcatgtgaatgtcaagtatcacttcattcaagatatgatcaatagtaaagctattgctattaagaagatatctacaagggagaatgttgcacacatgctcacaaaagttttaccctatgagaaggtcaactat

SEQ ID NO: 1405 - DNA, 332 bp, Glycine max
  unsure at all n locations
ntaactcggatgtccgattcaggcgcataatatatcgagacttttgatattgaataacagaagctctcgagaaattcgaatggtcataacttttcacacggatgtccgattcgggcgcataatatgtcgagacgctcgatagtgaacaacggaagctttcgagatattctaagtggtcataactttttcactcggaggaccgattcaggcgcataatatatcgagacgctcgaaattgataaacggaagctcccgagaaattcaaatgcgcataacttctaactcagaggtccgattcaggcgcataatatatagagacgctcgaaattgaa

SEQ ID NO: 1406 - DNA, 338 bp, Glycine max
agcttgtagcatatgcaaacggcaataacgttttactcggatgttcgattgagtcacgtaatacatcgaaacgctcgaaattgaaaacagaagctctgtgcaaattcaaacgacaatacattttaactcggatgtccgattgagctccgtaatatatcaagacactcgaaattgagaataaaagctctgaacaaattcaaacgacaataactttttactcggatgtccgaatgagtccagtaatatatctagacactccgaattgagaatagaagagctgagctaatccaacgactttaacttttactcgaatgccgatggcgcccgacgtgtttaca

SEQ ID NO: 1407 - DNA, 417 bp, Glycine max
  unsure at all n locations
agcttaagctccttcaactacacaaggctcttaatatttgaagagtatcctagtggaaccttcacccgacgaagacactgacaaaaacttatcttctccttcttggacaaagtatggcaggctgggggcatataggttcattccatcactgtctagtccaagtctaagatttcttggctcattcccgaaatccggatacaaaccatcaatcttcttccactgggagcaatcagccggatgacagaccattccatcagaaatccttccatttgcatgtcatgtaaggtcttttgcgtcatcctcgttagcaaagagacgcttannaccttggaataattgaagataccacanaaccttcgctggnggacccttgttggagttntcatcagaaatgctntcctcttaatccttgacttt

SEQ ID NO: 1408 - DNA, 428 bp, Glycine max
tgtcacttgaggacaaccagacagacactcgccctctcgacatctgtccatgacattaaccaatgaggaagtttattgctttgacaccaagagaggggtcatagtaaagtaattaacatcgacgatcaaactttatggatagcagaaacacgatattctgaacaacagtaggtggtggcatttgggttcatgctatctgatagaacaaggactttgaagacatgttctaataatatatttcataatcttgaaactgttgtatttaagctacagcaattggagcttgctagtactcatgctatgttggttactctctagtctactgactactaaggatggagctacatgcaatctatgctatctatatgcagtatatgaagttaacagctcttcataggcaatactatacacatgacttctatgaagca

SEQ ID NO: 1409 - DNA, 355 bp, Glycine max
gaaaattaaccatattgtattttatatttgatgttttataactcttttattaccttctactatatatagagagagagtgaattatactataatgagagttgaataatatgcactcaggataaatcttttcgaatgaaagatttttattaaataaacaagtttatttaaaaacttttgtctagtgactaagataagtattcttaagtacacgtgaattgttgtccaatgatatataacatttatttttcaatgaatatcttgtgtctagaatgtattaatagaaagctttgaaatattttaataagctaaagaacaatggtcaaaatacctcattttatactgattcagtcaatct

SEQ ID NO: 1410 - DNA, 440 bp, Glycine max
  unsure at all n locations
agcttaagctccttcaactgcacaaggctcttaatatttgaagagtatccttgtagaaccttcacccgacgaagacactgacaaaaacttatcttctccttcttggacaaagtatggcaggctgggggcaagtaaattttcttcccatcagaccttggatgcaactatgatctgatacccatatcagttagatcttgacgggtattcaagccatccttcgtcttgccttgaatgttaaggagcgtcccaatcacactgtcacaaacatttttctccacatgcataacatcaatacaatgtctaacgtcaagatcacaccagtacgaaagatcaaagaaaatggacctcttcttccatatgcaactctgacttttatcctctctttgggtcttcccacatacagngntcaggtgttgaacccgctgatatacctgctcacc

SEQ ID NO: 1411 - DNA, 410 bp, Glycine max
ttaagaaatgtgaactcccttgcattgatttcaaatattgaggtcaatccgcgccctgatgagactaatgaaggaggtataattgctgaaattaagctaaaggagttagaacagaagtcggctgaagtcagtactgagtggagtattgtccctggacgggaggatccactctggtatttatttctgtcaaattgaatatcaattctctttaacaaccgaggaatttttggcccacccaattaatttgtttactttctatttgactttgtgtaggcttcgctccagcctggtggcactgttagttttgaacatcggaatctgcaagggctgaatagatctattaatggttctattacaactagcaacttcttgaatcctcaagtaggtacccttgagctagatcctggagt

SEQ ID NO: 1412 - DNA, 443 bp, Glycine max
  unsure at all n locations
gaaactcagctttcacgactctgactgggcaggctatcgtgattctagacgttccatcataggtttttccatctaccttggacactctcttatctcttggcggtcgaagaaacaatctactatgtctcgcagctcctccgaagctgaatatagagcttcagcttcaacaacatgcgagcttcaatggctcacctnnntaccttcttcaagaaatcttcatatctcgtttggcccaactcagccatctctttattgcgataaccaatcaacaatccagatagcctctaatcaggtgtttcatgaacgcaccaagcatattgacatagattgtcatatcgttcgagagaaagtaaacaatggtcttatcaagcttcttcctgtctcgtcttccatgcaactcgccgacatttttaccaaagctntatctccatccatctttcaag

SEQ ID NO: 1413 - DNA, 454 bp, Glycine max
  unsure at all n locations
gctttggagtttccaagagccaattcgtcttcttcttttgttcagacttcttctggcttcaattcatcagtgggctttccttctgtgtccagcatcttgggatgttcccagcctttgatgacagctttccaggttctgctatccagtgatttgaggaaggccaccatccttgctttccagtattcatagttggttccatctaggattggcggtctgttcactggtcctccttctttctccatgttcatcagaatttatctccctagatctcactctgtgatttcgagtgtttgctctgataccaattgaaattctgatactgnggacagatgtcgtaccggatgtcacgacatctcacttcagaacatgcagattagatgcgttcgtctgaacagattacacatgtaaataacacaagaggattgttacccagttcggcgcaacttccctacat

SEQ ID NO: 1414 - DNA, 427 bp, Glycine max
tgaaggcaaactggatgcgttggtcaacttggtaacccagctggtcttgaatagaaaaatatacacctgtcgcaagggtttgtggtttgtgctcctctgctgaccaccatacagacctttgcccttccatgcagcaacctagagcaattgagcagcctgaagcttatgctgcaaaattacaatagacctcctcaacctcagcagcaaaatcaaccacagcagaacaattatgacctttccagcaacagataccaccctggatggaggaatcaccctaacctcagatggtccagccctcagcaacaatagcagcctgcttcttccttccaaaatgctgctggcccaagcagaccatacattcctccaccaatccaacaacagcaacaaccccagaaacagccaacaattgaggcccctccacaacctt

SEQ ID NO: 1415 - DNA, 280 bp, Glycine max
cttagaaattctgtcatgctgagatactttcagttggaccagccttagaggagaaaaaagagaaaccaaagaaagaggataagaagccagaagccaataaaaatccaaaggaggaatatgctcaacttctgaaggtatatgaagcctattataatcaaataattgaacctgttctataaacttgaaaaatcaactggctggtattgtatatgagttgaggatataatgaatcaagagaaatgtgacatttatgaatgacttatatgtaaaaaaggccgct

SEQ ID NO: 1416 - DNA, 448 bp, Glycine max
agcttaataaatctatatatggtttaaaatatgcctcccatatttggtaccttaagtttcatgggattatttcttcatttggttttgatgaaaaccccatggatcaatgcatataccacaaggttagtgggagtaaaatatgttttcttgctttatatgtagatgatattttacttgcacccaatgatcggggtttgctacatgaggtaaaacaatttctctctaagaattttgacataaaggatatgggtgatgcatcttatgtcattggcattaagattcatagagatagacctcaagatattttaggtctatcacaggaaacctatattaacaaaattttagatacatttcgtatgaaagattgttcaccagttgttgatcctattgtgaaaggtgatagggttaatttgaaccaatgcccaaagaatgactttgagagggaaca

SEQ ID NO: 1417 - DNA, 442 bp, Glycine max
  unsure at all n locations
agcttcaacatcagaccacttccagggtgctggaactacttcacatggatttgatggggcctatgcaggttgaaagccttggaggaaagaggtatgcctatgttgttgtggatgatttctccagatttacctgngtcacctttatcagagagaaatcagaaacctttgaagtattcaaagagttgagtctaagacttcaaagagaaaaagactgtgtcatcaagagaatcaggagtgaccatggcagagaatttgaaaacagcagattcactgaactctgcacatctgaaggcatcactcatgagttctctgcagccattacaccacaacagaatgggatagttgagaggaaaaacaggaccttgcaagaggctgctcgggtcatgcttcatgccaaagaancttcctataatctctgggctgaagccatgaacacagcatg

SEQ ID NO: 1418 - DNA, 428 bp, Glycine max
  unsure at all n locations
tctcgatatattatgcccctgaatcggacttccatttgaaaagttatgaccatttgaatttctcgagagcttccgttgttcaatttctagcgcttcgatatattatgcgcctgaatcggactttcgtgtgaaaacttatgaccatttgaatatctcaacagcttttgtagtttagtttcaaagctgtctcgattatattaatgcacgcttaatctggactctccgttgtgaaaagttatgaaccatttgaaattctcgagagcgttcgttgttcaatttcgatcgtctccatatattatgcgcctgaatcggacttccgtgtgaatagttatgaccatttgaatttctcgggagctctcgttgttcaactntgaccgtgtccatatattatgctcctgaatcggacttccgtgtgacaagtgatgacc

SEQ ID NO: 1419 - DNA, 433 bp, Glycine max
agcttctccatatattattcccctgaatcgtgacttccgtttgaaaagttatgaccatttgaatttctcgagagcattcgttgttcaatttcgagggtgtcgatgtattatgcgcctgaaccggacttccgtgtaacaagttatgaccatatgaatttctcaagagctttcgttgttcaatttcaagcgtctagatatagtatgcgcctgaatcggacttccgtgtgacaagttttgaccatttgaatttttcgcgagcagtcgtggttcaatttcaaccttctcgatatattatgcgcctaaatcggacttccgtctgaaaaagtatgaccatttgaatttctcgagagcattcgtttgttcaattcaagcgtctcgatgtattttgcgcccgaatcggacttccgttgacaatttatgaccatctgaattt

SEQ ID NO: 1420 - DNA, 424 bp, Glycine max
cgaaggcaaactggatgcgttggtcaacttggtaacccagctgttcttgaatagaaaaatatacacctgtcgcaagggtttgtggtttgtgctcctctgctgaccaccatacagacctttgcccttccatgcagcaacctagagcaattgagcagcctgaagcttatgctgataattacaatagacctcctcaacctcagcagcaaaatcaaccacagcagaacaattatgacctttccagcaacagataccaccctggatggaggaatcaccctaacctcagatggtccagccctcagcaacaatagcagcctgctttttccttccaaaatgctgctggcccaagcagaccatacattcctccaccaatccaacaacagcaacaaccccagaaacagccaacaattgaggcccctccacaacc

SEQ ID NO: 1421 - DNA, 418 bp, Glycine max
acttgatgataaccattctgctacttgtcctcttgcgatctcccattagatttagcacaccggaactgattgttttcacaccaagcgatgtctcatagtttcattatcaacatctacgagccaactttatcgttagcgtgagctggtacgctgaaaaacagaggtgtaggctttgggttcatgctttctgatagaacaagtactttgaagacatgttgtaataatattctgcataatcttgaaactgcattatttaagcttcagcatatgctgcttgctagtactcatgctatgattgggactccttagtctacttactactaatgctggagctatttcccatctatgctctcgatatccaatattggaagtcaggagcttttcacaggctatcctatacacattacttctatgaagc

SEQ ID NO: 1422 - DNA, 363 bp, Glycine max
agcttagagctaattcaaacgacaataactttttactcggatgtttgattgagccccgtaatacatcgagacgctcaaaattgaatgttgaagctcgcagcaaattcaaacgacaataactctttactcggatggctgattgagtcccgtaatatatcgagacgctcgaaattgaatgttgaagctctcagccaattcaaacaacaataactttttactcggatgtgtgattaagtcccgtaatacattgagacgctcaaaattgagatgttgaagctctcagcgaattcaaacgacaataactcttttcctcagatgtctgattgagacccgtaatatattcgagacgatcgaaattagatt

SEQ ID NO: 1423 - DNA, 436 bp, Glycine max
agcttgtgtattagggagagtattttagcatggaaggctaattaaggtgaagtggatcagagagagagatgaaaattcatgtttttttcatttctctcttcgagatcgccagagaagaaatcaactaatggcccattagagtggagatatgtggttaattagaaggaggggaacaaatcaaggatgaggtgacaaggcaattccagcaagtgttttcagaatcaaagttcacacgaccttgtttaccaggtgttgagtttaaacaaattagccaggtagatagctcttttcttattactccttctttggagctggagatcaaggcagcggtttggagttgtgatggtgatacaagtcttggccctgatgggttcaattttcaattctcacggcgtgttgtgaattttaaggcccaagatttgttgtatggtgcatg

SEQ ID NO: 1424 - DNA, 229 bp, Glycine max
agcttataatatatcgatacgctcgaaattaaacatcggagactctcggaaaattcaaatagtcataactattcacacggatgtccgattcatgcttataatatatcgatacgctcgaaattaaacatcggaaactctcgcgaaattcaaatggtcataacttttcacacggagatccgattcgccacataatatgtcgagaagctcgatattgaacaacgaaagctct

SEQ ID NO: 1425 - DNA, 324 bp, Glycine max
  unsure at all n locations
agctttgatgtttgtgttgaatgcattatatgtaaatagaccaaaagtaagaaattaggtgcatatagagctacagacatcttggaattgatacatacggacatttgtgggccatttcatgcaccttcacgaaatggtcaacaatattntatatcattcatagacgattactccatatatgcatacttgtttcttatacatganatgtcacagtctctggatgtgttcaaaaaatttaaaagtgaagttgataatcaactcaacaaaaaaatcaagagtgtcagatctaactatggtggtgaatactaaggcaaatataacggt

SEQ ID NO: 1426 - DNA, 433 bp, Glycine max
  unsure at all n locations
cgacactatgatactcagcttaacattcaatntctagcgtctctatatattacgggactcaatcagacatccgtgcttaaagttattgtcgtttgaacttgctcagatcttcggtattcaatttcgagcatctcgatatattacatgactcaatccgacattcgagtaaattgttattgtggtttgactttgctcagaactttaacattcaatttcgagcgtctatatatattacgggactcaatcagacatccgtgtaaaaagttattgtcgtttggaattgctctaagcatcaacattcaatttcgagcgtcccgatatatgacgggactcaatcagacatccgagtaaaaagatattgtcgtttggatttgctcagagcatcagcattcaattccgagcgtctggatatattacgggactcaatcagaca

SEQ ID NO: 1427 - DNA, 390 bp, Glycine max
agctttgagcaaattcaaacgacaataccttttgactcggatgtcggattgagtcacgtaatatctcgagacactcggaattgaataccgaagttatgagcaaattcaatcgacaataaatttttactcggatgtcggattgagtcacgtaatatatcgagacgctcgaaattgaataccgaagctctgagcaaattcaaacgacaataactttttactcggatgtgcgattgagtcccgtaatatatcgagacgctcgaaattgaataccgaagctctgagcaaattgaaacgacaataactttttactcggatgtccgattgagtcacgtaatatgtcgagacgctcgacattgaatatcgaagctctgagcaaattcatacgacaat

SEQ ID NO: 1428 - DNA, 412 bp, Glycine max
agcttcagaattggttaagcatggcagataatgtgatcgatcatctttgtaatgagtttgagggcacgtacaggttcaccgattgggacaccattcttttctccacttttcttgtatgaaccctctgttctggagatcccgggtcctggtttacaagcggagtacatgcaatcttggacatagaaagccgtgtagtaattgacgccaatgaaatccaatcctctcttgagtttctctttttcgtagctggaaaatttgggcaagaggcttccaagaacgttctccatctctgtagggtactttccgaatatgattgggtccaagaacctgcattataataaagtgttactctgggggagttgagtgaacaatagaaaatgctattattaagggagaactagtattaactata

SEQ ID NO: 1429 - DNA, 428 bp, Glycine max
  unsure at all n locations
cctgcatctggacaagcaaatgaagaagttgcccatgattattgttcaggctagacacatggaaaggaggacaattaaacctcataaaagatatggtcatgcatatctgatctcctatgctttaatagttggaaagaagattgaagttcaagaggaacctcactcttatgatgaggtcataagcaacaaggacaattcaaaatggattgaagctatggaagaagaaatgtcttttctagaaaagaattgtcctanagggcagtaaattgttggatgcagatggctattcaagaggaaagaaggttttgaaggagttcanagtgtaaggttcanagctaggctagtagcctgtgggttactcacaaggaaggagtcagatttgtagaaatcttctcacctatggtanaacatagttcaataagaagtcc

SEQ ID NO: 1430 - DNA, 315 bp, Glycine max
  unsure at all n locations
ggctggtccaatagattttatataacaacttgaatagtggctatatctagaagttggcaccaaattaactggatttttgttcagataggctatatgttgttgaagtgccattntcatttattcttgtaaattgcaggtgatagcagcaacaaaccgtgcagatattcttgaccctgcccttatgcgttctggtcgattagatcgtaaaattgagtttccacacccaagtgaagaagcaagagctcgaattctacacgtttggtgtctttaaacttcatctgctgacttgtttatcatacagaacatctactgact

SEQ ID NO: 1431 - DNA, 405 bp, Glycine max
  unsure at all n locations
tcgtggatgcttactccagatacaactagattaggatgcaatctccaaaggaggcgaagatgacatttatcactaaagataccaacttatgctaaagggctatgccctttcagcctaacaaatgtagacgctacataccaatgactgatggaccgagtctttaaacaacaaataagacaaaacatcaaggtatatgtggacaacgttggcggtaagtctcgaagcatagtccaacatgtggcagatctgcaagaagtcttcaaggaactttacaagtatgacatgcgcctcaaccctgaanaatgtactttcggtgtaggcagaggcaagttcctcgacttcatgatcactcaccaagggattgaagccaaccctaacaaatgccctaccatactatagatgcac

SEQ ID NO: 1432 - DNA, 327 bp, Glycine max
  unsure at all n locations
agcttatcctcacttgcanatttgataactattataatctcagcgtttcaacatcaaaatgatatgtaaatggtttagactcatcttccatgtgatcagagagatatgaaaggcatttaanaacaagctctagatgcaagtgtgaattgtcttctacaaagaaaggaaggatcttctggctaatctcaatccaactacaccctggattcttctttaatccaagctctttcatctttgatctcaccacacgtacttcatcccacttatgtgcagaagcatacatatttgacaagagaatatatggtgatgaatcatcacgatccttat

SEQ ID NO: 1433 - DNA, 466 bp, Glycine max
  unsure at all n locations
ctggaactacttcacatggactngatggggcctatgcaagttgaaagccttggaggaaagaggtatgcctatgtttgtgtggatgatttctccagatttacctgggtcaactttatcagagagaaatcagacacctttgaagtattcaaggagttgagtctaagacttcaaagagaaaaagactgtgtcatcaagagaatcaggagtgaccatggcagagagtttgaaaacaacaagtttactgaattctgcacatctgaaggcatcactcatgagttctctgcaaccattacaccacaacanaatgacatagttgaaaggaaaaacaggactttgcaagaagctgctagggtcatgcttcatgccaaagaacttccctataatctctgggctgaagccatgaacacagcatgctacatccacaacagagtcacacttagaagagggactccaaccacactgtatg

SEQ ID NO: 1434 - DNA, 428 bp, Glycine max
  unsure at all n locations
atcttgtcatgaatcctcgccataaaattacatagacctgccaattctaaatgaaaaatgtaataaatccaatgctaacaaaaaatagaatagcaacacacactcaaatgacacatgcaataacatttcaatgaataacaaaataacataaaaacaatgatactattcgttgaactactaagccaatacatgcaacaacctgaaccaaaaaagaaaagccaaattagcaaatagcagagaagcagaaacaaaaattatatctctgaacaaataatattgcaaccatcaacaaacaaatagaaaggccgaaaacaaacacaaaaaagttcagctgttggaaaacagaataccaacccatccttataccacacatgcaataagatntncatcaatgccaacataccacanaaagtattacactatcaatc

SEQ ID NO: 1435 - DNA, 434 bp, Glycine max
  unsure at all n locations
gcttatagttattggagggagaataaaatatattcattatcaattgtacctttcaagtaacgaagaattctttntgcggcttttagatgaggagaggtaagagcctccgtaaagcgacacacaactcccaccgtatatagaatatcgggccttgtattggttagataccttaaactgcccacaagactcttgaaaaccgtggagtctaccttctgtccttcatcaaactttgatgacttcaagccaccttccataggtgtgttcacgggattgcaatcaagcatattaaatttcttcaacacttcttttgtgtagctttcttgtgagacaaagataccattctccatttgcttcacttccattcccaaggaatatgacatgagtcccatatctgtcatatcaaattcacgagacatagactccttgaagtcttc

SEQ ID NO: 1436 - DNA, 284 bp, Glycine max
  unsure at all n locations
ttcatcttacagacagcacaagaaagtttatacggataaccactctggtatttccacccgtcaacgtgactcaaatgtcagtatgacagatcttgtgaagggtggccgacaaaagcgaggctctngctcctacgtatcctccaatgaggaactcagacctacgtagntcttgataacttgtgagacttgaaaagtctccacccgaagatgctgacatcttcggaaagggcgcagatgaccacacttggcctcatgctcgtcaatcacacttggggtcactgaat

SEQ ID NO: 1437 - DNA, 437 bp, Glycine max
  unsure at all n locations
acattntcgtgaatgtgacaatctattccttagtggattgattcaccttaacagcccanaaaatcatataagcataattagatgcaacaactcactcatctccaatcttcatatgattgcaccaaatgaaagcccaaacactgatgagaatgttatctcacattcatccaacatttccataaagaactccaagatggaaattggtaaatcatatataagttacaatctttaattgcataattattatatcttgtccttaaatcattcaatgagattgcatagccctttaattcctagttttttttataaggctactcaagtggtagatcctctcttaattntttttatttaaaaattatgtgatgcgtaaatattcatgtttctcatttaagttgacaatcttatgtaataaaaagaagacacaaattctcttcata

SEQ ID NO: 1438 - DNA, 411 bp, Glycine max
  unsure at all n locations
ctcagcttcacatcagaccacttccagggtgctggatctacttcacatggacttgatggggccgatgcaagttgaaagccttggaggaaagatgtatgcctatgttgttgaggatgatttctccagatatacctgcgtcaactatatcagagaaaaatcagacaccttcgaagtattcaaagagctgagtctaagacttcaaagagaataagactatgtcatcaagagaatcaggagtgaccatggcgcagagtttgaaaacagcacgtttactgaattctgacatctgaaggcacactcatgagttctctgagccattacccacaacagaatggatatttgataggaaaaacatgactntgcaagagactgctanggtcatgcttcatgccacagaacttctctataatc

SEQ ID NO: 1439 - DNA, 425 bp, Glycine max
  unsure at all n locations
atctccaatgctatgtaccttntactcataccccttcttggtgtagcttctgctcatctttcaacaatctcttaccaagatgttgtccaactatgggaaaatctcaagttcaatcttgtctcagtgactctatgttctagccttatagtgttccttgtcaccttttacttcatgagccgtccaaggggtgtttacttggtggattttgcgtgctacaagccagagccagattgcacttgcacaagggagattttcatgcacaggtctgtggaaactggtgtgttttcggaggagaacttggcctttcagaagaagatacttgagaggtctggtttgggacaaaagacttacttgcccccagcaatcttgagtatccctccaaacccttgtatggctgaagcaaggaaagaagctgagcaagtgat

SEQ ID NO: 1440 - DNA, 319 bp, Glycine max
  unsure at all n locations
agggtatgcgaaatattcgactntgcgcgatgccgtgaggttntatgagaggatgaggtgtgatgaggttatgcccgtggtgtatgattttacctacttgttgcagctgtcgggggagaatttggacctcaggagggggagggagattcatgggatggtgataactaatgggtttcagtccaatttgtttgccatgactgctgttgtgaatttgtatgccaagtgtatgcagatcgaggatgcatacaagatgttcgagagaatgccgcagagggacttggtttcctggaacactgtggttgcgggttatgcacagaac

SEQ ID NO: 1441 - DNA, 465 bp, Glycine max
  unsure at all n locations
atatttatacatgataaaattccaagtagtgtatacaacaatagttaagcaatcacaatcctttttaactcaaatcaaatacaaaatcatgtaatgaataataagttatgttgctttacactgggtgtcaataacattaacaattggtccatcctttataatagttctttgcaattcacaaacacgtgttacaccagaggagcttgnacttcgattgaaggctctccttccaagaacactatttcctactgcactcttgccattgccagtacgtccgactaaaactagtgtcctaacttcattagacgaggatgtttttgccattgatagtaacaaatttatgttacagctgcaaggaaaatatatcataaataanaatttagcaatagaataaattatacacacacacacatatatatatgaacatataatgtaattacaactaataaacatttaanaaacaaa

SEQ ID NO: 1442 - DNA, 470 bp, Glycine max
  unsure at all n locations
agctaccatgttcacctcatgctcaactgcctctatcttaaaacaggccctgtggtcatttggatgcttaattgtgtaaaatagattgaaggtaaccttttgatcatctacactcatttataggttaccatttccaatgtccactacatacttagcctcaacgtgaaaggatggcctaagatcaatggaatttcagcatcttcctctatatccatgatcacaaaatccacaaggaatgtgaattgacgaaccttgaccaacacatcctccaccacatcgtaagatcttgtaattgaatgattagcaagctgcaatgtcattctggttggtgcaatctctaagttcctgatccttctacacataaataggggcattagatngatgctagccctcaaatcgattagttcttttccaactgatacaacacctattgagcacgggatactcatactccctggatctttgtcctt

SEQ ID NO: 1443 - DNA, 419 bp, Glycine max
actaagcgtggaaaattaacatatcataccattcttcgacttttattgattatttgcataattactttcgatgagttttgacaatctattgtagaatatttttataggacctagattcttgctgtaatatttcaacataaacatcaatttatatatgtacataataatacttgaacaataattttaactcctcaacagaattgtacattaaagtgtttcaagattttgcaccactacacctaatttaaattatatttaatttcattattgttgtgataatctctttcatttttaaaccatgatattgatacgaaattgtattcgtccaaaacaataacaaatctctattaaagaccataaacacatgtaatataaatatatgtcttcaacataatttatttcatgtgcaataatgaatc

SEQ ID NO: 1444 - DNA, 453 bp, Glycine max
tttagatgatgcagatgggtttgtatctacctcatgcactcctctaatgactatggcatcatttctggcgctaaactgctgggagttggaggccatcttctcaattaaatttctggcttcagcaagagtcatgtctccaagggctccaccactggcagcatctatcatacttctctccatattactgagtccttcataaaaatattggagaagaagttgttctgaaatttgatggtgagggcaactggcacatagtttcttgaatctctcccagtactcatacaggctctctccactgagttgtctaatacctgagatatccttcctgatggctgtggtcctggaagcagggaaaaattattctaagaatactctcttaaggtcatcccagctcgtgatggaccttggagcaaggtaatacagccagtcctttgccactccctctaatgaatg

SEQ ID NO: 1445 - DNA, 472 bp, Glycine max
  unsure at all n locations
atccttagagtcacctgcggctgcagcttgcgtgatccttgaagttnttctatcatcatagtttctaaatctttggtttccttgattgtcacaacaatgtgcacaaatttgggatctaacgagcatagtatcttctccataattcttacatcttttaacttctcaccatttctttctagttgatttgaaactacgggaattcttgaaaaataatcagaaatggactccgactctttcatatgtaaggattcaaactcacctcttaagagtttggagacacaccttatttactttgtcttctcctttgtgagaggtttgaagcttatctcatgcctccttagcgaatgttgcatcagaaatcttctcgagcgcatcatcatctaatgcttgaaagatgaagaagagagctttcttgtctctctttcttgaatcctttaaagtcccttttgtgcttgggataatgaagtctcat

SEQ ID NO: 1446 - DNA, 420 bp, Glycine max
  unsure at all n locations
ggtctgccaattaggtgtcaattcatctatatgatcactaacagaaagaaaccactctatctctcgtcgccacattgctttcttctctgaacgcaggggctctaatctccaaagttggccaaagagggtagctgcaaattcagcaaagaaatgaacaacaacaatcaaagtcaagaatagcaaatgaataaaattcaccacaccaattaataaaaaataaaaacacagtaactgcttcaagtgtgcattttgcataccacatagattggttatggcatttgagatagccaaggctgtagcgaccccatttccacaacctgacatatcttctccaagtaacaattttgcaaacctctccttcatcatctcaatctctacaagtgagaatgaanatcanatctcatcatactgatatcatca

SEQ ID NO: 1447 - DNA, 461 bp, Glycine max
  unsure at all n locations
gcgcaacaaatattatattgttgcgtgatcagtgtaaatcactatctttgatcccaccaaataagatcgaaatttctcaagtgcaaacacaattgccagcaattctttctcagtggtggcatagataatctgggcatcattccaaactttgctagcataatagatggtatgaaacattctgcccttccgctgccctgccctagcatagcacctactgcataatcacttgcatcacacatcaattcaaactcttgtccccagtctggtgctataatcacataagcagaaaccaatttggctttgagagtgttaaaggcttctaagcattcttcattgaatacaaacacaacctccttgttcaacagattgcttacgggtttagaaantttggagaagtttttaatgaatcgccaataatatccagcatgacccataaagctgcgtatgccctttacattaac

SEQ ID NO: 1448 - DNA, 377 bp, Glycine max
aacttctccttcctcaggtgtacccaaacccaatcacctggttcaagcatgactatctttctgcttttggtggcttgccttgcataactcgcatttttcttttcaatttgagccatcacttgctcatgcagcttcttcacattctcagctttagcttgtgcgtccttatgcttaaacatagcaatgttaggcatatgcaacaaatcaagaggagtcaaaggactaaatccatacactatctcaaatggtgaacaattaagtgtgctatggacagcccgattataagcaaactcaacatgaggcagacatgcttcccaagatttaagaattttctttaaaacagtcctaagtagtgtgcctaaagtcctattgactac

SEQ ID NO: 1449 - DNA, 392 bp, Glycine max
  unsure at all n locations
actggatgcgttggtcaactgggtaacccagctggccttgaatcatatatctgtacctgtcgcaagggtttgtggtttgtgctcctctgctgaccaccatacagaccttngcccttccatgcagcaacctggagcaattgagcagcctaaagcttatgcagcaaatatatacaatagacctcctcaacctcagcagcaaaatcaaccacagcagagcaattatgacctttccagcaacagatacaaccctggatggaggaatcaccctaacctcagatggtccagccctcagcaacaacaacagcagcctgctccttccttccaaaatgctgctggcccaagcagaccatacattcctccaccaatccaacaatagcaacaaccccagaaac

SEQ ID NO: 1450 - DNA, 311 bp, Glycine max
aatcatccggatctgagatgggcaagtcctctacaacaacaatagactgtcccttatttccaaaatgttgctggtccaagcaagccatatgttcctcctccaatgcatcagtggtagtaacaacaacaacaaagacaacaagcaactgaggccccttcttaaccttccttagaggagttagtgaggcaaatgaccatctagaatatgcaatttcagcaagaaacaagagcctccattcaaggtctgacaaatcagatgggtcagatggctactcaattgaaccaagcttagttccaaaattctgacaaatt

SEQ ID NO: 1451 - DNA, 352 bp, Glycine max
  unsure at all n locations
acatgcttttttgggtgtcatgctacaaaggagagagcaagaaatgaagagtcaatggttgatacatgggcggaaatgaaaaagatcatgaggaagtggtatgtgctggctagttactcaagggacttgaaattaaaagctccagaactaaccctatgaaacaaacgggttgaggagtatttcaaggaaatggatgtgcttatgattcaagcaaagattgaagaagatgaggaggtaactatggctcgatttcttaatggtttgactaatgatatccgcgatattgttgagttgcacgagtttgttgaaatggatgattngcttcacaaagcaatccaagtagagcaacaat

SEQ ID NO: 1452 - DNA, 359 bp, Glycine max
agcttcttagtttcagatgatgcagatgggtttgtagctacctcatgcactcctctaatgactatggcatcatttctggcgctaaattgctgggagttggaagccatcttctcaattaaatttctggcttcagcaggagtcatgtctccaagggctccaccactggcagcatctatcatacttctctccatattactgagtccttcataaaaatattggagaagaagctgctctgaaatctgatggtgggggcaactggcacatagtttcttaaatctctcccagtactcatacaggctctctccactgagttgtctaatacctgagatatccttcctgatggctgtggtcctggaagc

SEQ ID NO: 1453 - DNA, 363 bp, Glycine max
ctcacactgatgtccgattcggggacatattatatcgagactctctatattgaacaacggaagctctcgggagaatcgaatggtcataacttttcacacgaatgttcgattctgggacataactcatctagacgctcgaaattgaacaacggaagctctcgagaaattccaatggtcataagttttcacacggatgttcgattcgggaacataatatatctagacgctcgaaattgaacaacggaagctctcgagagattcgagtggtcataacttttcacacgaatgttcgattccgggacataatatatcgagacgctcgaaatggaacaacggaagctgtcgagaaattcgtatggtcat

SEQ ID NO: 1454 - DNA, 311 bp, Glycine max
agcttttttatctagttagatctaaattatcaggtacatgagcataagagacacaaccaaaaactctaaaatgttgaactgatggcttgattcttctccaggcttctttgggtgttatgtccttcaccgctagcgtggaactggggtttaatacatgcacaacccaatatactgtttctggccaaaaagtgttaggcactttcttttcaatgctgcgaaccaaattcatgactgtgcgattctttcattctgcaacaccattttgatgcggcgaatatgtagctattaatcggctgtgcgctccatgcaca

SEQ ID NO: 1455 - DNA, 349 bp, Glycine max
  unsure at all n locations
agcttttaccaaagagttntactctctggtaaacgattaccagtttactgtaatcgattaccagtagcaaaatttgttttcaaaagctttcaaattgaatttacaacgttccaattaatttcaaaatggtgtaatcgattacaagattttggtaatcgattaccagtgtgtttgaacgttgaaattcaaattcaattgtgaagagtcacatcctttcacaaaaatgctttgtgtaatcgattacaatgatttggtaatcgattaccagtgataagttttgaataaaaatcaaaagatgtaactcttccaatggttntcaagtttttctaaaggttataactcttctaat

SEQ ID NO: 1456 - DNA, 484 bp, Glycine max
  unsure at all n locations
tgtaccctacacagaatataaggataattgtgtattttaaaatgagaaaaaatacttttttttgtattttatatatttttctttaattaaaatttcaattttaattaattcatgtaataaatgctagtatgatatataaatattgcttatattaaatattagtatgatatataacttaatttagtaaatttcaattntgatttgacaataacaccaaagatttttttgtaaagaattacatataaattttatcttttaaaaatggctaattaccatttttttttgtgtttcttcgtgcaagtattttttttgtaataccaaacatgtttcatatgtaaaaatttgtgaagtaaatnttacatttacttatntatatatgtcttctgagaataaaacatacaattaagaaatttaattaatattctgcattatacactgaaaatatttttaatttcttattacattcttngnctnttatatattc

SEQ ID NO: 1457 - DNA, 463 bp, Glycine max
  unsure at all n locations
agcttgtcacttgatgtcaaccagtctgctatttgttctcttgtcatcttccattatatttagcaatttggaaatttattgcttttacaccaagtgatgtttcatagtttagttattaacatctacgatcaaactttatggttagcataaactggaacgctgaacaacagtaggtgttggctttgggttcatgctttctgatagaacaagtactttgaagacatgttttaataatatttttcataattttgaaactgttttatttaagcttcagcagttgttgcttgctagtactcatgctatgttggttactctctagtctacttactactaatgttggagctntttcccatctatgctctctatatccagtatttgaagttaagagctcttcanaggcaatcctatacacattacttctatgaagcaactgtcggagctggtcttccaatttgtagcactt

SEQ ID NO: 1458 - DNA, 483 bp, Glycine max
  unsure at all n locations
cactcaagctntacacgaatgtccgattcgggcgcataacaaattgaacaatgaaagctctcttgaatttcagatggtcatagactttaacacataagtctgattctggcacatcacatatagagaagctcaaagttgaacaatagaaactctcaagaaataaaaatagtcataacttttaactcggacgtctaattcaggcgcataatacatcgagacgctcgaaattgaacaacgaaagctctcgagaaattcaaatggtcataacttttcacacggaattccgattcatgcggatagtatatcgagacgctcgaaattaaacgtcggaagctgtcgaaaaattcaaatggtcataccttttcacatggatgtccaattcggatgcatcatatatcgaacaacggaagctctcgacaaattcaaatggtcataactnttaccacggaggtcagaatcacgcgcataatatattgagacgct

SEQ ID NO: 1459 - DNA, 352 bp, Glycine max
tgacaacttatgactatttgaatttcacgagagcttccgttgttcaatttcgagtttcactatatgtgatgcgccaaaattggacattcgaattaaatgttatgaccatttgaatttctcaagagcttccggtgttcaattctgagcgtctcgatatgtgatttgcctgaatcggacatccgtgtgaaaagttatgaccatttgaatttctcaagagctatcgttgttcaatgtcgagcctctcgacatattatgcgcctcaatcggacatccgcgtgaaaagttatgaccatttgaatttctcgagagtttccgatggtgaatttcgagcgtgtcaatatattataagcct

SEQ ID NO: 1460 - DNA, 343 bp, Glycine max
tatgattccatgtgctgcgaattcttggattggatgtttatgtccattggcttccccagcccagttctgtacttggatcatggagtgtgtttcttccacttcctttagtgtggcagacaatggatccatttatggtcacttcacaggacagcggggtcttagacaagaggatcctctctccccttatctgtttgtgctctgtttggagtacttttccagagatatgagcagcctcaatgatgatgccaattttaaatttcatcccaactatgcaggtattcagctatctcatttggcttttgcagatgatattatgcttctatctagatgagatatccattct

SEQ ID NO: 1461 - DNA, 469 bp, Glycine max
  unsure at all n locations
tatatccatggcctcctatggtggtgagtttcttctaaactcatcttctccttgaagtggngtctcctctctctctcttccttctccattccgctgccattcatcttccaagaagcaaaggaatccattgatgaagaagatcctaggcctacaagctccaatggagcttacatcatgtggtatcaagagcatctccatctaggtgatgttcttttgcttcctctatctttttgttcggtgaattctctntaattccttgttcttcatcttattctccatgtatatcctccattgtcttgtggtttggtgctgttaagagtagattcaaaaaaaataaaccaattaaatcttagatctacacttgttcttgcatttctatggttcanattntgtagatctactcttgaatcangtttttgtgtngattntaggatctatncattttcattcataatattcttgtgctgat

SEQ ID NO: 1462 - DNA, 292 bp, Glycine max
agctctacatgtctcatgacacctaagcacacttagtggataatcttggacttgatcttgttttagtgagttgaaccatagctgatattcactaatcataatgagtgaaatatttggctccaaagatggctccacaaattaaaattcaagttcaagtgaagattgaatacaaaatcttacttgctatctatattgcgggacacttacgctatatataaaagctctgcgtgtgcatgttctcaactcttgacattcgagaaattacacttccaggcttagaccttatttgagg

SEQ ID NO: 1463 - DNA, 277 bp, Glycine max
  unsure at all n locations
gatcttccgttgttcaatttcgaccttctcgacatattatgcgcccgaattggacattcgtgtgaaaagttatgactatttgaatttcctgagagtttccgatgtttaatttcgagcgtatcgatatattataagcttgaatcggacatccgcgtgaaaagctatgaccacttgaatttctccagagctttcgntggtgaatttcgagcgtctccatatgtgattcgcccgaatcggacatccgtgtgaaaagttattcccgtttaatttttcacaa

SEQ ID NO: 1464 - DNA, 217 bp, Glycine max
attcaaatagtcataactattcatacggatgtcccattccggcgcataatatgtcgagaggctcgtaaatgaacaacggaagctcttgagataatcaactggtattacctttcacaccgatggtccatttacgccgaacacatattatgaagctccaaaatgcaccaccggagcttctccgaaatttcaaagggcataaattttttcaccgatggcc

SEQ ID NO: 1465 - DNA, 365 bp, Glycine max
  unsure at all n locations
gtactatcttcatgcgattcctttntctccctcctctaatattatctcacaaatcccaacggttaagggatgctcaattgaatttcgaacaacatatccaaattttactacaatccaatggttaacgaatccaagatcgtatttttaccaagacagttttgggtttctgcgggaaaataaaatgctacaatgcgaagggttttatactaagctcagacatgattttgaaattcccaacggtgagaatggtcggaattgggttttgaaccgggtgcttaaatttcacgatgatccaacggtgaatgagtccgagatcatcattcttctgagacatgtttagtggtctacgggaaaagagaggttga

SEQ ID NO: 1466 - DNA, 387 bp, Glycine max
agcttattcatggatattgtaggacgtttacttggtatgccacgaagcattgtctcggatcgtgatcccttattcgtgagtaaattctggaaggagctcttttctctcagtgggacaaagctctgcctcagctccgcttgtcacccacaattcgatgagcaaaccgaggttgcaaaccgcatcatcgaacaatatttgagagcatttgttcatcaaaacccttcgcaatgggggcactatttgctgtgggccgaatggtcctacaatacatcttgccactcagccaccggcgtcacgccgtttgaagtaaccttcagcaggaaaccacccaatttccctcattatgtcacaggaactgccaaggtcgacgctgttgacgatatgctc

SEQ ID NO: 1467 - DNA, 374 bp, Glycine max
  unsure at all n locations
agcttctggtgggacatcttgacttgctgtttaatctgacattcattacacattctgccttcttctattatcagattgggaatgcctctaacagcacctttgtcaatgattatattcatgcctcttgagtgcagatgtacaaatgtttgatgccataatcagacttcatcttctttggaggatagacatgtggaggagtaactgggttcttgagatgtccatangtagcagatgtgctttgatctgctgcccttcattagaactatactcttgtcatttgtcaccaagcattctgactttgtgaagtgtacattgaattcttcatcacacagctgactgatgctgataaagtatgcagacactcccttcaccaa

SEQ ID NO: 1468 - DNA, 396 bp, Glycine max
agcttaacaaggctctctgtggcttataaaacatgccccaagacagtggtttgacaggttgaaatctacttttcttcagtttggctttgtgggaagcaaatgtgattcttatctgttcatctacacacatcagaagcatactgtccatcttttagtctctgtgaatgatatcatcatcacaagcaattctatctctcttattcaacagctaacttccaaactaaacactgccttctctcttaagcagctaggtcatttggattattttttgggactagagatcaaataccttgctaataattctatactagggactcaaagcaaatatatttgtgatttacttcacaaactcaaatggctgaagcacattctatttcctctcccatggtttctaac

SEQ ID NO: 1469 - DNA, 388 bp, Glycine max
  unsure at all n locations
agcttcttgtgattcacaaagctactccaccctgtagttaacaagtgccggcgcggcgtgcccctataaatgtgcctaaatttccatgtctcaccatgaacatccttggcaaggatgttctgaacgggagggtccgcggaatattccaaccgaggaaaaattgtctcagcacaatatctgggaacagaaaagcccccaccattgttggcatcaaactgtgtcaaggttttggcaaaagaaggggatttatctttattttcagatccattgatgcctacaacagcatcatcctcaaaatcaccctcgtttctggtcaaatgaacaagcctaagctntacataaacctcatcagtttcaagatcagccatgtattagatagctccaactt

SEQ ID NO: 1470 - DNA, 438 bp, Glycine max
tctcatttatctccaccatccggtccaacttccgcttgaactctgggttttcaacatcaagaacggctgggataatccgatcagtcgtgcggtttgtctgcataaataatccagacattgaagcttgagtaactggttgtaatatacgagttcatcattagatgcttgttgatcgactttattagtgatagtttctaatgctaactcgaggctccattactttcattatatcatgttctgttactaaattgactatgtaattgagaatggataaaaacaaatattgattatacaaaataacaatggaggaatggtgattatagaaaaatgcaaacacaaactaacctcgataatgacatgcatgtcaaattcttttgtgttaagtccaatgccttcgtagaaagctgtacgttggcaatcatcgagatacattgtgac

SEQ ID NO: 1471 - DNA, 434 bp, Glycine max
  unsure at all n locations
tcatgagagagtcaaagatcaaattgagaggaaaaataatagctatgctaaacaagccaacaaagggagaaagaagttgtcttcaaacccggagattgggtttgggtgcacatgagaaaagaaaggtttccggaacaaaggaaatcaaaacttcaaccaaggggagatggaccatttcaagtgcttgaaagaatcaatgacaatgcttacaaagttgagctgcccggtgagtataatgttagttccaccttcaatgtctctgacttatctctttttgatgcagatggagaatccgatttgaggataaatccttctcaagagggagagaatgatgaggacatgaccaaaagcaagggccaggatccacttgaaggacttggaggacctatgancagggctagagcaaggaaagccaatgaagctcttcaacaagt

SEQ ID NO: 1472 - DNA, 444 bp, Glycine max
  unsure at all n locations
ctcaagcttggcgagagttaaacaagaacactntntggccaatatggaactccttcctaagaatcctagagtcatgaatcctcttcactttctctttgtagatcttggatttctcataggcttctaagcgaatctcttcaagttcttgcaattgaagcttcctttccatacccgcttcatcaaatgccatgttacaacccttcaccgcccaataagtgcagtactcaatctccaccggaagatggcatgccttaccaaaaaccaccatatagggagacatccccaaaggtgttaggtaagctatcttgtgggcccataaagcatccaaaagtagcttgctccaatccttcctattaggatgcactaccttctacaacacttgcttgatctctctattaaaaacctccacttgcccattagtttggggatgataagctatagcaa

SEQ ID NO: 1473 - DNA, 436 bp, Glycine max
  unsure at all n locations
agtaagatactattgctgtggagttgacgtacaggttctcactgctgttntgtgtctggatatgtgtttaggtgtgaaatatggaggtaaagctgcagacacgtgggcagtaggagttactttatactgtatgatattgggtgaatacccttttcttggagacacacttcaagatacatatgacaaagtaagaaatacacactcagacatatatgacaaagtaagaaaaacatgcatgtttttattataattacaacaaaaatgtcattctgttttcaaaagttctcactttactaagtttcgtaactttttcacccggatattatactctgattggcattcatattttctggtgcctatatcacaatcttagcttgctattttcttcctgatccagatagtcaataatcctttagtactccccaacgatatgaat

SEQ ID NO: 1474 - DNA, 442 bp, Glycine max
  unsure at all n locations
tgagggaanacttgatgccttggtgaacctagtaactcagcttgccataaatcagaaatctgcatctgcacctgttattgttgcaagagtttgtggtctatgttcttttgctgatcaccatacagatctctatcattctttgtagcaatctggagtcaatgagcaacctgaagcctatgctgcaaacatttataatggaccccctcagcagcaaaaccaacaacaacagaataattatgatctttcaagcaacagatacaatccaagttggaggaatcatccaaatctgagatgggcaaatcctccacaacaacagcaacaacagcctgtccctcccttccagaatgctgctggtccaagcaggccatatgttcctcctccaatgtagcaacagcagcaacaacaacaacaaagacaacaagcaattgaggccccttctcaa

SEQ ID NO: 1475 - DNA, 433 bp, Glycine max
tccttaagaagattcctaaagaagcttgagcttagctacacatacctctctaatagctaagctcacctccttgagatgagaagctagagcttagctacaccccccctataatagctaagctcacccccatgacaaaaaacatgaaaatacaaaaaaaagtccttactacaaagactactcaaaatgccccaaaatacaaggctaaaaccctatactactagaatggccaaaatacaaggcccagacgaaggaaacacctattctaatatttacaaagataagcgggctcatacttagcccatgggctcgaaatctaccctaaggctcatgagaaccctagggccttcccttggatctctagccaatctacttggagtcttctacccaatgcccttgcaggtaggattgcatcattccctccaccttggaaaga

SEQ ID NO: 1476 - DNA, 443 bp, Glycine max
  unsure at all n locations
ntaagaganattcccttcttcttcttatcattctcctcatgttgattcaatctcttcaattccattcatgttcctgtaactttccaaacaaggtagcaagagacatgttagtaagatttcttgattcaataatggtcattacctttggttgccattccctacttatgcatcttaacactttattgacaagatcttcatttggaaatatttttcctaaagatgcaagatgatttattatgtaggtaaatctcttttgcatgtcttgtatagtttcatttggattcattctaaataactcatattcatgagttaaagtatttatcctagatctttttacatttgttgtcccttcatgggttacttgtaaggtatcccacatatctttctcatgtttgcaatttgacaccctanagtattcatctattcctaatgcagatgtaatg

SEQ ID NO: 1477 - DNA, 450 bp, Glycine max
tccaatgagagaaatgggtctaatttatcaagctcctatgggccatcaacttttggaacaagtgtagtaaaggaggggttggccgcctttgggattacaccatgttcataaaagtcagcaaaaaccttcaacacatcatcctttagtcttggccaattttttttaaagaacttaagttaaagccattcgaagccagacttttgttactatcacaatctcatattgcttctctaatctcactctcctcaaaccttcaaacaagcatatcactctccacatcagttttatgtttgaacgactctttaactctccaaccttggtctaatcctccttcatcttgaaatctccttttaaagaaacacttcacattctctttaaccactcttggatccttctcccacttaccatttaccaataaaccacttattggaattttcatccttctccatt

SEQ ID NO: 1478 - DNA, 442 bp, Glycine max
tactgcgacgagtgcgcttcttgtaaagaatacggtatccgcactcacggcactgtataacgtcaccgggcttcagcgtattctccattccacaatctgcaacagatacaaacacaaaatcacatttcactcttaaaaccctaaaccctaaacacacacttttaacattggcaaaaaaggtaaacgaaaaacgcaattaggtcaaaaagagctgtgattagataagaaacctccgcatatgtagctgactggctcaggctgaggatccatcgctggttccagcgaggtgtaaaggaagaaggttctaggctttagcctttagctttctgctcaacgaagaaaatgtaaagtggctcagaatcagaggctctaaaacgaaggattgggcttcatcttcagcttttatgggcccaaattcgcaacttacatgtccaaaaccgag

SEQ ID NO: 1479 - DNA, 441 bp, Glycine max
  unsure at all n locations
tccatcacttttgacgactgttaagtgagattccttagcattggcctgataccttgcacataagtaagcacttagcatgacatatggtctatttttaattaagtagaggagtgatccaatcatacctctatatcttaactcatccactgatttacctttctcatctaagtcaaggtaagttaaagttgccattggagtagatgcttctttgcattnttccatgccaaatttcttaattagttttgtacaatatttcgtttgatttaggaaggttccatgtttcatttgcttgacttggagtccaagaaagaagttcaactctcccgtcatagacatctcaaattccttctgcatacaactagaaatttccttacacaaaatntcattagtagcaccaaatataatatcattaacatatattttaacaattagcaactcact

SEQ ID NO: 1480 - DNA, 455 bp, Glycine max
actaagcttctatccaaggttcgttcctaatttctctacaattgcatcacctctcaatgagctagtgaagaagaatgtggcatttaactggggtgaaaaacaagagcaagcctttgctttgcttaaagaaaagcttactaaggcacctgttctagctcttcctaacttttctaaaacttttgagctagaatgtgatgcctctggagtgggagttggagctgttttgttgcaaggtgggcaccctattgcttattttagtgaaaaacttcatggtgcgacccttaactaccccacctatgataaagagctttatgccttaataagagcactccgaacttgggaacattaccttgtttccaaggaatttgtcattcatagtgatcaacaatcacttaagttcattagagggcaaagcaagttaaacaaaaggcatgcaaaatgggtagagtacctag

SEQ ID NO: 1481 - DNA, 442 bp, Glycine max
  unsure at all n locations
ttaaatcaataaatcaatatcaatatattatataaaacaaagttattgattgtgtctgttacttaagacacatgacaaacgctgatgcagttaggcctcgcgtaattaaatattatttcccattgaagaaacaaaataaaattcaaaataagaaatcaatcaaacaccaagtaattctatcacacaataactctaaatttatttgttatattcataataacatgctattgtttaattatgtaaactgaaactgattgacgggaaaagaagaatgatagtttagataactcagaaccaacttaaataaacaattttaatgaccaagggcttaaaggatgaaaatatccaacatcttttaatattgtatgtacctttcagtagaatttttatattgatgaatgctaacaaaactcattntttaacttgatggaatccttactat

SEQ ID NO: 1482 - DNA, 442 bp, Glycine max
tcgtggcactttgccaagaccttttaaaggactgtcggctcataactctggatctcaatggcaaccaattattagaaggttttttgccagaatctttgtccaattgcattgatctggaggttttagatcttggaaacaatcaaataaaggatgtgtttccccattggcttcaaactctaccagaattgaaagtattggttgtgcgagccaacaagttgtacggtcccattgccggtttaaagatcaagcatggatttccctgtttagtcatctttgatgtctcttccaacaacttcagcggcccaataccaaaagcctacatacaaaaatttgaagcgatgaagaacgttgttatagataccgatcagcagtacatggaaatttctatttttgaatataataacatgtacagtgattctgtgattataacaacaaaagcaat

SEQ ID NO: 1483 - DNA, 444 bp, Glycine max
actcagctaataattatttggtaaaaaaaacatctacaatcagtcaaggagataagaaaaacatcatcctaaaaagtattatatcctaatatgtcccttccaacccttcaatccttgtttgatggaccatcaacggtattccaagtagctgattcataaaaaaagaaagcataatgaataccatttttatcttaaattgaaaaggctaagagattagttaaaaagataatatattttattgttgaacctgtgatgggggcggaagtggctataagaccctagacaatcccaaatcgatcattgataaccactgcaaaattaagattaattattacaaaaacagaggcaaatttaaagtatagataaaagaccaacaaatatgtcataagggttatcaaacaaaaaacttgaataggctatcgtattggagaaatagttagcatt

SEQ ID NO: 1484 - DNA, 338 bp, Glycine max
actcagcttaacatcagaccacttgcgggtgcaggaactacttcacatggacttgatggggcctatgcaagttgaaagcctttgaggaaagaagtatgcctatggtgatgtggatgattgctccaaatttacctgggtcaactttatcatagagaaatcacacacctttgaagtattcaaggaggtgagtctaagacttcgaagagaaaaagactgtgtcgtcaagagaatcaagagtgaccatggctgagagtttgaaaacagcaagtctactgaattctgcacatcttaaggcatcactcatgagttctctgcagacattacaccacaacagaatg

SEQ ID NO: 1485 - DNA, 399 bp, Glycine max
  unsure at all n locations
actatagaaactcagcttaacattcaattntgagggtctcgatagattacgggactcaatcagacatccgagaaaaaagttattgtcgtttgaatttgctcagagcatcaacattcaatttcgagcgtgtcgatatattacgggactcagtcagacatccgagttaaaagttattgtcggtcgaatttgctccgacgatcaacattcaatttcgagcgtactgatataatacgggactcaatcagacatcctagtaaaaagtggttgtcgtttgaatttgctcagagcttcaccattcaattttgagcgtctagatgtattacgggactcaatcagacatccgagtaaaaagttattgtccggtgaattagctcagagctttcacattcagtttcgagc

SEQ ID NO: 1486 - DNA, 434 bp, Glycine max
  unsure at all n locations
tgtcaaagagggaagcaagttagaaactctnttcaaagcaagaacattgtttctacttcgaaaccccttgaactacttcacactgatttatttggtccctctagaactatgagtttgggttgtaattactatggcttagttatagtagatgattactcaacgttcacatggactttgtttttgaaaacaaaaaatgaagcttttgatgcttttcgcanacttgccaaggtgattcaaaatgaaataggtcttaacattgtttcacttagaagtgatcatgaaggtgaatttcaaaatgagtcttttgaaatattttgtgaagaaaatggaatttaccacaatttttctgccccaagaacaccccaacaaaatggtgttgtggagaggagaaatagatcccttgaagaaggtgcaagaacccttctaaatgaaac

SEQ ID NO: 1487 - DNA, 425 bp, Glycine max
tgtgttctcccttgtagaactactaactgcagtaacagttgcggcccaactatccggtggtgatgactatagaatcaatgccttcacctcatcctcaaatttaatctgcacagattccaattgggcaagaatagtattaaactcattaatatgatcagtgacagagataccttgtcccatcttgaggatgaaaacccggcgcgtcaagtatactttgttggctgctgacggcttctcgtacgtatctgataatgccttcattaagcctgcagtagtcttctcgttcacgatgttgaacgcgaggtgcttggctaatgtcgatctgatcacgccaagagcttgtcgatctagcaagatccattcttatggcttcatgtcctctggcttaacccctgataagggctgatacagcttcttgtgatata

SEQ ID NO: 1488 - DNA, 417 bp, Glycine max
  unsure at all n locations
tagcttcaccataaaaaatggtgtcatccgctttctgttcgatgctgatcggcacataattagcaccaaccagatagcctttgaatagattattctcctcagccctgctcataacccaatcaaaccttctgcgagagataaacaagaggcgactaaggatccccttggcgaatgcccttttgagggataaaatcagaattcggacttcattcccaaaacagaaatagaggcggatatgacacatcctttcatccacttaacccagtgcggactataacctgttctccccagcatataaaacanaatagctccagataccgaatcatatgccttttcaaagtcaaccttgaacactangcatgatcgattgcttctcttatcggcatcaataaccctatttgctatgactacactatg

SEQ ID NO: 1489 - DNA, 438 bp, Glycine max
  unsure at all n locations
ntgcacgaagttacttggtaaaactatggcacatgttttcgggtagaattgagacttgtgaatgtaatgcaatttctgtaatgatattgataagtagggcctattagagtaggaaggccattatagcatgtttgcccgagtaccagtatattgagttattttctctaaccaacatgtattatgcattttgttaggatggacccaaagaggtccaaaagaaggatgtttaagtggctcaaagattataaaagataatgttttttatttataaattatagttctttatttaatttatattaaaataacatgatgttgagacttggataattattatccattgattaaatgtcccttagattatatatgtatattcatctttacctattatcatttattaatgaaatatcaagtttatcttattctctgtatagctgtatg

SEQ ID NO: 1490 - DNA, 436 bp, Glycine max
  unsure at all n locations
agctattgttgaataaatcgactcccatattgatccgcactaccaatgataataaaataatcaaatttaattcttcagggtgacagcatataatgaccaatagcaaacaatatacctgaattcaacaacatgacccgcaatttcagagagctcaaaacactttgttttattggttttaaactcttccaacagagaagaagcaaaactttcatcaatgttcccagtatctgcatgccaaggtcccatgaccccggccaaattcctcattccagaagcaaaacgcatattcagttcattgtgcctaacaggacttgcagatccaactggngaagtggatacaacagagtttgccattggacttcctgggtaagacatcccgacaccatatgcaggatttccataataaccatgaggagtggagctgcctgattaccac

SEQ ID NO: 1491 - DNA, 417 bp, Glycine max
  unsure at all n locations
agcttatgctgcanatatttacaatagacctcctcaacctcagcagcaaaatcaaccacagcagagcaattatgacctttccagcaacagatacaaccctggatggaggaatcaccctaacctcagatggtccagccctctgcaacaacaacaaaagcctgctccttccttccaaaatgctgctggcccaagcagaccatacattcctccaccaatccaacaacagcaacaaccccagaaacagccaacagttgaggcccctccacaaccttccctcgaagaacttgtgaggcaaatgactatgcagaacatgcagtttcagcaagagaccagagcctccattcagagcttaaccaatcagatgggacaattagctacccaattgaatcaacaacagtcccagaattctgacaagct

SEQ ID NO: 1492 - DNA, 461 bp, Glycine max
  unsure at all n locations
tgttgatttcttcaggatgatcaacacaatattgcatttgctgcttcaattttggcctgcagatttcacaaataatacatttactatgcttatttggtaggtttaaattttcatttttttaagggaggtataattttttattaaaagtcattgtatttttttagaattttattttatgtgaggtcaacttaagttttttattttacacaaatgtaatttattttattgccatattatccaattcattaatttgatttagcaacacactgaatttctataagtgttaatatttagcaacatattctctagcacatcttttatatcacacattctattatagattaaaatttattacaaactaaaaaattaacagagaaataactcattaaataagaagtgagactaacaaaaattgtgattnntaataaattctaatcaatctttaataatatatttaaatg

SEQ ID NO: 1493 - DNA, 400 bp, Glycine max
tgaatcggacatccgtgtgaaaagttatgaccatttgaatttctcaagagcttccgtagttcaatttcgagcttctcgacatattatgcgcccgaatcggacatacgtgtgaaaagttatgaccatttgaatatctcgagagcttccgatgatgaatttcgagcgtatcgatatattatacgcctgaatcggacatccgtgtgaaaagttatgaccatttgaatgtctcaagagcttccattgatcaatttctagactctcgacatattatgcgcccgaatcggacattcgtgtgaaaagttatgaccatgtgaatttctcgagagctttcgttgtgcattatgagcggttctatattttatacgccacaatctgacattccagtgaaaaggtattaaca

SEQ ID NO: 1494 - DNA, 380 bp, Glycine max
  unsure at all n locations
agcttgccgccacggagtttttcgactatgctcttgtgtggnggaacaagctacaaaaggagagagcaagaaatgaagagccaatggttgatacatggacggagatganaaagatcatgaggaagcggtatgtgccggctagttactcaagggacttgaaattcaagctccaaaaactaacccaaggcaacaagggggttgaggagtatttcaaggaaatggatgtgctcatgattcaagcaaatattgaagaagatgaggaggtaactatggctcgatttcttaatggtttgactaatgatatccgtgatattgttgagctgcangagtttgttgaaatggatgatttgcttcacaaagcaatccaagtggagcaacaa

SEQ ID NO: 1495 - DNA, 458 bp, Glycine max
  unsure at all n locations
ngagaagttgcatcaacaagctgaccagataatgcataacattatcaatgagcatagagaggctaagtcaagtgccacaggagaccagggagaggaggaagttcttttagatgtgctcttgaagaaggagtttggcttaagtgatgaaagtatcaaggctgtgatctgggtaaggatagacattttccaccaattttattgcatgatagaaaaatggagaaaagtatgctttactgccttcacactttagtttcaaaaactattttgtattttctaaaatgattagtaatcattttgtcattcaaaatttaataggttttgcaaattgctttgaatataagtgtttaaaaagaaaagaaaaatataaacagttaaggacatattttctcatcctctttctgtaagtgctttattcaagtatctagaaggcaaacttttaaaaattagaaatgtgatat

SEQ ID NO: 1496 - DNA, 354 bp, Glycine max
agcttgaaattgaacaacggaagctctcgatttaatcgagtggtcataaattttcacacagatgtccgattcggggaaataatatatcgagacgcacgatattgaacaacggaagctctcgagaaatttgaatggtcattacatttcactcggatgttcgatccggcgacataatttatcgagacgctcgaaattgaacaaccgaagctcttgacaaattataatggtcgtaacttttcacgcgaatgttcgaattcgggacataactcatctagacgctcgaaattgaacaacggaagctctcgacaaatttgaatggtcataatgtttcacacggatgtccgatctcggaac

SEQ ID NO: 1497 - DNA, 451 bp, Glycine max
  unsure at all n locations
agcttcgacaccctaatgttgttcaatttcttggagctgttactgacagaaagcctcttatgttaattactgagtatctgagaggagtatgtgaatgcatataactagacacctaggttctgatgctctgaacttatgcaatcttatgctntaagattaaactctactaaatctctatttcatgcccatttttagggtgatcttcataagtacctcaaggacaaaggtgcacttagntccttcaacagccatcaatttggcttggatattgctaggtatggtgtgtcataccttaagtttcctttatntttctttntaaaatttttataaagagaacaaacagaaaaccacanaacangagaatcattaacccatagatctcttcaacctctccatanatctggtatatanatataaaccactcctaaataattctcacacgtcagttact

SEQ ID NO: 1498 - DNA, 448 bp, Glycine max
  unsure at all n locations
agctngaaggggtgtaacccatcattctctatagtagaacagccggaacgngtctactatcattattatcatctccctctccatcattggagatgctacttgagctgctaggtcccttcacctctgggcatattccttgaacaactcatgctccttcttgcacatgttttgcaattgcactctatctagagccatgtccgagttgtattgatactgcctgatgaaggcagccattaagtcttgttaagaatggactcgggaaggttccagaatagtataccaggtgacgactgccccaataagagtttcctggaagaaatgcatcaacaatttttcatttttcgagtatgcccccattntccctactgtacatttcaggtgattcttggggcatgtagtccccttgacttatcaanatctgcaccttgaacttcggagggataacgat

SEQ ID NO: 1499 - DNA, 394 bp, Glycine max
tgcgggagtttgtgatagcgattatgacgttgatgttgatgatagaaaagcactaccggatttgtattgtttatgggcgaatgagttattacatggagatctaagaagcaaggcattgtgacactttctacttgtgaagccaagaatgtagctgcaacttcttgcacatgtcatgccatttggctaataagaatgttggaggaacttcagttgttgcataaggaaagcacaaagatctatgttgataatagatctgcataagagcttgccaagaatccggtgttccatgaacgaagtaagcatatagatacaaggcgatcattcattagagagtgcaataccacgacagaacgagaactgacttatgtgaaaactcacgatcaagttgcggata

SEQ ID NO: 1500 - DNA, 366 bp, Glycine max
  unsure at all n locations
agcttgtgcctcttcacatctgaaatatgaatgtagcatatagatccaaagacccttaggtgttntgctgatggcttcttccccgtccaagcttcaattggagtcttgtcttttacagacttagttggacatctgttgagtatgtaaacagcagtgtagactgcttcagcccagaatgtcttaggtagtcccttctccttgagcatcgatctagccatttccataattttgaaattctttctctcggacactccattntgttgaggagaatatgcgactgtaagttgtcgctcaatgccttcatcctcacaaaatctttcaaactcgcgagaggtgtactctntgccgcgatcacttcttagtact

SEQ ID NO: 1501 - DNA, 461 bp, Glycine max
tgtaatcgattacacacatactgtaatcgattaccagaggatgtttttataagacattctcaacagtcacatctttgtatctggttcttaagtggccatcataggcttatatatatgtgactagagacacgaatttgaaaaaagtttttcagaacaaaaaaggtcttatcctcttaaaaagcaaaatcgttttatcctcttacaaattccttgtccaaaacacttgtgattcaataaggaattatttgagtgctcaaattgttcaatttatctctttcaagagagatgtcttcttctcttcttcttcattctgaaaagggattaagagaccgatggtctcttgttgtgaaaggattctaaacacaaaggaaggattgtccttgcgtgtttagaatttgtaaaaggactttacaagataatggaactctcaagcgggtgcttgtggactggacgtacgcaca

SEQ ID NO: 1502 - DNA, 468 bp, Glycine max
  unsure at all n locations
ntaggcaaattcaaacgacaataactttttactcggatgtctaattgagtcccgtaatatatcgagacgctcgaaattgaatgttgaacctatgagccaattcaaacgacaataactttttactcggatgtctgattgagtcccataatatatcgagacgctcgaaattgaatgttgaacctctgagccaattcaaacgacaataactttttactcggatgtccgattcagtggtgtaatatatcgggacgctcgaaattgaatgttgaacttctgagccaattcaaacgacaataactttttactcggatgtatgattgagtcccgaaatatatcgagacgctcgaaattgaatgttgaacctctgagccaattcaaacgacaataactctttactcggatgtccgattcattgacgtaatatatcgcgacgctcgaagatgaatgtcgaacctatgagccaattca

SEQ ID NO: 1503 - DNA, 395 bp, Glycine max
  unsure at all n locations
atcctcagagacacctgaggcatgcaagcttcaacattcaaattcgagcgtctcgttatattatattatctagtcagacatccgagaaaaaagttattgacgtttgaatttgctcagagcttcaacattcaatttcgagcgtgtcgctatattacgggactatatcagacatccgagtaaaaagatattgtcgtttgaatttgctcagagcttcaacattcaatttcgagcgtgtcgatatattacgggactcaatcagacatccgagtaaaatgttattgtcgnttgaacttgctcagagcttcaacattcaagttcgagcgtctcgtatattatacgactcaatcacacatccgagtaaaaagttattgtcatttgaatttgctctgagcttc

SEQ ID NO: 1504 - DNA, 439 bp, Glycine max
  unsure at all n locations
acccgggattcttagagtcacctgccgcatgcaagcttatggtaatcangagttagttcctctctcttaaggaaaaactcaacattattntcattggatttacataatgaanaattgtcctaatgataaggttgatcacttcaaggctcatctagttactaatggtttcactcacgtttatggtgatagcttttcacttgtcaccaagatgccatttgtttgtctcttccttgccatgactcccatgtgttattgggctctatttaaactagacgttaanaatgtctttctacacaacgaacatggagagaaaatttatatggaacacctcattgtttttaggaggagtctaatttgggttataaacttcattgctctctttatgggttaaagcagtcttcctgtgcttggttccaagggttagtattggtattcaact

SEQ ID NO: 1505 - DNA, 300 bp, Glycine max
cacatactgtgatccatcaccataggattctatcaggaaacattctccacagtcagatcgatatatctggctgttatgtggccatcaaaggcttatatatatgtgactagagacacgagcttgcaataagctatacagaacagaataggtcttatcctgttaaaaagcgatgtcgttctattctcttacgaattccttgcccaaaacacttgagattcagtaaggagttatatgagcgctcaccattgacatggtatctctttcaagagagaagtcgtcatctcttcttcttcactctga

SEQ ID NO: 1506 - DNA, 363 bp, Glycine max
  unsure at all n locations
agctntggccaaaccccagcagcagttgttttcttagagacttgtcttagcaccttgtctttgagactgaggataattacactgtgtgccttttgcagtagtgctttcttatccccatcagccatcatcttttcaagtttggcttctccatcaagtgcttccaccaggccctgctgaacaagaagagctctcatcttcaatcgccataacccanaatcattntgccctgtgaatttttcaacctcatacttggccgagtccatttcttgaatcgaactcaaaaatcgctccacgctcaccgcaccaatttggtgtgccaagatcagaatttagttcacaaaagagtgagtttcttgtatgaac

SEQ ID NO: 1507 - DNA, 492 bp, Glycine max
  unsure at all n locations
gcattacggacctatgaaactcagcttagcagcttattgccataattcacaaacctagattccaaataacagcaactcanagtagttattagatagcatggaatatatttcatttttataaaaaataaatactatttaagagaaagttaaggatacaaatataagaggataagatatcacccctaacagagcaaaacaaatgtagttatttgatttagtacataattacatcactgtaagtgatgtatattcacttacgttttagcagcctgcctgcccttaccaattgcagcaccgaaatatctctagaacaattaccaaatgaacaaatcattacaaaaataccacatggaacttccaaaaaggaatatcaattgcatgtgtaattataaagaagtctggaagttgctatcaaatgacaaaaagtagctcacatagganacaccggaaggttcaaccatgtacaactgtggtccatccctgtcataacct

SEQ ID NO: 1508 - DNA, 358 bp, Glycine max
  unsure at all n locations
agccttctacttattaattatcataatttagtttanaaataaccaagtagagaataatatataaattatatatttttatggaattatttntgtgaaataaatttataagttatagattcaaatgtatgtctcttttcgtatattaaaaaaataatatctatctatactattataattcanaattaatttgattattcaatatacaaattcaataagtattntatcaattatttgaactatcaattaagtaaactaacacatantttgaaattactaatattattatttttctattntactcctannatttaaactcantttttttatggtcttcgtattaatcctataatatagaatc

SEQ ID NO: 1509 - DNA, 455 bp, Glycine max
gagtttctgatgaattcttttaccactgattgatgtctatgggatctaagtttcagaaagacccattctccaacttcaaaacacaagtccctcctcttcttgttagcataccttgtcatttgttcctgagctatgagcaagacgtgagttgagttgaatcaaagcctcatctctttcactcgactccaatgccgcagcagcaaccttagtctcattatacagaaatctcaacaatgcaagaggttgcctcccatataccacctccaacggagtcatcccaatagacacatgataggaagtgttgtgccaaactcaggccaagggacccacaatgaccaagtctatggatgatcataagcagagcaccgtagataactatccagacacctggctaccacctgcgtttgaccatctgtgtccggatgatatgctgaactcattgtcagcttattacc

SEQ ID NO: 1510 - DNA, 465 bp, Glycine max
cctgagattgagagaaaatgattattaaacacaaaatggaagtactaagtatttattacctatacttaatagaaaatacttataacactacaaaataaccataaattggaagagtttgatacaatttacacaagttttatacacaaaagttagtcgtattcatcgactaacaggtggaagaatgcgttgaataatagcactatagttaccttccacaacaattatgtcactatggatgtacaagttcttcttggttaacatatccttcaaaaatttggcatagaagggcatttgctgaagtgcttctccaaaaggcaaggtaatttccagtttcttgaagataccaagaaatctagccaaatgtcactctttatcttttcatgagggtaccaattgataaggtacctccttgcattcaataggaggagcctctttcttcttttctatgttagcctcactcttacc

SEQ ID NO: 1511 - DNA, 460 bp, Glycine max
gcttaatggctcaatgagcaaggggaaatgatagtcaatcaacatgtaaacatacccttttctataggagactactatgatgacgttttatatgatataatccttatggatgcagggaacattttgttgggtagaccatggcaatttaacaagaaagacatccacaatggtctcaccaatgaaataaccctcacccatgtaagcaaaaagctcaaacttgttcccttgacaccttcacaagtggttggggatcaagtacaaataaaactcaaatgggatgaggaaaataataaaataaagactagaagaacaacctttaatggttaaggaggagtgtaaggaggtaggtgtctcctccaataggttagctaagaagaaaagtcattctgcaataaagacaaacattaaagacactttccttcttagacaacctccacatattctcctttgtaaaggacac

SEQ ID NO: 1512 - DNA, 379 bp, Glycine max
  unsure at all n locations
agcttctggtgggacatcttgacttgctntccaatctgacattcaccacagattctgccttcttctattntcagattgngaatgcctctaacagcacctttgtcaatgattntcttcatgcctcttaagtgcagatgtccaaatctttgatgccatattctgacttcatcttctttggaggatagacatgtggaggagtaactggtttcttgaggtgtccataggtaacagttgtcctttgatctgctgcccttcattagaacttcactcttctcatttgtcaccaagcattctgactttgtgaagtttacattgaatccttcatcacacagctgactgatgttgatcaaagttgcagtcagtcccttcaccagcagta

SEQ ID NO: 1513 - DNA, 393 bp, Glycine max
  unsure at all n locations
agctaagtctatgatgtacttcccttcggtctgtatgactatagatatgaactgcgacgctgtcaacttnttagaatgacaaatcaagggatacaaatcacttttgcccgtggttattgaatatttatctgattttcagtgtccatgccccctacatctcattttacagatagtatataaccttttttttttctttttatcacattctgcatatgtaccatagaagatgatttcctgtgtatgatcaacgaccctgcaacaatttaaaaaccccttactgtacttgtttttaaataggagcatttaatgattgctacttttctactaacacacttatttaaatcagtttttacaacatgattaattttaaataaacttactgcttcatatcat

SEQ ID NO: 1514 - DNA, 406 bp, Glycine max
cgcgactatgaattggaaggctcttgaggcaattcaccattgttaactgcctcacaatagatctgctggcatgaaaaaaaatagagtacgcatttcactaggaaaacttcagcatgcactgcagcattctatagacaaatctcgtacaaacgtaagttattaagcttatatatctcacattgagcattccttgactatatgaatgtccaaagagaaaaacatatgccaaagggtgtatatcattttactcacttcatgtttgcctgtgtcaatgccattgcaagatgctagaaagaagtacgagttagggtcccttgctaatgaactctgtattctggatacaggctcagcaacagttctgaattccagtgttccaacaccagttgaagctattaaaggagtaaag

SEQ ID NO: 1515 - DNA, 431 bp, Glycine max
  unsure at all n locations
agcttctggtgggacatcttgacttgctntccaatctgacattcaccacagattctgccttcttctattntcagattgggaatgcctctaacagcacctttgtcaatgattntcttcatgcctcttaagtgcagatgtccaaatctttgatgccatattctgacttcatcttctttggaggatagacatgtggaggagtaactggtttcttgaggtgtccataggtaacagntgtcctttgatctgctgcccttcattagaacttcactcttctcatttgtcaccaagcattctgactttgtgaagtttacattgaatccttcatcacacagctgactgatgctgatcaagtttgcagtcagtcccttcaccagcagtactttgttcagactangaangtcatcatgaactagctttccatgccaatgatc

SEQ ID NO: 1516 - DNA, 260 bp, Glycine max
  unsure at all n locations
agctnttcaatcaatctttggctagctacattagtgcaactacccncatcaataatcaaagagcatattttccccatgatcatgcacctagtatgaaaagagttcttcctttgagtttcatctctatcctttcatgcactccccattaacctcctaaccatcanaagattaccttccaggggttgtgcatcacattcactttcactctcactagaagaactagaagagctagaagaagatgcactagtgatatccccatt

SEQ ID NO: 1517 - DNA, 346 bp, Glycine max
agcttctatgttcaatatcgagcgtttcaattaattatgtgcctgaatcggacatccgagtgaaaagttacgaccatctgaatttcttgagaacttctatttttcaagctcaagcgcctttatatatcatgggcctcaatcgtatatccatctcaaaagttatggtcgtctgaattggacaagagctttcgtgttgaatttcgagcgtctcgatatattgtggacctgaatcggacatccgagtaatattttatgaccatatgaatttccctacaacttacagtattatataaggagcgtctctgtatatcatgggactcaatgcgacattcatgttaaaagttat

SEQ ID NO: 1518 - DNA, 259 bp, Glycine max
  unsure at all n locations
cccttcaagtaacgaagaattctttttgcagcttttatatgagaagaggtaggagcctccgtanagcgacacacaactcccaccgcatatagaatatcgggccttgtattggttagataccttanactccccacaagactcttgaagaccgtggagtctaccttctctccttcatcanactttgataacttcaagccaccttccatatgtgtgttcacgggattgcaatcaagcatattaaatttcttcaacacttctt

SEQ ID NO: 1519 - DNA, 459 bp, Glycine max
tgcttctacaacctaagcacacttagtggagaatcctggacttgatcttggattagtgggctaaaccatagctaaatttcactaatcataattagtgaaattttggctccaaatttggctccacaaattcaaattcaagtgaaatttgaatagaaattcaaatttccctccaattttgtgtgacacttaagctataaatggaggccttgtgtgtgcagtttttcaacttgatcatttgagaattacacttcaaagttcatacctcatttgaggcttgaaatttcgtgctccttctctccttctccctccactcatcttctcctaccttcaagctcttatccatggcttcctatggtggtgagcttgttcttgactcatcttctcctttaaagtgacatttccaatcatctttcttacttctccattctgctgccattgatcttcaagaagtaaaggact

SEQ ID NO: 1520 - DNA, 462 bp, Glycine max
tacttatcttatagtttaggtgctttatctgttattggttctattgcttgatgctttgtctggtttaataataccgcttatcctagtgagttttacgggcccactgggccagaagcttctcaagctcaagcatttacttttctagttagagaccaacgtcttggggctaatgtaggatctgctcaaggacctacaggtttaggtaaatatctaatgcgttccccgacaggagaagttatttttgggggagaaactatgcgcttttgggatttgcgtgctccttggttagaacctctaaggggtccgaatggtttagacttgagtagactgaaaaaagatatacaatcttggcaagaacgccgttctgcggaatatatgactcatgctcctttatgttccttaaattccgtgggtggcgtagctacagagattaatgcaggcaattatgtttctactagaaga

SEQ ID NO: 1521 - DNA, 407 bp, Glycine max
  unsure at all n locations
agcttggtctaaaattcctcgaaaattagctttntatgattatatcggaaataatccagcaaaaggggggttatttagagcacgttcaatggacaatggagatggaatagccgtcggttggttaggacatcctgtctttagagataaagaggggcatgaactttntgtacgtcgtatgcctactttntttgaaacatttccggttgttttggtagatggggatggaattgttagggccgatgttccttttcgaagggcagaatctaaatatagtgtggaacaagtaggtgtaattggtgagttctatggtggcgagcttaatggagtcagttatagcgatcccgctactgtgaaaaatatgctagacgtgctcaattgggtgaaatttttgaataaaatcgtgctac

SEQ ID NO: 1522 - DNA, 399 bp, Glycine max
agcttgttcatatagtttcaacctgaggttctttaaagacttagtaaaaatatcagccaagtgctacgagatctatctttatgtgtttagtatgttcatggaagactaaattagatgcaatgtgaagagagcaacttgattttcacaaataagcttagtgtcttgagtgtctccaaactttaattgttggagaagttgcctaagccatgtaatttcgcatgcaacttctgtcatggtatagtattcaacttcagcgctggatctcgcaactatatttttgcttttgcttctccatgagatcaaattccctccaagcagaacacaatagcctgaggtagaactcctgtccaatcagcactagagtaacaaacaattttgacattgtcttcgtcttcatat

SEQ ID NO: 1523 - DNA, 471 bp, Glycine max
  unsure at all n locations
tcaagaaaaagatggcctcagcanattccttatttccagaagggaattctatcaatagacctccaatctttaatggagagggttaccactactggaaaacccgaatgcaaatttttatcgaggcaatagatctaaatatctgggaagccattgaaatagggccttatatacccaccacagtagaaagagtttcaatagatggtagttcatcaagtgaaagcataaccatagaaaaacctagagatagatggtctgaagaggatagaaaacgagtacaatacaacctaaaagccaaaaacataataacatctgccctaggaatggatgaatatttcagagtttcaaattgcaagagtgctaaggaaatgtgggacactcttcgattaacacatgaaggaactacagatgttaaaagatctangataaatgcactaactcatgagtatngaatatttagaatgaatacaaatg

SEQ ID NO: 1524 - DNA, 459 bp, Glycine max
  unsure at all n locations
tctggtgggacatcttgacttgctntccaatctgacattcatcacagattctgccttcttctattttcagattgggaatgcctctaacagcacctttgtcaatgattttcttcatgcctcttaagtgcagatgtccaaatctttgatgccatattctgacttcatcttctttggaggatagacatgtggaggagtagctggtttcttgaggtgtccataggtagcagttgtcctttgatctgctgcccttcattagaacttcactcttctcatttgtcaccaagcattctgactttgtgaggtttacattgaatccttcatcacacagctgactgatgctgatcaagtttgcagtcagtcccttcaccaccagtactttgtccagactatgaagttcatcatgaactagctttcccattccaatgatctntcctttatagccatctccaaatgtcacat

SEQ ID NO: 1525 - DNA, 373 bp, Glycine max
agcttgtaaggcttggatcttcttcatcaatagagtcatttgcttcttgaagatcaatggcagtagaatggagaaggaggaacggtgattggagatgccactttgttagtcatcttatacgactaacttttgtatagaaaacttttacaaaatgtatatattttccccaatttatggttatttttgtaggattctaaataaattttgctttgtttttatctgtgctcagtagaagccttgtgtatggaattaatgtcaatttctcttcaatttcaggcaaaaaggagttattttgaagaagtgctaaagttaatgtctcgctaagcgagctcaatgcgcttagcgagtgtcatcctctaaccaagtcatcaat

SEQ ID NO: 1526 - DNA, 418 bp, Glycine max
  unsure at all n locations
agctttgagaaaattgaattgacaataactttatacacggatgtccggttgagtattgtaatatatcgagacgctccaaattgaaaacggaagctcgtaagaaattcaaacgacaataactttttactccgatgtccgattgaatcgggtaatatatcgagacgctcaaaattgagactagaagctctgagcaaattgaaatgacaataactttatacacggatgttcggttgagtcccgtaatatatcgagacgctccaaattganaacggaaactcttagaaaattcaaacgacaataactttttactcggatgcccgacatagtgtcataatttatcaagagatgctccatattgaatacggaagctcgtatcanattcaaaccgacaataactcttgactcggatgtatgattg

SEQ ID NO: 1527 - DNA, 394 bp, Glycine max
  unsure at all n locations
ccttggatcttcttcatcaatggactcctttngcttttgaagatcaatggcagcaaattggagaaggaggaaaggtgattggagatgccacttcaaggagaagatgagtcgagaacaagtttatcaccatatgaagccatagataagagcttgaagattggagaaggtgagtggacggagatggagagaaggggcaaaacatttatgccaaatgaggtctgaactttgaagtgtaatttctcaaatgatcaaagttgaaaaaatacacacataaggcctctatttataacctaagtatcacacaaaattggagggcaatttgactttctattcaaatntcacttgaatttgtggaacccaaattggagccaaaatttcactaattatgattagt

SEQ ID NO: 1528 - DNA, 436 bp, Glycine max
  unsure at all n locations
agcttcgaatgggcattgtttcatcctagtctccattgattactttactaaatgggttgaaactgcttcatatgctaatgtaactaggaatgtggtggttagattcataaaaaatgagataatttgcatatatgggttgcccagcaaaatcatcgctaacaatgccatcaacctaaataacacgatgatgaaggagttgtgtgaggattttaagattcaacaccataattcgacaccttaccaacccaagattatcaatgtagttgaggccaccaataagaatatcaagaagatcattcaaaagatgatagtgatgtacaaggactatcataagatgttgtcgttctcattgcatggntatcaaacttctgtgtgcacttttactggggcaaacccaatttcgttggtgtatgggatggaagctctccaccctttc

SEQ ID NO: 1529 - DNA, 442 bp, Glycine max
  unsure at all n locations
agcttattcgaagccccttgaattgattgtctgttcatgcatcctcaaccattgagttcggagccccatgaattgattgcctagcgctgttcgtgcatcctccatcatcaaatcttattcggaacctgatgagttgattgccattcatgcatcctccaccattgagtccggagccttacgaattgactgccaagctctgtttataaatcatctatcatcaaatcttattcgaagccccatgaattgattgccattcatgcatcctccaccattgagtccggagcgccccgaattgactgcctagcgctgttcgtgcatcctccagcatcttattcggagccccaggaattgattgtcgtttatgcatcctacaccattgagtccagagccnncacaattgattgcctagctatattcgtgcatcccacatcatcaaatctta

SEQ ID NO: 1530 - DNA, 445 bp, Glycine max
agcttgcacacaagattctccttggctggcacttcaaaaccttctggttgggtcttatagatgtcttcctctaaatccccatgcaagaatgcagttttaacatctagctgctccaagtaaagattctctgcagcaacaatactcaaaataactctgatggtagtcatctttacaactggaaaggagtctctgtgatatcaattccctgtttctactgaaaccctttcaccacaagtctcgccttgtatcttcttctaccgtcagattcttcctttagcctacagacccacctattttgtaacgctttctttccttctggcaatttagttaaagaccacgtcttattcttctgaagggatgtcatcttatctttcatcgctagcttccactcaatagtgtcattcccctgcatagcctcactgaaacattctggctcaccaacatc

SEQ ID NO: 1531 - DNA, 406 bp, Glycine max
  unsure at all n locations
tccagatatagcatacatagttagggtattatgcagatatttaagcaatccaagaatggatcattggaaagaaaccaaaagagttatgaggtatttgaagagaacaaagtattatatgctcacatacaaaaggtcaggtcagttggagatcactgggtattctgacttagattntgcagaatacctagatagtttgagatccacttcaggttacattttcatgttagtcggtggtgcggtttcttggcgcagtgccaggcaaacccttactacttcatccactatggcgacaaaatatgtggcatgctatgaggcatcaaatcatggaatatgattgagaaattttgtcacaggttntcaaattgtggaatgaattgaaagaccacttaagttatattgcgacaat

SEQ ID NO: 1532 - DNA, 383 bp, Glycine max
agcttgttggtgagagcaatgtcaagaatgtcaccaacttcagccctaatagttgggcctggaaactgaccgttgattcccatcagaacgtgttccaagcaatctggttttctgatcatgtactccacatcaaacttgtagggtctcactattcctccgattgacaattctaccaaacccaaccatattatgcacccaacaaaaagagctttcaagctcattcttaattaattttgatcagagaaagcctaattagcaatataacaggaaggtatcaagtagtaaaacgaagctattgatgaacaaattgaaagaatatgtatagaggatcgaggatttggattggtggtaccattgccttatatatataagagagagagaga

SEQ ID NO: 1533 - DNA, 345 bp, Glycine max
  unsure at all n locations
agcttgcttcttttggtgcatagaatgcatgcaaaaaaaaaatagtaagtgtcatgaatctctgacataagcttcaaccaattaacattgtttgtatgacaactgttgtagttggacagcaatcacacagtttgtccaccatggtatgctttatgttcctattggttatagttttagtatgctttatgttcctattggttatagctttggtgctggaatgttcaatttggagtccacaaaaggaggaactccatatggtgttggagttnttgctggagatggtacaagacaagcaagtgaaatggagctggagcttgcacagtatcatggcaagtatatatgaaa

SEQ ID NO: 1534 - DNA, 424 bp, Glycine max
gctcgaagacaagactatacgaggtatcttccttgggtataacaatatctctaagggctaccgtgtctacaacttgcaaactaagaaactcgtcatcagtcgagatgttgaagttgatgagtatgcttcttggaattgggatgaagaaaaagtgaagaagaacgttcttatacccgctcaactacctcaagaagaagctgaggaagaagacccaggtgaaccaccttcacctgcaccataacaacaagatcaaaaactatcatcaccagagtctactccaagactagtaagatctttggtggacatatatgagatcagtaacttggccatacttgaacttggaagctttgaagaagcgtcgaagcatgaagtatgggtcacggcaatggaagaagagatacagatgatcgatacaacaacacat

SEQ ID NO: 1535 - DNA, 439 bp, Glycine max
  unsure at all n locations
tcaatagcatagcctcgtaagaggacatccaaagntgtcatattgagatgattctctctgtgaagtttgtcagaaagggaaacaagtaaaaagttcttttaaagaaaataaatgttatttccacttcgaggccattaaagcttctacaccttgacttgcttgaaccaaccaggattgcatccctttttggatgcaaatatggtctggtcataatggaatattacactagatggacttgggttaggttcctaacccacaagaatgagtcctttgataccttntataaatnttgtaaaaagattcaaaataaaaaaggcattngtatctctntaatcataagtgatcacagggaagagtttgaaaatgatatntttgaatgaaaagaatggtattcaccatatattttccactganagaataccaaactagaatggagtta

SEQ ID NO: 1536 - DNA, 331 bp, Glycine max
  unsure at all n locations
taacagactcaggaatgtcanaggttgatgcaatntcacctctcagttaccaaagccagacgctcaataccatcaaaatcagcatgttcaatagccaatattcccgcatcagctaagagctcctctggaaaattgcaaatcaactgtctgttaacaaaacagctgataccatgacctattatcttctgcaccttttctctcattatctctttctctgctgtttcaatttgagcaactctagccatagaatcaacacgaacacgtgcaccatatatcttcactttgtctgtgtccatggcaatgtttgccaccagtatctttgcattctcta

SEQ ID NO: 1537 - DNA, 338 bp, Glycine max
  unsure at all n locations
agctntgagcaaattcaaacgacattaactttttactcggatgtctgattcagtcccgtaatatatcgagacgcttgaatttgaatgccgaagctctgagcaaattcaaacgacaataactttttagtcggatgtctgatcgagctccgtactatatcgagacgctcgaaatggaataccgaagctctgagcaaattcaaacgacaataaccttttactcggatgtctgattgagacccgtaatatatcgagacgctcgaaatggaattctgaagctctgagcaaattcaaacgacaataacatttacctcagatgtttgattgagctctgaatatat

SEQ ID NO: 1538 - DNA, 432 bp, Glycine max
  unsure at all n locations
ctgtgtatcattatgggtttagagggccacaaaaagccaccaatgaaggaagaaatagatactttgattcgaagcatatttatttattgaagataatccggacaaaacctttgcacttttcctcacctttttaaattaattactattagaattactattttttattatctaatattatacgagattacgagcttataattactattggctcaaactattgtcaagttatttttttaatccacatttgatattatcttatatatatggntcaactcttaaaaaanaaattgtgtgtactcaactcttgcatatagagatttagtatttcacagggaacaanaattctatattaatatagaaatatataacagaaataaaatatccaaatgtataaagtagcaatttaatcaaatattatcatttcacaaagat

SEQ ID NO: 1539 - DNA, 285 bp, Glycine max
  unsure at all n locations
agctntagctttgtccccaaggcttcatgtatactggtccaaaatcgcgaagtgaacctcggatccctgtcagatacaatactagaaggaattccatgcaaccttattacttccttgatgtacaactccactagcttctccattctatacttcatattcactgggataaaatgagcagatttggtgagtcgatctactataacccacacagcatcatgtccacgactagtcttgggttaactagatacaaaatccatagatatgctctcccatttccattctgga

SEQ ID NO: 1540 - DNA, 220 bp, Glycine max
  unsure at all n locations
actaagctttaaataagggcccaaacactgaanagtcgtccatgaatatctcttaatacatttctccaccatgtctgacaaaatggccagcatgcacctctgaaatgcggctggtgcattacataacccaaatggcatctgtctataggcaaagacaccaaaagggcatgtaaaggccatcttctcccgatccttggggtccaccgagatctggttataa

SEQ ID NO: 1541 - DNA, 471 bp, Glycine max
tggaaatgaacaacggaagctctcgagaaaaaaaaatggttataacttatcactcggacgtccgattcaggcgcataaaatatcgagacgctcgaaattgaacaacgaatgctcttgagaaattcaaatggtcataacttgtcacacggaagtccgattcaggcgcataatatatcgagaagctcgaaattgaacaacggaagctcttgagaaactcaaatggtcataacttgtcacacggaagtccgattcaggcgcataatatattgagatgctcgaaattgaacaacaaatgctctcgagaaattcaaatggtcataacttgtcacacggaagtccgattcaggcgcataacatatcgagacgctcgaatatgaacaaccaaagctctcgagaaattcaaatggtcataacttatcacacggacgtccgattcaggcgcataatatatcgagacgctcgaaattgaac

SEQ ID NO: 1542 - DNA, 384 bp, Glycine max
agcttctcgatatattatgcgcctcaatcgtaccttcgtgtgttaagttatgaccatttgagttctggcgtgcttccgtttttcaatttcaagcttctcgatatattatgcgcctgaatcggacttccgtttgaaaagttaggaccatttgaatttctagagagcatttgttgttcaatttcgagcgtgtcgatgtattatgcgcctgaatcggacttccgtgtgacacgttatgaccatatgaatttctagagagctttcgctgttcaatttcgagcatctagatatattatacgcctgaatcggacttccgtgtgacgagttataaccatttgaatctctcgagagcatccgtgtttcatttcaaccttcttgatatattat

SEQ ID NO: 1543 - DNA, 385 bp, Glycine max
aaattggtccaaaacaaaacgtgagccccatagacagcatccaatagatgtcataccttttctgttacatatcgtggtagtgcaattgatgccagattgcacacagcagtctcagttggacttgaatattcaattatctcagtacacaaagctgacgatttaattggacccaaattctggtgattgcttttcctattgcaagtatgctagtagttgtaacaaaaatgctggaattactcatcgggtgagaacaataaatacaaaatctcatgaggaaagtcaaagacatctaagaacaccaccttataaagcatgtacgggggtgcggcttctatctgtgacttcagaatttcgaaccagaggctctgtgcctggacaaccttca

SEQ ID NO: 1544 - DNA, 465 bp, Glycine max
  unsure at all n locations
ctaagctatgcacccctntnttcaatattaatcaacctgaaatcacacacaatcacaagcaatcaactacactcaatgcaaagaaaacaaaattaaaaataaatgactgggtttcctcccagcaagcacttgtttaacgtcattagcttgacgcatcgctctgttatcctagatcaatcttggttctctctttcagaaccttctcatccaactccttcacctgtaagcacacatcctggtccagcagttctcttccttcattaaatagatcaaagctgatttgttggttttcaagactcatttctaactttttcttccctatgtccaccacacagcttgcaatagacataaatggacgttccataatgacaggaatatttgcatcttcctcaatgttcattacaataaaatcagtaggaaaaataagatgttntactcgaaccanaacgtcttcaatcactccat

SEQ ID NO: 1545 - DNA, 441 bp, Glycine max
  unsure at all n locations
agcttgctaacccatggaagctcctaatatctcccacacttttttaggtgggccattcttggatggccttgattttctcagggtccacttggaccccatttctaccaactacaaaccctaagaaaactatattatctacacaaaaagtacacttctctatatttgcatagagggtgtttttcctaaggactgaaagaacttgcctgagatgtcctaagtgatcatctaggctcctactgtatactaaaatatcatcaaaataaacaactacaaatatacctatgaaatcccttaagacatgatgcataagcctcataaaggtgcttggtgcattagtgagcccaaaaggcatcactagccattcatacaaaccaaacttggtcttgaaagcggttntccactcatcaccctttttcatcttgatgtggtgatacccacttt

SEQ ID NO: 1546 - DNA, 292 bp, Glycine max
  unsure at all n locations
tctatagaaaggtcattcctaatttctctacaattgcatcacctctcaatgagctagtgaagaagaatgtggcatttacctggggtgaaaaacaagagcaagcctttgctttgctcaaagaaaagcttactaaggcacctgttctagctcttcctgacttttctaaaacttttgagctagaatgtgatgcctctggagtgggagttggagctgttttgttgcaaggtgggcaccctattgcttattttagtgaanaacttcatggtgccacccttaactaccccacctatga

SEQ ID NO: 1547 - DNA, 452 bp, Glycine max
  unsure at all n locations
tcaattataagaacttgaggagatatgcttagaagcctatgagaactccaagatttacaaggagaaactgaagaggtttcatgactctaagattcttaagaaggagatccatattggccaaaaagtgatcttgtataactctcgcttcaagcttaattttggtaaacttcgatctatatgggatggacctttttttattactaatgttntccccatggcacaattgagattaaaaatgaagttattagcaaagtcttcaaagtgaacggtcaccaactcaagctttttcatgagagccccaagtggtggagcagtttgtggcggacctctctttgatcttgccaactttatgtgatgatgtcccttgaatggaactngangagtttccatccccttcttttgtatgttgtcacttttgttgcctttcattgcatgctcacattgagaacaat

SEQ ID NO: 1548 - DNA, 455 bp, Glycine max
  unsure at all n locations
ntgatgatgttgagaagaaatcacatgtttgtcatcatcattaagggagagaatgtgaatgtatgtacacatgattttgatgatgtcaaaagaagaatcaaacaaggctcatttgcatcaagattaatacaagattgtttcaacaaacaaagccttgattcaagatttcttcaagatcaagccttgcctcaaaatgaaagatttcaagtcatccaaggcacatgtaatcgattaccaagacacatgtagtcgattaccaatggtttgaaagtgtgtaatcgattacacatcatatgtaatcgattaccagagactttgaacgttgggaattcaaatattaaatgaagagtcacaattgttcaagaaaaataactgtgtaatcgattacactaatgttgtaatcaattaccagagagggatttcaaggaatatcgccaacaatcacatcttatcat

SEQ ID NO: 1549 - DNA, 450 bp, Glycine max
  unsure at all n locations
agctntaaacttcattgcatccagccactttctcttttcttcattatccatggcctctctaaatcactcaggttctccatcatctgttaggatcacatactcattaggagaatacctcttagaaggttgtctctccctgttggactttctgagttgaacttgaggtggttcggtggcatcaccaagattttcatcttgtgacatgtcatgctcctcttcatcatcatcatcaacatgaacatctacctcatctccaggttgttggacactaacatcattcttaactttagtattcagattctgaataggcgattgaactggttgaaaatcagccacaccattgtcttccttgggtgtaaacttatccaccttatcaatgtcttcaatggtttggtcttccatgaatttcacatcatggcttctaacaagcttcttctcaataggatcata

SEQ ID NO: 1550 - DNA, 362 bp, Glycine max
atgagccaattcaaacgacaataactttttactcggatatctgattgagtcccgtaatatatcgagaccctcgaaattgaatgttgaagctcttagcaaattcaaacgtcaataagtatttactcggatgtctgattgtgtcccgtcatatatcgagacactcgaaattgaatgttgaagctctgagccaattcagacgacaataactttttactcggatgtctgattgagtcccgtaatatatcgagacactcgaaattgaatgttgaacctctgagccaattgaaacgacaataactttttactccgatgtctgattgagtcccgtcatatattgagacgctcgaaattgaatgttgagc

SEQ ID NO: 1551 - DNA, 412 bp, Glycine max
  unsure at all n locations
agcttanacattcaatttctaggctctcgatatattacgggacttaatcaagcatccaagaaaaaatttattgtcgtttgaatttgctcagagattcaacattcaatttcgagcgtctcgatatattacgggactcaatcagacatccgagtaaaaagttattgtcgtttgaattggctccgagcttcaacattcaatttcgagcgtctcgatatgttacgagactcaatcagacatccgagtaaaaagctattgtcgtttgaatttgctcagagattcaacattgaatttcgagggtctcgatatcttacgggactcaatcagacatccgagtgaatagttattgtcgtttgaattggctcagagcttcaacattcaagttcgagggtctcgatatattacgggactcaat

SEQ ID NO: 1552 - DNA, 429 bp, Glycine max
tgagattgaacaacagaagctctcgatatattcaaatggtcataacttgtcacacgaagtccgattcaggcgcataatatatcgagaagcttgaaattgaacaacagaagctctcgagaaattcaaatggtcataacttgtcacacggaagtccgattcaggcgcataatatatcgagacgctcgaaattgaacaacggatgcactcaagaaattcaaatggtcataacttatcacacggaagttcgattcagacgcataatatatcgagaagctcgaaattgaacaacggaagctgtcgataaattcaaatggtcataacttatcacacggaagtccgattcaggtgcataatatatcgagaagcttggaattgaacaacggaagccgtcgagaaattcaaatggtcataacttatgacacagatgtc

SEQ ID NO: 1553 - DNA, 396 bp, Glycine max
agcttgaaattgaacaacttaagctctcgatatactcaaatggtcataacttatcacacgaacgtccgattcacgcgcataatatatcgagacactccaaattgaacaacgtagggtcttgagaaattcaaatgttcataacttgtcacacgaaagttcaattcaggcacataatacatcgagaagctcaaaattgagcaacgaatgctctcgtgaaattcacatggtcataacttgtcacacggaagtctgattcatgcgcataatatatcgagacgctcgaaattgaacaaccaaagctctcgagatattcaaatggtcataacgtgttacacggaagtccgattctgggccataatatatcgagaagctgaaattgacaacgacgctctctag

SEQ ID NO: 1554 - DNA, 377 bp, Glycine max
  unsure at all n locations
agcttagcagncacttgttgtcctccatcgttatcctgatcaccgtgaaagtcctcaacaaccactctgtcatgcaccttatacagagcatcctgagccggagacacataattgcctccaccctcaacagcattagtctcatcactgagaccataaatagtaacaacgcgctcttcgcaccccggcacagtctcaccaatcctaatcttagccttagtctccaccctcagttgcttaacaatctcacctcccctaccaataacactgccaatctttcgacccgggcacacataacgatacacggtatcctccgaatcaatcacaaactgctctctatcatcaccatgattcctccttttaattggcccattatcatg

SEQ ID NO: 1555 - DNA, 378 bp, Glycine max
agctttggccaaaccccagcagcagttgtttccttagagacttgccttagcaccttgtctttgagactgaggataattacactgtgtgccttttgcagtagtgctttcttatccccatcagccatcatcttttcaagtttggcttctccatcaagtgcttccaccaggccctgctgaacaagaagagctctcatcttcaatcgccataacccaaaatcattttgccctgtgaatttttcaacctcatacttggccgagtccatttcttgaatcgaactcaaaaatcgctccacgctcaccgcaccaatttgttgtgccaagatcagattttagttcacaaaagaatgagtttcttgtatgaacaagaataagcaaaat

SEQ ID NO: 1556 - DNA, 449 bp, Glycine max
  unsure at all n locations
tgcacacaagcaagtcccatttgattaagatcagtaccaaatattgcagatttcttctccccagtagcacgaagcttcgacacagcattcttgaaagtattgtaagattcagtgtagttctccaacacgtagtacatgactcccatctgagcttcaataccagctattgtgttttgctgaccagaggcttcattaagtatctctagtgccttgtgaagtaacttaagtgcctgttctagctcattcattgactcataaatggctgagacattcataaaaccactagcaacctcctctggagggaccccaggcatgggattctcatagatnntaagtgcactctcacaatatgattttgattcccttatcttccatgtcctgcaatacaagtcagcaaggcgtacaaagactgatcccacagaaggatgattctcacctttgtgagtcct

SEQ ID NO: 1557 - DNA, 432 bp, Glycine max
  unsure at all n locations
agcttttgcctcanaacgcattgtttccaacatccaaggctctggtaatcgattaccagaagagaattttgaagcaaagggtttaaaaagggttttgaatttgaattttgagtcatgtaatcgattactagatgtttataatcgattaccagtaatgacactttagaaaacactttggaaagacatgacccttcaaaatataattgtgtaattgattaccagaaatctgtaatcgattaccagtgaataattttagaaaaatctttttgaaaagacacatctcttcaaaccattttgaaaaggcacgaagggcctatatatatgtgtgtctgacttagaaaagcaagagagagatattctaagagaacataattgccaaattctctctcaacaactcctgggcaaacacttganaatctattgataattcat

SEQ ID NO: 1558 - DNA, 354 bp, Glycine max
  unsure at all n locations
agcttacagctttgtcgagctattctgctattgcacagatatgtatatctatatccaaacgcgatatataggaacatgaaatacaacttagcaggattaacttaagtataataacatgttcttttacttttatataattagaaattattttgtacatcgattaataattacttataaatacagataaaatataccaaaatatagatttgaaaagcattttaagaaaatactagcttatttactaaacatatgtgagaagatccataattacatgagaagagtatttntcactctcaagaacatgaagagacggacttattaaatagataaacaagttttaatatatctatgttg

SEQ ID NO: 1559 - DNA, 461 bp, Glycine max
  unsure at all n locations
gactcttcggctggccgattgctgaatcataatcagctgccggaataagtaggcaccaccattcaataccattatagagaatcaaataatatatatatcatcagaataaaattaaatattttttattgataggaattgtatatgagtattaagaaatttataagacttccgcaccatacttaactaagttataagaaaacctattggatgctttttttttggtgataggaaatctgatgttgaagtttagatgaaaaaaagtaaaactttctcatattatcggctaggaaatttaatggtttaaattgtaataaatgacgacatacaagaacataaataataaaaaacattgcaaaaattatatcatacgctgagataattaaatntgttgagataactaatanaacatagattattccaaaatacacacattgctaagaatattatatgctaatagaaaa

SEQ ID NO: 1560 - DNA, 345 bp, Glycine max
agctttcgttttcaattacgagcgactcgatatcctacgggactcaatcggacatccgagtgaaaagttattgtcgtttgaatttactcagagcttccgttttaaattacgagcgtctcgatattctacgggacacaatcggacattcgagtcaaaagttattgtcgtttgaatttgcttagagctttagttctcattttcgagcgtcttgatatattacagggctcgatcagacatccgagttaaaagctattgctgttagagttttctcagagcatttggtttgaattacgagcgcctcgatatcctacgggacacaatcggacatccgagataaatgtattg

SEQ ID NO: 1561 - DNA, 394 bp, Glycine max
tggatttcctgttgtatggaatctttccttcctaagatggagccaaacccagtccccctcattaagaactagctcatttcttcctctattgcccttaattgaatacacctttgtttggttctctatttgggtcttaaccctctcatgcaacttctttacaaactctgacctagattccccttctttatgtataaaagaagtgtcaagtgggaggggaatgatgtctaagggtgttaagggattgaacccatagacaacctcaaaaggggattgcttggtggttctatgaacccctctattgaggcaaattctacatgaggaagatactcatcccaagacttatggttgccttttagaagagcccttataagagtggatgaagacctattcacta

SEQ ID NO: 1562 - DNA, 352 bp, Glycine max
agctttgagataattcaaacgacattaaattttttcttggatctccgattgtgtcctgcagtatatcgacatgcttgaaattaaaagcagacgctatgagcaaaatcaaacgacaataatttttaattcggatgtccgattgagtcgtgtaatatatcgagacgctcgaaactgaaaacagaagctctgtgcaaattcaaacgacaataactttttactcggatgttcgattgtgtcccgtggtatatcgagacgctcgtaactgagaacatatgctcgtagcaaattcaaatgacacataactttaactcagatgccgattgattcccgtaatatatcgagacactcaaaa

SEQ ID NO: 1563 - DNA, 222 bp, Glycine max
  unsure at all n locations
agcttgctaacccatggaagctcctaatatctcccacactntntggggtgggccattcttggatggccttgattttctcagggtccacttggaccccatttcttccaactacaaaacctaagaagactatattatctacacaaaaggtacacttctctatatttgcatagagggtgtttttgttggatcgagtggcctcaaaataattaagaaggggggggg

SEQ ID NO: 1564 - DNA, 436 bp, Glycine max
  unsure at all n locations
tatcttccttgtgataacaatatctctaagggctaccgggtctacaactcgctaactaagaaactcgtcatcagtcgagatgttgaagttgatgagtatgcttcttggaattgggatgaagaacaagtgaagaagaacgttcttatacccgctcaactacctcaagaagaagctgatgaagaagacccangtgaaccaccttcaccttcaccataacaacaagatcaaaaactatcatcaccagagtctactccaagacaagtaagatctttggtggacatatatgaaatcagtaacttggccatacttgaactttggaagcttgaagaagcgtcaaagcaggaagtatgggtcaaggcaatggaagaagagatacagatgatcgaaaaaaacaacacatgggagttagtaaatcgtccccatgggaaagatgtca

SEQ ID NO: 1565 - DNA, 359 bp, Glycine max
  unsure at all n locations
actcagcttaacatcagaccacttgcaggtgctggaactacttcacatggacttgatggtgcctatgcaagttgaaagccttggaggagagaggtatgcctatgttgttgtggatgatttctccagatgtacctgagtcaactttatcagagagacatcagacacctttgaagtattctaagagttgagtctaagacttcaaagagagaaagactgtgtcagcaagagaatcangagtgaccatggcagagagttcgaatacggcaagtttactgaattctgcacatctgaaggcatcactcatgagttctctgcagccatcacaccacaacaaaatggcatagttgataggaaaaaca

SEQ ID NO: 1566 - DNA, 484 bp, Glycine max
  unsure at all n locations
cctatcagactcagcttacacatcgatccctcaactgtagccttattcttgactatattcttgaaggagtgtaaaaacctaacattaatatgaataagtatttctttaaaaatgactatatatataatacaatggtgtataaatgattactcatttatacctctcgaaaggatacatccaatgatattggactggaccaccaagtcttgcctcataaggtaaatgaactggaaaatgctccattgaatcaaagaagcttggtgggaaatattgttctaacttacacaacaacacaggtatgttattntccataactcttagttgttcaacatttaatgttgtcgaagttagttctttgaaaaattggctaagttcaacaagtgacttccaaatagggtttggtaatgagtcaaatgcaatnggaaagcaaccgtgcatgaaaacatgacaataatgactnttcattccattgaagtttcccttg

SEQ ID NO: 1567 - DNA, 420 bp, Glycine max
  unsure at all n locations
ttgtataaactcacatgtcgtatcacttctgattttatcttattagaataaattccattntgtattatatatacgtntttctctgaaattttaaaagaataatagtggctgtacattggtagcgataaaataatgccgataacaatcataacaaaatgtaaaatatactactttaaagtcttacaaaaataaatgagcaacaaaaaccttatcaactaattaacaatattaaggacatatttttttaaaatattaacaagcttattaaaaatgtagaaataagcttcatgataaatcaagattgattcaagggagtttgatgataacaaagatgatgacaaacaactcanaagtcaagatcacttcatgataacaaagatgatgacattcaagattaagttcaagaatgagtcaagaaca

SEQ ID NO: 1568 - DNA, 400 bp, Glycine max
  unsure at all n locations
agctctggtaccgcttgttaaacaagtggcctcaattatcttaagaaagggggttgaattaaaatacaaaaactatccccttaattaaaaatttaacttttttatattaaaaatgcaacccttattatgagttactctaagaacaattcaaaacaaacttctttaaagcgaaatataaacaataataaataaaagaagtttaagggaagagagaatacaaactcaatttttatactgggtcagtcacgccctatgcctacgtccagtccccaagcaacatgcttgagatttccactatcttgtataaagccttttacaaagtgtgaaccacacagtagcaacccttcccttgtgtcaaataaccttacaacttaagagaacctnggcctttaaacagatc

SEQ ID NO: 1569 - DNA, 382 bp, Glycine max
  unsure at all n locations
gtattataagttataacctcaaaaaatggggtatatgtaacatgaattatattctcctgttctttaaaagcttgaaatcaacgtagtaaataaaatttacctgaggaatgcaaagacttgcaatagtgagaccagatattaaatctcctctaaattatttaaggttgtaacttcttccccaactaagtattgggaatatggcttcaataccgagcctgatcttccttgatctanngtgatctttgaagggtcttacaggatcatcacaaaagaacgtttcttttatagtgtcttggaattcctcgaagaggttctgtctcggaggaattgccatttgtgggcttgtggtgcctgaccaaatgaagaagatggcatacttctg

SEQ ID NO: 1570 - DNA, 424 bp, Glycine max
  unsure at all n locations
cagcttaagaataatggcctcaacaaacttcttattcccaaaaggatattcaataaataggcctcctatgtttaatggagagggttaccactactggaaaacccgaatgcaaattttcattgaggcaatagacttaaacatttgggaagccatagaagttggaccttatgtacccaccatggtggctggaaatacaacaatagagaaacctagagaagagtggtttgaagatgaaagaatattagtgcagtacaatttaaaggctaaaaacatcattacttctgccttaggaatggatgaaatatttanggtctgaaattgtaagagtgccaaggatatgtgggatactctacaagttacacatgatggaacaattgatgttaaacgatctangataaatactntaactcatgagtatgaatta

SEQ ID NO: 1571 - DNA, 362 bp, Glycine max
  unsure at all n locations
cagctttggaatgcagattagctctattggctctctggttgcattctttgaaccttngatgtattatctgatatgttatcgaagatattcttggttactaacttactctccctttatatctcaattntttatgtgtgcacgtgagctgatgagcatgccaatgactgattactattgtttgaattttacttgattgagatataggaggtgaagatgtcgaccccggcaaggaagagactgatgagggattttaaaagaatgcaacaagatcctcctgctggcatcagtggggctccccaagacaataatattatgctttggaatgctgctatctttgggtgtgtaggagtatataaatcatg

SEQ ID NO: 1572 - DNA, 395 bp, Glycine max
tatatatattataaataaacatctatcaatcaatgtctacaaagtacatatattaatgtctgaaatcgatcacaaagactaaaattatgaattttataaaatagggagacacaatgtcttaattaaaaatgagagactaaaattataaatctttttaaagtggaagatgaaatatctcaattaaaaagtgagagaactaaaatcatatatttgaaaaaataggggaacaaaaagtatattctagtctaattatctttgtgtatgaatttggatttgaaattgtgtataagtgaatatagatttgggttaatcactttagtgcttgaatttggatctgggttagacaatatgtctacgaccatttaattaaacaagttagcaagtaattttggatc

SEQ ID NO: 1573 - DNA, 358 bp, Glycine max
ctgagaatgcgaatttagctctattgtctctctggtgcatttcttgaacctttgatgtattatctgatatggtatcgaagattttcttgattactaacttactctccctttatatctcaattctttatgcgtgcacgtgagctgatgaacatgccaatgactgattactattgtttgaatattacttgattgagatataggaggtgaagatgtcgaccccggtaaagaagagactgatgagggatcttacaagatagcaacaagatcctcctgctggcatcagtggagctccccagaacaatgatattatgcttcggaatgctgttatctatgggtgtgtaggagtatataaatcatg

SEQ ID NO: 1574 - DNA, 305 bp, Glycine max
  unsure at all n locations
agctttcgttntcaattacgagcgactcgatatcctacgggactcattcggacatctgagtgaaaagttatcgtcgtttgaatttactcagagcttccgttttaaattaccagcgtcttgatatactacgggacacaatcggacatccgagtcaaaagtaattgtcgttcgaatctgctcatagctctcctcccatttacgagcgccttgatatattacagggctcgatcggacatccgagctaaaagttattgtcgttagacttatctcagacgctgcgttcccaatttcgagcgtctcgatat

SEQ ID NO: 1575 - DNA, 328 bp, Glycine max
  unsure at all n locations
cttctccttctacggagaaaccaagaagctntacaagaatacagtgctgaagtatggcaattagtgccactctcattttgaactcatctaaaccttgtccagacttctttgaaagccttttcacagctaacgctttcccatctataagtgtgccctgaaagttatcttctgccatagttagaaagattntaaggaaaacagaagtttgtgaagttttcttagtcaccttgtataccggcccacatccaccttcttcgagcttatattttgttgagaagtttttagtcacattagctaagactgttggcaagtcaatgtcttctgttcg

SEQ ID NO: 1576 - DNA, 402 bp, Glycine max
agcttgtgctcgaggccttgacctcataattgtttcatcactgtgtttgatccattctgagagtttccagggcttctgccacttccatttaaactgtagcagccattgatgatgacttctcttccacttccaaagtattccggcttgtcctatagctgctagcctcttcgttgacaactctccaatgggtatcatctggatataaacccattaaaacttattgagaaataaacactatcatcatcatcatcagggaaatagaatctagcaaacatacctttcgtgcttcatctaaaaatgtagctgactccctgcctgaccaattaacaactccaggagtgaatttgagttgctttggtgcacgaagcgacattggagataacggaccactcatctcatccg

SEQ ID NO: 1577 - DNA, 330 bp, Glycine max
  unsure at all n locations
agctgttgtgagtaataaacccaaacatttcagtgtcattgtacatctcaaaagcttcttccaaatccttcaacttctcgtcttccccagctgcctccataagtttcacaaaatctatcaaactcaaaaacacatcaccatcagaatccaactcctcaatcaactgttcagcatctttggtcaacaactcaccaccaatcatgcctagccggttcctaaactcacatggagaaatcttaccatccccatcctcatcanaatacttaagaacacgctcaaactctgtgttcaccctcataactatagaaaatacacgcataaatattgatg

SEQ ID NO: 1578 - DNA, 447 bp, Glycine max
ctcagcttaacatcagaccacttcagggtgctggaactacttcacatggacttgatggtgcctatgcaagttgaaagccttggaggaaagaggtatgcctatgttgttgtggatgatttctccagatttacctgggtcaactttatcagagagaaatcagacacctttgaagtattcaaagagttgagtctaagacttcaaagagaaaaagactgtgtcatcaagagaattaggagtgaccatggccgagagtttgaaacggcaagttactgaatttgacatctgaggcatcactcatgagttcttgcaccatccacccaacaaatggatagtgaaggaaaacggacttgaagaactgcaggcatcttatgccaaaattcctatatttgctgagcatacaccatgcttttcacaagccactaagaggctcacccctgttaattgaag

SEQ ID NO: 1579 - DNA, 387 bp, Glycine max
  unsure at all n locations
cgcttgcacccagaagagctacaagtcaagctcaaaacacagatagcaaacctcctcaactctagagttccatcaccaaacatctgccaccattctccaggttgcataactnttctagtgtcctttgcctcttccatagacaaaaaccctctagcaaaatcaaactcaacaagttgcaaaataattntttttcctttctacaacatccttgaccaatcttctcatacacatgtgcaacccttctttcacctgagggtcatcatgtctaanactaggtttataatgcaaatgaggattactataatacgcagttgtatgcaaaggcttgtgaagctaatgatctcacctctcattgataattntctaaacaggctcatagatacatca

SEQ ID NO: 1580 - DNA, 394 bp, Glycine max
agcttgcacacaagattctgcttggctggcacttcaaaaccttctggttgggtcttatagatgtcttcctctaaatccccatgcaagaatgcagttataacatgtagctgctccaagaaaagattctctgccgcaacgatactcaaaataactctgatggtagtcatctttacaactggaaaggagtctctgagatatcaattccctgtttctactgaaaccctctcaccacaaggctcgccttgtatcttcttctaccgtcagattcttactttatcctacagacccacctattttgtaacgctatctttccttctggcaatctatttaaagaccacgtcttattcttctgaagggatgtcatcttatctttcatcgctagcttccactcaat

SEQ ID NO: 1581 - DNA, 354 bp, Glycine max
  unsure at all n locations
tctgcttcttccttcgagcagcaggcgtgagctccactggtctcaatggggagaagctggtgggaggggaaaacccaactggccgcatggggggtntcagagggatccgtttcccactcgcattacccggcgtggaaatcaacggtgacgacacccccaaaccaccagcctggttctgattaagactcaatccctgagcttgcaaatgagcctggagttgagcatgagctgcagctgctgcttgggcctgngcctgggcctgggccttggactgagcttggacaatagcatgggcctgggacagtggaaactgtccttgataaccaacaggaatctgggcctgtccttgggact

SEQ ID NO: 1582 - DNA, 374 bp, Glycine max
  unsure at all n locations
agcttttggaaggatcaagaagtgccttatgaatcctcccgtgcttatgccaccagtacctggaaggcctctcatnttgtacatggggtgtatgctggggcaacatgatgaatccggaaagaaagagcgcgctatttactacctaagtaagaagttcacgacctgtgaaatgaattactccttgctcaaaagaatgtgttgtgctttagtatgggcatcccatcgcctaagacagtacatgctgagccatactacctggttgatatccaagatggacccggttaagtacatctttgaaaagccagctctcacgggacgaatcgcccggtggcatgtcctgctatccgagtttgatatagtctacgtcacccaaa

SEQ ID NO: 1583 - DNA, 454 bp, Glycine max
  unsure at all n locations
atactatagcgaaagattctaccttctggtgagacttcttctatcccatacactaaagaatatggagttgcctcattcgaggtgcgtactaatgcacgatagccatgtggtgcaaagggaagcatgtcatgtcaatccttcttgatattcttgtttgctgcttctaccaccccattcattttttggcgatatggcacagaattgcgatgttgtatcttgaagctatcgcacaattctttcatcatattgttggtcaaatgggtcccattattagtaataatgtggcttggcagacatatcaatagatcaaatctcctttgatgaatctgaccactacattccttggtacactatcataagatgctacttcaatccattagtgaaataatcaatgggactacgatgaaaccatgccctattcaatggcttaggttcaattgacanatcacatcta

SEQ ID NO: 1584 - DNA, 434 bp, Glycine max
  unsure at all n locations
gtgtgcattgttngagtttagtattggagtacatttattgaattgcatagttactttattatttgtcactttgaattgaattcatagaatgtggattatgtttgttgacacttgacttatttgcattaattttttaatggattgagtatcataatattttacactaaaaattatttattttcaagatcacattctttctatagaaaatacaaaacataaataccgaataattcatcttatgtgagtcatcttatgtgagcagacgagaatgctaatctaaagtttgagaaaatgactaccacttattggtctttcaattcttataacatatgtgttgattaataagtaaatgtgcattattngagtaaagcaagttctttagtgtgcattactagactatntatcactttgaactaaattccatatattaactg

SEQ ID NO: 1585 - DNA, 445 bp, Glycine max
  unsure at all n locations
agcttaggctacaagttgaaggtgtatgaattaatagttctttagtcttttactattctaaagttgtaaaaattacctaaataatgctagattaaatgtcattttagttgatcattcatagctgtgtaagtttgatactttaagtttcttgcaatttataagttgttttaagaacttgtggcatttgccccttcacatactgagagaatgactaaagagcctttctgctctgccttttctctttcttaacacaaaatgatgttcaaccttcatatacggcaggtttgcaatcttgtctggtccaaaaatgtcaatgaactagtaagcacgcatggctattcccagaaccagataattgtttggagatacctctccatgtcaaaggtacactatatctactgtgataagccgaatctctcttatttttacttaattntaacatgtc

SEQ ID NO: 1586 - DNA, 445 bp, Glycine max; identical to SEQ ID NO: 1530

SEQ ID NO: 1587 - DNA, 439 bp, Glycine max
  unsure at all n locations
ctcagcttgtcaagttccatactgcctgcanatgtagcccaaggcaagaacccaacttgttgcacctttcgcttcctcattatttcatagaaagctgttctcatgactgaaatactggttttttcagctgaggctataacaccgtgagcaacagctcaaatcttttcagcagatactgctgccttcatgatgccagatgttttggctcctgaagtcgcaatccctggagccacaactttataatggccagatgcaaaagccagcactttctgcatctggctgagactgattatgagtgaagttggaattttgaaagtgataaccttcaccagtgttgatgcagggactactntggtcagagatgaagctccaanaactgctgtcgcccagactctactgcaccataggttatctgtaataaccacttttctcactatga

SEQ ID NO: 1588 - DNA, 400 bp, Glycine max
  unsure at all n locations
gtntactaagaatgttgatggagtcccgtaatatatccagccgttcgaaatagaatgtagaagctgtgagcaaattcaaacgacaatatttgtttactcggatgtctgattgagtcccgtaatatatcgagacgctcgaaattgaatgttgaacctctgagccaattcaaacgacaataactttttactcggatgtctgattgagtcccgcaatatatcgagatgcttggaattgaatgttgaagctctgagacaattcaaacgacaataactctttactcggatgtctgattgagttccgtaatatatcgagacgctcanaatcgaatgttgaatgtctgagccaattaaacgacaataactttttactcggatgtcctattcagtgacgtattatatt

SEQ ID NO: 1589 - DNA, 480 bp, Glycine max
  unsure at all n locations
gctttacagctggaatcatctaccccatttctgacagccagtgggtgagtccagtccaagtggttcctaagaaggcagacctcacaatgatcaagaatgagagggatgagcttatccccacaagagtgcagaacagctggcgagtccgcattgattataggaggctgaaccaggcaaccagaaaagatcattgtcccctgccattcattgatcaaatgcttgagcacttggcaagtaagtctcattactggtttcttgatgggttttcttgttatttacaaattcatattgctcctgaggatcaagataataccacattcacctgtccctttggcacttttgcctatangagggatgcccttggcctatgcaatgcccccggtaccttctagcgatgtatgcttagcattttcagtgactttttagagagttgcatagaggtgttgatggatgaatctactggttatggatcctcttttg

SEQ ID NO: 1590 - DNA, 448 bp, Glycine max
agcttagcccatcatcaatattgatttcaagaaacaaaaaagcaagtagatatatcagtgaactgagccagaccaaggaaaaatacatcaaagaaaataaataatctagtatagctaattttataatcagataaagcatctgagacctgctgccatgtggtatcaacaggaggctgccgccgagcatcgccagcatcaaaatccagtacaccataatccctcaaccgaatctacacagcaataactaaaatcagaagtctttttgaggattaaatgcatggcattatctataagacacatttttcaaattgagacaaacccgaaggaaggcacggattctttgcaaattcccaacaccaccaccaagagcagcctaccattagataaaaaagcaagcagaaattaagtgttgataacaaatacaaattcatgcttgctctcttatatg

SEQ ID NO: 1591 - DNA, 397 bp, Glycine max
  unsure at all n locations
agcttcgtgaaaacctgcggtaaatgagatgcattttcaatcttcattttctagttctagctatctaattctcgtttacataccttgatctttttacctggtgctaataattatagagtaaatagttaatttaatccttaatttatatcacgttattttagtctttaaaattaaagaaaacttaaaacaattggttgactagtttgactttttattaattttagagacttaaatgacaataaagtataaattcaaagactaattatctaaaaaaaaactatctatttaataattacatgaagataaagaagacacattttcaacttttttaaaaaaataaatatacattctctctctctatatatacttaaaaagtctttnggcattaaaaatatat

SEQ ID NO: 1592 - DNA, 451 bp, Glycine max
agcttgtcattcattcaggatagaccagtgagcctcacgttcaaagggaagctagtatttgaggtgaacaggtatggcttcactgatggtggagcttgggttgatgggaacctaaactaatgcaatcctaccccgcaagggcattggatagaaaactccaagtagattaagccagagatgcaagagaaggccctaggattcttatgagccttagggtagatttcgggcccatgggctaagtatgagcccacttatctttgtaaatattagattaaggtttcattatttttgggccttgtatttagagctccataatgtaggtagggtaccctagaaatataggatttttcagcccttgtattctagggcacctagactagtctttgtattaggggtagttttggaatctcacatgcactaagtggatatttgatgtgtgtggctggagata

SEQ ID NO: 1593 - DNA, 458 bp, Glycine max
  unsure at all n locations
ctcagctttgacttagctngtaaaaaaaaaaaaaaccaaatgcacctgaatatttggtcttcagtgaggtgctgcttcaaactctttgttagctcactagatgattctgagtcacgaccaaatggcttttcaacaataacccttgtccatccatcttttgaagaagctttaagactagcgcatctcaccacatccacaaatatgtttggaggtattgacaaataaaacaatctgttngatagctttccaccctagaaaaggccattgtcaaatatatctaagcatagtttcaagagcaattattcgtataaatttaattctgggaaatataagatgccttaaattttatgattgataatatcacccttttgtagcactacggttttaattntcaaatcaccatctgctctaaaggtttttgcactctattctacacagaagaaagatctcctaaactt

SEQ ID NO: 1594 - DNA, 482 bp, Glycine max
  unsure at all n locations
tcggtgtacctgaagatgctattaggctcagcctgttttcattttctttatctagggaggccaagagatggttgcattcattctagggcaacagtttaaagactagggataaggttgttgagaagtttctaaaaaaatatttcccagagtctaaaactgcaaagggaaaagctgcaatttcttcattccattagtttcccgatgaatctttgagtgaggcattaganagattccatagcttgctgcggaaaactcccactcatggtttttcagagcctatacagctgaacatcttcattgatgggttacgaccgctgtcaaagcagttactcgacgcttctgcaggaggaaaaattaagttgaagacacctgaagaagccattgacttaattgaaaatatggtttctagtgaaccacacaatttgcatgagagagttcatattcctaccaataagagnttattggagcattcattacaagat

SEQ ID NO: 1595 - DNA, 450 bp, Glycine max
  unsure at all n locations
agctnttggaaggatcaagaagtgccttatgaatcctcccgtgcttatgccaccagtacctggaaggcctctcattttgtacatgacaatcttggacgagtcaatggggtgtatgctggggcaacatgacgaatccggaaagaaagagcgcgatgtttactacctaagtaagaagttcacgacctgtgaaatgaattactccttgctcgaaagaacgtgttgtgctttagtatggacatcccatcgcctaagacagtacatgctgagccatactacctggttgatatccaagatggacccggttaagtacatctttgaaaagccagctctcacgggacgaatcgcccggtggcaagtcttgctatccgagtttgatatagtttacgtcacccanaaggcgataaaaggaagcgccttagcagattatntggctcaatagcctcttaacga

SEQ ID NO: 1596 - DNA, 455 bp, Glycine max
  unsure at all n locations
tctcaagatacacttaatgttatgcagcatgtccattctactaaagtgttaattcacaagttaaaagatgatggttggcaagctctgctgaaagatgtggtattgttttgtgagcaacatgacatttatattcctgatttcaatggtacctatgtagcacatcatgggcgctctcgatatcaaaaagatcatatcacaatagaacatcatttcagagtgaacacaatttttattgcagttgataagcaattgcaggagttaaatgctatgtttagtgagcaaacaatggaagttttaactntaatctgtgttntagttcctaagatatttttatacaacttttcaatgttgatgatatatgcactattgtgaacaaattttatcctttaattttagtaaacacgagaagatagttagaaatttaacttcacttttattttgggtgctctactcat

SEQ ID NO: 1597 - DNA, 259 bp, Glycine max
  unsure at all n locations
ataatatatcgaggcgctcganantgaacaacggaaggtcttgagaaattcaaatggtcataactnttaactcggatgtccaattcatgcgcatcacatatagagacgctaaaaaatgaacaacggaagctctccagaagttaaaatggtcataagttttcacaaagatgtccgattcaggcttgtattatatcgagacgcttcaaattaaacatcgaaagctctcgagaaattcaatgggcataacttttacttggat

SEQ ID NO: 1598 - DNA, 319 bp, Glycine max
  unsure at all n locations
tgggatgaggaactatataacagtaccaaggttttagtttaaggagtctttnttcggagaggagaataattctaggattttagaattccagtttttattactgttcatgcacactgtccacgtataataaaatccattntctgcaaatgatctctaatccatacattttttaatactatggactttctttattttcttttgatatactctgtgctttaacgacttaaagtcaatatgaatttgcttatcaattatttttggatttgtacattacttatacgaaattttataagtatcttgttctagttagtatttcact

SEQ ID NO: 1599 - DNA, 269 bp, Glycine max
  unsure at all n locations
agcttcaaggctaagtcttcatgttgctccccttatctctagcanaaattgagccgacgggtgaagttgctaaatacaacgcatgattagtggccaaagggttactgcaaaaatatgttctggattaccatgaagtctttgttctagttgcaagaattgaactaattaaacttatggttgcaatcgctagctaacggggctggtcattggatcaactaaatgtgaaattatcattcttttatgggcccttataaaaagtctatgtatat

SEQ ID NO: 1600 - DNA, 578 bp, Glycine max
agcttctacttcatagtctaccaaattcatatgatctattcatcatcaacattattgtcagtcgtctaacctttgatgatgttgccagaactattcctaaagaagaatccaaacaaaagaataagaaagataggcaggaaaattccaagcatgcaaaggctttaatgatgacgaaggtagatcaatgtaatgtggctctaatgggagttaaaatcatggcagatcaaagtctcgaagaagaaagaacctcaaatactataattgtggcaggagatgacacttaaagaaagattgttggcataaaaagagtggaggagataaactatagagaatcgagctctcaaggttgtgttgctagcacctcaaataatatggaagccatgtgtagtgaaacaccaattggttttagaggtggaagacaacttcatgattgttggatattagatttaggtgcagcttggcacatgactccatgttgagattgtttttacacttatgaacttatcttggaaggatatgtgttcatggaaaatgatcatgcccttggaattgctggggttggtactggtcaaataaaa

SEQ ID NO: 1601 - DNA, 483 bp, Glycine max
agctttgacttgagtcatcaagagactataaatatgtgaccatggcatgagtttcaaaaaaaaaaaaaacaatcaatcatctttgaatcatctatcttttacatcatcttctttcaacatccttcaatcaatctttcaacatctcttaatattttcttttatctctttcaacactttcaacagaactttctaattgatttctcttcatctttctaaaagtttttggtcaacactgtcccttccaagaaaagttctttgataaaaaacttatgttattcatcttgatgtaagctccatttgagcttgtaggcccaggatcttcttcataaatggattcctttgcttcttggtagatgaatggcagcaaaatggagaaggaagggagagaggagacgccacttcaaggagaagatgagtctagaagaagctcaccaccataggaggccatggataagagcttggaggaagaaagagatgaatgaa

SEQ ID NO: 1602 - DNA, 405 bp, Glycine max
agcttgtagcaaatgcaaacggcaataacgttttactcggatgttcgattgagtcacgtaatacatcgaaacgctcgaaattgaaaacagaagctctgtgcaaattcaaacgacaatacattttaactcggatgtccgattgagtcccgtaatatatcaagacactcgaaattgagaataaaagctctgaacaaattcaaacgacaataactttttactcggatgtccgattgagtccagtaatatatctagacactcgaaattgagaatagaagagctgagcaaattcaaacgacaataactttttactcggatgtccgatggagtcccgagcgtttcgatatattatgcgcctaaattggacatccggagttataggtatgacaattttaattgctccaaagc

SEQ ID NO: 1603 - DNA, 562 bp, Glycine max
agctttagtcaaacagaataatccgaaaatgtcaaagaattgggtgttgaaaaagcataacaacactttctgtgattggtttaaagatacaatctttgcagatgagaatgcttcaaaaagattaagaaagctagcagatgggcctaaaagaaatgttataatctggcaaggatacgacataaacaggtattcattttacacaaaagcacaagatgacaaaagtacaatgcagaacagcggggtcaccctaagggctgaatctcaacactttgcaagtgtcaatgatgccaatccctatgtagcttccatccattactttgggttcattgatgaaattcgggagcttaattatgtgaaatttacagtatgtgttttcaaatgtaaatgggttgacagcaacaccggtgtgcacaccgatgatataggatttacgctggtagatctaaagaaacttggttaccacaatgaccctttcatcatggcaaaacaagcttgacaagtattttacgtgcaagacccttgtgatgaaaggtggtgcgtggttctacaaggcaaaacagtt

SEQ ID NO: 1604 - DNA, 581 bp, Glycine max
agcttattgaacgtgatgatgtgctatcctgtttgtagagtaatacttagcaaactcttgattattcatattttttttagcttgaaggctatagagaaagccatagttagctctgatcttggtatgactccaaataatgatggagaattgatacgactgagcatcccacagttgacatctgataggaggaaggtattctccagttccattgatgctgcagtgtctaagtttattttttctctgtcaattacattcttgttctcattgactgaaagtaatattcttaattggttttcatttcttatttaactattaacaaaatcgcatagaatcacctcttctacagtcatgacccatgagaaaactgatctctacagtgacttaatatgttgtttgccatgattccaatagttttagttatcaatttattttgtttatgagattgtaccgttttatataaaggtcctatatgcataaattttaatgaatatttgaaggtctaaatgaatatgttgatttcttgaaggcatctgaataacttaaggtctgtttggtttttttccccaaagaaaagtgttttt

SEQ ID NO: 1605 - DNA, 489 bp, Glycine max
agcttatagttccagcaacgacaaaagctaattaagatagcaccaatattgctggaatggatagtttcaatatttttcatatgtaatcctttatgtagatgttggggtgaatgcacactaagatggaagagactcgctaatatgcccaacgttcctactgcaatataatgagaagctatactgaaacaaaaagataaaaaccttccacgcctcacacagatttactgattgtatccttctggtcaatccataaggatccactactacaaaagcaattatttaagtcacgagacctacgacggttgtgcaaaaccgccttaatataaggcacagtggcaattttgtaattaaggggagaaattttattttttaagtcgcacgttctaaggcggttacgaataaccgacttagaatgagttgttattgtaagacaacgacggtcttacggtaagcccgtcgttgttcctcacctggcccgtacttgacttt

SEQ ID NO: 1606 - DNA, 177 bp, Glycine max
gtaaccatgtaatttcacttgcagctgcagccatggcacggtatttagcttcaacactggatctagcaactgcattttacttcttgcttctccatgaaatcaagtcacctccaacaagaacacattagccagaggtagatcttttatctgatgatgatcctgcccaattagcattag

SEQ ID NO: 1607 - DNA, 552 bp, Glycine max
agcttgtggtgtctcagcattataatagtctttcttttgacactttatatgagttggccaagtgtttgaacactgatatggtgcctctgatagttaactggctaccaaaagttcttgcttttgctcttcatcaaactgatgaccagcagttaatttttgccgtgcagttttaccatgcacagactggttctgacaagcaggaaatatttgcggctgctttacctgctcttctagatgaacttgtatgctttacagattgtggggattcagaagagataaatagaaggtaatttgtgtagatttctggaacttgattttaatttgattcctgagtggaaaactttcacacctggatattaatttttggaattcacgtgtttgtcttggaaactatgttgctggcacctcagatttagctatattaatgattatatacgtaatttgtttttatttattcactcatcattgattaacagaatttgatttggttactggccattggataaccaatatatttgaatctcacatttctttctttcatgggacttgtat

SEQ ID NO: 1608 - DNA, 493 bp, Glycine max
agcttccattaccgcaaccatctatctaggtttgtaagttaataggaattttatttggattctaagtttgttgttccataaattactattattgttcataaaaaatatgtgcattgtgagtgaaccctaatttcccgtttgagattccataccatgattaatacggatagtttggattagttgtggtatggattcttgaattgtccgttcggacagtttgggaactctcttttttttacttcattcatagtgttagtgtttagctctactgagctttaaaagattggctaagattttgttaaaacataagcacttagacaatgaaggaaagctggagttgctgcacatgatgtccaacgttatgtcaaggaatgagatcgggctgcacaatgtacaaggcaagataaaatgtcaaatgaagaattgaagttgcacgatccacgatgtcggataacatgtcctgacatcctgccccgagaatactggagttgct

SEQ ID NO: 1609 - DNA, 561 bp, Glycine max
agcttctagccttcaactaagtaaaatacatgctagatgcatcaaactccaactattgtgttgtaggtgccataaaatgcgaaaaataatccagacaataatacaatagaatccaaggctttttgccagatgggtagagaagagccaaataactttaagtgaaatgtggctggcataacaaatgagagcattgcacataaggtgctccctacaaatgaggcaaatacagaaaattctggcacaaatgaagctatgactgccaatccaaccaccacaatcgcccggctaacgtatatgcacatattttctagtcccattgaatcattattgtttctgaggatgattttgagtttcccttccacaatctcattaattgggtgaaacatgactgggagtgtgaatgcaagccccacacataatcctacctgtcaaatgtagcaaaaacttgaagataatggaattctggcaaaataaacgtagtattctgcaaagtgtactatcctagtagacatggctaaggacaaagtaaaatacaccccaacatatattatgcagtgcaca

SEQ ID NO: 1610 - DNA, 545 bp, Glycine max
agcttgtcaaaaagggaagcaagttagaaactcttttcaaagcaagaacattgtttctacttcgaaaccccttgaactacttcacactgatttatttggtccctctaaaactatgagtttgggttgtaattactatggcttagttatagtagatgattactcaacgttcacatggactttgtttttgaaaacaaaaaatgaagcttttgatgcttttcgcaaacttgccaaggtgattcaaaatgaaataggtcttaacattgtttcacttagaagtgatcatgaaggtgaatttcaaaatgagtcttttgaaatattttgtgaagaaaatggaatttaccacaatttttctgccccaagaacaccccaacaaaatggtgttgtggagaggagaaatatatcccttgaagaaggtgccagaacccttctaaatgaaacaaagttaccctagtacttttgggctgatgctgtacatactatttggtacaccttgaacagagtacttattagacctattttggagaaaactccttatgaattgtata

SEQ ID NO: 1611 - DNA, 496 bp, Glycine max
cttaaaggaagtgaacaaatagtatttgtctaaatgtctctgattgatcggcatatctggtccccaaatcttggaaaactgccaagaccccggtaccttcagcataccttgtattatagggaacaggaagtttgacaatgccatgctaaatttaggagcttctgttaatattatgcctctggctatttttaattctctatctctaagtcctctgcagtcaactgatggggggattcatttagctaatagaagtgccgcctatcctgctggttgtaaaaaagatgtcttatttagagatggtgagctgattctgcctcttgaattttatattctgaatatggaggagggattttttaaaggatcagttcctatcattctaagcagaccttttattaaaactgctacaactaagatcgacgtatatgcccgcacactatctatggagtttggtgatacaactgttcatttaatattcttgatgctatgaaacacccat

SEQ ID NO: 1612 - DNA, 451 bp, Glycine max
agcttgacataatgaaatcgctttttacttttttatataaaattacactaaaaataaaatatatttattaatgtatacttatttgctgttgaaaaagagtattttagcttattataactttaatttttttaaatataccatataaaacatgtgtgtatatattaatatactctataaatattcgctgatttattttttaaaagaaaattttaaaaaggtataatttcatttttttaaatacattcaaaatgtaaattgttcaaattttccttcttttataaaacgagtacatgtgcattacctaatctcaataaaaaaataatatttctttatttaataaataagaaagactaataagagaataccaaagcaaaaattagattttttttcaattggaatttgttattcgaaatgagaatcttctaccaaaagatacacttttttggtactt

SEQ ID NO: 1613 - DNA, 369 bp, Glycine max
agcttacgttgttcaatttcgaccatcttgttttattatgcgcctgaatctgacatccgagttaaaagttatgaccatttcaatttcacgagcgcttacattgctcaatttctagcggctctatatattatgcgcctgaatctgacatgcgagtttaaagttatgaccatttgaatttctcgagagattccgatattcaatttcgagcgtttctatatattatgcgcctgaatctgaccatggagtgaaaacttatgaccatttgaatttctcgagagaatccgttgatcaattacgagcatctcgatatattatgcgcctgaatcgaacctccgagtttgaagtgatgaccatttgaatctctcaaga

SEQ ID NO: 1614 - DNA, 578 bp, Glycine max
agctttatgcaagtcaattttcaggaggcatcttagagaggatcttttccgggcatatttgcgcaaaatctcttgaactaggaagatgttgtccatcatctttctgttcttaatgaaagcagtttgagtttccccaataatagtctcaagcactggggctatgcggttggccagaattttagatacaatcttgtataacaaattacagcaagatatgggtctaaaatggttaacctgggaggcctgatcatgcttaggaataagcgcaataatagcatggttgagttgctttagaatttttccagttgtaaagaattcattaaccgctgcaaagatatcatcaccaatgatattccaagccttcttgaagaataaaacattgaaaccatctggcccaggagctttattattatccatcacagaaataacgttccaaacctcttgcttataagtaggacaaagtaaggccacaaagcaatcgatgggaaccttatgacccctgttgcagatcaaaatggatggagtttgggtcagctcatgaacactaaacaaattcctaaagtgattcacaaaagcag

SEQ ID NO: 1615 - DNA, 522 bp, Glycine max
agctttgatggtgtcgagaagaaatcacatgtttgtaatcatcaaaaagggggaaaatgtgaatgtatgtatactttggaaattcaaattcaaaagtcataacccttcaaattataactgtgtaatcgattacacaaacattgtaatcgattaccagtggaaagttttcagaaaatctgccagcagtcacatcttttcattagatttgtgaatggccatcaaaggcctataaataggtgacttgggcacgaattttaaaaagagagttttgcttggcaaaaatgtcttatcctctcaaaagacaatgagagagattctaaaagaacttcattgtcaaatgctctctcaaaagaaatccttgaccaaacacttgcaaaatctataaggattcctacatgatctttattggaatattcttctcttgaagaaagaattcttcttccattcttcttattcaatgagattggttaagagactgtgagtctcttgttgtaaaggattcctgaacacaaaggatgggtt

SEQ ID NO: 1616 - DNA, 554 bp, Glycine max
agcttttcgttgtctctctgcctgctccttccaaaccgtctttgcaatcgtctatgccactgtagtctcgcccttgtggcttatgtcctttaaaagatatttcccctattgttcttgcgcctccatatgagcttcaatctgatgtagtttgtattgttccagcaagtcaccctatggtgactcgtgctaaagctggtatctacaaacctcgtcactttgcagatataactacttatcggccatcttctcttttacatgcattactcaccacttctgagccaaaaggttttaaatctgctaccaagcatcctggctggcttgctgcaatgaatgaagaactcacgtccttacactccaacaagacttgggaacttgttcttcgaccacctaacactaacattgttggctcccaatgggtatttgttagtcggtgaaaacgactaacttttgtgtataaaacttgtataaattgtatcacactcttccaatttatggttattttggagtgttataaggaatttctattaagtataagtaataaatacttagtattt

SEQ ID NO: 1617 - DNA, 469 bp, Glycine max
agcttggaagcatttggttcagagatagaaactatgccagctgagttcaatgttagacaagtggcctcaaatatcttaagaagggggggttgaattaagatatcacaaactatttccccaattcaaattctatttcactttctattcaagttacaaattccctttataatgaacttcttaaatattgattcaaatagaacaatctgaatataaatataaaacaataataaataaaagagtttaagggaagagaaagtgcaaacttagatttatactggttcggccacacccttgtgcctacgtccagtccccaagcaacccgcttgagagttccactatcttgtaaaatccttttacaagttctaaacacacaaggacaatcattcctttgtgtttagaattcttttacaataagagaccctcggtctcttaatcccttagagaattagaaagagaaaaagaatgaatc

SEQ ID NO: 1618 - DNA, 575 bp, Glycine max
agcttggggaatagcattaactggtaatcttgacacatgcattggtacaacagtactactgtggccacaatgcaacaatcatgtggtactcgtactgacatgacctaacacgctagcaccatggtttcacaagacggcaagatgccaatcgtacttatactttgatgtgagttttcaccatggatagcatctagttgtaatggacaaaagcaaatggcttcagccgttatcaatgttataaaagaataaaagattatgttttgttttgatcaagagtgaaataaaagtgaaagaaacaggagagaaagatccaaatgtataaggatagaaataaagagagaaatagagaaatttgtcttcaattgtttagatgggtacaatattaaaagtgaaaaataacaaacgatatgagtttctatcggttggattgattattaccataataaaaatgaatcttacttgaaaaaattttattttgtttcattaagcaccttataatttattgaacttaagttttgataaaacgctaatataaatttttttatactatcaatttaattaaaaattattttaat

SEQ ID NO: 1619 - DNA, 417 bp, Glycine max
agcttgaaattgcacaacggaagcactcgagatattctaatgggcataacttttcactcggatgtccgattctcgggccataatctccatctaagatggcttcgaaatatgaaacattctggaaagcctctccgagaaaattccgatatgggtcaataaccttttcacacggatgtccaaatttaggacataatatatcgagacactcgaaattgcacaacggaagcactcgagaaatttgaatggtcataacttttcacacggatgtccgaatttgggacataatatatcgagacgctcgaaattgcgccacggaagcccctcagaaattcgaatggtcattaactttttcacacgaatgtttggattccggacataacttatttagacgctcgaaattgacaacggaagctctcg

SEQ ID NO: 1620 - DNA, 602 bp, Glycine max
agcttcaacatcagaccacttccagggtgctggtactacttcacatggacttgatggggcctatgcaagttgaaagccttggaggaaagaggtatgcctatgttgttgtggatgatttctccagatttacctgggtcaactttatcagagagaaatcagacacctttgaagtattcaaagagttgagtctaagacttcaaagagaaaaagactgtgtcatcaagagaattaggagtgaccatggcagagagtttgaaaacggcaagtttactgaattctgcacatctgaaggcatcactcatgagttctctgcagccatcacaccacaacaaaatggcatagttgaaaggaaaaacaggactttgcaagaagctgccagggtcatgcttcatgccaaagaactttcctataatctctgggctgaagccatgaacacagcatgctatattcacaacagagtcacactttgaagagggactccaaccacactgtatgaaatctggaagggaggaacccactgtcaagcactttcacatttttggaaagtcatgttactttttggcgattgaaaccaaggagaaagatggatcccaaaagtgatg

SEQ ID NO: 1621 - DNA, 444 bp, Glycine max
agcttgttaatcatcttgacaagaaaaatgtttttacacatggacggtttaataaagagtgactaaatcctcactatataatgtgtgtgtatgaaaaataaatttcacactttattattgtagaatttcaaaccaaaagatatagtgcatttaatacatgaaaattaaatttttatcactaaagttgaagtggtttaaatgcaaatggacaattgaattttacgagctagataaagactatttgaatggatacattgaaaattattttgtttcaatttttaatagaacttatttattttagttggtgaaaatcttcactataaatagaaaagagaattagtggagaaaattactttgttcagagaaaagcgtatttgtgtgaatgttatcattttttgtaactattgaatgtggtactaggatttgttgagtaatacacaattt

SEQ ID NO: 1622 - DNA, 629 bp, Glycine max
agcttaagctcctttaactgcacaagactcttaatatttgaagagtatccttgtggaaccttaacccgacaaagacactgacaaaaacttatcttctcctttttggacaaagtatggcaagctggggcaagtaaattttcttcccatcagaccttggatgcaattgtgatcgtatccccatatcagctagatcttgacgggtattcaagccatccttcgtcttgccttgaatgttaaggagcgtcccaatcacactgtcacaaacatttttctccacatgcataacatcaatagaatgtctaacgtctagatcagaccagtacggaagatcaaagaaaatggacctcttcttccatatgcaactattacttttatccttcttttggatctttccaaaaacattattcaggtgttgaacccgctgatatacttgttcaccaatcaacagtattggcgcaatatcatgctcttggattccattaaaagcttttttcagtcgtctgtaaagatgattgggtgttaaaaaacggaaatgcctactgtagactatttttttttcctgttttaattggttgtagcttttggtttcttcacagatgggggatgcatgaagaacctttaacattgta

SEQ ID NO: 1623 - DNA, 584 bp, Glycine max
agcttgatgattcaacgtttcttctatggcgacaacaagtcgagccaattatcaaatcccaccgtcttcagcaatttgtagctaatccacagattctgctccgcttcctttctaaagaagatcgttaggctggaattgagaatccagcgtatgaatcttgggagaaacaagatcaggtgctcctcacatggcttcaattgaccttttctacattgattttatctcgagtgttataggatgcacacattcctatgaagtttgggagtgcattcatgagtatttttacaaacaaactatcaccacagcaaggcaacttcgcactgaattttgagcaacgactcttgcgggtaagtcaatgcacgagttcctgttgcagatttgcgcaatcgcagattctcttgcctctgttggaagtccaattatgcttcaggagcatatcgattccattcttgaaggtccctcactgaattatcatccgccattattgaaagcaagttttaacccccgcggagtaacttgaaccaatggttgccaccactgcagcatacaccaccataccaaaaatcaactcgtcataccgaaaa

SEQ ID NO: 1624 - DNA, 597 bp, Glycine max
agcttctcactcctttgacattcattggaggagggagtttctcaattgcatcaatctttgccttgtccgcctctattccccttactgaaattttatgccccagcactattccttcttgaaccatgaaatgggatttctcccagttgagaactagattggactcttcacatatttgtaatactctttcaaggtttgataggcaccccttaaaagatggcccaaaaatagagaaatcgtccatgaaaacttcaatgcatttttccaccatatcaaaaaagattgccatcatacaccgctgaaatgtagctggggcattgcatagaccaaaaggcatgcaccaatatccgaatacacctatagggcaggtgaaagcaatcttttcttgatctttgggatctacaacaatctaattatagtcagaatacccatccagaaaacaataataagattgccctgcgagtcgttcaagcatctggtccataaaggaagcaaataatggtccttccgaatggcatcattcaacttccgatagtcaatgcacaatctccaacccgtgataatccttgtggatattaactcatatttatcaatttttat

SEQ ID NO: 1625 - DNA, 418 bp, Glycine max
  unsure at all n locations
atttggtctgtgcactatatttgacattgtggcattgagagattangcctaatacttagaaatagtccaaaaggtgattgttatcttttataaaattgacttatatttatttaaaaaaacattgtttatcatcataaaaataaaatttactaacttagatcttaaggagtttataacaaataacgcacagtatttaactaactcacttaaattccttgatgttgaatttaagtatagtcgataatataaaattttagataacttttctattactaatagatgttaaaataattaaataatattgaatttaatattatacttaaattttatcttcttttttattaaaccatcttgtaataattatatattgtctttaaaaaagntactanattaatcttatttttatctactcttatta

SEQ ID NO: 1626 - DNA, 391 bp, Glycine max
cgtatggttaaagtctcatgaatgtcacgtgctcatgctacaattgttaggcgtggctatacgagacatcttgcccaacatagtcatgataacgataactcgcctatgctttctcttacatgctatatgtagcaaagccattgatccaataatgtttgatgagttggaaaatgacgccgaaattatactgtgccagtcggagatgtattttccccctgggttctttgacgtcatgatccacttgattgtgcatctagttagagaaatcaactgttgcggacctgtttatctatggcggatgtacccacttgagcgatacatgaagatcttattagggtgtacaaagaatctatatcgtccacaagcatctattgttgagaggtacattgca

SEQ ID NO: 1627 - DNA, 419 bp, Glycine max
  unsure at all n locations
agcttcgcaacanattctactctccgatcctcaacatcgacaagctgtggtccctggtcccgcaagaagtgaaggacaacgcctccaaggagaacaaggcgccgctcatcgacgtcacgcagttcgggtactttaaggttctcggaaagggcgttttgccgcagaaccagcccgttgtggtcaaggccaagcttatttccaagatcgctgagaagaagatcaaagaggctggcggcgccgttgttctcaccgcttgaatttgacggtatcacttttttgaacgatttangttttgttctgatacgttttgttttggattatgttgntgnttagtctctgctatatttcangagtaaattgaaggtttattattttaatttgcgcgaataactatgccagcctgatgacattagaatcta

SEQ ID NO: 1628 - DNA, 489 bp, Glycine max
  unsure at all n locations
tccatcaatctatctctctaaccatcaaggccgatatatgtatggatatcctactcaaggcgtcagccactacattggctgtgccggggtggcaactaagctcaaaatcataatctttaagaaactctaaccatctcttttgacgcatgttcagctctttctgactaaacaagtacttaaggctcttatgatcactaaacacctcaaacttggagccaaacaggtaatgcctccacatcttaagggcaaaaactacagcagctaactccaagtcgtgagtgggataattcctctcatgagtctttagttgtctagaagcataggctattacttggccattatgcatcaacactcctcctatacccatctttgatgcatcacaatacacctcanatggttccctcgggttaggaaaaactagcactagagcggtcgtcaatctttccttaagggtcgtgaaactatgctcacactaggtgtcccacccat

SEQ ID NO: 1629 - DNA, 487 bp, Glycine max
  unsure at all n locations
tagatgaagatgaatccgtggccacctcatggactcctctaaggacaatagcatcatttcttgcactgaattgttgggagttggaagccatcttctcaatcaaattcctagcctcagcaggggtcatatcaccaagagctccaccattgacagcatcaatcatactcctctccatgttgctaagtccctcatagaaatattgaagaaggagttgctcagaaatctggtggtgaggacagcttgcacacaatttcttgaatcttccacaatactcatacaagctctctccactaagttgcctgatgcctgaaatgtcttttttgatggcagtggtcctagatgtagggaagaatttctccaagaacaccctcttaaggtcatcccagctganaatggacctgngagcaaggtagtatatccaatcttttgtcacttccttcaaagaatgangaacagcctttagaaagatatgatcttcttggacatc

SEQ ID NO: 1630 - DNA, 452 bp, Glycine max
  unsure at all n locations
agcttgcttctacagtaagtgttgatagtcaattagcacttagtcttaggaaaaaggtaactgtgttttaaaatttgcagatacgaaaaaccaacttgcagacatcttcacaaaaccactaaccaaagattctttctacaccattagaagataattaggacttctagatgcaagtgacttagacaaatgatttatgttttgatgacttatttgttatttatgcacatatgcttctattataatgtgaggataatttattatcttgtttgatttctataagcttctctcttttcttgtttaattattatattttttttaacccttgtatttggctatgttnttatgacatttgaatacttagtatttcttttattatttgattagtatgactggacatgatgattatatttacttgcttttgggtgttatggtatgaagtttaaacttatttt

SEQ ID NO: 1631 - DNA, 436 bp, Glycine max
  unsure at all n locations
agcttgacaagagggtctgtntaactaacaataataataataactttattttatcaaatcttatcttatccagattttattccatccagattttattccgtctagattttatttcgtccagattttattttatccatcttatcttatcttgtccagattttattttatttcgtttatgggcttggacttaaaatagatttgtaagctttgtggctaagaacctcatccatacattttttaatagtatgctctttttattttcttttgatatactttgtgttttaacgacttgaattcaatatgattttgtttatcaattatttttggatttgtacattacttatatgaaattttataagtttatttttttagttagatttcactaggttttaaaataataaattaattaaaggcgtctttaaacaaacttttaaat

SEQ ID NO: 1632 - DNA, 404 bp, Glycine max
agcttcagaattcaatttcgagcgtctcaatagattacgggactcaatcagacatccgagcaaaacattattgtcgtttgaattagctcagagcttcagaattcaatttcgatcgtctcgatatattacgggtctcaatcagacatctgagtaaaaaagttattatcgttcgaatttgctgagagcttcaacattcaatttcgagcgtctcgatgttttatgggacttaatcagacatccgagtaaaaagttattgccgtttgaatttgctgagagcttcaacattcaatttcgagcatctcgatatattacgggactcaatcagacatccgagtaaaaagttatcgtcgtttgaatttgtcagagcttcaacattcatttggagcgatacatatatacggact

SEQ ID NO: 1633 - DNA, 361 bp, Glycine max
agcttaataaatctatatatggtttaattcatgcttctcgtcagtggtaccttaagtttcatgggataatttcttcatttggctttgatgaaaaccccatggatcaatgcatataccacaaggttagtgggagtaaaatatgctttcttggtttatatgtagatgatattttacttgcagccaatgatcggggtttgctacatgaggtgaaacaatttctctctaagaattttgacatgaaggatatgggtgatgcatcttatgtcatcggcattaagattcatagagatagatctcgaggtattttgggtctatcacaggaaacctatattaacaaaattctagagagatttcggatgaa

SEQ ID NO: 1634 - DNA, 357 bp, Glycine max
  unsure at all n locations
ctgtagaggaatccatcggagttgtgtttggtcgacatcccatcatacccgaatcagataatatgtccaaagtatactttctttgcgacaaatggattcccttagaggaacgcgcgatttccaggccaaggaagtactttaagtttccaagatccttgatcctaaaagcttgatcaagcaatgtgagcatctcctgtatttcagtgttgctgttgcctgttaaaataatgtcgtccacatatactaagagtatcgtggtgactgaaccattaaagcggagaanaagggaatggtctgagtgagactgttggaacccatgcattggtaggatacccgatagcttcacgaaccattgac

SEQ ID NO: 1635 - DNA, 388 bp, Glycine max
  unsure at all n locations
agcttctatagaaggttcgttcctaatttctctacaattgcatcacctctcaatgagctggtgaagaagaatgtggcatttacctgnggtgaaaaacaagagcaagcctttgctttgctcaaagaaaagcttactaaggcacctgttctagctcttcctgacttttctaaaacttttgagctagaatgtgatgcctctggagtgggagttggagctgtattgttacaaggtgggcaccctattgcttattttagtgaaaaacttcatagtgccaccctcaactaccccacctatgataaagagctttatgccttaataagagccctccaaacttgggaacattatcctctgttcaaagaatttgtcattcatagtgatcatcaatcac

SEQ ID NO: 1636 - DNA, 408 bp, Glycine max
  unsure at all n locations
ntngacggactataccaagctctaggaaccagggacggagaaagatctatatatatgcttgctaatggtagagagaggaagactagagatttggatcaagtaaagtgtgttaaggatgaagaaggcaaagtcttagtgcatgaaaaagatatcaaggaaaggtggaaggcgtatttccacaacttatttaatgatggatatggatatgactctagcagtctagacacaagagaagaggaccggaactataagtactatcgtcggattcagaaacaggaagtaaaggaagcgttgaaaagaatgagtaatggtaaggcggtggggccagacaacatacctattgaagtgtggaaaactcttggagatagaggtcttgagtggctcaccgaactctctaacgaaattatg

SEQ ID NO: 1637 - DNA, 372 bp, Glycine max
  unsure at all n locations
tgcagcttcgttgtcaatttcgagcgtctggatatattatgtcccaaaattggacatccgtgtgaaaagttatgaccattcgaatttctcgagagcttccgtagttcaatttcgagcgtctcgatatattatctccccgaatcggacatctgtgttaaaagttatgaccattttaatttctcgaatgcttccgtttttcaatttcgagcatctcgatatattatgtccagaaatcaaacatcagtgtgaaaagttatgaccattcgaatttctcgatagcttccgctggtcaatttcgagcgtcttgatatattatgtccccgaatcggacatctgtgtgaaaagttatgaccattcgaatntcttgagagc

SEQ ID NO: 1638 - DNA, 288 bp, Glycine max
  unsure at all n locations
agcttcttggcaatcctcattccagcgatcagtttggttnttgcgtaagagcttgaacaacggctcacaaatggcggtgagctgcgatatgaatctggcaatataattcaagcgtcccaggaaacctcggacttgcctctctgtacggngttctggcatctcaaggatagccttcaccttttcggngtctacctctatccctttctggcttacaatgaaaccaagcaatttcccttatttgaccccaaaagtacacttggcggngttcaaccttaattgatatttctt

SEQ ID NO: 1639 - DNA, 477 bp, Glycine max
  unsure at all n locations
tcatgcaagaattattaatcttcttggccaactaataaccattgtgaggnggaggcatatgacgaaagttaagaatctttntatttgacttccaatttaggtaaacaaaatgggtagtcaaagttatgaaacccttagtattaatagatgtccataaatcagaagttaaacagatcctgccaggaatagcacacaacagttctttactgatggttttcttcctctcatatattctcaacatattagtcttaaaagtatttctagaaattggttaattgaggacacaaataacttatcaaagcctgaaactctggatacttaacaaaaatgaagggcaaattacgcctaatcattagattacacaacaattcgcgtgccatcattngatctatctctttggccttaaactttccttgcatgtctaagatcatttgactcatatcttcanagttttttatctcacatctgccattatga

SEQ ID NO: 1640 - DNA, 325 bp, Glycine max
caatttcgagcgtctcgatatcttatgcgcctgaatctgacctccgagtgaaaagtgatgagcatctgaatttctcgagagcttccggtgttcaattgcgagtgcctggagataatatacgcctgaatcagacctccgagtgaaacattatgaccattttaatttctcgagagcttccgctgctcaatttccagcgtctctatatgtgatgcgcctcaatctgacctccgcgagaaaagtcatgaccatttgaatgtctcgagagctctcgttgttcaatttcgagcggtttgatgtatcatgcgcctgaatgcgacctccgagt

SEQ ID NO: 1641 - DNA, 396 bp, Glycine max
actcagcttacagttccgtcactttggataatacacaaagaaggctgttcgatgttagaagacaatctcaacaggttagggatacagtggtggaaatgcaatctaaaattggtagtaatcgagtgacgtgcatggagttacaagtagaacttgagaaagaaaggtatttagtctgtaataatgtgtacaaaatttttcttcgaatgatttggtacacagaagttgtgaaccttcttgtctttctatatctaggtttgccaagaaaagagtggaagaggatctggaggtcgctaggagaaagtttacgcgccttatagagcagaatgagggctcttcagtaactgaaaagcttcaagaggaacttgaagagtacagggacattatcaagtgcagtat

SEQ ID NO: 1642 - DNA, 315 bp, Glycine max
  unsure at all n locations
agctngaagacaagactatacgaggtatctttcttgggtatagcaatatctctaagggctaccgtgtctacaacttgcaaactaagaaactcgtcatcagtcgagatgttgaagttgatgaatatgcttcatggaattgggatgaagaaaaagtggagaagaacgttcttatactcgttcaactacctcaagaagaagatgaggaaganaacccaggtgaaccaccttcacctccatcacaacaacaagaagagatggagtatccatacagaannaattgcaccagtagctcgtcttaataagacaaagctcaac

SEQ ID NO: 1643 - DNA, 404 bp, Glycine max
  unsure at all n locations
ttgattcaagatntcttcaagatcaagccttgcctcataacgaaaggtttcaagtcatccaaggcacatgtaatcgattaccaatacgtgtaattgattaccaatgatttgaaagtgtgtaatcgattactagagactctgaatgttgggaattcaaattttaaatgaagagtcacagctgttcaagataaataactatgtaatcgattacactaatgctgtaatcgattagtggagaggattttcaaggaatatcgccaatagtcacatcttatcatttggattttgaatggccatcaaaggcctatatatatgtgtgacttgtgacaaaattggaagagagttntgctggtccagaatgtcttatcctctcacaagaaaatgagagagattccaagagaact

SEQ ID NO: 1644 - DNA, 408 bp, Glycine max
  unsure at all n locations
agcttaatcttaatgatcaatcattaattcacgagacatcttctgtttgtctcctgatcatgcactgcagaaaatctagaagttgctgcaagaggttcaaaataaatggngaaagctataatgaactggccatccaccttgtcctcaggctccttttcttcattttcattagcaggactgtccttgtttccttctgctgcatcttcctctcctacaggcttctcatcagcaagaaccttttcagtttcattcaccacttcctcagtcaccctatgaaattaacatcaaaaggaacaaataattaataactgccaattaaaaacatgagactcttggatgaaaattctaatctgaacttcattattattaanattaagaattaanantatgaatacaaacaattactta

SEQ ID NO: 1645 - DNA, 413 bp, Glycine max
  unsure at all n locations
agcttaactctcaaattccncttcatcccattctcttttgatataggcattccttcattagggacaacaacctcagcaccaggtttgacaatatctgtcaatgggatcatgagactccttccgtccaaggtggtgagatccaacgttttaccagtaagggcctcaagaagggttatctcttggttgatcaccaaatcattaccatcccttctataaagagcatgcggcttctcatctatcacaaaaatgagatctgctgggatgacaccaggctcacggttacctttctctgggaaggtaatttttgttcctttcttccagccaggttttatctcgatagtcaaaatctcctccacatccccacatttgctgaaatggaattgcatgtgtcaaatattgtcaaaaaacacaaa

SEQ ID NO: 1646 - DNA, 343 bp, Glycine max
agcttgcttaagtccgtatattgaattctttattgtgcacaccacgtgttcttttccttcaactgagaatcccattgggctggtccatgtacacattctcctctaaatctccattaagaaagatatttttcacatgcatttgatgtagctctaagtcataataggctactagcgccatgataattctgaaggaatcctttcgtgacactgcgaaaaatgtctctttataatcaacatcatctgtctgagtaaaagtcttagtaacaacagttggcctagtaatgttcaaggttgccatgagagtcacatttagtcttacagacccatgtacaaccaactctat

SEQ ID NO: 1647 - DNA, 255 bp, Glycine max
  unsure at all n locations
tctcgatatattatgcacctgaatcagacttccgtttganaagttatgaccatttgaatttctcgagagcttctgctgttcaatttcaagcttctcgatatattatgcgcctgaattggacttccgtgtgacaagttatgaccatattaatttctcgagagcattcgctcttcaatttcgagtgtctcgatatattatgcgtctgaatcggacttgcgcgtgataagatatgaccatttgaatgtctcgagagct

SEQ ID NO: 1648 - DNA, 433 bp, Glycine max
cattgacaggacatgcctattatattcttgttaaacagagctcatacatctgtgagcattattaagctcgatgcaagatctttcatatgccccctagatccttcttaccaattgaagttttgaacaacatggattgagaaggtataatcatgaagaggagatacttaattcactacagagcaaaatggtgtaccataagatgatttttttttttcacgcaattatgaaaactactaaataacaaactagaagaataaaatgaaggcaaatagtacacagtacacacccatcttgccgtgattcgctccctgagttcaaattttggttcaatggggcgtcttcctgtgacaagttcaacaagcaaaactccaaatgaatacacgtcactcttttcagttagttgataagttttcacgtattcagggtccaagta

SEQ ID NO: 1649 - DNA, 366 bp, Glycine max
  unsure at all n locations
ntatagaaattcaaatggtcatgactcttcacacgaatgtccgattcggtgaaataataaatcgagacattcgaaatataacaacgaaagctctcaagaaattcaaatggtcataacctttcacgcggatgtctgattccgacacataacatatcgagacgctcgaaattgaacaatggaaactttcaagaaattcaaatgatcataacatttcacacggatgtccgattaaggcgcataatatatcgagacgctcgatattgaacaatggtcgatattgaacaatggtagctctcgagagactcacatggtcataacttttcactcgaatgtgcgattcggagacataatatatcgagacgctcg

SEQ ID NO: 1650 - DNA, 372 bp, Glycine max
  unsure at all n locations
agcttattctcgatttgttgctntggatttatcttganaaaatcgctgcttgagaagtgcctgttagtgttttataagatggttagtaagggactgttgcctgacgtcaagaattgcaatagggttcttagattgcttagggatagggataataacatcgacgttgcgagggaggtttataatgtgatggtggagtgtggaatttgccctaccgttgttacttataacacaatgttggattccttttgcaagacagggatggttcangaagctctgcagcttttgtttcagatgcaggcgatggtgtgttcgcccaacgatgtcacgtataatgttntggtgaatggtttgtctcacagtggggagatggag

SEQ ID NO: 1651 - DNA, 429 bp, Glycine max
  unsure at all n locations
agctataagtgaggccttgngagaggatntgtccaaaccctccaacaccagtacttgtagtaataaagctgacactactactactaaggcaaggataagatgcagcatcgaccaaagctttctgaagaacaaatctgtaaagggtaccacggaacttcttgaacagcatgtgtggaggccccagagagggttgccagagcgtgcagtggcaattcttaaagcctggttatttgagcattttcttcatccgtatgtttgtctctatctatgtctcttattaataattttcttgctccgtgactctcttttctgcattctaaagagacatttggattgaattgtggcctttttttgctgttgttgaatttcttttcagttaccctacagacactgataaacacatgctggctagtcaaacaggtctttcac

SEQ ID NO: 1652 - DNA, 277 bp, Glycine max
  unsure at all n locations
ttctctttcccatgtcaactatgcagcttgcggtcaacatgaacggccttcccaagattacaaggatgtcagtatcttcagagatatccataaccacaaagtctgctgggaagataaaatgttntaccctgaccaacacttcaatcactccacatgacctggtaatggagcggtcagctaattgcaaagtcattcgagtgggcataatctccaactctcccagccttctgcacatggagagtggcatcaaattaatagtggcttccagatcaatcat

SEQ ID NO: 1653 - DNA, 337 bp, Glycine max
  unsure at all n locations
agaacgcatgaacganaatgcttttcatggtgctccgaanaagggttgaggatggagaatcgcactaagaaatcactacgcatggctccaaactcgtgggtggaggacgcatgaacgaaaacgcaattcatggggctccgaaaaagggttgaggatggagaatcacactaagcaatcactacgcatggctccaaactcgtgggtggaggacgcatgaacaaaaacgcatttcatggggctccgaanaagggttgagaatggagaattacactaagcaatcactacgcatggctccaaactcgtgggtggagggcgcatgaacgaaaacgcaattcat

SEQ ID NO: 1654 - DNA, 400 bp, Glycine max
  unsure at all n locations
agcttatggagtagataaacaaaagcttgttgaggagattactcgtgcctatgcccaccaaatatatattgatggattnttcaatggtgatcctcatccaggtactctctctctctctccctctacgtttgtgcttatgtatgcatgtgcatatgatgtaacacttccgattgttccatgtgctcatgaactattttggctctcttactggaatcatcataggaaattttcttgtgagcaaggaatctccacatcgtcctattttacttgactttggccttacaaagaaactatcaagcaccattaagcaagcacttgcaaagatgtttttggcttctgctgaggtntggtttggcttttgtgcttttcatgattatgtggatactaataacatcatata

SEQ ID NO: 1655 - DNA, 382 bp, Glycine max
  unsure at all n locations
tatagaatatataatataagaacagtgactattgaagagtctatacatgtttcctttgatgagcctaatgccattcttgcaaggaaggattatttagatgatatttcagattccttagaagatacacatattcatggaaatgactctaaagaaaaagatgaacgaagcaatgaggattctcaagataatggggctagaggaaataatgaacttccaagagaatggaaagcctcaagagatcatccnctcgacaacattattggtgatatatcagaaggggtcacaactagacattctcttatagatttatgcaagaatatggctcttgtatctatgattgaacctaacaatatgggagaagtcatagtagatgataactgga

SEQ ID NO: 1656 - DNA, 252 bp, Glycine max
tcccggcaacattgtttgtattaatgaattcaacattatccttgaatatcagtaaacgtttttgcttctctgcagcatccttatataccttcccatatttcttcatccactgctcatgtctttcggacatggatgcctcatggaggttgcgggacattacttgggaagtgcacattgagagaaggagcacaagagctaaaatgtgctgctttttgcccatggaacccatgtcttttctcaacaatgtatcaa

SEQ ID NO: 1657 - DNA, 312 bp, Glycine max
  unsure at all n locations
acactatgatactcagcttaccactgtccggttactccttgcccttgttgctcttcataactggcaccttcaacaattggatgtaaacaatgctttccttcatggngatcttaacgaagaggtttatatgaagcttcctccaggacttattgtggataatcccaaccttgtttgtcgcctttagcattccttatatgggctcaaacaagccagtcgctaatggttcacacggctctcgtcatttcttctctcccacagattccgacgatcttcagcagatcactcgtttatatatactctgataatgaccat

SEQ ID NO: 1658 - DNA, 451 bp, Glycine max
  unsure at all n locations
agcttgtaattttcttattgcctttgcttgttattacatggttnttatagaattcctaatatggaataatcctaggaatattacaataaccgttttattgataagaattgctcagcaggatcacaattccaagcaaggcgatctgggaaaggatttgcagaagcttctgttttggcaggattcttcaaacgaagtcgtgaaggtaagtgggcctcttcaccttacgtttgggctttacttcgttatgcaccccctgttttgtaattcccacctccgagctcatctaagagctcatctattgtgggaattgngaactggtcttggaccatgacagcattgagggccctgtagtccatacagaaccttcagctcccatcatgtttccttacaaggaggacgagtgaggagaaagggcttgtactangttggatcaatcctttttgaagcatga

SEQ ID NO: 1659 - DNA, 428 bp, Glycine max
  unsure at all n locations
gctatgctgcntatattacaatagaacttccttcacctcagcagcanaatcaaccacagcagaacaattatgacctctccagcaacaaatacaaccctggatggaggaatcaccctaatctcagatggtctagccctcagcaataacaacagcagcctgctccttccttccaaaatgttgctggcccaagcagaccatacattcctccaccaatccaacaacagcaacagcccctgaaacagccaacagttgaggctcctccacaaccttccctcgaagaacttgtgaggcaaatgactatgcagaacatgcagtttcaacaagagaccagagcttccatttagagcttgactaatcagatgggacaattagctacacaattgaatcaacaacagtcccagaattctgacaagctaccttctcaagct

SEQ ID NO: 1660 - DNA, 297 bp, Glycine max
acagcagaataattatgaccgttcgagctactgatacgggccatgatggaggaattatcctaaactaagatggactagttctttacaacaacatcaacctgtccctccgttccagaatgttgctagtacaagcaagccttatgttcctcctacaatgcagcaacaacagctgtctcctcatagactacaggcaactgaggctcctactcaaccttacttataagagtgagcgaggcaagtgaccatccataatatgcaattttagcgagagacatgagcctccgttcagagactgac

SEQ ID NO: 1661 - DNA, 398 bp, Glycine max
  unsure at all n locations
agctnttcaaagccaatttcatcagagaagtcaggtactctacttgactcgccatcgtcgtcatggtcaaaatggccaatggcaagtggcgaatgtgcaccaactacacgtatcttaacaagctagttgatggagcgtccgagttccaagtactgagcttcctggatgcctacacatgatacaattagatccggatgcatgccctacatgaagagaaaatgacattcatctttgaagatgccaacttctgttatagggtcatgccctttggcctataacatgtaagcactacatactagagagtgatggaccatantattcaatagcaaattggatgaaatgtcgaggtctgcgtcaatgacatggtcatcaaatcacataccactagcccacatgtg

SEQ ID NO: 1662 - DNA, 429 bp, Glycine max
tatacagatatacatattttccagcaacatcttgatggctctattcaatacaacatacatcacatggaaatattagattacagccagacacaatgcatagatgctactgtgttgggtgctttgctacattgccacatgattttctggtacaagaactgtttggaggggatcaaattcaataaagaatgtccgaatcttcatcggagcaagttcaaccaccaacttcgtaggatcaacaggtcctcctctcaccaccttcggctcttcagaggagccttctaccttccaatctagcttcctcttttccatttgagctctttcttgattagcagacaaactcatctctgtcactttattgatctgaaaagattgagtagtcaaaaggaaactatacatgagtacatgatgtgtgaaaaatactaacttgga

SEQ ID NO: 1663 - DNA, 180 bp, Glycine max
  unsure at all n locations
gaggttntgattgatcaaaaagaagaanctacttcataccgatatgcccttaggcacggcaatacataacatagaaatcacanctcgaaagggtggaccaatagctagagcagcaggtgctgtagcgaaactaattgcaaaagaggggaaatcggccacattagaattaccttctgggga

SEQ ID NO: 1664 - DNA, 440 bp, Glycine max
  unsure at all n locations
cttgtgtgtaaagagtcacaacttanaattcttttttcaagtctaaagagtcacaactctttagaaaaataattttgtaatcaattacaccattttaataatcaattatcagtaaggaattttcaaaaataactcccaacagtcacatctattcaaatgtttttgaatggccatcaaaggcttatatataggtgacttgggacacaaaatttctcaagagtttttactgcacaaagagtctcatcctctcaaaaactaaattatcttatcctctaaaacattctttggccaaacacttgcaaattcaataaggaatcttgagtgatcttcaattgttatatctttatcttanaagagagaattcttcttcttcctcttcttattcaaagagattgattaagggaccgagagtctcttgaagttgtaaaaattcttgacac

SEQ ID NO: 1665 - DNA, 357 bp, Glycine max
  unsure at all n locations
gctacacaaatccngtctaatagctaagctcacccccatgcgcaaaaatacatgaaaataaaaaaaaagctcctactacaaagactacccaaaatgccctgaaatacaaggcttaaaccctataatacaagaatggccaaaatacaaggcctaaaagaaggaaaaacctattctaatatttacaaagataagtgggctcatacttagcccatgggctcgaaatctaccctaaggctcatgagaaccctagggccttcccttggatctctggcccaatttacttagagtcttctatccaatgcccttacaaggtagaattgcatcagtagggtcggtgctgcttaccctcaacgatca

SEQ ID NO: 1666 - DNA, 329 bp, Glycine max
  unsure at all n locations
taatatcaccaggaactatcacattaacaaaatcacagcctctaagatttcgacanattattaggtagccttgaagcattatgtttttatgattctaatctaccattctctntatatataatacataactatattttttaatttgtaatttatttataatattcaattatgttatgtaaaaaaatagttaaaataattaacattataatgattttagactatctaataatttctagtaagattttaatgtataacanacctggaagcacagaaggctaccacataatccgtcccagaacaagtgaaaatactagttggatcatcataag

SEQ ID NO: 1667 - DNA, 400 bp, Glycine max
  unsure at all n locations
acttaagtgattattttataattttaatagataaatgactaaattatcagttaanaataaaagttaaagaaccaaatgagtaatntaatcaaataattgtgatgtttgacaacactcacaagacttatatattgtaattntgataattcattaagatataatggataatattaattcttctcactttttgcattaaaacattctcactaattatttaatcttttctttttaacataaaaggcaaaacctcgctagatagagagagaggacttaaatttgtgttgataaaatttactgtgaagcttattaaaatatttataaaaatcataaatcattttaacaagcttaacaaaatacatactcattattactataatcaaataagtttcatacaaactcc

SEQ ID NO: 1668 - DNA, 372 bp, Glycine max
  unsure at all n locations
agcttccacttgantaatcttaaccattgttttttttcaaataatatctcatcaatttggtgactagcccatccatttgtgtagttttctcggcaggatctggtcttgaggtatctatgtccaaaaaacaccaccaggggaagtttcacttatggcattttctaatctttcaattccaattaaatggaaaaatagtttggttgatagcttatcatattagttgaaatgcttagtttgcaggaattcttccttgtttctattnttgaacctaatgatctgcgttggcagatgctgtgattcccatcacttgcttcatactggtgtgtttggttgcactacaacactatggaacacatagggtgggattctttt

SEQ ID NO: 1669 - DNA, 269 bp, Glycine max
ataataaccggaagtgcaacgatataaggacctagagcagattggactgaggaagacagaagattactacaatataatttaaaggccaaaaatattattacatctgccttaggaatagatgaatactttagggtttcaaattgtaaaagtgctaaggatatgtgggatacaatacaagtaacacatgaaggcacaacagatgttaaaagatctacggataacactctaacttcgtgatatgaacttttacgatgaatgtaataaaagta

SEQ ID NO: 1670 - DNA, 206 bp, Glycine max
  unsure at all n locations
cttttttcctcgcagcaaatcaaccacngcttaacaattatgacctcttcagctacagataccaccctggatggaggaatcaccctaatcttaaatggtccagccctcagcaacaacaacagcaggctgcttctttctttcaaaatgctgctggcccaagcagaccatacattcctccaccaatccaacaacagcaacaaccccag

SEQ ID NO: 1671 - DNA, 352 bp, Glycine max
  unsure at all n locations
agcttttatacggagtttaaagataaatacatatatatttatagaaaagtcaaacttctctctttttaaaatgcatatcccttaaanatgcttgagaaataataatgttattaaatagttatagttatgaaaaattattaaggacaaaatttagataccaattgttaagtgcttttagagatttatttgaataatttggcataataaaatttatattaaatattactcttttcggttctatttataagactcaattacttaatttagttagattaaggagagtgattagtttagttgataataagaaatatgttcaagatcatattcttttttctaaaactaccattgtcta

SEQ ID NO: 1672 - DNA, 316 bp, Glycine max
  unsure at all n locations
agctngaagaccccataaggctcctattgtttatggtgcagcaactatcttcattatcttccagtaatctccctcctaagaatgctgtcacacacctgattggccctctatggcccactagaactgccagacacgtgtgtngaccatcttgttctctagcccaaaccctgctcgttgagtcagccgagccactcactacatatttggccacacttgccagacacaacactgcatgcgtgtgcccttggatggagccaccgtattgtaactgccccgcanaccaacccttgtgccagtagtgtatgtagccatcagt

SEQ ID NO: 1673 - DNA, 471 bp, Glycine max
  unsure at all n locations
cgcgctntcatatctaatattacaacttggtctaagaactctattacctatcttgtcctgacaacaggttgggatttttgagatagccccatccaagcagtcattgcagtctttctcagacaagtcaggggtgcactctgccataccatatatggtctgaaaacttgaagcagttacattatccgtggcatacttacgacgagagtcacccgatgcggctacacctttgaggtttctcattaagttcgccagagcttgactgaacttatccggttccgttacattgtttatgttcatcaaggattggctaggttcaatttccatgatgccaaatatcgagcggggtgagtagcgcaacatgcatttgctagtgttcaaccacagaagtgcctctttctggtttggacaaaactgtttaattgtgactctggaatcattgaggcaactgcggcactcatgtggctcaacatc

SEQ ID NO: 1674 - DNA, 448 bp, Glycine max
  unsure at all n locations
acctgtctgagcaatcttatgttctggttctcaccttcatatcctctngaccttctcccattacctgcaagcaaacattgtgttctggagtaggcttgtcttccacagacaagtcgaaatcaatttttgggtcttcaaaacctaactccagctttctcttccccatgtcaactatgcagcttgcggtcaacatgaacggccttcccaagattacaaggatgtcagtatcttcagagatatccataaccacaaagtctgctgggaagataaaatgttttaccctgaccaacacttcaatcactccacatgacctggtgatggagcggtcagctaattgcaaagtcattcgagtgggcataatctncaactactccagccttctgcacatggagagtggcatcaaattaatgttggctcccagatcaatcatagcctcttccacatttac

SEQ ID NO: 1675 - DNA, 326 bp, Glycine max
  unsure at all n locations
tcaccattagtgacgggaaccttactctttcttatggaggccactataacctgacacatgcgagtgagggggctaccaccgggcttctgaatccgatacagactcgtaccggataagaagctcaccacagcaattgccatggccactgctggaaagacaaatccccacccccaacttacagtagtaaggacccacaccaccaaagaagcagcaacgcgaccaccactatttattgacaagcagaaccactngaagaaagagctcttgtgctcnctctcagcttcatcagcatcacaaattgagtgcaccaaagaagagacacaagc

SEQ ID NO: 1676 - DNA, 465 bp, Glycine max
  unsure at all n locations
actaagctttacctttagtttaacccttagaacttcccggccaaattgttatatataaagcaatgttgatgttcaaaggacactttacatgcctttntaatcaactgacctacgcttagcaagttctggtcaatgttaggtacataaagaacatctgatattaatttgatacctgaacacgttgaaattgcaacagttccttttccttttataggaatatagccaccattcccaattctgacctttgagacattagttggcttcaaatccttgaataaagtcttatcatatgtcatgtggttcgtacaaccactatcaatcaaccaactttcacttgattcactactcaaggttgataatttttctttttatccttacctttgatatggatgattgcactattttcgctgcttgctggctggatcttctagaanaaatgctttntgctttcatcaacttcatgat

SEQ ID NO: 1677 - DNA, 624 bp, Glycine max
  unsure at all n locations
ttctccactaagttgcctgatgcctgaaatgtcttttctgatggcagcggtcctagatgcagggaagaatttctccatgaacaccctcttaaggtcattccagctgaaaatggacctaggagcaaggtagtatagccaatcttttgtcactccctctagagaatgaggaaaatcctttagaaagatatgatcttcctggacattagggggcttcatggtggaacaaaaaatatggaactccttaagatgcttataaggatcttcacctgcaagaccacgaaacttgggcagcaaatgtattagtccagtcttgagaacatatggaacaccctcatcaggatattgaatgcacaagctttcataagtgaaatcaagtgcatccatctctctaagagtcctttcacgaggtggaggttgagccatgttctcagtatgaaaattagcagcggaatgttcaaaatcacaatattcagaatcaccctcaacagaatgctcaaaatgcacataatgaccaggatgcacactatgcctaactaatctatgaaagggtctatctattntatgatcaaagggttgtaaatcacctagattgcccctagtcatgcactatatgcagcaaatagt

SEQ ID NO: 1678 - DNA, 563 bp, Glycine max
  unsure at all n locations
tcttatccaaggcaattcttggtggtgaagctccttcttccttggcttattccctagtggatggtgcctcccctatcctcttctcctttgccttccgctgcatctccatggtgaaaaatcaccattgaaggacctcattgaagctcaaagatccagcctccatagaagctccacaagcaagcttccatcacttttcacacagaggtcagattcgggcacataatatgtcgagatgctcggaattgaaccacggaagctctcgagtaattcaaatggtcataacttttcacacagatgtccgattcgggcgcataatatgtcgagtagctcgaaattgaacaacggaagctgtcgagaaattcaaatgggcatactttttcacacctgcctcacattcnggcacataatatgttgagatgctcggaagtgaaccacgaaagctctcgagaaactcaaatggtcataacttttcacacggatgtccgattcaggcgtatcacatatacagacgctcgaaattgaacaacgaaagctctcgagaaatacaaatggtcataactttt

SEQ ID NO: 1679 - DNA, 402 bp, Glycine max
agcttgaatcggacctgagtgtgaaaagttatgaccatttgaatttctcgaaagctttcgttgttcaatgtcgagcatctcgacatattatgcgctcgaatcgaacatccgagtgaaaagatatgaccatttgagtttctcgagagcttccgtggttcaattccgagcatctcgacatattatgtgcccgaatctgaccttcgtgtgaaaagttatgaccatttgaatttctcgagagcttccgatgtttaatttcgagcgtctcaatatattgaaagcctgaatcggacctcagtgtgaaaagttatgaccatttgtatttctcgaaagccttccttggttaaattccgagcatctcgacaatatatgtgcccgaatctgcctttgggtgaaaagtatgac

SEQ ID NO: 1680 - DNA, 599 bp, Glycine max
  unsure at all n locations
taagaatatggaattgaacaaagttaacaaaaatggtagcatgcagcaagcttcatgtgcttaggatacagtagaacatgaaagtttgtattagagtcaagttgcgaactcaactcatttctagacttttttttttctgaattctcatttagtgtcaactatccctactctaattttatttattatgttttaatatttaatgttctatacttttgtagatttaatttattgttttaaatatactatagcaatgtgtgtgcgcacacgaatttatgcatttttaggtttggtgtatattttttatcaacaattattaatatacctcctctaattgtttactttttttttaatcccaaattcaaaagctagcctccataattctatattgggttatccgattttaacctttgcaatcatattttattgtattctcaatgtcccttggtccatatgtctctcaattgaacacgagagtaagaatgtgttattctcgtaaagttatgatcattgattcttttatacttgagtgaaagagtaaacacaaatatgtcanatatcacatattggtatgcatggtcacacatatttcatgttctact

SEQ ID NO: 1681 - DNA, 359 bp, Glycine max
tccattgttcaatttcgagcgtctcgatatattatgcgcctgaatctgactttggagttgaaagttatgaccatttgaatttctcgagagcttccgttgttgaattaggagcgtatcgatatattatgtgccggaatcggacatccgagttaaaagttatgaccgtttgaatttcttattagcttccgttgttcaatgtcgaccatctcgatgtattatgcgcctgaatctgacatccgagttaaaagggatgaccatttgaatttcacgagcgcttccattgtgcaatttatagcgtctctatatattatgcgcgtgagtctgacattcgagtttaaagtgatgaccatctgaatttg

SEQ ID NO: 1682 - DNA, 344 bp, Glycine max
agcttataagaaattcaaatggtcataacttttaactcggatgtccgactctggcgcataatatatcgagacgctcgaaattgagcaacggaagcagttgagaaattcagatggtcataacttttcacacggacgtcaaattcaggcgcataatatctagagacgctaaaaattgaacaacggatgccttcgaggaatacaaatggtgatagcttttaactccgatgttaaagtcatgcgcataatatattgagacgctcgaaattgaacaacggaggctctccataaattcaaatggtcatgacttttcactcggaggtcagaatcgaggacataatttatgg

SEQ ID NO: 1683 - DNA, 582 bp, Glycine max
agcttgttactggtttgcttctctgcaatggggttgtataaatgatgaaatgcttatagaaggcttttcttgcttttttgtccttgatacataattaggttggcaagaatcttcatgttctcagtcagatagagggtgttgacctagatatgtacaaagatgttgtgcttcccagagtactggagcaggtctaattgctttattgtttctatttctaatcatcaaagacatggttaactttctaaccataaaaaaaaacgattccttttcctcaattatcatgggcaggttgtgaattgcaaagatgagttagctcagttctacttgatggattgtataattcaagtcttccctgatgagtatcacttgcaaactcttgatgttttgttgggtgcttacccccaacttcaagtcagtgaacttgcacatttttttgtattacttctggaggatgccttaatgtatatatgttttttctcactccgaaacatgaaaattcaggttagtgaacttgcacagttttgttttactaatataataatattatattttattgggaaaaagcccaaattaaatattgaa

SEQ ID NO: 1684 - DNA, 398 bp, Glycine max
agcttcatgtagctttttctagaagcttcattaagaggcttcctccagaagcttcctcgtggcttctttgagaagctttctcaagaggcttctttgagaagctagatccttatctatccacacccctctattaactaaattaacttccttaaaaataattaccgatgaaaataacgcaacaaatattcaaacatcaaacataattactaatagtatatagatatatatatatcagggtgttacaactctcccacccttttagaaatttcgtcctcgaaatttaccttactcaaacaaggatgggtgagcttctcacatctgactttctaattcccatgtggcatcttctcctgatgcacctccccagatcaccttgaccaacagaatctctttccctc

SEQ ID NO: 1685 - DNA, 303 bp, Glycine max
agcttgaaggcaaactggatgcattggttaacttggtaacccacctggccttgaatcagaaatctgtacctgtcccaagggtttgtggtttgtgctcctttgctgaccaccatacagacctttgcccttccatgcagcaacctggagcaattgagcaccctgaagcttatgctgcaaatatttacaatagacctcctcaacctcagcagctaaatcaaccacaacagagcaattatgacctcttcagcaacagatacaacccttggatggaggaaataccctaacctcagatggtccagccct

SEQ ID NO: 1686 - DNA, 663 bp, Glycine max
  unsure at all n locations
tgaaggtaggagaagatgagtggagggagagggagtgaagaggcacgaaattttatgcctcaaatgaggtctgaactttgaagtgtaattctcaaatgatcaaagttacaacaagtgttacacatgcttccatttatagcctaggtagcttccttgagaagcttccttgagaaacttccttgagaagcttctttgagaagcttccttgagaagctagagcttagctacaaacacccctcaaataactaagctcgcctccttgagaaaattcctagagaagctagagcttagctacacacacccctctaatagctaagctcacctccttgagatgagaagctagagcttagctacacacactttctataatagctaagtcgtcatattcccacatggnttcttcttctccaattntcaacaaatatattcaagggaaatgaaacaccggaaagcataccgggtcatcaagtatttaaaattaaaacagagtgatccgagtatcgaacttagggaacttgcttattagacaaagttttattaacgagtaaggcattgttggaacacacattgacaattgatgggtaaaaacagaaataaactaattctatggtaagaataataaatgcaagtaagttaaagttgacaacaacaggtaaaaagtgt

SEQ ID NO: 1687 - DNA, 557 bp, Glycine max
  unsure at all n locations
ttggagtttccaagtgccaattcgtcttcttctttagtccagtcttcttctggcttcaattcattagagggctttccttctgtgtccagcatcttgggatgttcccagcctttgatgacagctttccaggttctgctatccagtgatttgaggaaggccaccatccttgctttccagtattcatagttggttccatccagaataggtggtctgttcactggtcctccttctttctccatgttcatcagaatttatctccctagatctcactcagtgatttcgagtgccagctctgataccaattgaaattctgatactggggacagatgtcgtacaggatgtcacgacatcacgcttcagaacatgcagattatagttgacagtgtggacagtttaaacaagaagataacacaagagattngttaacccagttcggtgcaaccttacctacatctgggggctaccaagccagggaggaaatccactaaaatagtgttagttcaaggtctaacagccactgtttacaaccttctcacctaaccactacccgtgcgatc

SEQ ID NO: 1688 - DNA, 440 bp, Glycine max
agctttaagactattcacataagttaacaagaagcaataaaggatcaactgtgaaaatgaattgcattcccatacctagatcttctccacaattccttcgaatttatatatgcttagatgcatgcaagaaaggattcaaggctaactgcaaaccttttattggtcttgatggttgtttcgtaaaagggtactatggcggtcatttgcttgcaacagtgggacaagatgcaaacaatgccttttttgtgattgcatatgcggcagtaaatattgaagataaagataactggaagtggttcctcactttgttacctgaagacataggagactacaagcaatatggctggaatttcatgtcagacatccaaaaggtgccattaaatataaaaagttgatttcatgcctgcatgggataattttgttgtcatgctagcaatatg

SEQ ID NO: 1689 - DNA, 709 bp, Glycine max
  unsure at all n locations
ttgagccaaaatcctgactcaccataaaccttgacccagggtgagaatgtcaatccttaccctcggaagcaaaaaaggaatagaagggaaatttccaatcaaagaaaaagagaaggaaaatttccaatgaaagcaaaaaaagaaaggaagggaaatttccaatcaaagaaaaaaagaaggaaaattccccaatcaaagagtgggagaaagcaaaaagaaaagaaaggaaattcccaatcaaagaatgggagaaagtaaaaaaggaagaagaagaaggaaagaaagccctgatcggggatcgaaggaaaaaacagaagaaatatgcagagaggtctttggaccggacaatatctgaacaatacagaattgtcaccaaatgaacaaaaaagaaggaaaggaaaccacgacctaaaatggtcttctccctttaattaccaaccaaaatcccgtgcgctagcgaccctttttttttctcgccccgcactagacaaaaaaaaacggaaaaaagaaaaaaagccagaaaaatcaaaagccaaaaacacacaaaagccgaaaaacccaccaaaagaacccattcccaagggaagccctattgatccatgatcacgcatgtaatntttgatttgataggaagtaatttgcanagtcaagtcatgacatatctatggntcngaattangatgaaacacttacctgtgcgagattgata

SEQ ID NO: 1690 - DNA, 409 bp, Glycine max
agcttgccttgccccttgatatatttgagggactcatggtcactatgaatgacaaattccttgggataaaggtagtgatggcatgttttcaaagcccgtactaacgcatacaactccttatcataaattgaatagttaaaggtaggaccacttaacttttcactaaaataagcaattggatggccttcttgcatcaacacagccccaatcccaacattagaagcatcacactcaatttcaaaagatttttgaaagtttggcaacgcaagtatgggggcattagttagcttttgcttaaaaacattgaaagcttcttcttgtttctctccccatttgaaaccaacatttttcttgagcacttcattgagaggtgctgcccatgtgctaaaatccctctattaaaacttgc

SEQ ID NO: 1691 - DNA, 584 bp, Glycine max
  unsure at all n locations
ttttgagagattaaatttaccttatagagagtattttgtgaatttgactgcataacaaattaaaagtaaaacaataaatattttaatgatatgagacacttaaagaattaaaattaatcaaaatatttaacaagaataaaagtgtattttattaatgttaggagtaattttacaaaaatgcgttaatttttttatcttaataaattagttaattgggtcttaaaaattcagcaagagtaaaaataataataattnatacttcttccttctctttttctatttataagacatttcttaaaaagactatttgtacttttatataatacttttttcaaaaaaaattattaattattttttaacccanatatatttattcattttctcctgaacgccatanagtaactaaatacattcttttttcttctctcgtaaaaaccacacaacatgactgaaacatattaattccttacgcaaaaattaagatttgctctgcattatatatttgagtgtagattttagtgaacatatccaattttgggacgaacacatcatacgtcaagaattataaaaaaaataatgtattt

SEQ ID NO: 1692 - DNA, 552 bp, Glycine max
agcttccattttcaattgcgagcatctcgatatattacgggactcaatcgtacattcgagtaaaaagttattgttgtttgaatatgctcacatcttcagtattcaatttcgagcgtctcaatatattaagggacttaatcggacatccgagttaaaagttattgtcgtttgcatttgctacgagcttccgttttcaattacgagcgtctcgatatattacgggactcaatgcaacctccgacttcaaagttattgtcatttgaatttgctacgggctttcgttttaaatttctagtgtcttgatatattacgggacttaatcgaacattctagttaaaagttattgtcgtcagcatttgctcagagctttcgtttcaaagacgagtgtttcgatatgttacgggactcatccgaattaaaaagtattggcgtttgaatttgctacgagcttttgtattcaacttaaagcgtcttgattatgttacgggactcaatcgaacatccgagtaaaaggtatattgggttggatttgctacaagcttccattttcaa

SEQ ID NO: 1693 - DNA, 640 bp, Glycine max
  unsure at all n locations
ttaattcaagatcaagaaactaagatcaagagtcagataaagacttagtttatttgttaaaagaatctcacattggttaataaggtttggcctcaaaagcttgattttaaaatgattatataaagctttaaaagatgttttaccagcacaaaaataagtttttttgcactggtaatcgattaccaagtattgtaatcggttaccagagacaaattacataaaaatatttctagaaggattttgaaatttgaatttcaaatgttgtaatcgattaccacttgtctgtaattgattatcagtgacaaaacttcataagttaactttgaaaagtcatgaccttcaaaacataactgtgtaatcgattatcaagacattgtaatcgattaccagtgagagaatttttgtaaaatattctgaaaagtcacatctcttcaaaagtttttgaaaagccaccaaggacatataaatatgtgacttgtctatgaaaatatntagagttttctgatgcaatcctacccccacaagggcattagatagaagactccaagtagatcgggctagagatgcaagagaagccctatggttctcatgagccttanggtagaattcaagcccatgggctaagtatgactccacttta

SEQ ID NO: 1694 - DNA, 649 bp, Glycine max
tgaagtgtccagttgtgatttttgttttccagttataattataaatttgactttattttctaactatctaaattcttattttatattatcagatagtctttttggggatagacaacatccatgcgatgagagagagctttgttcggctccgagaatacatggacactcatggaagaacgtcatcagatggaatgtcctcttttttggttagtccgtgaatgttaaaacaaaatgtaattatcatttttcaggtagtgtaaatttatttggttcctatatagacctgcacaatatttatgttttagtccttacaccttaaaattaaaaactacttgttttagtcccaatacatacactttttaagtcgcttaatccctatagcttctgcgtgacagggattaaaacgggttaaaaaatgtatgtgtagggactacaacgagtagcttctaggtgtaggaactaaaacatacatatggtgcataggtataaggacccaatgagtaattaaatcatttatttttaatagtatatatttgatatttgaagagtgatactactattagctgtataatgacacttgtagattagatatttaatctttcttcatgatgcttaatatatatcttaatattatttaatacttttttct

SEQ ID NO: 1695 - DNA, 583 bp, Glycine max
tatgaccattcgaatttctcaagagtttccgttgttcaatttcgagcgtgtagatgagttatgtccccgaatcggacatctgtgtgaaaagttatgaccattcgattttctcgagagcttccgttgttcaatttcgagcgtctcgatatattatgaccccgaatcggacatctgtgtgaaaacgtatgaccattcgattttctcgagagcttccgttgttcaatttcgagcgtctagatgagttatgtccccgaatcggacattcgagtgaaaacttatgaccattcgaatttctcgagagcttccgttgttcaatttcgagcgtctcgatatattatgtccccgaatcgggcatccgagtgaaaagttatgaccatgcgattttctcgagagcttccgctgttcaatttcgagcgtctcgatatattatgtccccgaatcggacattcgtgtgaaaacttatgaccattcggatttctcgagagctcttcttgttcaatatcgagcgtgtagatgagttatgtcctcgaatcggacatctgtgtgaaaagttatgaccttctattttatcgagagcttccgc

SEQ ID NO: 1696 - DNA, 362 bp, Glycine max
agctttgatgcaacatttggagaggttaatgaaacaacgagatgatgcgctccatgagaggttggatcaaatggagaatagagatcataatgaagaagaaaggaggagaagagggaatgatagtgttcctaaacaaaaccgaattgatggtattaaactcaacattcctccatttaaaggaaagaatgatccggaagcctacgttgagtgggagatgaaaatagagcatgttttctcatgcaacaactatgaggaggaccagaaggtgaagcttgccgccacggagttttccgactatgctcttgtgtggtggaacaagcttccaaaggagagagccagaaatgaagagccaatggttgata

SEQ ID NO: 1697 - DNA, 605 bp, Glycine max
  unsure at all n locations
tggccatattcctaattctcctctcctttaactaaacatcttgttaatatttgggttattgtatatttcttaatactcataaaattctggctcaagtttcaattctcactttcacggaggtaagatcctaaattccaaatcaatttatggattatttgattttaattgaatcattgtgcttatacaaacacccactcatattatgggttaataatttgattcatttttacgggtgttgtaagtagattatggatgcaaggaaggtgttctatgaaatgcctgaaagaactattgtttcttagaactcggttatgactgcttgtgttgagagtctttcattgngtgatgggattgagtatttttttaggatgtggggttgtgcgtttgagcctaatgagacttccatggttgtgttgttgctctctacttgtgttcttcaagctccatccatttctatttcttttttattaattactaataatactatatatgctattgtaattgtattaataatgagtcattaataatactatatantgtatggctactatatatggctattactngtagttgaattcaatgacttattttctgatctccgatgc

SEQ ID NO: 1698 - DNA, 675 bp, Glycine max
tggccatattcctaattctcctctcctttaactaaacatcttgttaatatttgggttattgtatatttcttaatactcataaaattctggctcaagtttcaattctcactttcacggaggtaagatcctaaattccaaatcaatttatggattatttgattttaattgaatcattgtgcttatacaaacacccactcatattatgggttaataatttgattcatttttacgggtgttgtaagtggattatggatgcaaggaaggtgttctatgaaatgcctgaaagaactattgtttcttagaactcggttatgactgcttgtgttgagagtctttcattgggtgatgggattgagtatttttttaggatgtggggttgtgggtttgagcctaatgagacttccatggttgtgttgttgctctctacttgtgttcttcaagctccatccatttctatttcttttttattatttactaataatactatatatgctattgtaattgtatttaataatgagtcattaataatactatatatgttattgctatattatattgctattacttgtagttgaattcaatgacttatttctgatctccgatgcttatcataatggtagagatacaatgtatttgtcctataaacctttggttatattactctatggattttaa

SEQ ID NO: 1699 - DNA, 722 bp, Glycine max
  unsure at all n locations
tgataagaaagaagaaagtattatgcaataacaagataaattaggtgtggctagtaaagaaaataaactatgaaagtaagcaagaaattaaagtgaaagaaatgtaaactaggcggatcctaagagtgtttggatgacctcatttaaggtttccaacaaaatactcactatcctaaagaaaaattgcctaaaagtattacacacaaatggaagtagggtgacctattggaggctcccaacttacttccaatgaaaggcctttttgttataaaatttgaaagcaatgaaggtaagtaaattctcaattaaaaaaattacaaaaaggttctcaatttttggtgattgttctctctttggtgattcactcaatttggagtgcttcttagtccaatagctcttaaggttgttttccccttgcttcttgactcaaattcttcaagggatgacaccaatcctcctttccaattccctatatggcaactcacaaacaaggaaacaaagagacaagcaataaccaaagacccaaaaaatgaaatgaaagctaaaccaatagagttttaacaagacaaattttcaggaatttttcaacaattaaagcacataaaagaaagctaggactcanagagaaacttagaatgactctagagtagagtanaanaaacccaaattaaaaagactcangaaacctcctagttttggaacttgtttttcacactaatttt

SEQ ID NO: 1700 - DNA, 529 bp, Glycine max
agcttataataacatggccatcattcacaaactttgtatacatgcatctattagcatcactactagaaaaaccatcaacaagtaaagtctcattaaacttttcatgccattgtttaggaacttgttttaaaccatatagggatttcaaaagtttgcacattttgttctcttgaccatccaccacacaccccttaggttgagtcatatatatctcttccgctaaatcaccattcaagaaagttgtcttaacacccatctgatgaatcactaacttatggattgtagctaaggctatcaaaatcctaatggaggaaatccttgtaataggtgcaaaggtataaaaaaaatctatgttaggtttctaagtaaaccctttagcaatcaaccttgctatgtatttatctataaaatcatcacgattatacttcctcttaaagatccatttacatccaataagatttgcaccctcaaatagatatactaaattccatgtattattctttttaataaaatcaatttcaatcctaat

SEQ ID NO: 1701 - DNA, 584 bp, Glycine max
  unsure at all n locations
ttgaataaattgaaacgacaaaaactttatacacggatgtctggttgagtcccgtaatatatcgagacgctccaaactgtaaacggaagttcgtaggaaattcaaacaacaatatctttttactcggatgtctgattgaatcgggtaatctatcttgacgctcaaaattgagactagaagctctgagcaaattgaaacgatattaactttatacacggatgtccggttgaatcctgtaatatatcgagacgctccaaattgaaaatggaagctcttataaaattcaaacgacaataactttatactcggatgtccggcagagtctcgtaatatatcgagatgctccaaattgaagacggatgctcgtatcaaattcaaacgacgataactttntactcggatgtccgattgagtcccgtgatatatcgagacactcacaatttagatccaaagctctgagcaaatttaaacgacaataactttctacacggatgttcagttgagtcccgtgatatatcgagacgcttgaaattgaaaaagaagctcgtaccaaatccaacgacaataagttttactccgatgtc

SEQ ID NO: 1702 - DNA, 397 bp, Glycine max
agcttctagtctcaattttgagcgtctcgatatattacccgattcaatcggacatccgagtaaaaagttattgtcgtttgaatttcctacgagcttctgttttcaatttggagcgtctcgatatattacaggactcagccggacatccttgtataaagttattgtcaattcaattttcttagagcttcggatcaaaaatttgagcgtctcgatatattacgggactcattcagacatccgagtaaaaagttattgtcggttgaatttgatacgagctttcgtttttaatttggagcatctctcgataaaatacgacactctgtcgggcatccgagtaaaagttattggcgtgtgaattttctaagagtttccgttttcaatttgggagcgtctgata

SEQ ID NO: 1703 - DNA, 363 bp, Glycine max
agcttgtacgcgatgccatatggctattacttgcaaatgcctattctgaagccaagactactgcatggttgaatgaattgtgcatgcctcgggtaactgcaataacttcttcgctgcttgacgattgttttgtggaggcatccaatgctctaatgtcacaaccaattactaaaggagcctatatatatgtatgtacaaaaaaaatgtacttattatgcaaaatatatttttcctcaagcaattctttatatggaaatgtctaagcaacatgagttaaattattagctacaagttaccttatctaatgcccatatgctgaaatgagcgcgatattcttcttgttgaatgcctccattttcaact

SEQ ID NO: 1704 - DNA, 414 bp, Glycine max
agcttgaaagtgtgtaaccaaccattttctcattgtagaacaccggtaacgtgtatactatcattgtgatcatctttttctctgtcattgaaggtgccacttgagctgtcaagtccctccacctctgggcgtattccttgaatgactcatgctcttttttacacatgttttgtagttgcgttctatccggagccgtatcataattgtactgatattgcctaacgaaggcaaccattaagtccttccaagaatagactcgggaaagttccaagttagtgtcataccctaatttcgtccggggattattacttgacgacatgcaacctttgattggccgtttcaagatacttggccccctttgttgcacaatatgtaagtcttgagacccaccggagtcaaaaagaaccagggtta

SEQ ID NO: 1705 - DNA, 524 bp, Glycine max
agcttatgcagcaaatatatacaatagacctcctcaacctcagcagcaaaatcaaccacagcagagcaattatgacctttccagcaacagatacaaccctggatggaggaatcaccctaacctcagatggtccagccctcagcaacaacaacagcagcctgctccttccttccaaaatgctgctggcccaagcaaaccatacattcctccaccaatccaacaacagcaacaaccccagaaacagccaatagttgaggcccctccacaaccttccctcgaagaacttgtgaggcaaatgactatgcagaacatgcagtttcagcaagagaccagagcctccattcagagcttaaccaatcagatgggacaattggctacccaattgaatcaacaacagtcccagaattctgacaagctgccttctcaagctgtccaaaatcccaaaaatgttagtgccatttcattgaggtcgggaaagcaatgtcaaagacctcaacccgtaacactgtcctcatctgcaaatg

SEQ ID NO: 1706 - DNA, 661 bp, Glycine max
  unsure at all n locations
tgggtggaaactacaggtaatcagatatgacaatatgtgacaaatttaataagttctatgaagatgcggacatagaacaatagttgacagcaccttattctccttaacaaaatggcaccgtagaaaggaagaataggactattatggagatggctaggtgtttgcttcatgaaaaagaattgccaaagagattttgggcggaagccgcaaatattgcagttttcatgcttaacagactgccaacaaaagctttgcaaaagaagacaccatttgaagcatggtatggctataaacctgagttgctcaatctgaagatatttggttgtttgtgctttttcttacattcctcgggttaagaaggacaaactatacaagaaagcagaagctgtaacctttgtaggctatagcttaatttcaaaggcctacatgatctatttgccacatcatgacaaagtaattgttagcaagaatatgagattcttggagctggatagttggaactgggaagatgacaagaagattgaatntcagaaggagaatgagaacatagacaaagaacctgccagaggaacaagatcactttttgatatctatcanaggtgtaatgtttctctcatggaacctgcacgatatgaggaggctacaccaataaaaaatggat

SEQ ID NO: 1707 - DNA, 338 bp, Glycine max
agctttcagaaaatgtcaatgtcgagcatatactatttttcttccatgtttcagttgtatgtagcttgtatcttcttcacagatagggcatgcatgatggtccttaacactgtatccactcaaattcttgtatgccgaaaagccattaatgggaaaaaatagcattgcatgcaacttggatgcctcattttgatacccatcaaacatgacaatccctttgtcccataactttgtcaagtctttaatcaagggactaagataaacatcaatgtcttttcctaagtgtcttgggcccaatattatcataaacaatatcatgtattttcgcttcatgcaca

SEQ ID NO: 1708 - DNA, 592 bp, Glycine max
tgctacattgatgcatcttggctacggaatcttcgatttgggcacttaaattttggaggcttaagtttgctatcaaaggagaagatggtaagaggactaccctatattaatcaccctgatcaactctgttaaggatgtttacttggcaagaaatttagaatgatttttccaaaggagtcaaactcaagagctaagaagccacccgagctaatacatgttaacgtctgtgggccaatcaagccccaagctcactacgtaaaaataaatatttcctctttttcattgattatttttcaagagaaacatgggtctatttcttatagcaaaaatcataagtcttttccaccttcaagaagttcaaagctgcagtagataaagaaaattggtgagagatcaaagccataaggactgatcgaggaggagaattcacttgcaaaaagttcaagagtttgtgaagagaatgaattagacgtcccctgacagtctaagacccccaatagatagtgtggcagaagataaaatagacgatccttgatatggcttgaacatgctcaaaagcagaactgccaaagaatttaggcaaagctttgca

SEQ ID NO: 1709 - DNA, 367 bp, Glycine max
agcttgaaggcaaactggatgcattggttaacttggtaacccagctggccttgaatcagaaatctgtacctgtcgcaagggtttgtggtttgtgctcctctgctgaccaccatacagacctttgcccttccatgcagcaacctggagcaattgagcagcctgaagcttatgctgcaaatatttacaatagacctcctcaacctcagcagcaaaatcaaccacagcagagcaattatgacctctccagcaacagatacaaccctggatggaggaatcaccctaacctcagatggtccagccctcagcaacaacaacagcagcctgctttttccttccaaaatgttgctggcccaaacagaccatacat

SEQ ID NO: 1710 - DNA, 654 bp, Glycine max
tttgtgtgggatacccagtgtgagtatagtttccaaacccttaaggaaaagttgacgaccactcccatgctagttttgcctaacctgagagaagcctttgaggtgtattgtgatgcatcaaagatgggtttaggaggagtgttgatgcaaaatggccaagtagtgacctatgcttctagacaacttaagactcatgagatgaattatcctaccaatgatctagaattggctgctgttggatttcccctgtggttactttttgttccacttttttcttcatacaaatatattcaagggaaatctggtttgtcgaaaagtgcaccagatcgtcaagtatttaaaaattaaaacggatgaattcgagtatcgaactcagggaaactagtctaagatcgggttaaattcagaaataatgcattgttgaaagaaacattgataattgatggtttaaaatagaattaaactgggtctaggataaaaacagtaaaaatgcaagtaagtaaaattgacagcagtaggtagaagtgttgggtctttcaaacagacaagctgatgcatatagggatgtttctctaatcgatcatgcttttatgttctatgatgtagcataaattactaaacctcgatccctaattgactgaatcaatccagctt

SEQ ID NO: 1711 - DNA, 503 bp, Glycine max
agcttatggtagattagagtgaagttcatcctgatcccgagaggtataggagacttgtaagaaagctcatttatttcaccattacaagacctgatatctcttttgttgttggagtagttagtcaattcatgcagaattctcatgttgatcattggaatgttgtcatgcatattcttagatatattaaaagagctcctgtacaaggattgttgtatgaagacaagggtaatacacaactatcaggatattgtgatgcagattgagctggttgtcctatggataggagatctacatcaggttattgtgtcttcattggagggaatattatttcttggaagagcaagaagcaagttgttgttgcttggtccagtgcagaagttgaatatcgatccatggcaatggttaaatgtgagctcatgtggattaaacacattctccaagaattgaaattctgtgaaagtgtgcaaatgaagttattctgtgataatcaagctgctctttac

SEQ ID NO: 1712 - DNA, 696 bp, Glycine max
tcacagcaaatgatagaatgtctatagttttatcatttgacaatttattgttattatatgtcttatccttcatatatatagactcttttttttcatctttttcaactgtgaatttttacataattcataaattttatttgataccttgcatagcattgcatttagcaaatacaatttaacatgcttggtttataagtattgacacaaaaaaggcttatgaaaataccttgtattgcatgttgctagggcttattaaaaatatcaaataattttacatgtgtctgtgaaatcagacttattaatgatgcgataaattatgtaactatcatgtctctcgttgatgttgctaaaaaaattgtttaggaagtatatggattaaaagtgcattcttcaaaaagtttaaagatcgagaacataattaacccattaaattattatcaataaaataaccttaaatttaaaatacaaacataggtacatgtaatttatattatcaattattgataaaaaaaaatataataatgtttatgtgaacaaaatatttttttgaccaaaaaataaacgcatgtgttttatattcaaaatcattttacagtttaatatttaatgtgtataaaacagtataattgtagcaagctgaaaatagtttatgaacatatatataagtgttatcataagtctggcaaacatgtttac

SEQ ID NO: 1713 - DNA, 469 bp, Glycine max
agcttgtgtgcagtaatataaaatgtgtccacacacagtcacttgttgctatccagtgtattgttagccttttttttcacattttttttttgcttactcccttttactttctttttctcttttttgttttctattttatcttgtaaaacacaagatgctctagttttaatttaactaatttttaaactagtcaaaataacttataacctactgctcttaaaatgatttgcaaaatacactgtttcacttttgattaagaattacaaaattcacacacaaaaagatgacaatggaacaaattttatactatctctatattgtaattaaaattaatattataaagatttgatagttatattaagttgttcataaattatttttttttatcaatcattcaattcaattttgaataaaactataataatggtttaaatcttgaaaaaataatataaaatttttagaattaaaa

SEQ ID NO: 1714 - DNA, 470 bp, Glycine max
agcttgacgaaatctagatggcgatgcctcagcaacagcttgtacttgtttctcgggcacagcaaagcatacagaatgctcactactagcctacataaatactgaaaatgattaatgccatttcttatatatcagcgtggacaactagaaaaattgaaaaaagttataaatgcacctgagatatcatgataacattagctccaacatcttttactgcaccaaaaatagcactggccgtacctggaacaccagacattccagttctgcaaaaaagcatcaaagaaaaatttattggaatctacaacttggacaattaatattggttaaagaaaaccttaaattaaatagaaatccctcggcaggaaaaaatgccaactattcatcatgtaacacaacttgcatttatgactcaccccttgacgtttacaaatgccaaagttgcctatggatgcaaaatctttgacaaaatt

SEQ ID NO: 1715 - DNA, 439 bp, Glycine max
agcttctaaactttgtacaagaatgaagctctgataccacttgttagacaagtggcctcagatatcttaagaagggggggttgaattaagatattccaaacttttcttctaattaaaaatctatcttactttttacttaagttatgaattcccttaatgacaatcttcttaaatattaattcaaatgaagcaacttgaattatgaatataaagcaataataaataaaggagattaagggaagagaaaatgcaaactcagttttatactggttcggccacacccttgtgcctacgttcagtccccaagcaacccgcttgagagttccactaacttgtaaattccttttacaagttctaaacacacaaagacaacccttcctttgggtttagagattctttacaacaagaaactcacagtctcttaatcccttagagaatg

SEQ ID NO: 1716 - DNA, 485 bp, Glycine max
agctttaaactctatttttaattctatttttctctctaaatgtatattacaatgcatatatttgtaaataattaatgagctcaaatatttaaaatgtattttttttacataaatcttataaaataagtgttagaaacacattttttaacattatccttaacacatttaatggattgaaattgtttaaaaattacaaaatcatttcatggagtcattaaataagatgaatcacacaatttttttataattttaagaaatttcaatcaagaggatgtgtatttaaaagaatgagtgaaaatatgttactaatatttctcatcttgtaatattttgagtctgattctttctaattggatagggaaatacacattatttttgtgggagccacaataatattttcttcgtcccgttataaataatgtttaaggtttttttaaaccgattaaaaaaacaagtattttaaagtgttttgtgtatttcaaatg

SEQ ID NO: 1717 - DNA, 590 bp, Glycine max
  unsure at all n locations
ttgaatgcactattcaatggagttgacaagaacatcttcagactgatcaacacttgcacagtggccaaagatgtatgggagatcctgaaaatcactcatgaaggaacctccaaagtgaagatgtccagattgcaactcttggctacaaaattcgaaaatctgaagatgaaggaggaagagtgtattcatgacttccacatgaacattcttgaaattgccaatgcttgcactgccttgggagagaggataactgatgaaaagctggtgagaaagatcctcagatccttgcctaagagatttgacatgaaagtcactgcaatagaggaggcccaagacatttgcaacatgagagtggatgaactcattggttcccttcaaacctttgagctaagactctcggatggggctgaaaagaagagcaaaaacttggcattcatgtccaatgatgaaggagaagaagatgagtatgacctgnatactgatgaaggtctgacaaaagcagttgtgctcccgggaaagcagttcaacaaagtgatgagcagaatggacaggaggcagaagcccatgtncagaacatccctttcgacatc

SEQ ID NO: 1718 - DNA, 581 bp, Glycine max
  unsure at all n locations
tcttatccaaggctcatcttggtggtgaagctccttcctccatggcttattccataatggatggcgcctcctctcacctcttttcctttgtcttccgctgcatctccatggtggaaaatcaccattaaaggaccccattgaagctcaaagatccagcctccatagaagccccacaagcaagcttccatcaccttgccctaatccatttggtgaaatagtcaatggcgattagtaggaattagattgctcctggggcttttggcagtggtcctagtatgcctattccctataaggcaaaaggccaaggggaactcaagctatggaggatgtcangaggggtgtgtggaatgtctacaaactcttggcatcgcctgaacctccttatgaagtcaagggtgtcggccaataatagccggcgcgcaccacttangttgctagggagcgacccctgatatggaggtcacagattccttcatgtagctcttgcatgagatagtctacttgttggttttttaggcatttaagcaatgatgtgttcaaccctcttttgaatagctcaccatcaaggatggcgttgtatc

SEQ ID NO: 1719 - DNA, 406 bp, Glycine max
ttttgtctctcttattaggcaatggttggccctctctctctctattgtgaaatcctcatcttttattcttttctacttttgcagcaacaacaaatttaatcatcttttcaccgacgagcttgtccctttcaataccaaccccgacaagatgctcgacctccaacacaccaccaccttcctcccctgcaccaagatcaaagcctctgctgattcctctgtcaccgctgactctgacctctgcattttcactactggcgcccgccagatcactgatgagtcacgcctcaacctcctctagaggaacctctccctcttcggcaccaccattctgactctcgttcgttactcccccaacgctattctcctcatcatttccaaccctggcgacattctcacctacacacat

SEQ ID NO: 1720 - DNA, 441 bp, Glycine max
agcttgctaacccatggaagctcctaatatctcccacactttttggggtgggccattcgtggatggccttgatttcccagggtccacatggaccccatttctaccaactacaaaacctaagaaaactatattatctacacaaaaggtacacttctctatatttgcatagagggtgtttttcctatggactgaaagaacttacctgagatgtcctaagtgatcatctaggctcctattgtacactaaaatatcatcaaaataaacaactacaaatctacctatgaaatcccttaagacatgatgcataagccttataaaggtgcttggtgcattactgagcccaaaaagttggtcttgaaagcgaattttcactcatcaccctttttcatcctgatttcgggataaccacttttaagaacaatttttgaaaaaatattggca

SEQ ID NO: 1721 - DNA, 381 bp, Glycine max
agcttgcttctacacttctccttgaagtggggtctccaatcacctttcctctgtctccattccactaccactgatcttcaagaagcaaaggactccattgatgaaggatatccaaggcctacaagttctacatggagctacattatgtggtatcagagtatcttcatctaggtgatcttttgcttactctatcttttgttcgggcaattcactttaatttctttttgttcatcgtcttctccatgtatctcctccattgtctagtggtttggtgttggttaaattacattcaaaaaaataaaatgatcaaaacttagatctacacttgttcttgcatttccatggggtccaacccatgcctcatcaattaaggaatgcttt

SEQ ID NO: 1722 - DNA, 519 bp, Glycine max
ttgagcaaattcaaacgacaataactctttactcggatgtctgattgagtcctgtaatatatcgagacgctcgaaatggaataccgaagctctgagcaaatttaaacgacgataacctttttactcggatgtctgattgagtcccgtaatatatcgagatgctagaaattgaatgttgaagctctgatcaaattcaaacgacgatgactttttactcggatgtccgattgaggctcgttatatatcgagacgctcgaaatggaatatcgaagctctgagcaaattcaaacgataataactttctactcggatgtccgattgagtcccgtaatatatcggaacgcttgaaattgaatgttgaagctctgagccaattctaacggcggtaagtttttactcggatgtctgattgagtcccgtaatatatcgagatgctcgaaatggaatgttgaaactctgagcaaattcaaacgacaataatcttttactcggatgtctgatggaggcccgcaatatatc

SEQ ID NO: 1723 - DNA, 451 bp, Glycine max
agcttctacattcaatttcgagcttttcgatatattacgggactcaatcggacatccgagtaaaaagttattgtagtttgaatttgctcagggcttcggtattccatttcgagcgtctcgatatattacgggactcaatcggacatccgagtaaaaagttattgtcgtttgaatttgctcagagcttcggcattccatttcgagcatttcgatatattacgggactcaatcagacatccgagtaaaaagttattgtcgtttcaatttgctcagggcttcggtattccatttcgagcgtctcgatgtattacgggactcaatcagacatccgagtaaaaagttattgtcgtttgaatttgctcacagcttctacattccatttcgagcttttcgatatattacgggactcaatcagacatccgagtaaaaagttattggcctttgaatttgc

SEQ ID NO: 1724 - DNA, 618 bp, Glycine max
  unsure at all n locations
ttgctggtaaaggtcttgaatgaagctcacgtagcccaagacatctccgtagaaggctttgggggaatcgtcaataacatcaaagccaacaactacctcaccttcgctgaagaggaaatccccgccgaggggagaggacataaccaggctttacatgtgtcagtcaaatgcatggaacacgttatggccaaagtactcatcgataacggctctagcttgaacgcgatgcccaaaagcacattggagaaattgccatttaactcttcccatctaaggccaagttccatggtggtctgtgccttcgacgacagccgccgagaggtaaggggagagatcgacctcccagtacagatagggcctcatacctgccacgttacattccaagcgatggatatcaacccagcctatagctgtcttttggggcgtccatggatccactcagtgggagttgtcccctccacactccaccaaaagctgaagtttgtagtggaaggacatatggtcatagtatcacgtgaggaagacgtcctgntaagttgcccttcctctatgccatacgtggaagccgcggaggagtcattataaacgactntccaatcttttgaggtagtaagcatc

SEQ ID NO: 1725 - DNA, 486 bp, Glycine max
  unsure at all n locations
ttagaggtgctagtggaagtagaaagaagttgattgtaccctttaattaaatcttctctagatttgaatattacctcttcaccatcagagttgacagtgttatcaggctaaggatgtatcaaccattagacataggttggtttcttcctcattgtccttatcagacaatgaattatccaagtcctcccaagtgttcatgaggcttttagatgcaatcctaccccgcaagggcattggatagaagactccaagtttattgggccagagatccaagggaaggccctanggttctcatgagccttanggtagatttcgagcccatgggctaagtatgagcccgcttatctttgtaaatattagaatagatttttcctttgcttcgcgcccttgtatttggccattctagtaatatagggctttaaccctgtatttcggggcattttgagtagtctttgtaacaacgacttttnttgtttttcatgtttt

SEQ ID NO: 1726 - DNA, 565 bp, Glycine max
agcttttggtacaaaagaagaagaagaataacttcaaagagatttcaaggcttgtaaatgattgtaagagattgttagaaagattgattaaaaatgcaaaacaaagccttacttttatagactcttcatgtatggtcaagaaagccattcagaagagttataacttttagaaaaacttaaaacccatttgaaagggtcaaaacctttttgaagagttacatctttagatttttcagaaacaaacattggtaatcgattaccaaataagtgtaattgattacacaaagattttgagtgaaacaatgtgactcttcacatttaaatttgaatttcaacgttcaaggacactggtaatcaattaccaaatcattgtaatcgattacagccttttgaaaatatttggaacgttgtaaattcagtttgaaaactttttcaaactcattttgctactggtaatcgattacaacaatatggtaatcgattaccagaagagtaaaactcttttgtaaaggtttttgtcaaaactcatgtactattcaaaagttttgaaaaccttttaatactt

SEQ ID NO: 1727 - DNA, 565 bp, Glycine max
ggctcaaacacgctatgaccaactcaaccttattgaaggtaaacgcttgatggccatgtgccatgggcgcctatatcaacaaagaatgaagaatgtgttcgacaagaaagtgcgcttgcccaagttccacgaaagggaccttgtgctgaaaaagatgtcccacgctgttaaagaataatcgagggaagtgggcctccaactaccaaggacctttcattgtgaaatgggctttttccggaggggccttggtgcttgccaacatgaatggcgaggagctacctttacccgtgaactctgatgttgtcaagcgatactatgcttagaatctggggcaattaaggatatcattgcatgttcttttatttttatgtgttcttcttgggttcccccaaggattcccgtctgctgtatatttctcgtcacagtctttttaaaaagaagagaacaagagtttgaggcttcaatcctcactttgggctttaaaccatgtgcagtttgtgataacctgagcctttttccttagtccatgggatgccccaagcgcttaattaaaactgaacctgac

SEQ ID NO: 1728 - DNA, 716 bp, Glycine max
ctattaactatgttttttcttattaataaaaatccagacagcattaatgattttataataattcaatgcaccatatttaattaacttagttaaatatccttgacaatttctaagctacttaatttcacttcctggacaataattcatattatccaatttatactatctataaggtaaaaattacaaatacatgaaagtttgaaagcaccgtaggatttgttaataaaaaaacatgaagcaagtgggttcgaagggaacttcatgaatccttataattttgttttaatcagcataggtatacgtatattaatataaatgaaagacaaaaatgggtgccccaaccattttccgtataatgtagattcatggagaaaatttaacaatcaatatattttctgacatacttttttaatattgattaaaattataaattaaatttatagatcttgatttattttaactagtattttaaatttgcaatttattgaataaatttttatttatatataataataataatgtaaagttaccaaccaattagatatttttaacatttaataaaatattattaattaaaaacttggaaaaaaaaaaatttaaaaatttataaattatatttttgaatttattactaaaaaatttcaaataggggatattaggtaattttttttaaaaattaaaatgaatacgggggttaaaaataaaggattttttaa

SEQ ID NO: 1729 - DNA, 548 bp, Glycine max
  unsure at all n locations
tatatactatatgatgaactaagttntatatagctcttaggtgtaataactatttaaatagccaaagccaagcgctaaatataattaaacttatattccgtccaagcttaaaaacagctatttatatacaagatatatctttaaaataacaaccagtcacatggatattgtcaaataattgaaaacagtgtgtgggcctgttattatcaaatcacttgtaaaacttaattatatgaagagcacttaatgattgataaactatttactattaatatcagataaaaattattggatagagattattttcttccttcgacatgtttaatcatcatttgttttaaaaaccccctgatttataatttaattaaaaataatgtttgtcctgagggctacttccatcaaaagtggaaactatttttttatacttgccctttactcctcatcaatcataatctgtgatttttaagatataaccctcctccgttgacatccaatttagcatattaaagaaaaatggtgcgccattatacaacattgataaataagtt

SEQ ID NO: 1730 - DNA, 455 bp, Glycine max
agcttaaaagaatcagaggggctcaaacacgctatgacttactcaaccttattgaagggaaacgcttgatggccatgtgccatgggcgcctatatcaacaaagaatgaagaatgtgttcgacaagaaggtgcgcttgcgcaagttccaccaaggggaccttgtgctgaaaaagatgtcccacgctgttaaagataatcgagggaagtgggcctcgaactacgaaagacctttcattgtgaaatgggctttttccggaggggccttggtgcttgccaacatgaatggcgaggagctacctttacccgtgaactctgatgttggcaagcgatactatgcttagaatctggggcaattaaagatatcattgcatgttcttttatttttatggggtcttcttgggttcccccagggattcccgtctgctgtatatttctcgtcacaagtcttttaaaaa

SEQ ID NO: 1731 - DNA, 400 bp, Glycine max
atactgaaacttttgcccctattactcatctaaaagcaatacacattttactatcccttggtgctcatcatgggatgatggtgtatcaaatggatgtaaaaatcatatttctcaatggactaattaaggaagaagtctatgtggaacaacccctggagtttgagaattctatctaccttcatcatgttttcaagcttaaaaaggaccttgtatggtttaaaacaaactccttgagcttggtatgaaaagctaagtttggttataactgaaaatggctttaaaagaggaaaagtagatactactttgttgcccaaaaattatggtaatcaattcctaatcggctagatatatgtggatgatatcatatttgatgctcctaatgactctttatgccagcttt

SEQ ID NO: 1732 - DNA, 687 bp, Glycine max
gcttcccaagtttttaagttattcctcaaaactgtcctaagcaaagttcccaaagtcctattaacaacttccgtttgcccatcggtttgggggtgacaagtggttgaaaataacaatttaatgcccaacttgctccacaaagtcctccaaaaacgcaaatcatcaagcctaagtataggatgcctatatttaatggtgatgttattaagggctctacaatcagaacaaatgtgccatgtcccatcctttttagggaccaaaatcactgggacagcacaaggactcatactatctcttacccaacctttgctaatgaattcatccacttgtctttgaatctctttggtttcttttgaattacttctataggctggcctattgggcaaagaagctcccggaatgagatcaatttgatgctcaattccccctcaaggaggtagtccacttggcacatttggtggaaacatgtcatgaaaatcctgcaaaagaattttaacactagaaagcacttaaaatcatcaaaagtgttaggggcaaaatctgatttttgcataacaagatatagaacgactgtttaacaccaaacaaccctcttgacctcactttttgtgggttaatacctctccctcactctaagggttccccctttcttttggaccctctttttccctcccagtggttccctca

SEQ ID NO: 1733 - DNA, 437 bp, Glycine max
agcttgaaccaagatcaatctcaatggtcttgtttctaatgagaccatccctttttttcagataagctctttctgcctctcccacttctcgcttggcacaagcacaatgatccaaccaaatccccaacacttgcttggaaatggggtccaaatggtccctgatgatctcctccatgcgttccactccgccattttccgtcagaacgcgaaccattatggctgtaggagaagaaacagtgcggatgtaaagggaagaagaaaagtatggttgaacctctggaactctctccagagtctgcctatgtttgtctagttgagtgtcctcatagaaagttttgaggtcatctggccaaagcacatggtctttccggggaggccaatcaagaatgagaagtagcattgttggactactggggatcatttcaaacacaaaattt

SEQ ID NO: 1734 - DNA, 505 bp, Glycine max
tcctatacatatgatagagagggttcacatcaataatgtggttctatcatatgctaaaagttttacgattccatgcaaccatatacatctaggatacatgtgggcatgtgcatttgagttttgcttaaaataaccttattttctatccagaagtcccatatgtgtaatactattatcccaaagaaaaattataatttttgctatattagattactaatagaaactttcttattaactattatgaataaatcaatatggagattatagtgtttatctattttttaattttcaaaatcctttatgttgaatagaatgaatgaatggctatagaataattagccatatgaaaaacccaatgtactatgacagaaattcctaagaatgatatcatgactttacctagccattgaaccaatttgcccaattaatgaacatggagatgtacccacatgtagaggtatacatgcatcaccattatttcatttttaatttattgtgcaaaaat

SEQ ID NO: 1735 - DNA, 395 bp, Glycine max
aaggtctatgactcagtctcatgggtttttttggattatatgctgcaaagaatgggtttctgccacaaatggagacactggatgtctgcctgtctcagtcaataagcatttctattcttatcaatggcagtcctaccaaggaatttgctcctactagaggtttgaagcaaggtgatcctttagcccccttactctttaatataattggagaaggcatcacaggattgatgaacgaagcagttcagaagaacttatatagaagctatatgggtggaaagaaaaaggaacccattaatattttgcagtatgcggatgacacaatttttgtgggtgaggcttattgggaaaatgttattgcttttaaagctatgctcaagggatttgaattggcctca

SEQ ID NO: 1736 - DNA, 516 bp, Glycine max
agcttcaaaaaaaagatggcctcggcaaactccttatttccagaagggaattctatcaatagacctccaatcattaatggagagggttaccactactggaaaacccgaatgcaaatttttattgaggcaatagacctaaatatttgggaagccatagaaatagggccttatatacccaccacagtagaaagagttacaatagatggcagttcatcaagtgaaagtataacaattgaaaaacctggagataaatggtctgaagaggatagaaaacgagtacaatacaatttaaaagccaaaaacataataacatctgccctgggaatggatgaatatttcagtgtttcaaattgtaagagtgctaaggaaatgtgggacactctttgattaacacatgaaggaactacagatgttaaaagatctaagataaatgcactaactcataagtatgaactaattagaatgaatgtcaatgaaaatattcaaagcatgcaaaagagatttacacatatagta

SEQ ID NO: 1737 - DNA, 408 bp, Glycine max
caatagaaactatatgacttggagaattctatgccacttcaaccttttgaacaacaagtgaaggacctcaagataacccaagctgacctttgggaaaagctactatgcaggagtctattgtgaggcagaaatcaagatgcatatggatcaaagagggggacaacaacacatcctattttcatagagttattaatttgaggaggaggataaatgctttgaggggggtgcagattggtgacacctgggtggaaaatcctaacattataaaggctgaaacccttcatcattttcagaacaggttcaatgagcctcacttgagcagacctaacttggatggggtttcatttaaaagtctgacttctactcagagagaaactatgattgaacccttttatagaggaagagata

SEQ ID NO: 1738 - DNA, 445 bp, Glycine max
agcttatgcttttaatttagcccatttaaatataagtatgagcaacctttctttttcagaagccaagcttgaacttcaagtgttcaacttggctagatagacttgtttgcacctttactgataaatgactaatcagaaaattaaattcacatagaggaatacaatcattatactaatgtataggtgacagacacaccttacttttgcatttaaccttgtagactgcctctctgaatgatgagacaaagctgttattaattctgatctgccaataaaaaggcaggggaaataaaaagtattagctgtgaaatatagaggtgagaataagaacagaaccaacctgtgcatgatgaagatctggctcaatgtgtttcctaaataatggaaaaatgctatcaataaggtaatccagtgaacaagaatctccaatgtcatagcgaacttt

SEQ ID NO: 1739 - DNA, 213 bp, Glycine max
tctcagcttcaccttaggagacggaccattccaagtgttggagaagatcaacgactatgcctacaagattgacttgcctagtgagtattatgtaagtgccactttcaatgtgtctgacctatctctttttgatgcagatggcggagcctttgatttgaggacaaatcctttttcagaaagggggagggatgaagacataacccaggaccatga

SEQ ID NO: 1740 - DNA, 416 bp, Glycine max
agctttgagctaattcaaacgacaataatgttttgctcggatgcccgactgagacccgtaatacatcgagacgctcgaaattgaatgttgaagctctcagcaaattcaaacgacaataactttttactcggatgtctgattgagtcccataatacatcgagacgctcgaaattgaatgttgaagctctcagctaattcaaacgacaataacttttttactcatatgtctgattgagtcccgcaatatatcgagatgatcgaaattgaattctgaacctctaagctaattcaaacgacaataatcttttggctcggaagtctgattgagtccccgtttctattgagacgctcaaaatagaattcttaacctcctagctaattaaacgacaataacttttttctcggatgtctgattg

SEQ ID NO: 1741 - DNA, 433 bp, Glycine max
  unsure at all n locations
tctgtggtgcacaagaattctattatttaaatattcaatttcccaaacaaaaatttgggcatcataggtctttcatatcaaattatttctttaatcaatctatagcttttggaaagctcttcaagagctccaaanatatttacataatctacataaacaacagttatgaaaaatctattttttcatattttcatgaaaaatacatggacaaataagatcatttctatatccttcctttagcaagtactcactaagtcaattgtaccatgtgcgacttgattgccttagtattattctctagaatatgcattattgggtcaattatatccttcaggaagttttatgcaaatatcattatcaagagagtcgtataagtaaattgtacaacataaaaacatccattagatctaaactaagtcctccatgggctact

SEQ ID NO: 1742 - DNA, 394 bp, Glycine max
agcttaagctccttcaactgcacaagctcttaatatttgaagagtatccttgtggaaccttcacctgacgaagacactgacaaaaacttatcttctccttcttggacaaaatatggcaggctgggggcaagtaaattttcttcccatcataccttggatgcaaatgtgattgtatacccatatcaggtagatcttgacgggtattcaagccatccttcgtcttgccttgaatgttaaagagcgtcccaaccacactgtcacaaacatttttctccacatgcataacatcaatacaatgtctaacgtcaagatcacaccaagtcggaagatcaaagaaaaaggacctcttcttccatatgcaactctgacttttatcctttttttggggccttcc

SEQ ID NO: 1743 - DNA, 432 bp, Glycine max
taaaggtgtgtagcccaccatcttttcatagtagaatactgtttatgtgtctactattattgtcatcatttgtttttccatcattgaggtgccacttgagctgccaggtctctccacctttgggcgtattcttttgaaggattcgtgccccctttttgcacatgttttgtagttgcatcctatccgaagccattatactgacactgcctaacgaaggcaaccattaggtccttccaagaatggactcgggaaggttccaagttagtgtaccaagtaacagctaccccagtaagactttcttggaaggaatgtatcaacaattcctcatcttttgcatatgcccccatctttcaataatacatctttagatggttctcggggcaagtagtccccttgtacttgtcaaagaccagcaccttgaacttgggaggg

SEQ ID NO: 1744 - DNA, 457 bp, Glycine max
tcaacatcagaccactttcagggtgctggaactacttttatttttttgatggggcctatgcacgttgaaagccttgtaggaaagaggtatgcctatgttcgtgtggatgattttctccagacttacctgggtcaactttatcagagagaaattagaaacctttgaagtattcaaagagttgagtctaagacttcaaagagagaaagattgtgtcgtcaacaaaatcacgagtgaccatggcacagagttagaaacaacaggttcactgaattctgcacattctgaaggcatcactcatgagttctctgcggccattacaccacaacagaatggcatagttgagaggaaaaacaagactttgcaagaggctgctatggtcatgctttatgccaaagaacttcctaatatcttctggctgaagccatgaacacagcatgctacatcccaaccgagtccc

SEQ ID NO: 1745 - DNA, 255 bp, Glycine max
tgctggaactacttcacatttatttgatggagcctatgcacgttgaaagcctctgaggaaagaggaatgcctatgttgctgtggatgatttctccagatttacctgtgtcaactttatcacacagaaagtccaatcctttgaagtattctacgagatgagtctgagacttcaaagagagaaagattgtgtcttcaagagaatcacgagtgaccatggtagagagtttgaaaacagcatgttcactggatgctgca

SEQ ID NO: 1746 - DNA, 589 bp, Glycine max
agcttatagggagccatgccaatggtaaagtgaaaactattgttataagttaactctatcaatggaagaaaactctcccaacttcccttcttctccaagacacacgccctcaaaaggtcctccaatgactgaatggtccgttcagtttgtccatcaatctaaggatggtaagctaaacttaatctaagcttggttcccaatgctctgttcaagctctcccaaaatctagaggtgaatctaggatctctatcagatactatgctagatggcacaccatgtaatctgacagcctcacatatatacaaggaggtcaacttctccaaggaaaatctgatattaatgggaatgaagtgagcagactttgtcaatctatcaacaataacccagatagaatctaaacctctaggggttctaggtagtcctaccacaaaatccatggaaatactgtcccactttcactggggtatctctaaaggttgtaacttccctgaaagtctctgatggtctatcttagccttctgacagactaggcatgcatacacaaactcactaacctcttcttttatgttgggccaccaaaacatcggct

SEQ ID NO: 1747 - DNA, 414 bp, Glycine max
agctttgagccaattctaacgacaataactttttacttggatgtccgaatgagtctagtaatatatcgacacgctcgaaattgaatgttgaagctctaaacctattcaaacaacaataacgttttactcggatgtccgattcagtgacgtaatatattgggatgctcgaaattgaatgttgaacctctgagccaattcaaacgacaataactttttactcggatgtctgattgagttccctcatatatcgagacgctcgaaattgaattttgaacctctgagccaatttaaacgaaaataacgttttactcgaatgtctgattgagtccccgaatatattgaggacgctcgaaattgaatgttgaaactctgagccaattcatacgacaattactttttactcggatgattgat

SEQ ID NO: 1748 - DNA, 509 bp, Glycine max
aaactttcctttcttattaatcactttgaatgttatatcacaaaataaattatatttaaacatttaaggcaaagctattccgagtaatgggagagttgaccttttggtatattcttcaaactacaaaatatgtttggaacaaagaaatcttttcttgaacttggatataaatatagcactaaggaatataccaaatctgagatacttctcaatactagtttgtaaaagctaaatttctaacatactccatattttaatttctagttttcagcaaggtatttttgttgcttttaaagtgtaaatcggtttgaaaatctttttaatatttagttctaatcaagtttattattagatattattcaatcaaaactaattaaacacacaacacaaacttgagaagcaaggaaaggatattgaacatgagaatttttttattgattcacctataaccctgggctatacattcagtcattacaacttaattataggatcttctacgtggaaaaaaa

SEQ ID NO: 1749 - DNA, 516 bp, Glycine max
agcttcaagaattatggcctcatcaaaatacttgtttcccgtaggaaattctataaataaacctcccatctttaatggagtgggttaccactactggaaaacccgcatgcaaatctttatagaggcaatagatttaaatatttgggaagccatagaacaaggaccttatgttccctctataataaccggaagtgcaacaatagaaaaacctaaaacaaattggactgaggaagaaagaagattagtacaatataatttaaaggccaaaaatattattacatctgccttaggtatagatgaatactttatggtttcaaattgtaaaagtgctaaggatatgtgggatacactacaagtaacacatgaaggcacaacagatgttaaaagatctaggataaacactttaacgcgtgagtatgaactttttaagatgaaatgtaatgaaaatatacaagacatgcaaaagagggtcacacacataggtaatcatcttgcatctttaagaaaaaccttttc

SEQ ID NO: 1750 - DNA, 404 bp, Glycine max
agcttttgagcaaattaaatggtcataacttcttactcggaggtccgattgaggcgcataatatattgagacgcttcaaattgaaaaatggaagctcttgaaaaaatcaaatgggcataacttgtgacttcggagtcgaattcacgcccataatatatcgagacgctccaaattgaacaatggaagctcttgaacaattcaaatgggcataacttttaactcggaaggtccgattgaggcgcataatatatcgaaacgcctcaaattgaacaatggaagcttttgagctatacaaatggttattacttttcactcggaaatccgattcaggcacataatatatccaaacgctccaaattgaacaccggaagctttttgaacaattcaaatggtcataactttta

SEQ ID NO: 1751 - DNA, 538 bp, Glycine max
ttaaaatttgaattaaaacgttcaataactgctagttaatcgatttaccatcccaggtgtaatcaattacacaatttaaaatttgaattcaaatttctaatagctgttttaaatagtttcaactgctggtaattgattacaatacttatgtaatcaattacatgctttcaaaagtattcaaaatcattttaaaagcatttcaggaagcattttggccactagtaatcgattacatcctctggtaatcgattaccagagagtaaatctcttgtaaaaacattttaacttatattctttggccaaacctcttgttgtctcaacttggaattcccttcctaagtctctagagattatcttgatcatatatcttgaatttcttggattcttgtgttgaattaaacttgagaagcgcagcatgatcctcttgaattaaacttgagaagcacatggtccttttgcatcatcaaaaacataaaatggcctttgtttctacaaaattatctttgatttggtatatagagctcttgcgttggacaaa

SEQ ID NO: 1752 - DNA, 556 bp, Glycine max
  unsure at all n locations
agcttgtataaccatgtctagatatgaagttattgaaacaatcaagaatgttcttttaatgaatattggggctcttataccaatattgagaaggaaataataacattatattctctaacaccttttgacacacttttttatttggtgaaattgatgtaagtctcactaaatgagactcatttcttatttggcgcatctccttttaaactagtggaattcaaataaattttaaccaatatcagaagagagtctattagaaagagaattataattatgttacacgaggctgaagtgccctgaatagcagactgataaaagacaagaaattttgtttgcaggtacttactccttcgtactcactccaaggaggctttccccgtgaacatttcaataattgtacaacccanactcccaatattaacagcgaaagccaggtcagagctgttatctttttgcacaaccgcttgaaaaagctgcatgtatgaggaataagtgtctatagagaacgcatgagacatcgcggagttatagagttataaaccttaatagatatacc

SEQ ID NO: 1753 - DNA, 469 bp, Glycine max
  unsure at all n locations
agctattcctctagtngctctgatagggtttcctagtcattatatagaaagagaatggattggagcctcaattatattgtctctgtgcgaggggcatttctttctctacaaacattattttgcacatcccaacggtgggaatatgcggaaatgagttccgaatgtggtgaccaaattctatgatgctccaatggttaatgaatatgggatcatacttttacttacacaagtttgggtgtatgcatgttttgggagaggaagaagcgataactaanttgagaggaagaaagagcgcatagacgtatccgatgtgtcaaaactgacctaatgtgtccatttataactatgagaccgagtctactatatatnctatctgttgctataattaattactncataaaaagagagctctattatactctctatcaaatacataaatataacatcctcttatgttctaaaaacacat

SEQ ID NO: 1754 - DNA, 431 bp, Glycine max
  unsure at all n locations
ataactttcactcggaggtccgtattangcgcataatatatcgagatgctcgagattgaacaacgaaagctctcgagaaatttaaatggtcataactatcaacttcgaggtccgattcaggcgcatactatatcgagattcacgaaattgaacaacggacgctctcgagaaattcaaatgatcataacttttctcacggatgtcatgattaggcgcataatatatcgagacgctcgaaattgaacaacggaagctctctaaaaattcaaatggtcattacttttcactgagaggtccgattcatgcgcataatatatcgagacgctcgaaattgaacattggaagctcttgagcaattcacaatggcattacttttcactcggaggtccgaatcatgcgcatactatatcgagacgctcgaaattaacaac

SEQ ID NO: 1755 - DNA, 182 bp, Glycine max
gccactgcaactgaattcttacatgattacccgaagtagcttgtgtgcacttcacagatggagcatgcatgaggacccttgacactgtcaccgtatggattcccataggcgggactgccattattggttccaatcagcatggctcgcatcataaacgtctcattgcgaaacgcatctaacac

SEQ ID NO: 1756 - DNA, 458 bp, Glycine max
  unsure at all n locations
taataagtccatctatggattgaaacaagcctnccgccaatggtatttaaaatttcatgaggtcatttcttcatttagctntgaagagaatgtcatggatcactgtatataccagaaggtcagtgggagtaagatttgtttccttgtattatacgtagatgacattctgcttgcgactaatgataagggtatgctatatgaggtgaaacaatttctctcaaagaaacttgatatgaaggatatgggagaggcatcttatgtcataggcataaagatccatagagaaagatctcgaggcattntaggcttgtctcaagaaacctatatcaacaaagttntagagagattaatatgaaagattgtcaccaagtgtagctcccattgtgaagggtgacanacttgctttgagtcaatgccccaaaaatgattttgagcgggaacacatganaaatattcca

SEQ ID NO: 1757 - DNA, 371 bp, Glycine max
agcgtctcgttgtcgaagttcgagcgtctcgatatatcatgcgctttaaacggacctgcgagatgagagctatgaccatttgaatttctcgaaagcttgcggcgttgaagttcaagcgtctcgatatattatgcagcgtgaatcggatgtacgcagggagaagttgggaccatatggatttttagagtgcttccgttggtcaatatcgagcggctcgagatattatgcgcctgaatcggacctccgagatagaagtcatgaccatttgaattcctcgagatgtctcgttgttcaatttagagcgtctggacatattatgcacttgactcggacctccgagtgaacagtttgaccatttgaatgctcaagag

SEQ ID NO: 1758 - DNA, 294 bp, Glycine max
agctttaactcggaggtccgattcaagcgcatatatatatcgagacgctcgaaattaaccaacggaagctctcgagaaattcacatggacataactcttaactcggaggtccgattcatgcgcataatatatcgagacgctcgaaattgaacaacggaagctctcgagaaattcaaatggtcataactttgcacacggaggtctgattcaggcgcataatatatcgagacgctcaaaatttaacaacggaagctctcgagaaataccaatggtcataacttttcactgggatgt

SEQ ID NO: 1759 - DNA, 419 bp, Glycine max
gtacagcagatgccactctactccaaattcttgaaggatatgttaacaaggaaacataagtacattcaccaggaaaacattgtagtggaaggaaattgtagcgttgtgattcaaaagatccttccacctaagcataaagaccctgggagtgtaactattccttgttcaattggagaagtcattgtgggaaaggctcttattgacttgggagccagtataaatttaatgccactctccatgtgtagaaggttgggagagttggagatcatgcccactaaaatgactttacaactggctaaccgctccattactagaccatatgcagtaattgaagatgcgttggtcagagtgaaacattttatcttcctggtagactttgtggtaatgaatatctgtgaagatactgacattgctgtata

SEQ ID NO: 1760 - DNA, 490 bp, Glycine max
agtcacctgcggcatgcaagcttcattctacacctgaaaaagaggatgagatagttgcacaaaggagaaagcttcctaacaaaaattttcatgcaggtggaccttcttctagtaattctaacttaccgcagcctcctatccctcttccattcccacctagagcaattctagacaaaaaaatggaagaagtggaaaaggagatcttggagaccttcaggaaagtagaggtgaacatacctctgctagatgccatcaagaagattctaagatgtgccaagtttctaaaggagttgtgcacccacaaaaggaagctcaagggcaatgaaaggattagcatgggcagaaacgtgtcagcattgataggtaaatctgttcctcacattcttgagaaatgtaaggacccaggtactttctgtataccttgcattattgggaacagtaaatttgagaatgccatgctagatctaggagcatcagttagtgtcatgcc

SEQ ID NO: 1761 - DNA, 244 bp, Glycine max
agcttgtaggccttggatcttcttcatcaatggagtcctttgcttcttgaagatcaatgacaatggaatggagaaggaggaaaggtgattggagactccacttcaaggagaagataagttgagaacaagctcaccaccataggaagccatggataagagcttgaaggtaagagaagatgagtagagggagagaagagggagaatgaggtcttaactttgaagtctaatttctcaaatcatcaaa

SEQ ID NO: 1762 - DNA, 459 bp, Glycine max
  unsure at all n locations
gacaacgatcagaagacaaccttttcctgtaagatataattgaaacttattgagtcttacatcctgggtttgaaagatgagatatatcatgtgactaaattatcattcatctcgatcaatacattgataagcaacccttcaattcatgttataccttaaagttgaattcttcatctttaaccttatcgtaaatttgggattcatttcacaccttatctttgcaaagccgaaaaaattattttattcttgatccgtaaaaagaatactctctaaatcattttaaacaatcaccttttttacctttatctgtatgtttaattttttgtctattcttttcaaatattatattctttatcaatctaaaaattaatgttcaatattctattaaatgagaatgtcaataattaaaaataactctatattggaacttaaattgattntataaatctacgtgctcta

SEQ ID NO: 1763 - DNA, 259 bp, Glycine max
agcttctccggtcaatgtcagaccgtaccgataccctcattatcagaaacaagaaattgagaatcaggttgatggcatgttgcagcgaggcttcatacaaccaagcacaagcccgttttcctcacccgtgttgtttgtcaagaagcacgataggtcttggcgcttatgcgtcgactaccgtgctttaaatgctttgacggcgcatgatcagtttccaagtgcgactgtggatgaactcttggacgaatatgaggcgcca

SEQ ID NO: 1764 - DNA, 394 bp, Glycine max
  unsure at all n locations
ctacgccnaacatgagaccacttccagggtgctggaactacttcacatggattcgatggggcctatgcaagttgagagccttggaggaaagaggtatgcctatgttgatgtggatgatttctccacatttacctgtgtggactatatcagagagagatcataaacctttgaagtattcagagagttgaaactaagactttaaagagagacagactgtgtcatcaatagaatcacgagtgaccatggctgagaataagaatacagcatggtcactgaattctgctcatctgaaggcatcactcatgaggtctctgcagccattacaccacaacagaatgggatagttgagatgaaaaacacgaccttgcaagaggctgttctggtcatgcttcat

SEQ ID NO: 1765 - DNA, 364 bp, Glycine max
  unsure at all n locations
tgtctattactcccaatagacgtcctcctggtgttgcaaccttcttcaacccaatagacatggctntgctgtcagctgtgaagcaaggtacttttgtagttcaagcagcaggaaatactggaccatcaccaacaagcatgttctccttcagtccatggatctatactgttggtgctgcctctcatgaccgggtttatagcaactccatatntcttggaaataatgtgaccatacctggagttggtcttgcacgtaagtttttgtttctcaattcctggtaaatggttaaccttataagaatttattntagactaactcaccagagggggggtaatgttactgactttaatgattggactttctc

SEQ ID NO: 1766 - DNA, 205 bp, Glycine max
  unsure at all n locations
agctttntccaagttaataaaaaccatatgtaagtctctntctttgctttggtaactatccatcaatccctgttaaagataaatgacttctgttgtagactttcttggtataaaccaaattgattctttgcaattcttatttcttatctatgaccaatcacttgttctcataatttcatagtgtggtaattaacgttgaaagtga

SEQ ID NO: 1767 - DNA, 463 bp, Glycine max
  unsure at all n locations
agcttgatggtgttgagaagaaatcacatgtttgtcatcatcaaaaagggggagaatgtgaatgtatgtatacatgattntgatgatgtcaaaagaagaatcaaacaaggctcattntgtttaaagattaatacaagattgtttcaacaaacaaagccttgattcaagatttcttcaagatcaagccttgcctcacaatgaaaggtttcaagtcattcaaggcacatgtaatcgattaccaatacatgtaatcgattactaatggtttgaaagtgtgtaatcaattacacatcatatgtaatcgattaccagagacaatgaacgttgggaattcaaatnttaaatgaaggttcacaattgttcaagaaaaacaactgtgtaatcgattacactaattctgtaatcgattactagagaggattttcaaggaatatcgccaacagtcacatcttatcatttggat

SEQ ID NO: 1768 - DNA, 478 bp, Glycine max
  unsure at all n locations
gcatgcaagctntctgctcatagaacannatttnttcttcctctcttaattctccaacatctgaattcaatttctcaaaagtgtgcctaaattctctcttcagggcactgtaagagtgcttcagcctctctttaagctccccttgcttcctactgttgtattttggcatagaccaaatctgtccagtaacaacttcctcttctcttttcactttgtattggccaagtagcccactcaattggccatcatatgagcatttttgctcccacgcatcagcaataaaatcagcagatcctggaacttcaagatctttatcatacggtatatcgccagtcacaaagttcaaatagggagcatcaatatcttcatcataagcatctttgatacgccggtaaagtctacccaggaatttcttcgacctgtaagactggtgccgctctttccccatganatcagggtacaattttggtttcagatg

SEQ ID NO: 1769 - DNA, 455 bp, Glycine max
acacattttaattttatagggataaaaaatatatacaaaattttacatagataagatttaaacattttaatatttattggaatataaaaacatattttagtgcaatatatatgactggattatgaaagaaacagcaaagagaatattaaaaacatctaatataaaagcaacttttccaactaagaatatatataagtgaatattggatgtaatatttaatttcttaaaatcaaatcaaattaactcttgtgatgatcggaacaaaaaggaagttggcatgaatgcagccttctggcgtactacctgtaatattgtggtaagcgcttctgtacttgatcgtatcaattattctttataaataaaaaaaacaatcgaagttagtatcgacgcgtatattttgaaagttgaagacgtgtttggataaattgtgaaaccgacggtgaccttacacttga

SEQ ID NO: 1770 - DNA, 430 bp, Glycine max
agcttgtatattctgtttgtggtaggctggaactatagttcttacacaaccatggcatgatttgcactgcagaatagatggacctgctgcatatgatgttcttattaattttgagcagcgatggagaaaagcaactaagtggaaagagtttgcgatccttttcaaaaatatcctctcaatggcatggcgatgctttaataagaatagaacgcatctgaaaggataaattggattattatactactctaggggatgaccctgtagtatgggtttctagtgaagctgatcctgataatagcatgttcaggatggacaatgcaatcttagttttgagtgacgtcacttgcttgctatattttcttgattgtggagataaatactttcattacattgtattccaacccttacagatcttacactccgttgactc

SEQ ID NO: 1771 - DNA, 454 bp, Glycine max
agctgccttgtcccttgatatatttgagggactcatgatcactatgaatgacaaattccttgggataaaggtagtgttgccatgttttcaaagcccatactaaggcatacaactccttatcataagttgaatagttaagggtaggaccacttaacttttcactaaaataagcaattggatgaccttcttgcatcaatacagccccaatcccaacatttgaagcatcacactaaatttcaaaagatttttgaaagtttggcaacgcaagtatggcggaattagttagcttttgcttaagaacattggaagcatcttcttgtttctctccccatttgaaaccaacatctttcttgagcacttcattgagaggtgctgccaatgtgctaaaatccttcacaaatcgtctataaaaacttgctaagccatgaaaactcctcacctcggtcacggactt

SEQ ID NO: 1772 - DNA, 462 bp, Glycine max
  unsure at all n locations
ntgcataccccaaggatccattaggaaattacttgtgaaagagagccatgagggtgggctcatgggccactttgggatagacaaaacccttgtcttactcaaagaaaagttttattggccccatatgaagaaagatgtccataagcattgcactaggtgtgtggcttgtttacaagccaagtctagggtgatgcctcatgggctatacacacccttacccatcccatctgcaccttgggtagacattagtatggactttgtccttgggcttcctataacccaaagaggtgtagactctatctttgtggtggtggataggtttagcaagatggcacactttataccatgccacaaggtggatgatgcttcccacatctcacaactctntttcagggaagttgtgagactacatggtatgcctatgaccatcgtgtcagatagagatgctaagttccttagcca

SEQ ID NO: 1773 - DNA, 408 bp, Glycine max
  unsure at all n locations
ngagctngcaaaagaatgctacaagaatgctctcgcaattatgcacacaagagctcatgaaggtgtggcacgcatttatcatcagaaaaatcaaagaaaagctgcatatgatgagatgaccaagctaattgagaaggcagagagcaatgcctcagcatatgagaaaagatcacaatactgtgaccgtgagatggctaacgctgatcttgatgttgtaacataacttgatcctttaaagacctacccatatagatacagggcagcaggtactctccctagtagctcactctactatctgccatttgagcttatcaagtaaccatgttcaatttaaccatctgtagttagattactacttaacaagtttggcatcagcattgaaattaatcagatagtgtgcgggatctg

SEQ ID NO: 1774 - DNA, 482 bp, Glycine max
  unsure at all n locations
tcttaagtcacctgcangctgcagctntatagaactccnttaaaaaatcacttcggaatttaagtttgattatgcacaccatgctgataaaattntatttaaaacaagttcatcagtttatcttaaaaaaattaatatacaatgtaccgttgaaaatagaaacaattatcaaaagtctattttttctaatttggtgggtatggtaaacataacactcatgattgaaaattagatagatgaaaacatcattccatcatattaatggtgcaggtatatcaaatgttacaccaattagaaagcattatgaatatgattagtaaatgtgtgattatacatttaaattattttttaacatcacaagtgactgcttcagaaatcagaattgatgatantttactagaaaacaaaaaggaacttgagacattattaataactatccagtgttattacaaaagcatatatgttattatcaatcaattacc

SEQ ID NO: 1775 - DNA, 448 bp, Glycine max
agcttgttctgaactatagctatcgaatggccaacatatattgagatgctatgagcatgtcgactacatagagtagtatatagatgtgggaaccatcctccaccttactatgataaacacatgagtcacagggactttcgatgtcccatgagagacaatgaaatcattaaatctcttgtaccactgccttagtgagtgcttcaacccataaagagatctctttaatctacagacataattttcctttcctttcacttaaaaaccttcaggttgtagcattagaatgtcttcctctagtcttccatggagagaggcagttatgacatcgagttgctctaactccaagtccttagttgccactagggccagcagaacacgtatgaaggtgtgttgactaccagatgtgctttataacatacgtgctgtataaaagatgacttcttcagtc

SEQ ID NO: 1776 - DNA, 463 bp, Glycine max
  unsure at all n locations
tcaagaataatggcctcaacaaacttcttatttccagaaggaaattcaatcaatagacctccaatctttaatggaaagggttaccactactggaaaacccgaatgcaaatttttattgaggcaattgacttaaacatttgggaatccataaaaatagggccttatatacccaccacagtagaaagaaccacaatagatgaaagcacaacaagtggaagcacaacaatagaaaaacctagagatagatggtctaaaaaggatggaagacgagtacaatataatttaaaagccaaaaacataattacatctaccctaggaatggatgaatatttcagggtttcaaattgtaagagtgctaaggaaatgtgggacactctacaagtaacacatgatggcacaacagatgttaaaagatctaggataaacacattaactcatgaatatgaactatntangatgaatg

SEQ ID NO: 1777 - DNA, 472 bp, Glycine max
  unsure at all n locations
tactaagcttaacatcagaccacttccagggtgctggaactacttcacatggatttgatggngcctatgcaagttgaaagccttggagggaagaggtatgcctatgttgttgtggatgatttctccagatttacctgngtcaattttatcagagagaaatcagacacctttgaagtattcaaggagttgagtctaagacttcaaagagaaaaagactgtgtcatcaagagaatcangagtgactatggcagagagtttgaaaacagcaagtttactgaattctgcacatctgaaggcatcactcatgagttctctgcagccattacaccacaacanaatggcatagttgaaaggaaaaacaggactctgcangaggctgctanggtcatgcttcatgccaaagaactgccctataatctctgggctgaagccatgaacacagcatgctacattcacaacagagtcacactca

SEQ ID NO: 1778 - DNA, 491 bp, Glycine max
  unsure at all n locations
atcttaagcacctgagctgcagctatgctgaaacattacaatagacctcttcaacctcaacagcaaaataagccacaacagaacaagtatgacctctccagcaacaggtataatcccgggtggaggaatcatcccaaccttagatggtcgagtccttcacaacaacaacaacaacaatagccttattttcataatgctgctggcccaagcagaccatacgttcctccaccagtccagcagcaacaacaacaacagcagcaacagcaacagtcccaaaaacaacaaacagttgaggctcctccacaaccttcccttgaagaacttgtgaggcaaatgactatgcaaaacatgcagtttcaacaagagaccagagcctacattcagagcttaactaatcaaatgggacaattggctacacagctaaatcaacaacaatcccagaattctgacagattaccttctcaatctgtccagaatcccaaanatatgag

SEQ ID NO: 1779 - DNA, 413 bp, Glycine max
  unsure at all n locations
ctagataatggacacacatgaacagcgctaggcaatgacattcatggtgctccatacaaaggtggagagtggaggatcgccttgagggtcctctcttaggcaatcatgaaactcagctccaaactctaaagtggaggacacatgaacagccctaagcaataacattcatgtggctctggaaaaggatgagaatggaggattgccttgagggtcctctcttangcaatcatggaacacaactccaaactcgaaagtgggggacacatgaacagccctaagcaataacattcatgtggctccggaacaggatgagaatggaggattgccttgagggtcctctcttacgcaatcatgaaacacagctccaaactcgaaaatggatgacacatgaatgacaatgcaattcattcatg

SEQ ID NO: 1780 - DNA, 361 bp, Glycine max
agcttctggtgggacatcttgacttgctttccaatctgacattcaccacagattctgccttcttctattttcagattgggaatgcctctaacagcacctttgtcaatgatattcttcatgcctcttaagtgcagatgtccaaatctttgatgccatattttgacttcatcttctttggaggatggacatgtggaggagtaactggtttcttgaggtgtccataggtagcagttgtcctttgatctgttgcccttcattagaacttcattcttctcatttgtcaccaagcattctgactttgtgaagtctacattgaatccttcatcacacaactgactgatgctgatcaagtttgctgtca

SEQ ID NO: 1781 - DNA, 343 bp, Glycine max
agctttgagcaaattcaaacgacaataacgtttactcggatgttcgattgtgtcccgtagaatatcgcgacgctcaaaattgaaaatagaagctctgagcaacttcaaacgacaataaatttttactcggatctccgattgtgtcccataatatatcgagacgctcgaaattgaaaacagaagctctgagcatattggaacgaccttaacttttttctcggatgtacgattgtgtcccttagtatatcaagacgctcgcatttgacttcggaagctcttagcatactcaaacgacaatattctttacctcggatgtccgatagagtcctgcaatatattaaga

SEQ ID NO: 1782 - DNA, 458 bp, Glycine max
  unsure at all n locations
tctaaactntatacaagaatgaagctctgataccacttgttagacaagtggcctcagatatcttaagaagggggggttgaattaagatattacaaactatttccccaattaaaattctatttcactttctattcaagttacaaattcccttaataatgaacttcttaaatattgattcaaatagaacaatttgaatataaatataaaacaataataaataaaggagtttaagggaagagaaagtgcaaactcagatttatactggttcggccacacccttgtgcctacgtccagtccccaagcaacccgcttgagagttccactatcttgtaaaatccttttacaagttctaaacacacaaggacaatccttcctttgtgtttagaattcttttacaacaagagaccctcggtctcttaatcccttagagaattagaaagagaagaagaatgaatctc

SEQ ID NO: 1783 - DNA, 408 bp, Glycine max
  unsure at all n locations
gttgacggactataccaagctctaggtaaccaggacggagaatgatctatatataggcttgctaagggtagagagaggaagactagagatttggatcaagtaaagtgtgttaaggatgaagaaggcaaagtcttagtgcatgaaaaagatatcaaggaaaggtggaaggcgtatttccacaacttatttaatgatggatatggatatgactctagcagtctatacacaagagaagaggaccggaactataagtactatcgccggattcagaaacaggaagttaaggaagcgttgaaaagaatgagtaatggtaaggcggtggngccagacaacatacctattgaagtgtggaaaactcttggagatagaggtcttgagtggctcaccgaactctttaacgaaattatg

SEQ ID NO: 1784 - DNA, 378 bp, Glycine max
gcttggccatattagacttaataatttgattgttcgagtataacattacaaggaaatgtttttaaagaaatcataacattgatctggtactacaaaaaaattagagattcaactttcttcactaataattaacaactaagatttattgataaaaaaatgatatattattctagaagtattcatagatcaatcaaatgtattgataaaaaacatagatcaatcaaattttatgaagattggaaaaactcaatatggaaaagtgaaaaaagaaatatgtagtattaaacatatttatttaaaagcatgtaagccaagtctaattacattaataaaaaattaacataaaaaaatgtatcccaaacattcagtttggaaaat

SEQ ID NO: 1785 - DNA, 472 bp, Glycine max
  unsure at all n locations
tatggatgatgaagacgcaagttttgtgtatcatatttcatacacagatgacagttctgtatgcttaccaacccatccaggatgcttctgcataataacagcaaaagcagtcatctgttctaagataatgaaatcaatcatggaagtatggttggctacaaaaacctgctcaacaaatgaagggaaactcaaattagtaataaatagcatttactctttctagaatatgcaaataaggataatacaacattaaacaaacctgctttggtctcctgctaggcctgggtccatgatacttaacaaccccagtccaagatgcaacaaagaaactgcacatcatctctaccaaagacctctgaaggaaatgaacaatntacaacacacattgatgaacaaaaggagaatgtgccaaagttaatattagaaaccaagaattgatatgagatagaaaagaaagaactttactgaatag

SEQ ID NO: 1786 - DNA, 446 bp, Glycine max
  unsure at all n locations
ctacgctcgctacccatggagttcctaatatctccacacttttgggtgggccattcttggatggccttgattttctcagggtccacttggacctgatttctaccaactacaaaccctaagaaaactatattatctacactaaaagtacacttgtctatatttgcatagagggtgtttttcctaagaactgaaagaacttgcctgatgtttagccttccatagacatcacaaatagaagaacaaacaaaattgcacatgagagagaagaacatacttgaagatatgaattatatacaaagaacaagtaagagaaaacgagagagaagagnttgatctaaaacttgcactagaagtttctaaaaatgggttctttttacacaaatgactgtaactaactaactaactaactaactctgaanatatactcagtagaaaacattatactc

SEQ ID NO: 1787 - DNA, 364 bp, Glycine max
agcttatgcaggcagagttcgagatgagtatgattggaacattgatgccttacttggactttaaatcaagcaaagcagatgaaggaatatacatacatcaaaccacgtatgtgatggaactgctcatgaagttcgagatggacaatacaatgtcaatgaagacctctactcatccaaccattgtgcttggattggacaatgtgtctaagcaggtgagtgaaactgcatatccaggaatgataagatctcttcgatatctatctacttccagaactaacattatgctcatcgtatgagaggcaacctaactgctccatggcatttgatagaagactccaagacgattatgccatagatgcatgag

SEQ ID NO: 1788 - DNA, 476 bp, Glycine max
  unsure at all n locations
agcttggctttaaaaagttcaccttaagatccgtaacaacttcaaagcacctcataattgcctttaatgtgaggacgttcattaaagttggttttcctaggaagagggtatcatccgcaaattgaaggatagataaagaaaagtccccttctcctaagggaataccttcaaaaaagatattgtttcaccgcttctcacatcaagtcaccaagaccctctgccaccatgatgaaaaagaagagggctatggaatccccttggtagagacctcttttacccttaaattcttccgtaggacttccatttatcaaaatagacttataagtgaatttcacgcaacatctaacccacttaatccatattncactaaagtttattctattcataatatagttaaaaaaacgtcacctagtgggcgcttctcacctaatccactctcaataagatgtcctgactattttcatacactctatcaa

SEQ ID NO: 1789 - DNA, 438 bp, Glycine max
gcatctgtgtgcaatacataattcttggtacaccacaacacaatggtgtatcataaaggcgtaatataactttaatggatatggttatgagtatgttaatcaattagactttacctgtatctttatggatgtatgccttgaaaactgccatgtattttgtgaagagggatgctagttagacagcttctaagacgacttatgaactgtggacaaataggatacctagtataaggcatcttcatgtttggggttgccatgcagaaataatgatttataatccacaagagagaaaattggatgcaagaacaatcagtggatatttcattggttatacagaacagtttaaagggtatatgttctattgttataatcatagtatgagaattgcaaaactggaaatgcaaggttcattggaaatgatgaaatcagagggagtac

SEQ ID NO: 1790 - DNA, 456 bp, Glycine max
  unsure at all n locations
tataganatcaaacacgataataaattatcctcacattataatagaaacatatgtgcataaataacaaataagtcataagtcatcaaaacacaaatcatttgtctaagtaacttgcatctagaagttctaattctcttctaatggtgtagaaagagtctttggttagtggttttgtaaagatgtctgcaagttggtttttagtgtctataaattttttaaaacacaatcacctttttcctaagactaagcgctaattgactatcaacacttaccaagatgagtttttattatcataaaaggttntatcatatcaaaataattntgtttgaaatacaatataataattttgaaaagcataaaaaatattttgaacaatcaatcaagtaattcaaacatatcanacaagaattatacaaggattgaaggatatagatcacaggcattatcaaacattc

SEQ ID NO: 1791 - DNA, 375 bp, Glycine max
gtatatggacgaaagtgcaatactcctatctgttggtacgatgatggagaagcactacttcttggacctgaaatgctacaacagattaacgaacaagtgaagttgattcgagagaagataaaagcatctcacgataggcagaagagctattatgatagaaggaggaagccactagattctcatgaaggagaacatgtgtttttgaaggtttctcccatcaccggggtctgaagagctctcacatctatgaagttgacgcccaagtatctaggtccatatcaaatcttgaagaaggttgggcctgtagcttatcatatcgccttacctccgagtgtatcaaattcgcatcatgtgtttcatgtctctcaactgaga

SEQ ID NO: 1792 - DNA, 433 bp, Glycine max
atatataggttccttccaaactcttagttcgtagtagttgaaaatttaaaatgagaatgaactaaacaaatattatattaatttttaaagttttagtatacattaatttgatacaatcttctataatttgttggtgaagcaaacaaagtactaaaaaaagaaatcaatgttttattagaaatattaaaattagattttttacatgcatgcaatgcaatgtttacataatattattaataatactagtaattgttttcattcttaaaagaaaattaaaattattttttaattaaactaacttgagataaattatattgcaaagatattggttaaattacttattgttgaatgaggtgtttaaattgatcgaacgagatgtgtgaattattttattattaaattctaacttataaattttaaatataaaattgtt

SEQ ID NO: 1793 - DNA, 444 bp, Glycine max
  unsure at all n locations
taagcttcctgctatggatgtgttcatatgcactgctgatgcaactaatgaaccaactatggatgtgatgaacacagttatatcagccatggcactggattaccctcctcagaaacttcatgtgtatgtntcggatgatggagggtctccattgattcttcatggagtgagggaggcttgtaagtttgctatgtggtggcttccattttgtagaaggcacaaaataaagaacaggtgccctaacgctttttttttttattcacaaatgttagtagttcatattctttgttagcagaggatcaaccccatgaactttttctccttctcttctcccttaaccattcaacccatcttatattatcatgtgtcccaaggcttacttctctgctttgaatgataatgatgatggtgatcttgcaacgagtatgtgttgtcatggaagat

SEQ ID NO: 1794 - DNA, 471 bp, Glycine max
  unsure at all n locations
agctngcatgaattcacattctcccctttctcaagcaaattcttcttgacatgatcaagatcttcatgatttacattctcccccgttttgatgatgacaaccacctgtaggttaggagcaaaaacaaagaaaaatatctgaaattctgataccaatgccagatgtcgtacaggatgtcacgacatcacgcttcagaacatgcagattatatttgagagtatgaacagattaaacaggtaaataacacaagagaattgttaacccagttcggtgcaatgtcacctacatctgggggctaccaagccagggaggaaatccactaaaatagtgttagttcgaagatctaacagccactgtttacaaccttctcacctaaccactacccgtgcaatctctacctaagagccactcttagatatgagaacccctctcactccctctcaatcactcttccgtgtttacaaataaatc

SEQ ID NO: 1795 - DNA, 361 bp, Glycine max
  unsure at all n locations
ntagatcaattcaaatggtcataagctttcactcggaggttcgattcaggcgcataatatatcgaggctctcgaaatatagcaacggaagctctcgagaaatttaaatggtcataactnttcactcagaggtgcgattcatgtgcataatatatcgagacgctcgaaattgaacaacggaagctctctagaaattcaaatggtcataacttctcactcagaggtccgattcaggcgcataatatatcgagacgctcgaaattgaacaacggaagctctcgagacaatcaaatggacataactcttcactcggaggtgcgattcatgcgcaatatatatagaggcgctcgaaattgaacaac

SEQ ID NO: 1796 - DNA, 364 bp, Glycine max
  unsure at all n locations
agcttgcaaagatattntatgggccctaccaaatcgtggaacacatgggcaaaactgcttacaaactccangttgtgaaagatgctcgcattcatccagttttccactgctcattacttaagccctntcatcactccaccatagagcccatcacccatttacctctgcctgtcaattgcatgaactgccaacctctgattgctcccttggtaattctgggttgtcgctgtaacacggaaaattcaggtgttggtgctgtgggacgaccttctacctgaagagacatcgtgggaagattgagagccattgaaagctaccttccaccttaaggacaaggtgcttttccaagccatgaggaatgata

SEQ ID NO: 1797 - DNA, 445 bp, Glycine max
  unsure at all n locations
agcttcttatctaaggcactcttttggtggtgaatcttcttcttccatggcttattctctagtggatggtgcctcctctcacctcttctcctttatctttcgctataactccatggctgaaaatcaccattgaaggaccttattgaagctcaaagatcaagcctccatagaagcttctcaaccaagcttccatcactcatgattgtcatgtatgaatgcaaaaactatntactgtagcaattcgtggtatctttcctgacaaagttagggttgccataactcgtctatgctttctttntaatgctatctatagcaaagtcattgaccctagaaaattggatgaattggagaatgtggcttccattgtcctttatcaaatggagatgtattntcctccatcattntttgacataatggttcacttaattgttcatctggcgaggga

SEQ ID NO: 1798 - DNA, 443 bp, Glycine max
agcttacggtccatgacctcatacattcgctcttattgggtatatcccactagttttcttcttaaaagcttgctaattttatgccatgcagataggctatatggaagtatccacatacaacagagggaagttgaaagggcgtagaaactaaacatatttcaagcgtttcactttaacgcacaattgtctaatgaacagagttgcactcatctacaatttcaagctgacgtacagcataagtatccatttccctcgacattaactcaaattttgtgtacagaacataaaaatatttgttactaaatactgattctgactaggacaggatagccatgacatctgaggccctcaaggcaatgtagacagaaccatctctgcccttgaagtcattcgctgcatatctggagtacagaactgtattcccaggcatgacggacaatggc

SEQ ID NO: 1799 - DNA, 449 bp, Glycine max
  unsure at all n locations
agcttctggtgggacatcttgacttgctttccattctgacattcaccacagattctgccttcttctattttcagattgaggatgcctttaacagcacctttgtcaatgattttcttcatgcctcttaagtgcagatgtccaaatctttgatgccatattctgacttcatcttctttggaggatagacatgtggaggagtagctggtttcttggggtgtccataggtaacaattgtcctttgatctgctgcccttcattagaacttcactcttctcatttgtcaccaagcattctgactttgtgaagtttacattgaacccttcatcacacacccgaccgacgctgatcaagtttgcagtnagtncctttaccagcagtactttgttcagactaggaagtccatcatgagctagctttcccattccaatgatctttcctttagagccatc

SEQ ID NO: 1800 - DNA, 350 bp, Glycine max
aaagcatttctttcaaggataaaaacaaggtccatgtaaattaagaatagctatccacaatcactaaggcataatagttccctcctatactcatagttctaaaaggaccaaacaagtctaaatctaagagttcaagcaatctagaggttgaaatcatatttttagatttaaaagaaattctagattgctttcccttttgacatgcatcacacaagtcatccttcccaaacttaaacttaggaagtcccttaaccaacttattgcctctaagaaactctgagatcaatacatttatcttcccgtgtttgattaccactaagcattgatataaaactaagtctaaaacaaaa

SEQ ID NO: 1801 - DNA, 470 bp, Glycine max
  unsure at all n locations
tgaccaggaattatntgtatgggttggatgttgaattctggttgttcctggtgcggagatgatggtacagagggtgaaccangagctgaagtttcttttggtgaggtagccatggaaaagcaaagcgtttggaatgatttcgtaaatttctgagagctgttggggaatgcagaaaacgagattaacacgagaatataagtttgaatgaggaatgtagagggacgtgtgaagcaacggtcgaatttgctttggttcagtagtgaacgtgctattaatgttaagtgattcgtttgggcacgttcagatatcagtagttgctacaattcctctagcagacaaatgcccagcttgcccctcagtttttcaaactgttttgcatccaatgcctttgtgaaaatatctgctatttgttcctcagtgtcaacatgctccagtgtgataactttatcatcaacaagctctctaatata

SEQ ID NO: 1802 - DNA, 425 bp, Glycine max
  unsure at all n locations
agctngccaaaggtcgaanaggagcttgtccgatcaattgagcaagaccaaagaaaacatgtgggccatcatcgaccaatacaaggaaaagttaagcctagcggtaactcacaaacaaaggctagaggacgagtacgtgaaggtataagtcctgcaagtggaaagggaagcaagggaaagggtgatcgattcattacacagagaagcaatgatgtggatggataggttctcctttactgaaattctgatactggggacagatgtcgtacaggatgtcacgacatcgcgcttcagaacatgcagcttgtatatgaccgtatgaacagattanacaagtaaataacacaagagaattgtaacccagttcggtgcaacgtcacctacatctgggggctaccaagccagagaggaaatccactaaaata

SEQ ID NO: 1803 - DNA, 470 bp, Glycine max
  unsure at all n locations
tcaagatgtagttaagatacctgacaacttctgttcgtgtntgttgcttgatagaaacacagatgctagatataataatatgaggaaggctgcttctcgggcagattccggtgacaactatttatactgtccaagggttgtagatctacaggatgaggatntaaggcactttcagtggcattgggaaaagggggagcctgtcattgtcagcaatgtgctngcaaaaacatctggtttaagctgggaaccacttgtcatgtggcgtgcattccgtcagatgactaagaccaagcatgaacaacatttggatgtgaaggcaattgattgcttagattggtgtgaggtttgtttaatttctcaatcttgaacttcgagggaattttgcacaaattccattgctcatgttcattctcatgaagcttatgtttaaattgtgtaatgttggtacttattttaactggaaccactga

SEQ ID NO: 1804 - DNA, 473 bp, Glycine max
  unsure at all n locations
agcttaactaactccaaggcatcacctgctgctttatactccgaatcggtagttctcacctaccagaagttccagaatccagtacagacttctatttcagcttatgtgtgagtaaaatattgctcaaataataaatcatgttgatgttgctattcaggaaaaataacaaaataccaataaattatgttaataataaaggggttggtatgtgttgatggtaaattatggagctacttatttacctgcaacaactccccgcaccctaagctcttttgataacttttcaacaaattgtcggggattgagatgtcgaacgcttgaaaattcaacctcaaactcttctgggaccatgttacagcaataaggaacccaagatgaaagaattcgctttcggtcacatttagcaactataggagccctgttagggaaacatttaacaaaatagacgttattntacacatggagataacaat

SEQ ID NO: 1805 - DNA, 451 bp, Glycine max
  unsure at all n locations
ntaagaagttgtcaaacattaatgaatagaaaacaacatattgtagttgctactgacaagaaatcaaacttggtgaaaagagaatataggattcatttgatggcaacaattgattgtattcatttctattgaagcaaagattgacatttcgtggtcatgatgaatcaatttattcacaaaatcaagataattctattgagcttctacatattcttgacaatcataatgaagatattgataacgttctaaaaaatgctcgtggaaatctcaaaccagtggcacctaatattaaaaggatattgtgatagctgccgcttgtgagaccaccaaaattattgttgatgatgttagagatgattnttttgccattctaattgatgaatctcgagatatatcaattaaggagcaaatattggttgtttttgttatgcagataanaatggaagtgtca

SEQ ID NO: 1806 - DNA, 436 bp, Glycine max
  unsure at all n locations
tactatgtcccaacaatcctactagtagttcctgtggactcttgttgcataaacattcttgccaatccaaaatcagaaattnttgggttcatattctcatcaagtagtatgttactagctttcaagtctctgtgaatgatttttagtcttgagtacttatgaagatagagtattccttgagaaatcccttctattatgttgaagcgcttcttccagtctagtaacatgcttctagtgcaatcttgtcaattaaaacaaggcagtatgtgttagaatatatactatacaagagtaatacactgcaagacatacatagttatgcttaagataggaaagcataagtaaaggattaaaggaatcatccgtaacaattattgaaaaattcagtcagaanacttgaaatttcctcataagagcatcgatggtatatataatt

SEQ ID NO: 1807 - DNA, 381 bp, Glycine max
  unsure at all n locations
taaatcttaataattagtaggatgttcttggcacttctcatgttaaattgttcacattatcttaatatttttaaactttctttcacaaaagtaacaaaataaattattttctataaaatacactgaactacatctaagcttaatcaactttagcaaagtatcattaaattttctcatagatgtatntattttataattaatttatagaaataactaattttcaaaaaaaaaatcatgaaattaacaaaataaactatttntacaaaatacaccgaactaaatatgaatttaataaactttagcaagctatcatttaatctttttcatanatggatttatcttatgatatcatctactcatgtatcaaaattaatttcatga

SEQ ID NO: 1808 - DNA, 450 bp, Glycine max
  unsure at all n locations
tgtgggtggaggacgcatgaacgaaaacacaatttatgggtcttcgtaaaagggttgaggatggagaattgcactaagcaatcactacgcacggttccaagctccagggtggaggacgcatgaacgaaaaagcaattcatggggctccgaaaaagggttgaggatggagaattgcactaagcaatcactacaaacggctccaaactcgtgggtgaaggacgcatgaaccaaaacgccattcatggggctcagaaaaagggttgaggatggagaattgcactaagcaatcactacgcatggctccaagctcctgtgtggaggacgcatgaacgaaaatgcaattcatggggctccgaanaagggttgaggatggagaattgcactaagcaatcactatgcatggctccaaactcgtgggtgaaggacgcatgaacgaaaaccccattcatg

SEQ ID NO: 1809 - DNA, 456 bp, Glycine max
  unsure at all n locations
cgtcttgctggatatttatatgcatatttttctgatgatcaccgaggaacaattagggatcaacttgaaacttatgtgcnttaagtgagacgcacatgcttcttttttcanttgtgaagatgttcaaagtttggctatgaagatggttcacactgagaaacatttggtatttccattggtttataaacttattgagctagctntgatattgccggtgtcgacaacatccgttgaaagagctttttcagcaatgaagaatatcaagtctaaattgcgcaataagatcaacgatgtgtggttcaatgacttgatggtatgttacaccgagcgggagatattcaagtcacttgatgatattgatattattcgaacatctaccgcaaagaagtctcggaaaggacacttgcctcgtaatttatttaacccgctttgtaaattatgttatctctttattta

SEQ ID NO: 1810 - DNA, 426 bp, Glycine max
  unsure at all n locations
agctagagcgtaaactanatgccttggtttacctgttaacctaactggccatgggataaaaatctgcacctttcgccacactctgtggtttatgctcctctaccgaccaccatacagacctttgcccttctatgcaacaatctgaagcaattgaacaacctgaagtttatgctgaaaacatctacaatagacctcctcaacctcagcaacaaaatcagccacaacagaacaactatgacctctccagcaataggtacaatctcgggtggaggaatcatcccgaccttagatggtcgaattcttcacaatagcaacaacaacaacaacagccttattattaaaatgctactgggccaagcagaccatacgttcctccaccaatccagcgacagctacaacaacgacacatcggacccgaaatagcaa

SEQ ID NO: 1811 - DNA, 409 bp, Glycine max
  unsure at all n locations
agctagctaacccatggaagctcctaatatctctcactctttntgnggtgggccatccttggatggccttgattttctcagggtccacttggaccccatttctaccaactacaaaacctaagaagactatattatctacacaaaaggtacacttctctatattttcatagagggtgttttcctaaggactggaagaacttgcctgagatgtcctaagtgatcatctaggctcctattgtccactaaaatatcatcaaaataaacaactacaaatctacctatgaaatcccttaagacatgatgcataagcctcataaaggtgcttggtgcattagtgagcccaaaaggcatcactagccattcatacaaaccaaacttggtcttgaaagcggttttccactcatcaccc

SEQ ID NO: 1812 - DNA, 446 bp, Glycine max
  unsure at all n locations
agctntacgcggacaagcatcgtagggaagtctttttgtttttgggactgggctctggctcgacttcgttcttacaggcagccctctgccaaaggggatcactcaaccaatgtgaagttagctcgttgttattatggcccatttcaggtcacagttaagctcgggcccgtagcttatcgcgtggatttttcggcaggcgtttgcatccacctggtgtttcattgctcgaacctcaaaccttttcggggcgagacagactccaattcctcaattcctttgccacccaattttcacgagaatcaaccactcatatcccctcttgccattctggngtctcgtcgtgcaacctctgatcctcatagttcttggcaggttttggtgcagtggcagggtctcccaccggaggagacgtcgtgggaagattgtgaccagtctttgcaggacta

SEQ ID NO: 1813 - DNA, 441 bp, Glycine max
  unsure at all n locations
tatggtcgtnntgaattgcttagaccttatgttttcaatttctagcgccactatatagtacgggacacaatcggacatccgagtaaaaaggtatagttttttgaatttactgagagcttcagttttcaatttcgagtgtctcgatatattacaggactcaatcagacatccgagttaaaagttatggtcgtttgaatatgctacgagcttctgttttcaattgcgagcgtctagatatactaagggacacaatcgcacatccgagaaaaaagttaatgtcgtttgaatttgcacagagcttctgttttcaattttgagcgtctcgatatactacgggactcaatcggacatccgagttaaaagttattatggtttgaattngctaggagctactattttcaanttggagcatttcgattataacgggactcaatcggacat

SEQ ID NO: 1814 - DNA, 424 bp, Glycine max
  unsure at all n locations
ggatcttaagcactgagctgcagcttgagcaattaaacgatgataacttttttctcggatgtcggattgagtcccgtaatatatcgagacgctcgacattgataataaaaactctgtgaaaattcaaacaacgataactttttactcagatgtccgattgcgttccgcaatatatcgagatgctcgaaattgaaaatggaagctcgtagcacatgcaaaccacaataactttttactcggatggccaattgtgtcccgtaatatatcgcgatgctcaaaattgaatacaaaagctgtgagcacatacagacgatagtaactntntactcgaatgtccgattgcgtcccgaagtatatcgagacgctcaaaattcagagtagatgttgtgaccacaatctaacgacaataactctttactcggat

SEQ ID NO: 1815 - DNA, 423 bp, Glycine max
  unsure at all n locations
gcttctacatcctatgacagtgttgcctcacttttgcttttttgactctagcaatagagacactatatagtggtacctgcactccaagaactttggatacaatcgccttactgattcaaactcggcaatcctntaaagcagctagatgagttttgggtcaatggtctatgggttgaataatgtgataaaaataacgcttcaatagtgtgatacatatacataagattattaacatataatgtataaaataaaaacacagcttatataagcctacatattctaatgtatgtgaaaaaaggatttaatcttatatattatatcttagaagataatctctaagagtataaaactatcgtaaagttaaaaggaataaaagttatattttgaaatatgttcgcataagacttatattaatattatatt

SEQ ID NO: 1816 - DNA, 352 bp, Glycine max
cttgagcttcgctcattacctgtcataagctatttttacaaagctcggctcggcttatataaaagtgtggctcggcccacgagcctatttaaaagtctgcctaacatcgcccttgattaaccaattatcttaaaacctagcgaacaacgaactataagaagaaccttagtcaaattcgtgtcagtactgtacaaatccaaaaataatggactaacataatcatagtgaattcaagcggcacaacacagcgtacatcatgagaaaataaaaagaacgtcattttatgagacgtatgaattagacatggtttgcacaacatgaattttatcttacgtgcacagtgtgtatgaac

SEQ ID NO: 1817 - DNA, 403 bp, Glycine max
cttgaatgctctattcaatggagttgacaagaatatcttcagactaatcaacacatgcacagtggccaaagatgcatgggagatcctgaaaaccactcatgaaggaacctccaaagtgaagatgtccaggttgcaactattggctacaaaattcgaaaatctgaagatgaaggaggaagagtgtattcatgacttccacatgaacattcttgaaattgccaatgcttgcactgccttgggagagaggataacagatgaaaagctggtgagaaagatcctcagatccttgcctaagagatttgacatgaaagtcactgcaatagaggaggcccaagacatttgcaacatgagagtggatgaactcattggttcccttcaaacctttgagctaggactctcggat

SEQ ID NO: 1818 - DNA, 455 bp, Glycine max
  unsure at all n locations
ctaagctcggagatttatcattggttctactcgatgacaccagaatatatagttggaatcatcaagcttntctgaaatcgaaggaaaagattgatgtgaatgatgagaggaagtggacacagcaaaattgttttctgccattgatgaatccttctaagagattggacattagatcctccaagttctgagtctgtacgaaatgctgttggagttcttcaagagattggggcattgtcagttgatgaacaactcactcagctagggcagaagcttggctgtcttcctattcatccatcaacaggcagaatgcttattttttccatatagatgatatgtcttgatccagctctaactcttgcttgtgcattcgagtttaatgatccatntgtgcatcccactttacctgatgaatagaagagagcttcagctgctagatctgagcttggctctttgta

SEQ ID NO: 1819 - DNA, 481 bp, Glycine max
  unsure at all n locations
ntaatatatcaaccaccaatattagatacaattaactaattatgtgtttacttcatctngtttgaattccaataagatacatatgtacagcttatgcactttgatttttgttatcgacatttatagtttgaaacaaaaatgcaaattggaataataaatcatggtagctagacaaatacaattttggttaatttttttaagagataaaactagtttatattcatatgggccgtcttgattaatttgaatttgaatttcaagcgagatttgtgtatttgttaattntggtcaaaaaaattattggttgacgaaattaattgatttaaaatttaaacaaaagttaaatatgttatgaacgaaaataaatatataagcacaattagaaacgctaaattaatctactgtcttagttaaaatcatgctggtgaacacaatctagaggttagtgacatataacgagtggagatcctcttgagtgcag

SEQ ID NO: 1820 - DNA, 465 bp, Glycine max
  unsure at all n locations
ngaaggacatacacaaagtgtgactatatgatgtgacaatcggttgtagctagcatatactcacctccccctctaaaatntaattggattgggcttcccccaattcaattaaatttatttcccaatacatacatcaaatattcacttaatgcatgtgaaattacaaagcaacccataatacaaaaattagtctaggtatcctaaaatataaaggctgaaaaatcctatatttctagggtaccctacctacattatgaaaccctaaatacaaggcccanaaaaaaatgaaaccttaatataatatgtacaaagataagtgggctcatacttagtccatgggcccaaaatctaccctaaggccgatgagaaccctagagccttctcttgcatctctggtctaatcttcttggagtcatctatccaatggccttggagggtaggaatgcatcattcccttccccttga

SEQ ID NO: 1821 - DNA, 424 bp, Glycine max
tctcgatatatgatgcgcctgaatcggacgtccatttgataagttatgactctttgaatttcctgagagcttgcgttgttcaatttcgagcgtctcggtatattatgcgtcagaatcggacttccgtgtgacaagttatgaccattttaatttctcaagagcattcgttgttcaatttcgagcgtctccatatattatgcgcctgaatcggacttccgtgtgataagttatgaccatttgaatttctcgagagcttgccgtgttcaattccaagcgtctcgatatattatgcacctgaatcagactttcgtatgacaagttatgaccgattgaatttctcgagaggcttcgctgttcaatttcaagcgtctcgatatattacgcgcctgaattgacttccgtgtgaaagttatgacaatttaat

SEQ ID NO: 1822 - DNA, 382 bp, Glycine max
cgcctgaatcggacttttctttgtaaagttatgaccatttgaatttctccagagctttcgttgttcaatttcgagcgtcccaatatattatgcgcctgaatcggacttccgtctgacaagttattaccatttgaatttctcgagagcatatggtgttcaatttcgagcgtctcgatatattatacacctgaatcgggcatccgtgtgacaagttatgaccatttgaatttcttcagagccttcgttgttcaatttcgagcgtcccaatatattatgcgcctgaatcggacttccgtgtgacaaagtattaccatttgaatatctcgagagcactcgctgttcaatttagagcgtttcgatatattatgcgcctgaatcggac

SEQ ID NO: 1823 - DNA, 428 bp, Glycine max
actatgaatactaagcttcatggtctctggtataggctctgggactttccattgcaacttatgtggagggcaaagaaggccttcttctgggggccagagccataagtgagacaccactctagaagagttagacttctaaccttgtgtcaggacctatgggccaaggaatagtctcaggtactcaatttttacggaacgtctgttttgatttagctgtttgtagcacgtctcaatgcgctggttgaacgacatgcaatttttacccttacattgaaagggtttcgcattgaggggttttccacttcaaattgtgtctctgttttctttcatttctattatgtgctctatactttattggtactcctgacaggtactcgcaagggtgggaaaatatatgtacgttatctcgtcttactctgttatagatt

SEQ ID NO: 1824 - DNA, 487 bp, Glycine max
  unsure at all n locations
ngcttatctcttcaggatgctcaacacagtactgcatgtgctccttcaacttagacctacaacaagcaaatagacaagagcatataaatcttctcacaaatcacaacaaattcagcattagcaagttcacatgtcacaaattcaatacccgaattccttgttcaggctgttcgcagccacggttgctgcctttccgccgccgtatttggccacaaagtcatccttcacacgctccagaaaagccacaggcacctgtctcccaatcgattcatccgcaacaacacaataagctacaaaaaacaagtgtgtgagtcagacattcatttccaaaaacacagcaccgaacttcagataagcctataaacaaataataacaacacgaatttcatttcagttcattttcaaacacatcaccgaacttcanaatagcctctaaacagatcagaacaacacgaaattcatttcattttcaacacaacaccgaact

SEQ ID NO: 1825 - DNA, 375 bp, Glycine max
  unsure at all n locations
tattgtcgttnngaattgcttagaccttatgttntcaatttctagcgcttcgatatagtacgggacacaatcggacatccgagtaaaaaggtatagttttttgaatttactgagagcttcagttttcaatttcgagtgtctcgatatattacaggactcaatcagacattcgagttaaaagttatggtccgttgaatatgctacgagcttctgttttcaattgcgagcgtctagatatactaaggcacacaatcgatcatccgagaaaaaagttaatgtcgtttgaatttgctcagagcttcggttctcaattttgagcgtctcgatatcctacgggactcaatcggacatccgagtcaaaagttattatggttt

SEQ ID NO: 1826 - DNA, 462 bp, Glycine max
  unsure at all n locations
agctntgagcaaattcaaacgatgataactnttactctctgatgtcggattgagtcccgtaatatatcgagacgctcgacattgataataaaaactctgtgaaaattcaaacaacgataactttttactcagatgtccgattgtgttccgtaatatatcgagatgctcgaaattgaaaatggaagctcgtagcaaatgcaaaccacaataactttttactcggatgtccaattgtgtcccgtaatatatcgagatgctcaaaattgaatacaaaagctctgagcaaattcaaacgataataactttttactcgaatgtccgattgcgtcccgaagtatatcgagacgctcaaaattcagaataaatgttctgaccaaaatctaacgacaataactttttactcggatgtctgaatgaatcccgtaatatatcgagacactcgtaatctaaaactaaagctct

SEQ ID NO: 1827 - DNA, 436 bp, Glycine max
  unsure at all n locations
gcttggagtttccagtgccaattcgtcttcttctttagtccagtcttcttctggcttcagttcattagagggctttccttctgtgtccagcatcttgggatgttcccagcctttgatgacagctttccaggttctgctatctagtgatttgaggaaggccaccattcttgctttccagtattcatagttggttccatcaagaaatggtggtctgttcactggtcctncttctntctncatgttcatcagaaattatcntcctagatctcactcagtgatttcgagtgcctgctctgantaccaatgaaattcttgatactgggacagatgtcgtaccggatgtcacgacatcatgcttcagaacatgcagatngtatgtgtccgtatgaacagatttaaacaagttaataacacaagagaattgttaacccagttc

SEQ ID NO: 1828 - DNA, 473 bp, Glycine max
  unsure at all n locations
tattaatatatgattaatataattaannaatatttgtaaaattagctgataaattagtttataaatgttaatagcataaaaatacatatttaattatttaattatatatgtatgtatttaatttgtttccaataacgtgtcatcataaaaactagggcaatattttttttaaaaaaaattgtattataaaactataaaatgtttgagttgtataaagcattaattttctactaatttttctcttttttgaacccaatttttttttttgatatttttgtaaaagttagggagctacatactnttaattgtatttccttcttaacatggcattccttcttaacgtgaattatctttatataaatggcttntttttttcattgactgaaaantttaaagatccgagtgcacaaatgacatatatgatagtaagttactgagcttttgttaaatttatacctgaatntcatacttaa

SEQ ID NO: 1829 - DNA, 364 bp, Glycine max
tcctagacataagaatgcgcatcacgtaacaacttcttctgatgatgccagataaggtcatgagggataatctcagctaccttgaagttagcagatggctaagtaaactctctgtttaggtggtagcaaagctcatatgtgcatcatttaggactttactggcatagtaaatagagcgaagcatcttatacgcctctgtcctagcactgcaccaacaacgtagtcactagcaccacacatcatttcagactctaggctgcaatttggggccacaatcactggagctgacaccagcctccctttcatggtgtgaaatgctagcatacattcttcatcgcacttatacacagcatctttgttcgat

SEQ ID NO: 1830 - DNA, 419 bp, Glycine max
  unsure at all n locations
tctcccanaaaatggtgtcgtcagcaaatgggaggatattcactagaactcttgttcttccctaccaagaagctntggaagcaatcttttattgttgcttccctcatcattcctgtcaagccttcaacaaccaagtcaaacaatagaggggccaaaggatccccttngtctcaaatctcttgaggcttaaattcagaggttgagcttccattcactagaatagatatagaggctgatgtgaggcaccccttaatccatccaatccatctgtcatggaacctcattcttctcatcatatganaaaggaattgccaagacactaaatcataggctntttcgaaatccactttaaacaccatgcaggacctcatagacctcctangcctctcaagtacctcattagcaaccanaacaccatg

SEQ ID NO: 1831 - DNA, 454 bp, Glycine max
agcttcatgctgaagtatgtatgacaaaactttattactgttattcaacacatacaagtgagcttgtaacaaatcttctacacttggagtgataacatgcagtccttttgaacccttaccgcccactctgtcgtcatggcgagactcaggaaggccaataggtttagccttttcaatgtactctgaataaaattcaatggcttcttctgcaatgtacctttcaacaatagatgcttccagacgatgtagattcttggtatacccttttaagatcttcatgtattgctcaaccaggtacatctaacgcaaataaataggaccacaacatttaatttctctgacctgatgaacaattaagtgaatcatggtgtcaaagaaagtaggaggaaaatacatctccagttgacacagtataattgtggcctcattttccaggccatcaaacttgacagga

SEQ ID NO: 1832 - DNA, 381 bp, Glycine max
  unsure at all n locations
tcaaaggtcgagatgttagacaagtggcctcagatatcttattattagggggttgaattaagatattccaaactacttccccaattaaaaatctatttcactttctttttaagttataaattcccttaacaatgaacttcttaaatattaattcaaataaaaaaattgagtatgaatataaagcaataataaacaaaggagattaacggaagagaaagtgcaaactcagaattatacttggtccgccacacccttgtgcctacgtncagtcctcagcaacccgcttgagagttcactatcttgtagatccttttacaagttctaacacacaaggacaatcctntctttgtgttagaattccttacaacaagagaccacagt

SEQ ID NO: 1833 - DNA, 447 bp, Glycine max
  unsure at all n locations
ctgatatggatattagattaaaggtaaaagctggcacatattatacattgtgtagggtaatgagtgcagaaagttgtactatgcctaagtgggtagcattaacaagatggccatttggtagcttaacactaatgggactaatttgacgatatgaataaaaatttgttaaagaagaagaaacatggtcagtggctcctgaatctaagatccaagaggtagagttggatttattcgtaagacaaaaccatacctgttggatcgttattggtgcaagacgaaatagaggcaacctgtggtttaatggacgctgaggttccggccgacggctgttgtattaaagctagaagtgctatgtactgctctgatgaanaacgaacctgttcttgtgattcttggggatagtattggtcatctgtggccttcccttcagttgccactacactatta

SEQ ID NO: 1834 - DNA, 457 bp, Glycine max
  unsure at all n locations
caagcttgagatattnttaagccatacaatgtctttntaatttgtacactntgtcttcctggccatcaacttgaaaacctagaggctgatcaaaaaacacatcttcttcaagaggaccatttagaaaagcagacttgacatccaattgatgcattggccaccttctcaaacttgcaattacaactacaagccttattgtatcaatccttgctactggagcaaaaatttcaccataatccacaccttctctttgcaagaaaccctatgctactagtcttgccttgtgcttgaccacctctcctttgggattcttcttcactttaaagacccatttaactacaatagctcttttccctttcgggagagtcacaagatcccaggtatggttcttcttaattgagcttaattcctccttcattgcttgaatccattgaggttcttgcaatgtttcctctac

SEQ ID NO: 1835 - DNA, 370 bp, Glycine max
  unsure at all n locations
agcttggacttnctgtgttctgggaacctctttttctttaagtgtacccaaacccaatcacctggttcaggcacgactatctttctgcttttgttggcttgccttgcatagctcgcatttttcttttcaatttgagccttcacttgctcatgcagcttcttcacatacttagctttagtctatacgtccttatgcttaaccataacaatgttaggcataggcaacaaatcaagaggagtntaaggattacccccatacactatctcaaatggtgaacaattacttgtgctatggataagccgattataagcaaactcaacatgaggcaaacatgcttcccaagatttaagatttttnttcaaacaatcct

SEQ ID NO: 1836 - DNA, 464 bp, Glycine max
  unsure at all n locations
ggctaagtcntatttgatgatgccaaagactcaagtcaagaatcaagagtcataacagtttcaagaatcaaagagtccttcaatcaagaatcaagattcaagtgaagattcaagagaagactcaagatatgcaagaacttcaagaaaagcatcaagataagtataaaaagattctttcaaatgaaaagattgaatagcataaacagaagcacaaacaattttataactgtttcacaaagtagtaattgattaccatgggcatgtaatcgattaccaatgtttttgaatgttggatttcaaatttcaagagtcacaacttgtgataaaacattttcatatttgtgtaatcgattacacaacatttgaaatcgattaccagtgtttctaaacattggtattcanatctaaacatgaagagtcacatctattgatgtgtaanntgatacactaaatggaaatcaata

SEQ ID NO: 1837 - DNA, 466 bp, Glycine max
  unsure at all n locations
tatagcttacttattatccacaaaaagcttcactccatcactttccttgattnttaattcttgtaataatgtgtccaacgagacagcttggcaagcactcattgtagctggaacatacttagcttcacatgttgataaagccactatggattgcttcttagaactccatgatattggtgttgcaccatacatgaatatgtaacctatagtactctttctgtcatctctgtctcctccccaatccgcatcagtatatcccactaattcctctgagttgttgttgtctttatttggaaatagaattccagtattgatggtcccttttatgaaccttagaatcctcttagcagttaggagatgaggaattctgggtcttttcgtatatgtacttaccagtccaatagcaaattccaaatcaggtctttgatgacacaagtacctgagagaaccaacaatatgtttgaac

SEQ ID NO: 1838 - DNA, 408 bp, Glycine max
  unsure at all n locations
ctgcaatagatgccactnntactcaatttttaaatgatatgttgacaaggaaacacaagtatattcacaaggagaatattgttatggaaggaaattgcagtgctatgatacaaaaagatccttccacctaaccataaagaccctggaagtgtaaccattgcttgttcaattggtgaagccacccggggaaaggctttcattgatttgggagccagtattaacttaatgccactctccatgtgaagaacattgggagagttggagatcatgcccactagaatgactttacaacttggtgaccggctcattaccagaccatatggagtggatgaagatgtgttggttcgagtaaaacattntatcttcccagcaaactctatggtaatggatatctatgaagataatgac

SEQ ID NO: 1839 - DNA, 423 bp, Glycine max
  unsure at all n locations
gcaattaaacgaaataattttacgcacatgtcatattgagtcccgtatatatcgagacgctcgtattgaaaacgggagctcgttgcaatggcaaccgaaataacctttaactcggatgtncgatttgagtccgtaatatatcgagacgcttcaaattgaaaacagaagccttgagaaaattctaacgagaattattttttactcggatgtccgatggagttccgtaacatatcaagacnctcnaaattgaaaacggaagctcatagcaaattgaaacgaaagtaacttttaactcggatggtccgattgagtccgtaatatatcgacacgatcgtaattgaaacaaaagctcgtagcanacgcanacgacaataacattttgactcggatgtccgactggagtcccgtatatatcgagacgct

SEQ ID NO: 1840 - DNA, 328 bp, Glycine max
  unsure at all n locations
gggggggttgaattaaagatattccaaacttttctcctaataaaaatctatcttacttttacttaagtatgaatccctttatgacagtcttcttanatattaattcaaatgaagcaacttgaatatgaatataaagcaataataaataaaggagattaagggaagagaaaatgcaaacttcagtttatactggttcggccacacccttgtgcctacgtccagtccccaagcaacccgcttgagagttccactaacttgtaaatttcttttacaagttctaaacacacaaggacaacccttcctttgtgtttagagattctttacaaca

SEQ ID NO: 1841 - DNA, 439 bp, Glycine max
  unsure at all n locations
agcttcggtgggctgccaaattcctcanaaccttttgttctcgaaatgaacactttaggggtcgacatgggcgccgtccttgtccaatatggacatccaatagccttctttagcaagacgttctgtctgaaactccaaaactcgtcgacctacattagggagctcgttgccattaccacgacagtcaaaaagtggtgccattacttattgggccatcacttcacgattctaacggatcatagaagtcttaaagagctaatgactcaggttgttcaaacacctgaacaacagatgtatttagctcgtctattgnngtacaactattcaatccagtatcggtcaggcaagaccaacactgccgctgacgccctatccagaatcacggaactagtagcgggacaatntctaatgctaacaataccctaacctttgttttttt

SEQ ID NO: 1842 - DNA, 459 bp, Glycine max
  unsure at all n locations
agcttcccaaccaatcttcgatatctttcaggatcagaataaggctccccatgattgggtagcaatttttgatttggatccataggagtatcaattggtctacaatctgacataccagtttctttaagtatgtctaacgcatacttccttagtctaaaaatgactaaataaatgttcttttagttgagcaatttttccttggtcatttcttatgatgactatatcatctatatagaccaccaagtaaaaacatctactcgatgaggtatgacaataaaaaactgaatggtctgcttcacttcgttttatcccaaaagcctgaacaactgagctgaattttccaaaccaagcacgtggggattgtttgagtccataaagagacctncaaaatttgcaaaccaagctagacttcctctgagcaacaaatcccggtggttgctcatataaatctctattcta

SEQ ID NO: 1843 - DNA, 470 bp, Glycine max
  unsure at all n locations
agcttccttaatcacctcattaaggactagaacaccatgtaggatgtgtctgttntttatgaaagttgtctgcctctcatcaataagaccagatatcacttgtctcaatctatntgctaataacttagctatcaccttgtacatacatccaatcaaggagatgggtctgtagtcatcaaatgactggggatgtttaattttgggaatgagagctatgaaggaagcattactgcctctagggaaactgccatgtacatggaattcatcaacaaatcttctgaagtcagctttcagcatatcccanaattctttaatgaatttgaagttgaaaccatcangtccaggacatttgtccncatcacaactccatactgcttctntgatctccaaatctgaaaaaggaacaaccaaagactccctctgctcctgggttagtgaagagaaatgcactccatcaagagtgggtctac

SEQ ID NO: 1844 - DNA, 458 bp, Glycine max
  unsure at all n locations
tggagaggatgcttaatggaggaaaagaaagacggagagaattagagaggggggagcacgaaattgaaggaataaaagaggtagagaagtggaactttgaagtatgtctcacaagactctcattcatcaaagttacaataagtgttacacatgcttctatttatagactaggtagcttccttgagaagctttcttgagaaaacttccttgagaagctttcttgagaaaactttcttgagaagcttctttgagaaaacttncttgagaagctagagcttatctacacatacccctctcataactaagctcaccttcttgagaagcttccttaagaagattccttgaaattctgatactggggacagatgtcgtacacgatgtcacgacatcacgctttagaacatgcagattatatttgacagtgtggtccgtttaaacaaatagataacacaagagaa

SEQ ID NO: 1845 - DNA, 409 bp, Glycine max
  unsure at all n locations
agcttgttgcattntagtgaaagaacaccgagtactatttagtctcacaaatgcaagaactacgtaggtctgagttcctcatcacaaattgaggatacgtaggagcaaaagccccgcttttgtcgaccacctcgccttttgctatcgtgacctgtgagtccggtggcacgcggaaacacccgatggttatccgcgcacactntttgctatcccatgacctatgagtccggtggcacgcggagacacccgatggttatccgcgcacactctttgctatccaatgacccaagggtccggtagcatgcagagataccttcgggttatccgcacctttcgccagctagaggcaagcgagcccgttgacatgcagagatcaacgtggtcatctgcacctttcctggagatgtca

SEQ ID NO: 1846 - DNA, 354 bp, Glycine max
  unsure at all n locations
agcttatgctgcanacatctacaatagacctnctcaacctcagcagcaaaatcaaccacagcaaaacaattatgacctcttcaacaacagatacaatcccggatggaggaatcaccctaatctcagatggtctagccctcaacaacaacaacaacagcctgctccttccttcaaaatgttgctggtccaagtagaccatacgttcctncttcagtgcaacaacaacaacagcaacagcaacatcaatagagacaacaatccactactaaggcccctcctcaaccttcattggaagaattagtgaggcaaatgacaatacagaacatgcagtttcagcaggagacaacctcaatt

SEQ ID NO: 1847 - DNA, 484 bp, Glycine max
  unsure at all n locations
agcttgttggtggcaaagtcaaaatctaatagaatgtatacttgaatcaacctgtagctagctatttttgtattcattgtaactaacggagattctaaatttccacttaatatgtgaagatgtaccttttctgagaccttattgctactaccatttagtagctctggtgccatccaaggtagagttccacgaacaccaccagacaccaaggtatttcgcttaatctttgataggccaaaatcaccaacctggtgaaaagcaagtttcttagctttatcacaatgaagacaatgtaatagaatgaataatccacagcttgaaaagataccttgcatattggccgcatatgatccttcaagttcacgagcanatngtcacatttcaagtcanaatgcacaatatttttcgagtgtaaatattccactccaaaagcagcattcatgggcaatatcagtctcttgcggcgtcaagatacctggaataa

SEQ ID NO: 1848 - DNA, 428 bp, Glycine max
ctaagctagacatacatatctcttcttgatacactaattcaaataatctatttcatggtctacccaatgaagacccttatgctcacttggccatctatatagagatatgcaatattatcaggttggtgggtgtgcctgcggatgcaatcaggttgagtctgttctcattttctttatctggagaagctaagagatggcttcattcttttaaaggaaacaatctgaagtcatgggatgaagtagtagaaaagttcttaaagaagtacttccttgaatcgaagactacagaaggcaaagctgccatatcttttttccaccagttaccagatgaattgttgagtgatgcacttgaaagattagaggtttattgagaagactccactcaaggtttttagaccaatacagctcaacatattatagatgggtga

SEQ ID NO: 1849 - DNA, 430 bp, Glycine max
  unsure at all n locations
agcttgcttctacaaaaagaatacacacacatgacctctatttatagcctaagtgtcacaganaattggaggggaaattgaatnttctattcaaatttcacttgaattagaaattgaatttatggagccaaatttcggagccaaaatttcactaattatgattcgtgaattttagctatggttcaacccactagtccaagatcaagtccaagattctccactaagtgtgcttaggtgtcataagacatgtaaagcatgaagtatatgcacaaagtgtgactatatgatgtggcaatggagtgtagcanacaaatgctcacctccccgtctaanattaattagattgggcttcncaaattcaattaatttatttccaacaacacataaatattcattaatgatgtganatacaaactaccctaaacaaact

SEQ ID NO: 1850 - DNA, 250 bp, Glycine max
actagtactttggtttctagccgtgtatttggctatattatgacatttgaaccatttaatgatgcaatccttcctaggaagggaccaatcactagaaccatgagccagaggctccaagaagattgggctagagctgctgaagaaggccctatggttctcatgaaccttatgatagatttctgagcccatgggccaaggttgggtccaattatctttgtacatattagactaggatgtcattatatttggt

SEQ ID NO: 1851 - DNA, 467 bp, Glycine max
  unsure at all n locations
gcttaagctccttcaactgcacaaggctcttaatatttgaagagtattcttgtggaaccttcacctgacgaagacacttgacaaaacttatctnctccttcttggacaaagtatggcaagctgggggcaagtaacttttcttcccatcagaccttggatgcaactgtgatcttatacccatatcagctagatcttgacgggtattcaagccatccttcgtcttgccttgaatggtaaggagcgtcccaatcacactgtcacaaacatttttctccacatgcataacatcaatacaatgtctaacgtcaagatcacaccagtacggaagatcaaagaaaatggacctcttcttccatatgcaactctgacttttatccttcttttgggtcttcccaaatacagtgttcaggtgttgaacccgctgatatacctgctcaccagtcaacggtatcgacgcaatatcatgc

SEQ ID NO: 1852 - DNA, 417 bp, Glycine max
  unsure at all n locations
ttctaacgacaataactgtntactcggatgtnctgattgagtctagtaatatatcgactcgctcgaaattgaatgttgaagctctaagccctattcaacaacaataacggtttactcggatgtccgattcagtgacgtaatatatcgggatgctcgaaattgaatgttgaaccttctgacccactcaaacgacaataacgttttactcagatgtctgattgaatcccganatatatcgagacgctcgaaatngaatgttgaagctctgagccaattcaaacgacaataactttttactccgatgtctgattgacgtccgcaatatatcgagacgctcgaaattgaatgttgaacctatgagcctattcaaacgacaataactttttactctgatgtctgattcgagtccgtaatata

SEQ ID NO: 1853 - DNA, 324 bp, Glycine max
  unsure at all n locations
agcttggactntctgtngtctgggaacctctnctttctcangtgtacccaaacccaatcaccttgttcaagcacgactttctttttgcttttgttggcttgccttgcatagctcacaattttcttttcaatttgagccttcacttgctcatgcaacttcttcacatactcagctntagcctgtgcatcattatgcttaaacatagcaatgttaggcataggcaacanaatcaagaggagtcaaaggaataaatccatatactatctcaaatggtgaacaattagttgtgctatggacagctcgattataagcaaactcaacatg

SEQ ID NO: 1854 - DNA, 362 bp, Glycine max
tctaaaccttgtacaagaatgaagctctgataccacttgttatataagtggcctcaaatatcctaagaacggcgggggttgcagtaagatattccaaactgtttcccctaatttaaaaattattttactttttactcaaggtattaatctcctcaatgacaatcgtcttaaatatgaactcaaaccaaaccaccttgatatgaatatatagcaaacataaataaacgagattaacggaaaagaaaatgcaaacctcagtttatactggttcggtcacacccttgtgcctacgtccagtctccaatgcaaccgcttgagaagtccactaacttgttaattccttttacaagttctacacacac

SEQ ID NO: 1855 - DNA, 463 bp, Glycine max
  unsure at all n locations
taacaatcagtgtcatactatngatcaaaacanagcaggtattaatatgccatactagactcaaaatatgccacaaacactagacctaaatcagtgtcacagaaattggaagaaaatattttatccaagcacaaacttcaagccttattccatgtattggggggaagttatggctggccatatgggtagaggtgtcataaaggagcaagtatggaggaagggaccttggactgctgaagaggacaagttgcttgttgagtatgtcaggttgcatggtgaaggcagatggaactctgttgctangcttgcaagtaagaaacaccaaacttttttcactggtttgtttcttaatatatatgattcggatttgacatttataagtgacaatatagcacaaaaacaactgaaatngttttcaacttctactgttcatngtggctacattcatgttcacccgaagctc

SEQ ID NO: 1856 - DNA, 313 bp, Glycine max
  unsure at all n locations
tacacttctttcagagaaaggagcttaacattttcttctcaaaaactgaaaataacactactaagtcttcaatctgtacttaatgatgctgaggagaaaaaaatcactaatcctgctatcaaggaatgggtggatgagctcacacacactctctatgacgctgatgagttgttagatgagatcaacaccgagacattgtgatgcaaagtggaagttgtgacctaaagtcaacccattggtgattaggcgccaaacgtgctttcttattctttcanaagggtttatggggtcatcaattatgagatacaaagct

SEQ ID NO: 1857 - DNA, 345 bp, Glycine max
agctaactaatcaaatgggacaattggctactcagttaaatcaacagcagccccagaattctgacagattaccttctcaatctgtctagaatcccaaaaatgggagttccattacattgagatcgggaaagcaatgtcaaagacctcaaccagcaacatcttcctcatctgcaaatgaacctgcccaacctcactctactccagaaaaagatgatgacaaaaatttaaagagtaagttacctaacaatttctatgaaggtgaatcttccacttgtaattctgatttacaaaagcagcatatccctcttccattcccttcaagaagcaattccaacaaaaaaatgg

SEQ ID NO: 1858 - DNA, 361 bp, Glycine max
  unsure at all n locations
cgaaatgcagatattgtttcatttcggaagagtgcgcaaccaaaaagtacagtctttccatgactattcatacccacaaaaattccaaatggcacttcataagaattgaccttgtgtgtagtatcaaatacaacaacatcaccatattnttggtgcccatcagagctagaagtatgagaccaaaaaatatgctctcaccttctctcttcatcacgtggatatgcatactggaaattatagccacttctttttgcatcctcaccgtacttgagaagatcttggcatcatttctttcacttatttttggtttcacaaaaaatacgaatgccctttcataaatggaaataccatgcttacattt

SEQ ID NO: 1859 - DNA, 423 bp, Glycine max
  unsure at all n locations
agcttattgattntgataatatcactatagaaaatacaacattaaaagtaatttaaacacaaaataatcaatctttatattgtgtntttcttgtcagatctcattccaagtgaatttatccatgttattacggatgcacatgtttaccacaatcatgtgaggccttngcaggagaagctccataaccagccaaaaccttttccagtatgtgtaatgtttagcacttcttttactttatattgtgactcttttacttgttgaccccctaatctacttcttgtagactttggagatcaatcccaaaatgagagatatagattcttttgtggctgttgatttcaagctcataggctatgatcctcaccagaagattgacatgaagctggctgtctaaaatctggggattctcactccttcgaactg

SEQ ID NO: 1860 - DNA, 409 bp, Glycine max
  unsure at all n locations
tncgctnttggtgaataataagaaaaaagtcatctatccaaaattatcacactcctttcttcatccaacaatgaattggtctatttaaggaagatgatacacagcattattgcacatctctgtagaagcagccactatagtaaacaatcttctctatctaaaatggagtttgttctaaattacctaaatgccactgccattggagttctttctataaccctcttctttttgtttttgtataatcccttcaaatttgcattatgtaaaaaagaggctcccaaagttgcaggtgcatggccaatacttggtcacctaccactattgagtggttcagagacacctgatagggttttgggtgctttggctgataagtatggacccatattcaccatcaactatggtgtcaaaa

SEQ ID NO: 1861 - DNA, 386 bp, Glycine max
  unsure at all n locations
ctctaggatcttcttgacttctcttgataaaacttcaacttgcccattggtctggggatggtaagggaagctaccttgtgtctgacactatagtgctggaggactntcttgagttggatgttacagaaatgagatcctncatcacttatcagtacccttggtgtgccaaaccttgagaagatgtttttcttgaggaagcgaataatagtctctgcatttgcatggttcacaactatttcttccacccatcttgttacatagtccacaaccaatataatgtattcatttgagtaaaatgattgcaatggaccaatgaaatccatcccccagcagtcaaaagcttcaaccctcagaatgttctatagtggcgattcattccttctgga

SEQ ID NO: 1862 - DNA, 224 bp, Glycine max
cactgcctcaagtagttcacgatctgcttccataggataacacgttgcctaacagttactatcaggtcaagagatcttacgcttgcactagccagtgatggaatgaatccacatggcaatttaagcactcaaaacagctcatggccagatctactattaatttacaatcttgctcctgagttgtgcatgaagagaaaatacatgacgttatcgatgatgatatc

SEQ ID NO: 1863 - DNA, 457 bp, Glycine max
  unsure at all n locations
tatctaanactgcgattgtgagattgatgcttattcggaaaacctctaatcctgcccatttttagtctaatattagttcacacttgtaattctaaatctaatatggctgaaaaatagagaacattggtttccttttcttatacgtatttttcaatttttgttcctactttattatgtgtttatagacttgagtgaaatgaatacaaactcaacttttggatcatattatgaatcctagatcaattgtgcttcgtctatatatttcgtggcatcataaattatcttgtaaagcctttcatttgtctatatttataaatcataaatataaacaatatcatagatattctttgtgaaattcaatattaaatcttatatattcattgtttttctttctcaacaactctcatatctccatctatctagnttatctatngactnttatgcggatctacatata

SEQ ID NO: 1864 - DNA, 404 bp, Glycine max
  unsure at all n locations
cccatggaagctcctaatatctcccacactatntgggatgggccattcttggatggccttgattntctcaaggtccacttggaccccatttctgccaactacaaaccctaagaaaactatattatctacacaaaaagtacacttctctatatttgcatagagggtgtttttcctaaagactgaaagaacttgcctgagatgtcctaagtgataatctaggctcctactgtacactaaaatatcatcaaaataaacaactacaaatctacctatgaaatcccttaagacattatgcataagcctcataaaggtgcttggtgcattagtgagcccaaaaggcatcactagccattcatacaaaccagacttggtcttgaaagcgggtttccactcatcaccctttt

SEQ ID NO: 1865 - DNA, 447 bp, Glycine max
tgtagagtctttcgtcaggactcgggcttgtgccctgttggtgccatggagatgatccaaaagtctctacctgaatctctaagaaagagtgtaaacaagtgtgacctcgcacaatccaacaagagcatataatggattccacacaactttacttttcgatatctcatacctaaggagcttgtaaaataattgcttggtagcccttttttcttactatgggagacaatctacttcaagttttaaacaacagttcacaacttcaattgtagctgcattagtcgtatctgtctgcaattttccaatcgagacaaaactgctactacaattgctactgcagtttataaccttgatgtgcgttgcttgctctatgatgtattattcttctgtacaaagatgacagggtagcaccaacagagaaatctaatattgcaatgtgtagcattgagt

SEQ ID NO: 1866 - DNA, 471 bp, Glycine max
  unsure at all n locations
catgcangctttctgctcgatactcatctgggttgtgcgactaccatttccatcaacagacaactgatcgtagttgctcaaggaaacacacaaaatggccaattcaacattctcaaacatttctagccacttgcaattttctgctagccctctagcatgtattggaattagttgatacctgcaatcaatgagaacaaagcatatgacacagatcagcaactttttatagcagctctggcaatcggatcaatcatgactacctataaaatttctcacatgaaacaataggcgcaaatattttcacccacctaactaaagaatcatgtagatcggcagtgtcgacagtttcctcacgagctggccgaggaaatgaaaactctaccagaagccatcccattgtatgaagtaactccttcagcatagaggatatctaaatccgagggttcataatcagtcctcaatatctcaaca

SEQ ID NO: 1867 - DNA, 305 bp, Glycine max
aagatacattgatcattcgtttgtgttgaagctgctttacctttttgactcagaagaccaaagagagagggattacctgaagactatcctccaccgtatttatggaaagttcatggtgcatcggccattcattacaaaagccatcaacaatatcttttacaggttcatatttgagacagagaaacacagtgggattgcagagttgcttgaaatattgggcagcataattaatggtcttgctttgcctttgaaggaagaccataagctgtttcttgcccgtgcgttgatcccgcttcacaagccta

SEQ ID NO: 1868 - DNA, 440 bp, Glycine max
  unsure at all n locations
agcttatattaaatagagtataaggagtactctaatgtatatgtaaagtgatatccgntaatttgaataaatatatatgatctaataagatgaacaaaattaatataaaatatgtttagtctgttagattgtaaaatgaacacaatttgaaagacaaataagaggaagatacatgtttttgtctaaatatgattggatatttttctctttatagcgcttttctctctgaggtcttttactgagtttcataaaatgttgtattggaggatgaaatacctacaaagatactgtgacgcttaaataagattntggcctagagtaataaataaacatgttgtactaacctcaagtccacaagcatcgttataatcctcgtatccgagatattatgcacttatatgcctggtggccatcacggttttatccttgtaaatacaact

SEQ ID NO: 1869 - DNA, 189 bp, Glycine max
tgttagacagacggcctcagttctcttaagaagggggtggttgttttacgataacaagaactctcgcgcaattcgcctttcactctctgctcttacatgaacgatgcaccctcaacatgaattactctaaagacaattctccatagactgctttaatggaagagagaactgcacactagattcatgctg

SEQ ID NO: 1870 - DNA, 404 bp, Glycine max
  unsure at all n locations
tattacgtgttgatgattatatgtatatcaattgttaaaatatattagaaattaatagttcaaataagaaaattaaattgaaggaaattaatatattaagattcaacgataaatactttcaatgcanttttagtttaattatttattagactcttttaattgaaaataatatagttcgatttaatatgtacatgttttgtgccatgtaaatattaatattgtgtgatgtctatatgattcatgagatgtgataacatgtttcattgagattataacattgtgattgaaaataaatataaatgtttgattaatacttgatgtgatattacttgtgttgtgacttatgaattggtgaatatacaataattcgactggtgtttactttgagaaaaatgtttatgtgc

SEQ ID NO: 1871 - DNA, 459 bp, Glycine max
  unsure at all n locations
tcttagttntagatgatgcagatgagtntgtagatacctcatgcactcctctaatgactatagcatcatttctggtgctaaactgttgggagttggaagccatcttctcaattaaatttttggcttcagtaggagtcatgtctctaagggctccaccactggcagcatctatcatacttctctccatattactgagtccttcataaaaatattggagaagaagctgctccgaaatctgatggtgagggcaactggcacatagttttttaaatctctcccagtattcgtataggctctctccactgagttgtctaatacttgagatatccttcctgatggtcgtggtccaggaagcagganattntttttctaagaatactttcttaaggtcatcccagctcgtgatggaccttggagcaaggtaatacagccagtcctttgccactctctctaaagaat

SEQ ID NO: 1872 - DNA, 474 bp, Glycine max
  unsure at all n locations
taattcttagagggngaaggccctttcangggcggtgcatgatgtgtttttaaaagttgtagctaaaacagttccaaattattgtatgagcatttatcattttccaaaatctttagctaatgaacttcataagatgatgagctccttttgttggggtgccaaaaggagtggtcatagagggattcactggatggattggcacaagctgggcagttcacaaggaacatggcggaataggttttaaagacatatatggatttaacctcgctttacaagggaaacaagggtggaatctattgaaaaacccaactgctttggtttcaaagattttcaaagctagatattatcctaaagcggatttcttggtggccattgagcataaataatccttcatactcttggagaagcatatgcaattcttgggttctattaagggaagactatagatggaaagttggaaatgggtcatcaatc

SEQ ID NO: 1873 - DNA, 417 bp, Glycine max
agcttgaaggtaaactagatgccatggttaacctgttaacccaactggccatgaatcaaaaatctgcacctgtcgccagactatgtggtttatgctcctctgtcgaccaccacacagacctttgcccttctgtgcaacaatctgaagaaattgaatagcctgaagcttatgctgcagacatccacaacagacctcctcaacctcaacagcaaaatcagccacaacagaataattatgacctctccaacaacaggtacaatcccggatggaggaatcatcccaaccttagatggtcgaatccttcacaacagcaacagcaacaacaacagacttattttcaaaatgctgctggcccaagcagaccatacgttgctccaccaatccagcagcaacagcaacaacagccccagaaataac

SEQ ID NO: 1874 - DNA, 410 bp, Glycine max
  unsure at all n locations
agcttcttgatgtagaaaagacaaaagttatattctttaaatatttaatttctcaaatagaactttgggtttcctatgtatttcatctcaaattatttcttcaatcaatctatagcttttggaagctcttcaaaagttccaataatatatacgtcatctacataagcaatgattatgaaaatatatttttagattttcctgaaaaatgacaaataagatcattttaatatccttcctttaacaagtactcactaagtctattatacaacatgcgacttgatggctttagtccatacaaagtattcttcttgagaatatgcattattggacaaactatttcctttaaggagttntatgcanatgccattataaatagagttatataagtaagatgtaacaatatccattat

SEQ ID NO: 1875 - DNA, 457 bp, Glycine max
  unsure at all n locations
gagctngcttctacaaccaattgaataggaacatttgcctttggaggcatgggtaagggaaagattactagtataggtaaaatccgtgttcctttcttagcctccatagacaacgtcttatatgttgaaggtttgaagtataacttattgagcaaagttaagtttgcgacaatggttatattgtgtccttcaacaaagaccaatgtatagtcaagatacaagatgacaagtncttatttactactaaatgacacaacaatctgtatgagattgatctgataggtctaagtaaacaaaatataatgtgtctgctttgtagagaatatgagagatggatttggcacaaaatatttgggcatgtgaatctganacatatctcacaactttcttaaaaaggaattagtgaacagacttcctaagatttgttgaaactctcatcttctctgtgaagcatgtc

SEQ ID NO: 1876 - DNA, 320 bp, Glycine max
tatgaccattcgaatatctcaagagcttccgctggtctatgtctagcgtgtagatgaggtatgtccccgactctgacatgagcgtgaaaagatgtgaccattctattgtgtcgagagcttatgatgttcagtttagaacgtctcgatatattatgagacgcgcatctgacgtgaagtgagacaatccctgatctcttggatattttccagagcttccggagattactttcaagcgtatagatgagctatggacacgaaccgcacattccagtgaaaacttgtgacggttcgaatttctcgagagctttcggtggccaatt

SEQ ID NO: 1877 - DNA, 475 bp, Glycine max
actaagcttacaagggaagataacacctcattcatatttggtcgatgttcaagatctgggagggtgcagcacaatgataacttaatgagctctggcaacacttcgtcatggtcaacatcccaggtaaacaaagggtctacaatattggcaagttgttttattccatttttaagggcttttgtcactacttcacgcaaagtgattggcaaaccatcctctttttagagtcctgtcggccttctttttgttagaaactccattactatgacaccgaagctgaacacatctgctttagtggttactttcctcatgtaggcaaattctgaaaattacacagcataaatatcttgtttagagagtgaaacttataaaaactctcgggtatacaatgttaataagataagaggattcgaaacatagtgacaaaataagacgttgtgtaattgtgccagtcttggtcatgctaccttctctg

SEQ ID NO: 1878 - DNA, 459 bp, Glycine max
  unsure at all n locations
ntgtaatacaccaaattcttttctttgtttatttgcggccacttgaattatttatttcaatttctatccttatacccatagtaagtattgacatttatccatattttatttttccattatcagctgacaaggttgaagctattctatctaattttttatagataattttcacacatcaatgaaaactcacataaaaataaataaaacccatgcacaatacaaaaccttatatttcttttgtattatattaattatataaaaataaatttgaattataattgaatatgtttgctgttttgagaaccccttgaatcactattaagatacttgattgaaaagtttaaatatatcaataaatatatgttttaacatatagtatgacacacatttattatctctctatacattaataatatattacattagaatggataaatgcatatgtatatatatatatat

SEQ ID NO: 1879 - DNA, 464 bp, Glycine max
  unsure at all n locations
cgtcactcanaacaactcattgtgcatgaacctattgaatctagctntcaacattgaaataaagatataacaattgaaattgtaacatctcattttcttaaaactaattttaagaaaatgttatttataaataaatagagttttagaaaaatgatgagatttttgtaattaaatgaataagaagaaataattgtattaaaataatggtttgagagaaaataaaaaggatacatttgataggaaataaaatagagtgtttgtttataaagtaataaaaaaatagagtagacaatagactaagagtatctaactatgaatagagacatgctaggtcatttntaactntctctccctctcagtttgcgtntctttctcctcctctaaacctntctattccgcatccaccaatttatcccagaaaatgtgatctcgactcattcatcgtggatcgcataatattaaca

SEQ ID NO: 1880 - DNA, 367 bp, Glycine max
  unsure at all n locations
actatgaatgacaaattccttgggataaaggtagtggtgccatgttttcaaagcccgtactaaggcatacaactccttatcataagttgaatagttaagggtaggaccacttaacttttcactgaaataagcaattggatggccttcttgcaacaacacagccccaatcccaacatttaaagcatcacactcgatttcaaaagatttttgaaagtttgcaacgcaagtatggnggcattagttagcttttgcttaagaatattgaaatcttcttcttgtttctctccccattagaaaccaacatttttcttgggcacttcattgagaggtgctgtcaatgtgctaaaatcattcacaaatcgtctat

SEQ ID NO: 1881 - DNA, 369 bp, Glycine max
gcttaagctccttcaactgcacaaggctcttaatattttaagagtatccttgtggaaccttgacccgacgaagacactgacagaaacttatcttctccttcttggacaaagtatgagatgctgggggcaagtaaattctcttcccatcagaccttggatgcgactgtgatcttatacctatatcagctagatcttgacgggtattcaagccatccttcgtcttgccgtgaatgttaaggagcgtcccaatcacactgtcacaaacattgttctccacatgcataacatcaatacaatgtctaacgtctagatcacaccagtacggaagatcaacgaaaatggacctcttcttccatatgcaactctgac

SEQ ID NO: 1882 - DNA, 486 bp, Glycine max
  unsure at all n locations
agcttctacattcaatttcgagctnttcgatatattactggactcaatcggacatccgagtaaaaagttattgtagtttgaatttgctcagggcttcggtattccatttcgagcgtctcgatatattacgggactcaatcggacatcagagtaaaaagttattgttgtttgaatttgctcagagcttcggtattccatttcgagcatctcgatatattacgggactcaatcagacatccgagtaaaaagttattgtagtttgaatttgctcagggcttctgtattccatttcgagcgtctcgatgtattacgggactcaatcagacatccgagtaaaaagttattgtcgtttgaatttgctcagagcttctacattcaatttcgagctgttcgatatattacgggactcaatcagacatccgagtaaaaagttattgtcgtctgaatttgtcagagcttcatattccatttcagcgtttgattata

SEQ ID NO: 1883 - DNA, 484 bp, Glycine max
  unsure at all n locations
agcttgcttctacaatatccnncttttgatgatgacatcttctgaaatcaagaagcacacacacactttttcctagtcgatcactcatataaattctcctcctttgtttttgaatttatgtttatcttaaaaataagttgattactcatgtgaattcttgatttaatcccatttctctccccctttggcatcaacaaaaagccaaagtgcgtatcaaacttaaggtatacaaatataacttaaacatctatacttaatattcatgaaaaaaatatcaaccaaatcatgaagcaagaagcaagaaccatgaaaaccatgaagcaacaaccatgaatagattaattttaaactccacatagtcaaataacatacttaatattggtccaaacataccatgcaaataaggaaatagtatattgttcaaatatcataataataatagagaaattatttgataagtcactaacatctattagtcctaact

SEQ ID NO: 1884 - DNA, 393 bp, Glycine max
  unsure at all n locations
ggccgccacggagttntccgactatgctcttgtgtggtggaacaagctacaaaaggagagagcacgaaatgaagagccaatggttgatacatggacggagatgaaaaagatcatgaggaagcggtatgtgccggctagttactcaagggacttgaaattcaagctccaaaaactaacccaaggcaacaagggggttgaggagtatttcaaggaaatggatgtgctcatgattcaagcaaatattgaagaagatgaggaggtaactatggctcgatttcttaatggtttgactaatgatatccgtgatattgttgagttgcacgagttngttgaaatggatgatttgcttcacaaagcaatccaagtggagcaacaattaanaaggaacggagt

SEQ ID NO: 1885 - DNA, 447 bp, Glycine max
tgcaggtgctgctactggtggaggcacttgaatttgcttgccagaccacaaggtgatggcactcacatttttcggattctgcacagtttgtgaaggcaatttgtcaaaaatttgggactgagcttggttcaactgagtagccatctgccccatctgatttgttagactctgaatagaggctcttgtctcttgctgaaattgcatattctggatagtcatttgcctcactaactcttctaaggaaggttgaggaggggcctcagttgcttgttgtctttgctgttgctactgctgtattggaggaggaacatgtggcttgcttggaccatcaacattctggaagggagggacaagctgttgttgttgtggacgacttgcccatctcaaaattggatgattcctccaacctggattgtatctgttgcttgaaagatcataattattctg

SEQ ID NO: 1886 - DNA, 465 bp, Glycine max
  unsure at all n locations
gcttcaacatcagaccacttccagggtgctggtactacttcacatggacttgatggggcctatgcaagttgaaagccttggaggaaacacgcctgcctatgttgttgtggatgatttctccagatttacctgtgtcaactttatcagagagaaatcagaaacctttgaagtattcaaagagttgagtctaagacttcaaagagaataggattgtgtcatctagagaatcaggagtgaccatggcagagaatttgaaaacagcaggttcactgaattctgcacatctgaaggcatcactcatgagttctctgcagccattacaccacaacagaatggcatagttgaaaggaaaaacaggactctgcaagaggctgctanggtcatgcttcatgccaaagaacttacctataatctctgggctgaagccatgaacacagtatgctacattctacacagagtcacact

SEQ ID NO: 1887 - DNA, 431 bp, Glycine max
  unsure at all n locations
agctcatgctttttccccaagctgtacagtttattattttaaggactgttggcaagtgatagtatgatgtagtaaagaaacatgcataatgagattaaagtagtggttactagtggtaattacagtatatatggttgataactggagagtaataaacctagcgaggtgtaatatatcaagtgtgatagaaaatgtgttactagcatttcacatatactaattacagaaaactacttatgtttttattcaagttaattagctattactttgtatgtggcagttctttcttctgtgtatgttgagtggctgtagcatatgttggttcaacacagtatgttntgttctctgcattaggaatttcccagttaacagaccccttgcattatcactcactgtgagtgtcaatggtgtgagtgcagcactctacacac

SEQ ID NO: 1888 - DNA, 460 bp, Glycine max
  unsure at all n locations
tgccnanataaagaaagggaatagattgaatctagtaagatgcattaaggatgaagaaggaaaagtattggtcagagatcaagatatcaaagaaagatgggagaaacattttataagcttttcaattatggacaaaggatcagcttggaagtgaagacagagcatatgcattgcaattttagcaagaggcaagaggagtatgacttggaagtgaagatgggagaagatgtcataccacatgttactaagtttaaatatatgggatcaataatataatacaatatcatgaggaaattaatgaggatgtcacacatagaatacaagcaaggtggttaaaatggagaaaggcgtcaagggttatttgtgattgcaaaataccaactttaaatgcaagttttgttgtacagcaatagtttgactatactctatggtagtgaatggttggtttagagggacaata

SEQ ID NO: 1889 - DNA, 335 bp, Glycine max
  unsure at all n locations
agcttcacatcataccacttccagcgtgctggatctacttcacatggacttgatggggcctatgcaagttgaaagccttggaggatagaggtatgcctatgttgttgtggatgatttctccacatctacctgtgtnaactttatcagagagaaatcagatacctttgaagtattcaaagagttgagtcttagacttcaaagagaaaaggattgcgtcatcaagagaatcatgagtgaccatggcagacaatgtgaaaacagccgggtcactgaattctgcacatctgaaggcatcactcatgagttctctgcagtcattacaccacaacagaatg

SEQ ID NO: 1890 - DNA, 433 bp, Glycine max
  unsure at all n locations
agcttaagctccttcaactgcacaaggctcttaatatttgaagagtatccttgtggaaccttcacccgacgaagacactgacaaaaaattatcttctccttcttggacaaagtatggcaggctgggggcaagtaaattttcttcccatcagaccttggatgcaactgtgctcttatacccatatcaactagatcttgacgggtattcaagccatccttcgtcttgccttgaatgttaaggagcgtcccaatcacactgtcacaaacatttttctccacatgcataacatcaatacaatgtctaatgtcaagatcacaccagtacggaagatcaaagaanatggacctcttcttccatatgcaactctgacttttatccttcttttgggtcttcccaaatacagtggtcagggtgtgaacccgctgatatacct

SEQ ID NO: 1891 - DNA, 467 bp, Glycine max
  unsure at all n locations
agctngagcaggttggaattggaaagcaacaaattaactggagaaataccctcctcccttggtaatcttaaaaggcttcaattcttgtaagtatggcattctgtttgctaggctctacatatatataatgagtcttaggccttagcatgtattttttgtgcaatgtttaaaagtgtctgtttcttgtcctgctaccagaacattgagccaaaacaatctcagtgggactattcctgaatcacttgccagtcttccaatcttaatcaatgtgtatgtaaaataatggtttctagaactctgccattnttttaaagtatatttcattaatttagtatctgattgattattcaaacttctcttttgcagtctgctagattcaaataatctgagtggccaaatcccagagcagttatttaaggttcctatatacaagtatggatggtacaaccataaaattagtatatgat

SEQ ID NO: 1892 - DNA, 408 bp, Glycine max
  unsure at all n locations
tctcgtagtagaacataggcaacgtatctaccataatcgtgatcatctccctctcagtcatgggcgggatgacttgggctgctaggtctctccacctttgagcatattctttaatggactcatgttctcgcttggtcatgctctgaagatggttccgatcaggagccatatccgcgttgtattggtactgcctaatgaaggcagtttccaagtctttccatgaccggatctgagaagcttccagattggtataccacgccactgctgctccggctaagctgtcttgaaagaagtgcgtcaacagctctttgtccagagaatatgcccccatccttcggcaatacatccaaagatgacctcttggacacgtcttccctttgatntatcaaaatctggtattttaaactt

SEQ ID NO: 1893 - DNA, 464 bp, Glycine max
  unsure at all n locations
taagctccttcaactgcacaaggctcttaatatttgaagagtatccttgtggaaccttcacctgacgaagacactgacaaaaacttatcttctccttcttggacaaagtatggcaggctgggggcaagtaaattttcttcccatcagaccttggatgcaactatgctcttatacccatatcagctagatcttgacgggtattcaagccatccttcgtcttgccttgaatgttaaggagcatcccaatcacactgtcacaaacatttttctccacatgcataacatcaatataatgtctaacgtcaagatcacaccagtacggaagatcaaagagaatggacctcttcttccatatgcaactctaactgntatccttcttttgggtattcccaaatacagtgttcaggtgttgaacccgctgatatacctgctcaccagtcaacggtatcggcgcaatatcatgc

SEQ ID NO: 1894 - DNA, 374 bp, Glycine max
  unsure at all n locations
agcttgcccttgttcttcaccctaaagtgtatataaattaggaacaaaccttttgtagaagcttgctcacccctagaagctcctaatatctcctatactttntggggagggccattcttggatggccttgattttcttagggctcacttggaccccatttctaccaactacaaattctaagaaactatattatctacataaaaggtacacttctctatattagcatagagagtatttttcctaagaactgaaagaactttccttagatgtcctaagtgatcatttaggctcttactgtacactaaaatttcatcaaaataaatgactacgaatctacctatgaaatcccttaagacatgatgcataagcctcat

SEQ ID NO: 1895 - DNA, 406 bp, Glycine max
  unsure at all n locations
catgcaagcttcttaatgttatagaattcaatagctcaaggaagcgaatgtcagtgatagtgaaagatgaagaagggaaaanttttctactctgtaaaggtgctgacaggtctgtgataaaataatttatagccttcaacttctagcctgcgcatttaacctatggacttgcctaacttattttttcatgcagtgtcatgttggaaaggcttgcaaacaattggaggaagtttgaaaggaaaactgtggaacatgtgcgtgaatatgctgacacaggtctaaggaccctagtacttgcctattgcgaacttgatgaacaagaatacaaggagttcgatgataaattctctgaagtaaaaaattctgtccgcgcagatcaggaaactctgattgaagaagtatcgga

SEQ ID NO: 1896 - DNA, 452 bp, Glycine max
  unsure at all n locations
agctngttactatgataagagcatacctgttgtttcctgaagtccaagtacaagactttntgtcaataatatcaccaaaaactatcacattaacaaaatcacagcctctaagatttcgacaaattattaggtagccttgaagcattatgtttttatgattctaatctaccattctctttatatataatacataactatattttttaatttgtaattaattataatanntcaatatgttatgtaaaaaaatagttaaaataattaacattataatgattntagactatctaataatttctagtaagaatttaatgtataacaaacctggaagcacagaaggctaccacataatccgtcccagaacaagtgaaaatactatgtggatcatcataagcatagctgtaagaaagtggacatgcctncttaaacttcttcgaataaaacgtgggatt

SEQ ID NO: 1897 - DNA, 164 bp, Glycine max
  unsure at all n locations
agcttatacatggagcaaggtaaattctcattatatcatattgcttaagcacaagaaacatcatattgcgaggtaaatgttaaggcagataaacaatcaaaactcctatctaatatctaccactctatgtctcttctatntgcagggnaaagcaatccttgcta

SEQ ID NO: 1898 - DNA, 466 bp, Glycine max
  unsure at all n locations
tgttccgtctaaaactcagattaaacgagganttttctgcaaaatacctctntgatcaacattctgaatacaaaccattttgtaattcttttgcgaagttaatggtttgcatagcaaaacttgacggagtctttatagtaactaataatcattcactcagtcctcactttcctctggtttcacaaagaattcaatatgagctattctacttggttgctgatagccaaccgaatcagcatatgggtgtgacacagatggtttggcaattgaaaccagatgctggacttttaacattccacctctcccaatgcttaacttacttcctctattttctttaataacactgctaggcatattagaacgtgttgctctgaggaacttatatttgtacctgttaacaacaagcatagtaatgacaaataaatcgctggcaaggaaatgacaactaacacataaataatagttt

SEQ ID NO: 1899 - DNA, 415 bp, Glycine max
  unsure at all n locations
ctttgaatcggtggtctgattgtgttccaaaggatatcgagatgctcgtaattgaaaacggaagttctgagaaaaatcaaacgacaataacttttaactcggatgtcctattgagccctgtaatatgtcgagacgctcaaaattgaaaacggaagctctaagaaaagtgaaacgacaataacttttgactcggatgtncgatatagtctcgtaatatatcgagacgctcggaattgaaaacagaagctcttagcaaattcaaacgacaataacttttgacacggatgtctgattgagtctcgtaggatatctagacgctcataattgaaaacggaagctctacgaacaatcaaacgacaataacctctaactcggatgtctgatcgagccctgtaatatatcgagacgctcgaaa

SEQ ID NO: 1900 - DNA, 192 bp, Glycine max
  unsure at all n locations
agcttaacatcagaccacttccagggtgctggatactacttcacatggacttgatggngcctatgcaagttgaaagccttggaggaaagaggtatgcctatgttgctgtggatgatttctccagatttacctgngtcaactttatcagagagaaatcagaaacctttgaagtatttaaagagttgagtctaa

SEQ ID NO: 1901 - DNA, 469 bp, Glycine max
  unsure at all n locations
ggaggatatctatgtttattgtaacattcatcaatattgtgatttgtgaatccataatgtgtacaaaccttgcttgctttcctatcaaaactccctttatcaaagcttcattggctacttcctcctcctctagaagtataacttggaggaaaaccatttttcctataacatctgtccactatgtgattatccttaccacagtatgtacatgatttcgatgaaagtgagcctgttgcattgatgagactagtgtntcccatcagatcactattattgatctgcctttcttgctgaacaacatatgagaagacctttgctatgctaggtaatggatccatcatcactacattggatcagacaatgccaaaatgataatttaaacctctaagaaactgcataacttgatcttgtttcttcctttctataacactaccaagagcatcacatatacactttnggtcacatatac

SEQ ID NO: 1902 - DNA, 480 bp, Glycine max
  unsure at all n locations
actataaaactaagctaccacgacatctgaattcatgtacgacaaatctctatgcggtcttagttggaacatggacgctagagtggcaagggcgtcggccatctgatnttcctctctaggaatgtgatgaaaggatatgtcatcaaagaattctatcaacttccttatgtaagcctcgtaaggcaccaatttatggtccctggtctcccattcacctttcaattggtgaattaccaatgccaagtccccataaactttgagcaacttgaccttgatgtcaatcgccacttggatcccaaaggcacacgccttatactcacctatgttgtttgtgcagtcgaaacccaacctagccatgaaaggtatatactattcatccagngaaaccaatactgcgccaactccatggcctagtgcattagatgcgccatcaaaccacacgaatccattgtccctgtcttcatcctctactttctcctc

SEQ ID NO: 1903 - DNA, 428 bp, Glycine max
  unsure at all n locations
agctttcaacactggcaactgcaagatanttgtaagttctggcatatatgggattaggccaaatggaaaaattacaaatgtcaaaagactaaccggtagggccatgactaacacaaggccaataaagcaacggccttaagcctcttttcaattattgaaattntatatatttttaaaatacttctaaattaatagataataaattttattatattatttgtatttaacttgtttctaaaataattagtaaaatttattctctctaaatataaaatagaataactatattgaatgagaatatttttaagaattattgtgtttgataagaacaagtaaaaaaattctctanaaaaaatatctttggattctttttgctaatattttctcttactatatttttcataatgcacaatgaacaagatagattc

SEQ ID NO: 1904 - DNA, 448 bp, Glycine max
  unsure at all n locations
gtacaagaccgnggaattagccattagtgtgtggcctggatcttctgttggactagtttgacccctgtgcttgacaccatgtggcccaagtactccacctgggtttgggcgaaggaacatttcgagagcttaatgaagaactggccctgcgacaaaaccgtgaaagccaattgcaaatgaagtaaatggtcattgaaggagctactataaattagtatgtcgagatgtggacatcaaagcccaagcccatgacaaccaccagccccaggcccatgactagatggaagcccaagacccaatacaaggcataggaagacccatgacaagagcaagagctaaaaaggcacaagatgctttggaacatatggtgattattctgagggtagttcaaatgcaaggagaggcccaacacttggagtctcaaaagggaatgttgctagtcctatgt

SEQ ID NO: 1905 - DNA, 380 bp, Glycine max
  unsure at all n locations
agcttcaaggttcanagttggatcaaaagcggcttgagggacttttccatttcccgagcatcagttgagtggcgcattcctgttcctgatgacaagacccagactatatatgtatggtttgatgctttactagggtaaggatatgtatcttatagcttgtgcgtgctcctctagcttcccttgactctattctataatcttataggtcctgtctatcatactcaccgactatcatcttgtttattgttcgaaatacatagctaaatgcatgaaagttcacattatgcatgatcatttgtacagaatcacgataaagaacagcttggacttctgctattttgctgaatattctctattacatgtgtcgctaatcaccttcc

SEQ ID NO: 1906 - DNA, 426 bp, Glycine max
taagctcttcaatgcttcctctttcttgctgggagaagttcttatcattttgacatgcataccaaaagccttagcaaacttgacagccacatgacctatgcctccgaggcccaccacacccaagtgcaacccaggctgagcaagcctataatatttcattgggctgcatactgtgattccagcacatagcaacggggcgtgcaccatctaacggaagagattttgggattagcacgacaaagttctgatcaaccactatgatatctgagtctccaccttgagttattgccccatcataatagcgtgcactgtaggttacatgtatttttggacaatatacatagaagccgatgctgtcggtccaacatgagccacacgaacctacagagccacccacaccacgcatgcaccatcactgcactttgg

SEQ ID NO: 1907 - DNA, 396 bp, Glycine max
  unsure at all n locations
tgagcccacttatctntgtacatattagattaaggtttcattattttctggccttgtatttagggctctataatgtaggtagggtaccctagaaatgtaggatttttcagcccttgtattttagggcacctagactagtttttgtattacgggtatgtttgtaatttcacatgcattaagtgaatatttgatgtgtgtgttggaaaataaatctaattgtattgggagaagctcaatccaatttaattctagagggggaggtgagcatttgcttgctacaccccattgtcacatcatatagtcgcactttgtgcatatccttcatgctctacatgcctcatgccacgttagcatatttagtggataattttgaacttgatcttggttagtgggctg

SEQ ID NO: 1908 - DNA, 421 bp, Glycine max
  unsure at all n locations
agctggcttcctttgattntcggcatgtctcgggacttcacatatcgngcaacaaagggtgccaagtatctcgaagcggccaatcaaaggttgtatatcatcaaataataatccccggacgaaattagggtatgacagggtcgaagcggcttcctataccaatgtcacgaggagtgtggtggtcagattcataaagagggagttgnattgtcagtacgaactccctaggaagatcattactgacaatggcacanatctgaataacaaaatgatgcaggatatgtgcatggatttcaaaatctagcatcacaattccacgccctaccgaccaaagatgaacggagccgtggaagcagccaataagaatattaagaatattattcagaagatgacagtgtcgcacaaagattggcatgagatg

SEQ ID NO: 1909 - DNA, 453 bp, Glycine max
  unsure at all n locations
ngaaggagtttattgcatcagggaacaatttcactttaaaagtgtgtcctaattggattcctaattntcaacttacctatttggatgtgacatcatggcagataggtcccaactttccatcgtggattcaatcacaaaacaaacttcaatatattggactgtctaacacggtgattttagattctattcccacttggttctgggaaccacactctcaggttgtgcatttaaacctctctcataatcatatccatggtgagcttgtgactacattacaaaatccaatatctatccaaactgttgatctaagcacaaatcacttatgtggtaaattaccctatctttcanatgatgtgtatgagttagacctttcaaccaattcattctctgaatccatgcaagaatncttatgtaacaatcacgacaaggcaatgcaattagaatttctcaatc

SEQ ID NO: 1910 - DNA, 340 bp, Glycine max
  unsure at all n locations
tctaattgattaacggaagctcttgaganactcaaatggtcatatcttatcacacggacgtncgattcaggtgcataatatatcgagacgctggaaattgaacaacgtatggccttgagatattcaaatggtcataactagtcacacggatgtccgattcatgcacataatatatcgagatgctcaaaatcgaacatcggaagctctcgagaaattccaaaggtcataactcttcacacggaagtccgattctggcgcatcacttcataagatgctctgaattgaacaccggatgctctcgagaaattcaaacggtcataacttgttacacggaagttcg

SEQ ID NO: 1911 - DNA, 469 bp, Glycine max
  unsure at all n locations
tctanactntatacaagaatgaagctctgataccacttgttagacaagtggcctcagatatcttaagaagggggggttgaattaagatattccaaactacttccccaattaaaaatctatttcactttttttaagttatgaattcccttaatgacaatcttcttaaatattgattcagataaaacaatttgaatatgagaataaagcagtaataaataaaggagattaatggaagagagagtgcaaactcagatttatactggttcggccacacccttgtgcctacgtccagtccccaagcaacccgcttgagagttccactatcttgtaaattccttctacaagttctaaacacacaaggacaatccttcctttgtgcttagaattcctttacaacaagagactcacggtctcttaatcccttagagaatgaggagaagtagaagaataaatctctctagaaagagat

SEQ ID NO: 1912 - DNA, 432 bp, Glycine max
  unsure at all n locations
agcttcaagaaaaagatggcctcagtatattccttatttccagaagggaattccatcaatagacctccaatctttaatggagagggttaccactactggaaaacccgaatgcaaatttttattgaggcaatagatctacatatttgggaagccatagaaatagggccttatatacccaccacaggagaaagagttacaatagatggtagttcatcaagtgaaagcataactatagagaaacctatagatagatggtctgaagaggatagaaaacgagtacaatacaacttaaaagccaaaaacataataacatctgccctgtgaatggatgagtatttcacggcttcaaattggaagagtgctaaggaaatgtgggacactnttcgattaacacatgaaggaactacagatgttaaaagatctatgataaat

SEQ ID NO: 1913 - DNA, 493 bp, Glycine max
  unsure at all n locations
acactcagatactaagctgttcgccatcgttcgcgtgtatgacatccactccacaaggtttgaagttgaggagaccttcaatcctattacacaacgtggccgacaaaagtgggcagttaacttgaatggtcattattgtcaatgcagaaggtattctgcgcttcactatccatgttcacatattattgcagcttgtggttacgtgagcctgaactactaccaatatatagatgttgtttatacaaatgagcacatcgtaaaagcttactccgcacaatggtggcctcttgggaatgaagcgactattcctccttctaatgacgcatggacacttatccctgacccaacagcaattcgtgcgaaaggtcggcctaaatcaacaaggataaggaatgagatggattgtgtcgaaccctctgagcaccgacaaaaatgcagtagatgtggagccgaagcgcataacangcgtcgatgtccaatgcaatctgagcgt

SEQ ID NO: 1914 - DNA, 464 bp, Glycine max
  unsure at all n locations
agctnntggaaatgatntctatacaaaagttagtcgtataaagtgactaacacacttaggctataaatagaggtcatgtgtgtgcatttcttcaactttgatcattttagaattacgcttcaaagttcagacctcttttgaggcacaaattttcgtgctccttctcctaccttcaggctcttatccatggattcctatggtggtgagcttcttcttgactcatcttctccttgaagtggtgtctctaatcaactttcttccttattcatttcgctaccattaaacttcaagaagaaaagcactccattgttgaagaagatccaaggcctacaagttccacatggagctacattagtattgccctttctcctacgtatccttagatgcgatgaggaacttagacctacgtagttctttaagtctgaatggttgttgtgctacatngattttatcttaattttaaa

SEQ ID NO: 1915 - DNA, 395 bp, Glycine max
ataccttcatctgacttattatcattatttcctaagctatcttttccattattcaatacaaaacatttacgaccaaagatatgaagatgtgagatgtttggttttctgccattgaacaattcatatggagtattctttaaaatgggtgttattaaagccctatttaaaatgtagcatgctgcgttaacggctttagcccctatagttgttggaagaggagtatcatttaggtcagtcctatctatctcgttcaaagatctatttatactttctacaacaccataatgtcgaggggatcttggtgttgaaaagctatgctcaattccatgcttatcacacaataattgacattcttcacttgcacactgacgcgcatgatcactcctaatagatat

SEQ ID NO: 1916 - DNA, 409 bp, Glycine max
  unsure at all n locations
ggaagganaacttgatgccttggtcaacctagtaactcagctttccatgaataagaaatctacacttgttgcaggagtctgtggtctatgttcttctgcagatcaccatacagaaatctgtccttttttgcagcaatctggagtcaatgagcaacctgaagcttatgctgcaaacatttataatagacctcatcatcagcaaaacccacaacaccagaataattattgacctttaagcaatagatacaatccatgctggaggaatcatccatatctgagatggacaagcccttcacaacaacaacaacctgtccctccctttcagaatgatgttggtccaagcaagccatatgttcctcctttcatacaacagcagtcacaacaaagacaacaagcatctgaggctcct

SEQ ID NO: 1917 - DNA, 484 bp, Glycine max
  unsure at all n locations
tctntgagaaaacttccttgagaagctagagcttagctacacatacctctctaatagctaagcttacctccttgagatgagaagctagagcttagctatacacaccctataatagctaagctcacccccatgacaaaaaacatgaaaatacaaaaaaaagtccttactacaaagactactcaaaatgccccgaaatacaaggctaaaaccctatactactagaatggccaaaatacaaggcccagacgaaggaaaaatctattctaatatttacaaagataaatgggctcatacttagcccatgggctcgaaatctaccctaaggctcatgagaaccctagggccttcccttggatctctagcccaatctacatggagtcttctacccaatgcccttgcagagtaggattgcatcattgagttatgtggagttntattgacctaagttgaaattatgagatttcaaatcttacctaaacctact

SEQ ID NO: 1918 - DNA, 475 bp, Glycine max
agcttgtaggcctaggatcttcttcatcaatggattcctttgcttcttggaaaatgaatggcagcggaatggagaaggaagagagagagagagaggagacgccacttcaaggagaagatgagtctagaagaagctcaccaccataagaggccatggataagagcttgggggaagaaggagatgaatgaagggagagggagagaagagcactgaaatttgtgctccaaatgagctttgaaatctgaattttaatattcaaatgatcaaagttgaaaaaaatgcacacacatgacctctatttatagcctaagtgtcacacaaaattggagggaaattcaaatttcacttgaattggtggagccaaactttggagccaaaatttcactaattatgattagtgaattctagttatggttcagcccactaatccaagatcaattccaagattctccactaagtgtgcttaggtgtcatg

SEQ ID NO: 1919 - DNA, 325 bp, Glycine max
cccgttgttcaatttcttacgtctatatatgtgatgcgcctgttatcgaccttcaagagaaaagtaatgaccatctgaaattctcgagagcttccgctgctcaatttcaagcgtctcgatctgttatacgcctgaatcggacctccgagtgacatcttatgaccatatgaatatttcgagagcttccgccgatcaacgtctagcctcatgacatattatgcgcctgactcggacctactagtgagaagctcagaccattagagttggtcacgagcttccaacgatcaatacccagcgtctcggcatgtgatgcgcctgaattgga

SEQ ID NO: 1920 - DNA, 344 bp, Glycine max
  unsure at all n locations
agctctaacatcagaccacttccattgtgctggatctacttcacatggactcgaaggggcctatgccagttgaaagccatggaggaaagaggcatgcctatgctgatgtggatgattcctcgagatatacctgggtcaactgtatcagataaaaatcacacatcctngaagtattcaatgagctgagtctaagacttcacctagacatagactgtgtcatcaagagactcatgagtgaccatggcaaagagtacgaaaacagattgtttactgaattctgctcatttgaacgcatcactcatgagttgtatgagccattacaccacatcagagcgacatatatg

SEQ ID NO: 1921 - DNA, 425 bp, Glycine max
ttatgctattacctaaacttatgagctctagctaggttgtagcttcctataataggtataagaataggatcaaagcttctactttgacaatcacagtgtcaaggacttaactgatgacattattgcaaattcaatgttttgacattccttaattttgtaggtactaccaatgggaaacgggcaaccccaaatccagaaatgggttctacatctcaaggggaacggaagaggaagcggttagcaaccgacggagaggaggaaactttgcaaagccaattaattgatgtcttagaaaagaatggcaaaatgctacatgatcaacttgaagctcagaacctgaatttccagttggatcgccaacagcagaaagacactgcaagtaacatagttgctgtacttgataagcttgcagatgctctacggag

SEQ ID NO: 1922 - DNA, 408 bp, Glycine max
  unsure at all n locations
agctgcatactgttntcattatgacaataaaatatttttgcaggctatacagctggatccagaatntgctaacaacattgggcagattgttcttcttggtggtgcttttgcagtaaatggcaatgtgaatcccgctgctgaagccaacgtgagtatttcaatcctgtattcaaattcttaatataacttccataaaaatattgtatcatccacaagtcaatctgtctaactcttcggttggatttgttccagacatttggtgatccagatgctgcagatgttgtatttacaagtggggcagatgtacttgcagtggggataaatgttacccaccaagttgtactgacaggtacccctttgacaaattctttggctcctttgtatacttgagtcatttttgtaaaattc

SEQ ID NO: 1923 - DNA, 437 bp, Glycine max
  unsure at all n locations
agcttctggtttaattacgtgcgtctcgatatctctactgtgacacaatcagacatccgagtgaaaatntattgtgctttanatgtgctcagagcttcagttttcaattaggagcgtctcgatatattacgggtctgaatcggacatccgagttaaaaattattgtcgtttgaattttgccagagctttcgttatcaattacgagcgcctcgatatcctacggtgctcaatcggacatccgaggtaaaagttatagtcgatagatttttcccagagcttccgttttcaattaagagcgtctcgatatcctacgggacacaatcggacatccgagtcacaagttattgtcgtttgactcttcttagagcttcctgtttaaatttcgagcgtcttgatatattacagggcgcaatcggacatccgagttgaaagttatt

SEQ ID NO: 1924 - DNA, 495 bp, Glycine max
  unsure at all n locations
agcttagctaactctataggagacatcctataatgagctatggatatgggtccagtaccaggtactaagtctatggaaaactctatctctctctcaggtggcagatcagatatatcctcaggaaacacttcaagaaactctctaacaacagggaggtcacacatagaaacctttgtctctacttctaggctagacaagatcatgtacacttgagcatcttcctttanagatgtcacaacttggttggcagagataaacatcatatccttactcactctagaatcatcaaacaccacactnttatcaaaacagttcaacaagacatggttggaagataaccagtccataccaagaataacatcaatctgactcataggcaaacaaatcacatcaattaagaatgttctaccagaaatctccacagaacaattcacacacacataagaaagtaacatagaaccactagtaggggtctctaccactagatctttatta

SEQ ID NO: 1925 - DNA, 375 bp, Glycine max
  unsure at all n locations
agcttctacattcaatttcgtgctnttcgatatattacgggactcaatcggacatccgagtaaaaagttattgtcgtttgaatttgctcacggcttcggtattccatttcgagcgtctcgatatattacgggactcaatcggacatcagagtaaacagttattgttgtttgaatctgctcagagcttcggtattccatttcgagcatctcgatatattacgggactcaatcagacatccgagtaaaaagttattgtagtttgaatttgctcagggcttcggtattccatttcgagcgtctcgatgtattacgggactcaatcagacatccgagtaaaaagctattgtcgtttgaatctgctcagagcttctacat

SEQ ID NO: 1926 - DNA, 480 bp, Glycine max
  unsure at all n locations
agcttcttcttgtnntttcgccccattganaacaacatttttcttaattacctcattcaaaggtgctgccaaggtactaaaatccttcacaaatcgtctataaaaacttgctaggccatgaaaacttctcacctctgtcacacttttaggtgtaggccactcttgaatagccttgaccttttcttcatcaacttaaacccctttggaactcaatacaaaaccaagaaacacaacatggtctttgcaaaaaatacattnttcaaggttagcatacaattgttctttcctaagcacacacaacaccgattntaagtgtacaacatgcaaatcaagggttatgctataaacaaggatatcatcaaagtacaccaccacaaatntaccaatgaattctctcaaaacatggttcattaatctcatgaaagtgcttggtccattagtcaaaccgaaaggcataaccaaccattcatataatccata

SEQ ID NO: 1927 - DNA, 469 bp, Glycine max
  unsure at all n locations
agcttaacaggttcaggtgctggtgttgctactggtggaggcactttgaattggttgccagacctcanagtgatgacactcacattnttcagattctgcacagtttgtgaagacaatttgtcagaattntggggctgagcttggttcaactgagtagccatctaccctatctgatttgtcagactctgaatggaggctcttgtcttttgctgaaattgcatattctggatggtcatttgcctcactaactcttctatgaaaggttgaggaggagcctcagttgcttgttgtctttgttgtgactgctgctgctatatcggaggaggaacatatggcttgcttggaccagtagcattctggaaaggagggacagactgttgttgttgtggaggacttgtccatttcagatttggagattcctccaacctggattgtatctgttacttaaaagggcataattattctgatg

SEQ ID NO: 1928 - DNA, 391 bp, Glycine max
  unsure at all n locations
agctnttggaaggatcaaaaagtgccttatgaattctcccgtgcttatgccaccagtacctggaaggcctctcattntgtacatgaccatgttggacgagtcaatgcggtgtatgctggggcaacatgacgaatccgggaagaaagagcgcgttgtttactacctaagtaagaagttcacgacctgtgagatgaattactccttgctcgaaagaacatgttgtgctttagtatgggcatcccatcgcctaaggcagtacatgcagagccatactacctggttgatatccaaaatggacccggttaagtacatctttgaaaagccagctctcacgggacgaatcgcccggtggcaagtcctgctatccgagtttgatatagtctccgtcacc

SEQ ID NO: 1929 - DNA, 484 bp, Glycine max
  unsure at all n locations
agcttgctaacccatggaagctcctaatatctcttacactttntggggtgggccattcttggatggccttgattttctcaaggtccacttggaccccatttctaccaactacaaaccctaagaaaactatattatctacacaaaaggtacacttctctatatttgtagagagggtgtttttcctaaggactgaaagaacttgcctgagatgtccttagtgatcatctaggctcctactatacactaaaatatcatcaaaataaacaactacaaatctacctatgaaatcccttaagacatgatgcataagcctcataaaggtgtttggtgcattagtgagcccaaaaggcatcactagccattcatacaaaccaaacttggtcttgaaatcggntntccactcatcaccctttttcatcctgatntggtgataaccacttttaagatcaatctttgaaaagatattggcaccatgcaactcatc

SEQ ID NO: 1930 - DNA, 455 bp, Glycine max
  unsure at all n locations
tactcaagcttgtccaanatgcaaacaataataattgtcaaacggatatcctattgagtattgtaatatatcgagacgcttgtaatggaaaacagaagctcgtagaaaatgcaaatcgcaataacttttaactcggatgatcgattgagtcccgtaatatatcgagacactcgaaattgaaagcagaagctctgagcaaattctaacgacaataacttttgactcggatatccgattgagtcatttaataattcgagacgctcaaaattgaatacagaagctctatgcaaattcaaatgacagtaactttcgactcggatgtccgattgagtcattttatgaattgagacgctcaaaattgaatgcacgagctcttaccagatccaaatgacaataactttntactcggatgtacgattgagtgccgtaatatatctagacgctcaatattgaaa

SEQ ID NO: 1931 - DNA, 479 bp, Glycine max
  unsure at all n locations
tactcaagctcttatccatggcttcctatggtggtgagcttcttctttactttcttctccttaaagtggcgtctccaatcatcattcttccatctccattccgctgtcattaatcttcaagaagcaaaggactccattgatgaagaagatccaaggcctacaagctccacaaggagctacatcattttgggtttgatatctagacttttagtccactattactattgtgtagggtacatttgtcctttgcaacaattaataagtataaattaacataaatatctcatcatcaatataatattctcaacaacaacatgataaattacaaacaaaaaattatagaccaacccacccatcataaatatgtatgactttaccattataacaattntatacttcatgtttaagggtatcaaaacccctcataagtctttgggtactatctccttcatcttttattatgtgcatatgaccttcat

SEQ ID NO: 1932 - DNA, 399 bp, Glycine max
  unsure at all n locations
cggattctttttactctggaaacctcttctttctatgtgaacctcaacccaatctctgggttggtaaacaacctttttgcgacccttgtttgcttatctagcatagctctcattcctcttttcaatttgggccttgactctttcatggagctttttctcacagtccgctttggcttgtacttcctcatgcttaaaaactgaaatattaggcattggcaacaaatcaagaggagttagtggattgaaaccataaataacctcaaaaggagaacaactagtggtgctatgtatagccctattataagaaaattcaatatgaggtaagcaaacttcctaattnttaagattctttttcaaaatggtccttagcaagatacccaaagtcctattcatgacctc

SEQ ID NO: 1933 - DNA, 408 bp, Glycine max
aacacgacatggagactatctagcatagctaatagggaagacaacaactaaacattcccagatggtaagcgtgcaattataaatcccaattccactgcagtacatgatcacaattcctattaactgctattggcagtaaccaagttcataaagaacagtccacaactcaatgcggccggatctgcccgcaatatccctaaatcgacagccatgcgaccacaatctaaaaccttggtagtaacataagcatggggccaaatacatgaataagagaggctagttttactttacccctgagcaaatatgcgaccagcctcaagagcattgtgaccaacttcactattacccatgtcatcttctgttggaaagtctacagcggtaccatgagccctaaccaatctccatcgt

SEQ ID NO: 1934 - DNA, 470 bp, Glycine max
  unsure at all n locations
tactcaagcttctcatgctgagtaggaccccagtagtaccctntcaatcccactacattgggatgcctgatgtttgcaatttttttagcctctttggtaaattcttttctctttgttgccattccttctcttagccacttcactctcaataacaaaccatgctccagagttgccttgtaagatgtaccatgactgcttctccccaaaacttcagctggggctccagacagctcctcatgtgtcaatgttattgcatcatcaagaaaataaagttctccagtcaatttatctgctgatcttgcatatagtcttgcatgatttcctacagaaactgaatcactagatcctggtgatgaaaagtggctattttttgatggggagaaccttgttgcagctgccattttttcatcatggctgataatctcagatgacgaacctttctgtgaggtcacaaaatcctcggctgatac

SEQ ID NO: 1935 - DNA, 437 bp, Glycine max
  unsure at all n locations
tactcaagcttgtatctgtggattcactttcgatctcaactataccataaggtataacattattcaccacaaaaggaccaatccactttgacctcaacttaccactcatgagtccgagcctagagttatacaataaatttttttgtccaaccacaaagttcttcttagctatcaagctgtcatggaacttcttggtcttctcctagtagaatttggaattctcataggcttctaaacggatctcatctagctcacttagttgcaacttcctttcctctccagcctggtccataaagaagttgcaagtctttacagcccagtaggctttgtactctatctctacaggaagatggcatgtcttgccaaagacaacccgataaggagacgttcctatgggtgctntgtacgcagtcctatgcgcccaanaagcatcatct

SEQ ID NO: 1936 - DNA, 477 bp, Glycine max
  unsure at all n locations
agctagaaatccaatgcaatccaagttatgatctaatcatttatctattccatatccaattgactaaattaattaacataagtgcataacataaccaccacatatctaatcaactggatttaaagttgcaaccgtgccaattcgacgataatataaaacgaagtaaactcacgaacctatcatcatcattattggtgtattgaactaattaaatttttttctatcgtcaaacaaacatattattattatagtaacaggtaccagnggcaccacatatcatacatatatatataactaattaattagtgcaacatatacacaataaaacccaactgtctagccaaacgctctaataacaaaaataaataaactatatattcttataatgaagactatcaagaaaggaataagaaacaatggagattatattccacggcaccaccatgcactattagtatattactaatcatccatgga

SEQ ID NO: 1937 - DNA, 390 bp, Glycine max
gaaagaaggttgtcttcgaacccggagattgggtttgggtgcacatgagaaaagaaaggtttccggaacagaggaaatcaaagcttcaacaatggggagatggaccatttcaagtgcttgaaagaatcaatgacaatgcttacaaagttgagctgcccggtgagtataatgttagttccaccttcaatgtctttgatttacctctttttgatgcagatgtagaatccgatttgaggacaaatccttctcaagagggagagaatgatgaggacatgaccaagagcaagggcaaggatccacttgaaggacttggaggacctatgacaagggctagagcaaggaaagccaaggaagctcttcaacaagtgctgtccatactatttgaataca

SEQ ID NO: 1938 - DNA, 448 bp, Glycine max
  unsure at all n locations
agcttgaaattgaacaacggaagctctcgagattatcgagtggtcatataatttcacacagatgtccgattcggggaaataatatatcgagacgcacganattgaacaacggaagctctcgagaaatttgaatggtcataacatttcactcggatgttcgatccggggacataatttatcgagacgctcgaaattgaacaaccgaagctctcgacaaattagaatggtcgtaacttttcacgcgaatgttcgattcggggacataactcatctagacgctcgaaattgaacaacggaagctctcgagaaattcgaatggtcataagttttcacacggatgtccgattcggggacataatatatcaagacactcgaaattgaacaacggaagctctcgagaaaatcgaatggtcataacgtttcacacagatgtncgattcggggacat

SEQ ID NO: 1939 - DNA, 409 bp, Glycine max
tgagcgcttgccatagcttctaactcaagccttctggcctcatatacttgggaagcctcttctgcagtgttgaaagtgcctaaccatatacgattgttctgaaatgggttatagatctcagaagcccatttaccccattttctctgcctgacacctctatatttaccaggagtcttcctcctcgctgatggggtatgagtcaaaaccctcttcttactttggggttgacctttagtgctaaccctcattgtatttattttgttattcaactcacaagaactagtttcaagagtggtgaatgtgtgaagaagacggagaagagagatctcacacatacttcttttaactattctcgggttctgaatcctcttggagtcatcatcggatgaatcagtagcatcaggatcgt

SEQ ID NO: 1940 - DNA, 478 bp, Glycine max
  unsure at all n locations
agctngcattacaatagatgtttttaaagataaattaaataaattattattattatataatagcatacccaaagcgaatcatttcttgattaggtaaaatgttcactaacttttgcttagattcctaagtagaagcatcctttctaattcattttttttctctcttcttttttataattatttaggtggtaagtcctactctactaggtgactatgattattaaagaatttggccatcaacattagtattatttttttaataaacgtgttcatattttaaaggatataaaatgctcagattcaagtgcaagaacagaatgtattacaatgataaaaattaataaaaacaaattatttataaaatttaagactggataagttctcattaataattatgtatactctattcctataaaatataagaatggtggcttaattatgtattctctacttgccatgcaacatntttatgggtcat

SEQ ID NO: 1941 - DNA, 489 bp, Glycine max
  unsure at all n locations
ctcacttgatgcatagagaagagtaacaccaccacctgcacaaagcacaacacantcaaattgattgaacaacatagaattagaactaagcatacaactgccagtgctaataatctacctggtactatgccctcctctacagctgccttggttgcatttaaggcatctgtcactctatccttcttctcaccaacttcagcctcactggctcctccaatctgcanaagtaaggtttcagatgttaattttatcatgacaaaaccatatgatgaagcaccagataagacttaacagcaagcaaggtaaactcaaataaacaaaccttcagtactgcaacacccncagaaagcttggctaatctttcctgtaacttttccttgtcataatctgaagtgctattntcaattgctgatctaatctgcttgttaaaattcatcacaagacacaagtaaaacacatcaataagtatcagtacatgaaacagaatac

SEQ ID NO: 1942 - DNA, 377 bp, Glycine max
  unsure at all n locations
tcagtgtcatactatngatcaaaacaaagcaggtataaatatgcaatactagactcaaaatatgcaacaaacactagacctaaatcagtgtcacagaaattggaagaaaatattttatccaagcacaaacttcaagccttattccatgtattggggggaagttatggctggccatatgggtagaggtgtcatagaggagcaggtatggaggaagggaccttggactgctgaagaggacangttgcttgttgagtatgtcaggttgcatggtgaacgtagatggaactctgttgctaggcttgcaagtaagaaacaccaaactgttatcactgtttcgctactaaaatatatgatcggattttcacatttacaaccga

SEQ ID NO: 1943 - DNA, 491 bp, Glycine max
  unsure at all n locations
gcttacanagagaatcatctagatataacaactgtggaagttctcttacgaggctatgcttttcaagctttaagattaacctcaagctagcatgaccaagcttctcatgccatgcccaatgatgctctttgactgagagtaagcatgacacttttttactggatagatcaccaagtctaatcttatagagatttccttgtctcttagcagagaagagtgaagacctatccttgttttggactatacacatatccttaataaaggtgacattatatccactatcacataattaacttatgcttagtagattatgcttcaatcctttaacaagcaacacattntcaataggaggatagagagggatacaaatcttactgacactagttatcaaatctttttgattccctccaaaagtgatcgccccatcagacatagggcttaggaattagaacatagactntnttcctgtcatgtgtcgtgagcagccactg

SEQ ID NO: 1944 - DNA, 137 bp, Glycine max
  unsure at all n locations
gtctcacattatctgcctcaattcttggagtgcagcttatgtatctattgngtaacttcactcagtgtcaattgattttaagatgaaatctaacatggtatcagaacccataatctatcttggttctcgcctattct

SEQ ID NO: 1945 - DNA, 468 bp, Glycine max
tactcaagcttgtagattattgatttaaacattatttagtttattctttcttttatacataatatacatttatgtaaagtttactttcaccatttagtttgtcaaattatatcaaattcaagttagacaacattattttcaatatttgactcattgtattaagttgaatatgacaattctattattatttgtatctaaagataattattataaaattcaataaatttacattacattccctaaaaaaattataatacataatattttataatattttataatttgatgacaataataatgataaaatgcattaggctagttaactcaactgaaaccttttcaatgaaatttatgtctttaaaatataatatcatattaaatatgaataactttagtctcatgtaagtatgatataatatggacttaactcataaaattctgacttttacattactcaagctttattaa

SEQ ID NO: 1946 - DNA, 313 bp, Glycine max
  unsure at all n locations
agctntactgtaacaatgaagaatgcttctatgaattacttcatccccctgaagattgcaatgtgaactcatccttgtcattcacacttcaggtactttgtaaagtattggcggtgtggtacctttagttctactaatatccgcccttctaatagttgaaacttgaatttctgtatgttgcctttctagatctgcagagtcgatgacatcctttgtgaaagccttataaaaggttctgtcgatcatttccacagggcgaggaccataagtgttgaatcttctggaacaatatctgcctctggaatgggtatgc

SEQ ID NO: 1947 - DNA, 454 bp, Glycine max
tactcaagctctgatggtgttgagaagacatcacatgtttgtcatcatcaattatggggagaatgtgaatgtatgtatacatgattttgatgatgtcaaaagaagaatcaaacaagactcattttgcttcaagattaatacaagattgtttcaacaaacaaagccttgattcaagatttcttcaagatcaagccttgtctcacaatgaaaggtttcaagtcattcaaggcacatgtaatcgattaccaatacatgtaatcgattaccaatggtttgaaattgtgtaatcgattacacatcatatgtaatcgattaccagagactctgaatgttgggaattcaaattttaaatgaagggtcacaactgttcaagaaaaacaactatgtaatcgattacactaattctgtaatcaattaccagagaggattttaaggaatatcgccacagtcacat

SEQ ID NO: 1948 - DNA, 390 bp, Glycine max
ttaacacctgagctgcagcttgatgcaacatttgggaggtattgattcttcgagatgatgcgctccatgagaggttggatcaaatggagaatagagatcataatgaagaagataggaggagacaacggaatgatggtgtttctagacaaaaccgaattgatggtattaaactcaacattcctccatttaaaggaaagaatgatccggacgcctacgtcgagtgggagatgaagatagagcatgtcttctcatgcaccatctatgaggaggaccagaatgtgaagcttgccgtcacggagcattccgactatgctcttgagtggtggaacaacctgcataacgagagagcaagagatgaagagccaatggttgatgcatggacggagatga

SEQ ID NO: 1949 - DNA, 462 bp, Glycine max
  unsure at all n locations
agcttctttgagnaaacttccttgagaagctactgcttagctacacacacccctctcataactaagctcacctccttgagaagcttccttaagaagattcctaaagaagctagagattagctacacatacctctctaatagctaagctcacctccttgagatgaaaagctagagcttagctacacaccccctataatagctaagctcacccccatgacaaaaaaaaaaaaaacatgaaaatacaaaaaaagtccttactacaaaaactactcaaaatgccccgaaatacaaggctaaaaccctatactactagaatggccaaaatacaaggcccaaacgaaggaaaaacctattctaatatttacaaatataagcgggctcatacttagcccatgggctcaaaatataccctaaggctcatgagaaccctatggccgttccttggatctctagcccaatcta

SEQ ID NO: 1950 - DNA, 490 bp, Glycine max
  unsure at all n locations
agcttcttagtctcggctaatgaagatgaattctttgctacttcatgcactcctctaatgacaatagcatcatttctggcactaatttgctgggagttggaagccatcttctcaattaaatttctggcttcagcaggggtcatgtctccaagggctccaccactggtagcatctatcatacttctctccatgttactgagtctttcataaaaatattggagaagaagctactcaaaaatctggtggtgagggcaactggcacatagttttttaaatctctcccagtattcatataggctctctccactgagttgcctaatgcctaaaatatcctttttgatggccatggtcctgcgaagcagggaaattttttctaagaatactctcttgaggtcatcccagctcgtgatggaccttgnggcaaggtaatatagccagtccttctccactccctctaaagaatgaagaaaagccttcagaaatatgtgat

SEQ ID NO: 1951 - DNA, 364 bp, Glycine max
agcttgtcagggaacaattatgcatgtattcatagatgagagctttcttgcgtccttccaaacagaatcaaagaagtatgacaacattaacatgagaagttctactgatacactattagaaaatatgttttctacatcggttatttatgactttcaacatcggtttttcaaccgatgttgaaagtaccgacgttgatagtattatcgttaacatcgggttttgaaaaaccgatgttaacgtaaaattaccaacatcggttatataaataaccgatgctgctaatatgaattacacccacacaatgtatattaatgctgaaagttaacatctgtttttacatagaaccgatgttgtgttcagaat

SEQ ID NO: 1952 - DNA, 442 bp, Glycine max
  unsure at all n locations
agcttattggagatggagcttcggtggagagataagtccttgtttggctgatttaaagcatttgaattacttggacttgagcggcaattatttacttggagcaggtatgtcaattccttctttccttgggacaatgacttccttgactcacctcgacctctctgatactggattctatgggtagattccatctcagatntggaatctctcaaatttggtgtatcttgacctggcgtatgccgccaatgaaacaattccatctcagattgggaatctctccacattggtgtatcttggccttggaggtcattctgttgtcgaacctctgttagctgaacatgtataatgggtatcaagtatgtggaagcttgaatatcgttatttgagtaatgcanacctatccaaagcatttcattggctacacactctccaatctcttcct

SEQ ID NO: 1953 - DNA, 446 bp, Glycine max
agctttctctcacaattaatgtgtctactgactaacaattctaaatgcaagttcacattcttgtgccttctttgtctaacatacacacttgctcaaactcatgaaaagagacacaaattccatcaaaatcatgcactcaattcaaaataaagacatacacccatttttcacaaaaagataaaagtacttcactgccatatcattaaaactaagttaaactgttcaaaatgcttcataataagcaaacaaactacccataaacaaaactaacaaaaaggaattaatgtactaaaaccatgaccataataataataataatctaaaaggcaacaacaaaagaaacacaaaatcatcaggaatatcaacattcttgtcagtgtgagccacaatttcctcagcagtccatccagtcagaaaagtcataaccatcatctatgttgcaagat

SEQ ID NO: 1954 - DNA, 440 bp, Glycine max
  unsure at all n locations
agctntgaaatctgaagtttaatattcacatgatcaaagttcataaaaaatgcacacacatgacctctatttatagcctaagtgtcacacaaaattggagggtttgaaattgaatttgtggagccaaactttggagccaaaatttcactaattatgattagtgaattttagttatggttcagcccactaatccaagatcaaatataatattctccactaagtgtgcttaagtgtcatgaggcatgaaaagcatgaaggacatgcacaaagtgtgactatatgatgtggcaatgaggtgtagtaagcaaatgctcacctgcccctctaaaatttaattggattgggcttctaccaattcaattaaatntatttccaaccacacacatcaaatatccacttagtgcatgtganattacaaaactacccctaatacanaaact

SEQ ID NO: 1955 - DNA, 469 bp, Glycine max
  unsure at all n locations
agcttcacanaatgtggagataaggatgttatagtacaagttcctttaactagtacttctacttcaagaattgttgttccttatactgttgaaccacacaacaatcaagaagaacaacaaattaatgatcctgaggttaacaatgaacctatagtagaacaatcacaagacatagtattaagaagatctcatagagaaaaggagatctgctatttcgaatgattatgtgatttatctacaaaagtcggaaaatgacttaagcattgataatgatccatcagtttcattttcaaaagccattaatggtgatgattctggacaatgattacatgctatgaaagatgagcttaaatcaatggcacanaatggtgtatgggaccttgtggaattgcctgaaggatgcaagagagttgggtgtaaataggtctntaagactaagcgtgactctcatggaaatattgaatgacac

SEQ ID NO: 1956 - DNA, 302 bp, Glycine max
aaactaagcttgtaaagtgctggatgggcttttccttcgcaagttgacttgaagatgtacaacagttaccctgagctctctgatgccttgtgcaagatgtataactccttcaccattggtaactataattaatccataatttaccatacatcaacttttttttatatagaatttaatgactgatcataactcttacgtatcagtatctagattgttttctgtttaatataactacccaaaagatatggatcttaaatttgatcatgttgaaagctcactaatggtgtatgtgaatattaaat

SEQ ID NO: 1957 - DNA, 432 bp, Glycine max
  unsure at all n locations
agcttgaacctgctaatcaaaagcccttcttctgttcccaaaatcaagtctttaatttatctgatattttggaaacacgtcaatttctgaaatatatactttatganaaacgattcttaaaattaattagattgatctcaataatgcagattttaatctaatgccctttgtttgagtttatcttttaaatattaaaagatatgtttaacaaatgttgcaataattgtgaataatataaataacttaaaagacgtctccaatgctntttccatatttgataacgcacatttaaaatagtttgtaacaaagctgcataaagaaatacttaatttttaataatgaataaacaagcagatctcaaatctatcagcgactggtatagacatcatacataaagagcacacatactatgaaggcttgtcattgtgaatc

SEQ ID NO: 1958 - DNA, 475 bp, Glycine max
  unsure at all n locations
gaagttagatatatgtgattatctattcgttatatatatatatatatatatatatatatatatatattttgcagtttgttaattaagacttaaaggcccatgtcagtgttatatatttattgttttgaattggttagtgcatgtatattacatagattttatactattattaattaattgatgttgaagatgttataatgttgttatgatatgatttttgaaaattagttgattcagtgtatgtgtatataggttgtgtcttgtaaatattgctatgaatgtataatatgatatatgagtataagtgaagtatgcgtgcttatgaatatatgtgaagacaatgtgtcatggtatgtgtgtgtgctgcgaaaaaatgtgagaagaatctactcccccgggataggaatctncaagagatnttgaaattaaaccatgtgcatattgtgtgtgaaccatgaatcatgttgtgcatatg

SEQ ID NO: 1959 - DNA, 481 bp, Glycine max
  unsure at all n locations
ctcgacccggatccttaagtcactgcggctgcagcttggtcctgattanaagaaatcttctttaataaagccaatctagttcgacaattggtgaagttggagtataatgatggtcatagtatgattgagcacttgaataattctaaagggctcgtaaatcaattaaccaaaattgagatgaagattgatgatgagttgcaagcccttctactccttagttccttgctggaaagctgggacacactcgtggttacacttagtaactcagctccagaaggaaagctcaccatggatacagtcagtgacagccctctcggtgaagaagcaagaagaatggaacgaggtgagtctatccatcccgaggctaatgttattgagaatcggggtaggaatgagactcgtggatgtaataagagccgagatctgagttttcccaacactattcaacactatggatgtaatgttattgagactcgttcac

SEQ ID NO: 1960 - DNA, 397 bp, Glycine max
  unsure at all n locations
agcttgaagganaacttgatgcctttgtcaacctagtaactcagcttgccatgaatcaganatctacacgtgttgagagagtttatgatctatgttcttctgcagatcaccatacagatctttgtccttctgtgcaacaatctaaagcaattgaacagcctgaagcttatgctgcaaacatctacaacaaacctcctcaacctcaacagcaaaatcagccagaacagaacaattatgacctctccagcaacaggtacaatcccgggtggaggaatcatcccaaccttagatggtcgaatccttcacaacagcagcaacaacaacctctatttcaaaatgctgctggcctaagcagaccatacgttccttcaccaatccagcaacaacaacagcaaca

SEQ ID NO: 1961 - DNA, 398 bp, Glycine max
agcttgcatacaagattcttcttgcctggcacttcaaaaccttctggttgggtcatatagatgtcttcctctagatccccatgcaagaatgcagctttaacatctaactgctccaagtgaagattctctgcagctactatgctcagaataactctgatggtagtcatctctacaactggagagaagatctctgtgaaatcaattccttgtttctgctgaaaccctttcaccacaagtctcgccttgtatcttcttctaccgccagattcttcctttagcctatagacccacctattctgtaatgccttctttccttctggcaatctacttaaagaccacgtcttattcttctgaagggatgacatctcatctttcatcgctagctcccactcaatagt

SEQ ID NO: 1962 - DNA, 334 bp, Glycine max
cactattgatgctgcaattgagtgaagagatctggctattgcaagaacgagtttcgttattacagagagctatcacgatacacaacgagcccacgctgttgtttgttacttatatttaatatgttaaattacttatttattcttataatttcgttctttgtattttttaatttcaatagttaataatgtaattttcttaaatacttatagtttaaaaatatttttctaattctgaccatctgcattctaattcttttctacctcatatcgcttaaaattaatctttttaattcatataatttcgattttaatcatctttaatccctgtccaaaa

SEQ ID NO: 1963 - DNA, 269 bp, Glycine max
  unsure at all n locations
ctgcangcatgcaagcttgcttctacaatcaagaatgatatgaatgttctaattctgataataacaatcactgagtggataatgttattgattagaggaagctaattgaagccaccaggaaagaccattacccgcttcccttcatggatcaaatgcttgagagacttgcagggcaatctttctattattttttagatggatattcgggctataatcaaattgcagtggatccttaggaccaagataagatagctntcacatgccccttc

SEQ ID NO: 1964 - DNA, 284 bp, Glycine max
tgaatggttcgttcagtctgaccatctgtttgaggatgataagctgaactaagcttcaactttgtccccaaggcttcatgtagactcgtccaaaatcgcgaagtgaacctcggatccctgtcagatacaatactagaaggaattccatgcaaccttactacttccttgatgtacaactccatgagtttctccattctatacttcatattcactgggataaaatgagcagatttggcgagtcgatctactatgacccacactgcatcatgtccacgactagtctt

SEQ ID NO: 1965 - DNA, 287 bp, Glycine max
tcaagagacagtgcctgagctgcttaaaaactccttgcttgttatgaagatgaggggtatactggcccagaggagtgccttgggtggtgatagtctgtgggaacttacatggctacacgtgaataacatttcaccatcattgcaacttgaggtattccctgagcaggattctgagcatttgcagcacaaacagggtgaatcaataagtttgctgcctgatgaaaagggtttcgtgccttcaagtgaaacaacaatctgcgaacatgctggcattcgttggtaactat

SEQ ID NO: 1966 - DNA, 380 bp, Glycine max
caggcatgcaagcttcattcctttctcactcatgtgtccaagtttttgatgccacatggtcgaattattgatagcttcagtaactgctaccttatcctcatctgcaagcatgtaaagaagaccttgcatttttccacgagccacaacgagattgccttttgttaccttccaagctccatcaccaaaagtggtgtgatgtccctcattatccaactgctctatagatattaaatttatctttaaggcgggaatatgtctgacattgtgcaatgtccatagggattcactggaggtcttgatgttgatatcacctcttccgacaatgtcaagagactttccatctgcaaggtaaactttcccaaatcttccagaaatatagc

SEQ ID NO: 1967 - DNA, 346 bp, Glycine max
  unsure at all n locations
agcttagatgcagaacaagagaggttacatggatatataagagatctcgagcaaaataggtcgcgtatgatataatttaaaatgtaagtccaacattggttttcaatacaaaaccgatgttaacagaatgatgttaacgttaacatcggttttcttcaagaaaccaatgttaactggtcatacgttaacatcgattntcagaaaatcgatgttaacgaacataggttaacatcggttttcttcaaacccgatgttaacgaagagatattaacatcggntttggaaaaaccgatgttaacaaattaatgttaacataggttttacaagaaccgatgtaaacgtcact

SEQ ID NO: 1968 - DNA, 460 bp, Glycine max
  unsure at all n locations
cgaaggcacactggatgtgttggtcaactcggtaacccagctgttcttgaatcagaaatctgtacctgtcgcaagggttaggggatagtgctgctctgctgaccacgatacagacctttgcccttccatgcagcaacctagagcaattgagcagcctgaagcttatgcaggacatatatacaatagacctcctcaacctcagcagcanaatcaaccacagcagagcaattatgacctttccagcaacagatacaactctggatggaggaattaccctaacctcagatggtccagccctcagcaacaacaacaacagcctgctccttccttccaaaatgcttctggcccaagcagaccatacattcctccaccaatacaacaacagcaacaacctcagagacagccaacagttgaggccccttcacaaccttncctcgaagaacttgtgaggccaatgact

SEQ ID NO: 1969 - DNA, 429 bp, Glycine max
  unsure at all n locations
caggcatgcaagcttctagtctcaattntagcgtctcgatatattacccaattcaatcggacatccgagtaaaaagttattgtcngttgaatttcctacgagcttctgttttcaatttggagcgtctcgatatattaaaggactcaaccggacatccatgtataaagttattgtcaattcatatttcttagagcttcggattaaaattttgagcgtctcgatatattacgggactcaatcagacatccgagcaaaatgttattgtcgtttcaatttgatacgagcttctattttcaatttggagaatctctccatatattacaacactctgtcgggcatccgagtaaaaagttattgtcgtttgaattctctaagagtttccgttttcaatttggagcgtctcgatatattacgggactcaaccggaca

SEQ ID NO: 1970 - DNA, 348 bp, Glycine max
  unsure at all n locations
cgctacattgatgcatcttggctacggaatcttcgaattgggcacttannatttggaggcttaagtctgctatcaaaggagaagatggtaagaggactaccctatattaatcaccctgatcaactctgttaaggatgtttacttggcaagaaatttagaatgatttttccaaaggagtcaaactcaagagctaagaagccacccgagctaatacatgttaacgtctgtgggccaatcaagccccaagctcactacgtaaaaataaatatttcctctttctcattgattatntttcaagacaaacatgcgtctatttcttaaagcacaaatcataagtcttttccacct

SEQ ID NO: 1971 - DNA, 400 bp, Glycine max
  unsure at all n locations
atcttaagtcgactgcagctgcagctattatttcanaacgagttttgataatttatcattataagaacaaaatatatgcatgttgaaatttataagaatgaaatctaacattatatgatataaacatatctttaaggtttgatataatattcataataacctacttaaaaatatattttgaaataatacatttaaataagacataagcttattttttaataaacttaactataaaatttagtctaccgctttatataaatcaacatgattaacattttaaaaaataaatacatgtaagattttaatgtattatatcaaatttaatataataataacactaataatgaatatttatttatgaacttttaaataaatgatcttggtaagtctaaaaaagttt

SEQ ID NO: 1972 - DNA, 395 bp, Glycine max
agcttcatgcttaagtatgtatggttaaacttcattactattgttcaagacatactagtgagcttgtaataaatcttctagacttggagtgatcacatgcagtcctcttgaacccttaccacccactctgtcatcatgccgagactcaggaaggccaataggtttagccttctcaatgtattctgaacaaaatttaatggcttcttctgcaatgtacctctcaataatagatgcttctggacgataaagattctttatatacccttttaagatcttcatgtatcgctcaaccgggtacatccacctcaaataaacaggaccataacatttgatttctctgaccagatgcacaatcaagtgaatcatgatgtcaaagaaagcaaggggaaaataca

SEQ ID NO: 1973 - DNA, 177 bp, Glycine max
  unsure at all n locations
tgcaatgtattgctcgacaaggacatgaatgctngttggttatcttgggcttgcaaggctgcatcaccatgaacatgtggctgacacaacaagagtgatagggactctggggtacatggcacctgaacttgtccgaatcgggcgaccatcagctgcatgtgatgtgtatagtttcgg

SEQ ID NO: 1974 - DNA, 158 bp, Glycine max
gcttcttcccgttcgtcgtcatgcaggttgtcaacatcttcattaagcctctgtctcatgctctatcttcaggctgatattccaagctgtgaatgatgaacatgcagtcccagcttgcggcggctctcagtcgaagcctacgtacgctggataatcaa

SEQ ID NO: 1975 - DNA, 389 bp, Glycine max
agctttgatgcaacatttggagagtgttaatgaatcaacgagatgatgcgctccatgataggttggatcaaatggagaatagagatcataatgaagaagaaaggaggagaagagggaatgatggtgttcctagacaaaaccgaattgatggtattaaactcaacattcctccatttaaaggaaagaatgatccggaggcctacttggagagggagatgaaaatagagcatgttttctcatgcaacaactatgaggaggaccaaaaggtgaagcttgccgccacggagttttccgactatgctcttgtgtggtggaacaagctacaaaaggagagagcaagaaatgaagagccaatggttgatacatggacggagatgaaaaagatcatg

SEQ ID NO: 1976 - DNA, 415 bp, Glycine max
ccaatatgaataacatcttccaacaatcaaaataaatatttattctataatgataaaatcattttcaattctttttaaaaaaaattaccctgtatgaaattgaaaaagtcaaatcttttactttacgtgttatttcaaaaatctaatatttctatttttcttttgcagaaatgaaatgacagctatacataaataggaatgacaatgatcaagatttacatagggtcctatagtattccttatataacttttaaaatatttattataaaaattaataaatttatggtttgatttataaataaatgacatattggaaagtgaaaaagatctttacactatcaatagatatattactttctatatttctcagaaaaggctatatatatatctatattatcacttaatagtctctata

SEQ ID NO: 1977 - DNA, 298 bp, Glycine max
  unsure at all n locations
aattaataatactaaaattagatagacttgtttgaactttaaattggtctgatatctagtttggatatagtttatcaaattgcatttcttactacaccgcgataacatatattgtagtaattacaatgtttgcattattacattaattatactcgtcatttgtgtaatatttttttataatgtcaaattttaccaatctaaattntattaagcagataatatttatataaaaaacagagacaatatgtagataattagattaatttcttaagcatgttattaagagggtcttattctg

SEQ ID NO: 1978 - DNA, 331 bp, Glycine max
tggacattacttcttctatggacgctatatctacgcgcataatatatcgttacgctcaaaatcgaacaacggaagctcttgagaaattcaaatggtcataaccctttcactcggaggtccgattcatgcgcataatatatcgagacactcgaaactgaacaacggaagctctcgagaaattcaaatggtcattacttttcactcggaggttcgactcaagcgcataatacatcgatacgctctacattgaacaattgatgctctttagccaatcaaatgggcataacttttccctcggaggtctaattcaggcgcattatatatctacacg

SEQ ID NO: 1979 - DNA, 401 bp, Glycine max
  unsure at all n locations
cttaacanaaggcattcaaagtgggtggaatttctagagcatttcccttatgttatcaaacataaaagggaaaaggtaatattgtagccgatgctcttcctcggcgtcatgcattgctttctatgcttgaaacaaaattgattggtcttgaatgtttgaaaagcatgtatgaaaatgatgaaacttttggagaaaattttaaaaattgtgaaattttttcagaaaatggtttctttagacatgaaggctttctttttaaagaaaacaaattgtgtgtgcctaaatgttctactagaaattngcttgtttgtgaagcacatgaaggagggttaatggggcattttgggtccaaaagactctagaaacattacaagaacnattttattggcctcatatgaaaa

SEQ ID NO: 1980 - DNA, 389 bp, Glycine max
tacacattcaacttcgagcgtctcgatatattacgagtctctatcaaacatccgagaaaaaagttattgtcgtttgaatttgctcagaggttcaacattaaatcttgagcgtctcgatatatgacgggactcaatcagacatccgagtagaaagttattgtcgtttgaattagctcagagcttcaacattcaatttcgagcgtctcgatatgtgacgggactgaatcagacatccgagtataaagttattgtcgtttgaatttgctcagaacttcaacattcaatttcgagcgtctcgatatatgaccggactccatcttacatccgagtaaaaagttatctgccgtttgaattggctcagagcttcaacattcaatttcgagcgtctc

SEQ ID NO: 1981 - DNA, 357 bp, Glycine max
aggcatgcaagcttagagccaattcaaacgacattaactcttttctcggatgtctgattgagactttttatataacgagatgctcgaagttaaatgtttaagctctgagccaattcaaacgacaataactttttactcggatgtttgattgaggcctgtcatatatcgagacactcgaaattgaatgttgaagctctgagccaattcaaacgacaataactttttactcggatgtctgattgagtcccgccatatatcgagacgctcaaaattgaatgttgaagctctgaaccaattcatacgacaataactttttactcggatgtctgattgagtcctgtaatatatcgagacgct

SEQ ID NO: 1982 - DNA, 227 bp, Glycine max
ggacaagtacctaagaatatctgttccatgagattctgaagttttttcaagggtcttctcactctaacttaggcgtctaacttcaccgcctgttttcaatttatccttcaggcaaccctcgagtttcgtattatggatagtgattatgtgcttgtaatcaggtgaacacacctgatatggtttgcgggcacatctacatgcactttcatttccctcatgatgatcac

SEQ ID NO: 1983 - DNA, 432 bp, Glycine max
  unsure at all n locations
cttgcagcttgtccttatggttattaatgtatgaattgttgcttttgcacctcttccttgttttgttatatatctgtttgcattcgggattccaattttcatcaacagtggttaccctactcctcacgtgaagtggaacttgtgggttatccacaagctgctgcttaccctagtttatggtntcatactgttcatgtatcattctaggtggagagaaaggttacctggttagtgtcctggattgttatattattttatctttaattagttttatgatagcatagtttatcttcctcttttngcagcaaggcctgcttactataagtatgttaccattatgttcatcttgaatgcaattgcgctgtttgctcgcggcattactggaaacggtgctgctttcggattctggttagattcttctattctatatct

SEQ ID NO: 1984 - DNA, 382 bp, Glycine max
acactgtgttcatgctctcccaacagcacatgtatactcacgatcccaatcagacactatgctagatggcacaccatgtaatccgacaatatcactactatacacggaggccaacttctccacggaaaatatgacactaatgggaataaagtgagcagacttggccagcctgtcaacaataacctatataaatcaaaccttttgggtttaggtaggcctacaacaaaatccatacaaatattcgccctcttccactggggtatctacaagggttgaacttccctaaagtctctggcgtttcatcttacccttctgacagactaaacatgcatacataaactcactaacctctctcttcatgttaagaccttacaacaggatc

SEQ ID NO: 1985 - DNA, 250 bp, Glycine max
  unsure at all n locations
gcatctatcatacttctctccatattactgagtccttcataaaaatgttggagaagaagctgttctgaaatctgatggtgagggcaactggcacatagtttcttaaatcgctcccagtactcatacaggctctctccactgagttgtctaatacctgagatatctttcctgatggctgtggtcctggaacanggaaaaaattttctagaatactctcttaaggtcttccagctcgtgatggccttggagc

SEQ ID NO: 1986 - DNA, 506 bp, Glycine max
tagaatgcagaagaagcaacaacaatcaatttaataatgttctataaacatgcaaggcaaaattgattgcaataacataaatgagataagggaagagagaatgcaaacacaattttatactggttcggccacttcccgtgcctacatccagtactcaagcaacccacttgagatttccactatctttgtaaaatccattacaaagtctgaaccacaaagggacaacccatcccttgtgttcagatgctttacaacaagagactcacaatctcttaaccaatctcattgaataagaagaatggaagaagaattatctcttcaagagaagaatattacaatgaagatccatggatgaactcttaatggatgtgcaagtgcttgcccaagagttctttgagagagcatttgacaatgaagttctcttggaatctctctcattctcttttgagaggataagacactttggagcagcaaaactctctctctaaattcgtgcccagtcacct

SEQ ID NO: 1987 - DNA, 472 bp, Glycine max
tgtagggttaaagtctcatgactgtcacgtgctcatgcaacaattgttagccgtggctatacgagacatcttgccaaacaaagtcaacttatccataactcgcctgtgctttttcttccatgctatatgtagcaaagtcattgatcctgtcaagtttgatgagctggaaaatgaggccgcaattatactgtgccagttggagatgtattttccccctgctttctttgacatcatgattcacttgattgtgcatctggtcagagaaatcaaatgttgtggtcctgtttatctgtggtggatgtacccgattgagcgatacatgaagatcttacaaggtatacaaataatctatatcattcagaagcatctattattgagaggtacattgcagaagaagccattgaaattttttcacaatacattgagaacgctaaacctgttggcctctctgagtctcagcatgatgatagag

SEQ ID NO: 1988 - DNA, 334 bp, Glycine max
  unsure at all n locations
gaatctttcttagatattggagaaaaaagtctctntgtaatctattccttccttttgagtaaatcccttagcaacaagtcttgccttgtatctctcaatgttgcctaatgaatcccgtttggtcttaaatacccatttacatccaatgtcctttgccccattangcatctctacaaggttccaaaatttgttactgtacatggaattcatctcatccttcatggcatcataccataaatntgactctttacaactcatggctngatcaaaagtntaggatcattttcagttacaatatatagtcagattcttacaaatatacaatataatcact

SEQ ID NO: 1989 - DNA, 211 bp, Glycine max
aaaatctgaagatgaaggaggaagagtgtattcatgacttccacatgaacattcttgagattgccaatgcttgcactgccttgggagagaggataacagatgataagctggtgagaaagatcctcagatccttgcctaagagatttgacatgaaagtcactgcaatagaggaggcccaagacatttgcaacatgagagtggatgaactcat

SEQ ID NO: 1990 - DNA, 498 bp, Glycine max
  unsure at all n locations
gtgcatataacttgaagaggattgatagtantatactatagttgtactgggcttaaaagcccattagtataagtggtatacaaatatattcttgtactcctattttcattagacaaataaaattcaatgtctatagaaccaataacagccacaattgtaactagtaagaagagggttcacaaaataacaaaactacagtctatttaatatcgtaccttccaatagggtgagtggtacccttttccattgctgatacaacagcaagagcttctttttcacaggtgggaatgcaacacgaaggaacatttgattctgtgtttctaacatgatgaccataaatgggctcaattgccttgaatacgagtccaccagtggtcaatgtccctgttttgtcaaatgcaatagtatgacaagaagcatgagcatccagaacatgcccacctttgagttatatgccctgcaaattgggcaactgtcacagccacaatgaaagaagca

SEQ ID NO: 1991 - DNA, 328 bp, Glycine max
gcttaacatcagaccacttccagggtgctggaactacttcacatggtcttgatggggcctatgcaagttgaaagccttggaggaaagaggtatgcctatgttgttgtggatgatttctccagatttacctgggtcaactttatcagagagaaatcagacatctttgaagtattcaaggagttgagtctaagacttcaaagagaaaaagactgtgtcatcaagagaatcaggagtgaccatggcagagagtttgaaaacagcaagtttactgaattctgcacatctgaaggcatcactcatgagttctctgcagccattacaccacagc

SEQ ID NO: 1992 - DNA, 197 bp, Glycine max
  unsure at all n locations
ccattcttgctttccaggaattcatagttggntccatctaggattggtggtctgttcactggtcctccttctttctccatgttcatcagaatttatctccctagatctcactctgtgatttcgagtgttggctctgataccaattgaaattctgataccaggggacagatgtcgtaccggatgtcacgacatcacgc

SEQ ID NO: 1993 - DNA, 386 bp, Glycine max
  unsure at all n locations
tcatccaactaatacatggaaagacaactgtatataccaggcatctaagatttctcanacattatcatccatatcagngattgaaaagagcctttgatgtaagtcaagaaaatgaaagcgcgccccgtccattagtaggaatagatgtctatgatcgggtaaaagatatcataactatgattgggaagacacaaaaaaaaccgtcatctgatgcaaacatatggaagaaaaggtcaatattctttgatcttccatactggtccaatcttgatgttagacactgtatagacatcatgcatgtagagaaaaatgtttgtgatcctttaattggcaccatccgtaacatgaaaggcaagacaaaggatggctcgaagcgtcgtcaagac

SEQ ID NO: 1994 - DNA, 297 bp, Glycine max
aaagtcacacgactgtcacgtgctcatgcaacaattgttagtcgtggctatacgagacatcttgccaaacaaagtcaggttagcgataactcgcctgtgctttttcttccatgctatgtgtagcaaagccattgatcctgtcaagtttaatgagttggaaaatgaggccgcaattatactgtgccagttggagatgtattttccccctgccttttttgacatcatgattcacttgattgtgcatctggtcagagaaatcaaatgttgtggtcctgcttatatacggcggatgtaccc

SEQ ID NO: 1995 - DNA, 420 bp, Glycine max
  unsure at all n locations
tcaaccaaggggagatggaccatttcaagtgctagaatgaatctatgacaatgcttacaaagttgagctgcccgatgagtataatgttagttccaccttcaatgtctctgatttatctctttctgatgcagatggagaatccgatttgaggacaaatccttctcaagagggagagaatgatgaggacatgaccaagagcaagggcaaggatccacttgaaggacttggaggacctatgacaagggctagagcacggaaagccaaggaagctctttcacaagtgttgtccatactatttgaatacaagcccaagttttaaggagaaaagttcaaggttgtgagttgtatcatggtccaaatggaggaggactaaatgacaccactntatttcaactttagagcggttagtttgctaaataa

SEQ ID NO: 1996 - DNA, 474 bp, Glycine max
  unsure at all n locations
tgttggtttttagctagacaactctttattactattnnttattttctatattnttcttccatcttattcttttcttgctcgctctctttntgctcctttctttccatgagatattttgctacctaaacatacgtatatttttgtgaggtattttgctatatacatgcgtgtccaaggtatcttgctacctaaacatacatatatatgttttgtgagatattnttgctatatacatgcatatccaaggtatcttgctacctaaacatacatatatatattttgtgaagtattnttcctacatacatgcatatccaaggtatctttctacctaaacatacatatatattttgtgaggtatgactaccttccgagcttgtgcttgttntatttaaattcctaggatcatgagcaactaggtgtgtcctgctatgacttgagaaacaaaggtgatcaaataacaagcagagatttaaa

SEQ ID NO: 1997 - DNA, 276 bp, Glycine max
ataaataagataagggaagagagaatgcaaacaccaatttatactggttcagccacttcccgtgcctacatccagtactcaagcaacccacttgagatttccactatctttgtaaaatcctttacaaagtctgaaccacacagggacaacccgtctcttgtgttcagatgctttacaacaagagacttacagtctcttaaccaatctcattgaataagaagaatggaagaagaattctcttcttcagagaagaatattacaatgaagatcatgtaa

SEQ ID NO: 1998 - DNA, 236 bp, Glycine max
gtggtttgtgtgacatgggaatgcttgatgaggctagtaagtatgtggaggaaatgttgtccatagatttttctcctcattctgctgttgttcacgccttggtgaaggggttttgcaatgttggtagggtagaggatgcttgtggagtcctcaccaaggcactagagcatggggaagctcctcaatcggatacttggatggccataatgcctgtaatatgtgaagaggatgatgat

SEQ ID NO: 1999 - DNA, 258 bp, Glycine max
ctgtgatcgtatccccatattagctagatcttgacgggtattcaagtcatccttcctcttgccttgaatgttaaggagcatcccaatcacactgtcacaaacatttgtctccacatgcgtaacattcattcaatgtctaacgtctagattagaccagtctggaagatcaaagaaaatggacctctgcttcatatgcaactcttacttttatccttctttgggtctttccaatacagaatcaagtgttgaaccgctgat

SEQ ID NO: 2000 - DNA, 406 bp, Glycine max
tgttgccttagcacgcaagttatttgaataaattccagacgatgtctatttggaccctctaaagacattgcctattgaggaacaacaaaggcataatgctgagaaggctaccatgatggagatagatggtgaaccagtgacgatggtggtagcgatgttggtggtggcaccaactgttattggtgtggtggtggtagtgacaatgatagtggcagtgacattgatggctgtggtggtggtagtaatgtccactgtgatggtgatgtctatggtggtagtaatgatggcggcagcggtagtgatattagtggtcatggtgatagcaaccaattatggcggtgacaattgataacgatggcggccgtggcgatcgaagtggtattggtggtggtggcgatgacagtgg

SEQ ID NO: 2001 - DNA, 367 bp, Glycine max
  unsure at all n locations
cttaacccctntctaaatgataggctcataatgcagaagaagattaataagcaatcaatctaataatgttctttaaacatgcaagacacaattgattgcaataacataaatgagataagggaagagacaaatgcaaactcgatttatactggttcggccactttccgtgcctacgtcaagttctcaagcaacctacttgagatctttcactatctttgtaaaaatcctttctacaacttctgaacgcccaagcaatccctttaccttgtgttcaggaaactcatatttcacgggaccactagtctctcgattacaattgactntctgagaagaatagaaagatntctctcctttagagtggataata

SEQ ID NO: 2002 - DNA, 492 bp, Glycine max
  unsure at all n locations
ggcattcgacagtggagctcatccaatggagtaattgatgctatagaaattcacgatttaaaggagctgaatgctttggaggctggtagttctgacagaaatctgaatcaatcagaagtggagctcaagaagtctctgcaggagcaattgtggcatgctgctaatgcctatgaatctttgctgaggcaaaaggctagagtgaaatggttaaaggaaggggacagaaattcagcttacttccacaagctgataaatcatagaagaagacataatgccattcaaggattgatcattgatggggaatgggttcacgaccctagtatggtcaaaactgaggctttcaatcatttcatagatagactttctgagcagaattntaatagaccaaccctggatggtgtgcagctaccttccattggtcanagcgagaatgaagcccttgtgggcagattntctgatgcagaaataacctcagctgtgtgggactgtcat

SEQ ID NO: 2003 - DNA, 236 bp, Glycine max
  unsure at all n locations
aaactaacccaaggcaacaagggggttgaggattatttcaaggaaatggatgtgctcatgattcaagcaaagattgaagaagatgaggaggtaactatggctcgatttcttaatggtttgactaatgatatccgtgatattgttgatctgcaggagtttgttgaaatggattatntgcttcacaaagcaatccaagttgagcaacattaataaggaaggagtggcttaagagttta

SEQ ID NO: 2004 - DNA, 480 bp, Glycine max
  unsure at all n locations
tcataaggttatatatggcctcaaataagctcctaaggctnggtttgataaactaaatgagactctactaatgtttgaattcaaatccaacaagtttgatccttcactatttgtttattttaaggcttcatccataatctacattccggtatatgttgatgacatcataaaaacatgaaatgatattcctttattacatcaactcatttctaagctaaatatagtattttctctcaaagatcttggatcctcagattatttcttgggaatgaaagtaaagcatctatctgatggttccattgctttaacttanaccaaatatattagagacttaatgggcaaaaccaacatgttagatgtcaaacctatatcttccncaatggtaactggctataagctcacctacaagtggtttaatcctttctttttatccctatatgtatangtcatttgtaggaagcacttaatatgctactataa

SEQ ID NO: 2005 - DNA, 181 bp, Glycine max
acccgtcctagcttttcctaacttttctaaaacgtttgagctataatgtgatgcctctggagtgcgagttggagctgctttgttgaaggtgggcaccctattgcttattttagtgaaatacttcatggagcgacccttaactacccgacctatgataatgagctctatgccttaatgagag

SEQ ID NO: 2006 - DNA, 443 bp, Glycine max
  unsure at all n locations
acaacatatttcttaaaccatcggatcaatgagagcnactcatgggtgtggagagtcaaccttcatgggcttcctgtaggaattatagtataacatcatctgaaatgtagctacatataggttcaaacaatgtaactaaataaattagtagtgagtacattataattgtaggaaaatggttagtatatagatattatatgtaccctaacaggttttttaaaacctccttgcaaactacactcgtggtagaggtcaagctttttttgtctttatcatgtattaaaacctttaatccattctttgatttgactctcgatagtgcaacatataattgaccatgactaaacaatggggtttatgcaagtaaagttcaacactatatcatgactggcctggagacttattaattgtcattgcataagagagcattattggaaatagtc

SEQ ID NO: 2007 - DNA, 459 bp, Glycine max
tcccgttgcccgagtcgacccggcccgagttgggctggttgagtgttaactccagcgtttcaagtctcgggtcgctctggtaagcgaaaaacgggtacgggttgatcgtgaacggcgatttgttgtccttgagtatcgccagcagctgtttgagcgtgtcttgcatcgcctggttgaacaacccggacgagggcgggtccgactgagtcaacacgggcatctgagtgcactgtggagaccttgatcttgccgtcgagcgaagccgcgccgagggcattttggacatttagcatcttcgggactagctgcgacttaataccctgatcggataatgtcaaaatctcttttccgacggtgatcatagtgatgttgctcgccaggtagtaaggcaagacgttctcgataacccactgtgtggccgctgtgggatcgcctgcgagactcgctatgtctccgttg

SEQ ID NO: 2008 - DNA, 145 bp, Glycine max
tatatcaatacgctcgaaattaacagcggaagctctctcgatattcatatagtcataactattcacacggatgtccgggtctggcgcttaatatgtcgagaggctcgaaattgaacaacggaagctcttgagaaatgcaactggt

SEQ ID NO: 2009 - DNA, 492 bp, Glycine max
  unsure at all n locations
gatggcctcagcanattccttatttccagaagggaattctatcaatagacctccaatctttaatggagagggttaccactactggaaaacccgaatgcaaatttttattgaggcaatagatctaaatatctgggaagccatagaaatagggccttatatacccaccacagtagaaagagtttcaatagatggtagttcatcaagtgaaagcataactatataaaaacctagagatagatggtctgaagaggatagaagacgagtacaatacaacttataagccaaaaacataataacatctgccctgtgaatggatgaatatttcagggtttcaaattgtaagagtgctaagaaaatgtgggacactcttcgattaacacatgaaggaactgcagatgttaaaagatctacgataaatgcactaactcatgagtatgaattatttagaatgaatgcaaatganaatattcaaagcatgcacaagagatttac

SEQ ID NO: 2010 - DNA, 414 bp, Glycine max
  unsure at all n locations
caattactgtgtaaatttcatagttgccaatcattgtcttctctatatctcttatgaacaacacgagtgcaccacttttactctgatattagacaacctataacagagacgggtgtttaatatttctctatgaatagagacaactattggacaagtatggaactggggcaacctcaaagatttcattaattgcaactttgtcaagatcatcctctccagagccgtctactcgtagtaaatgatntgctgcattatgaatcatcaatgaattatacgtgccacaattatagcatacaatgtattaatatgcagcttaagaaacaaaagttcaatctaatacagcgaattaccagaacagaagaacccacggtcatcttcacaaatgccaccaagatcattgccatctggaattga

SEQ ID NO: 2011 - DNA, 311 bp, Glycine max
agcttgaaggacaaaaggaactcatttcactcatttgctcattacaaagatagtatggttaaactttagagagatctagagtcgtgcttagacggtagtgacagggagaagcactttctcaccttaaggaagatatcaacagctctatagagcccatcactcacaatacgtgcatgatctggaagtagttcagcaagggatatgaactctgatggcaacaagtttgggtctagtgccacttcagcaagatagttgcccattaatgtggatacctttagaatagacctttgtttgggagatccggggctgtc

SEQ ID NO: 2012 - DNA, 490 bp, Glycine max
  unsure at all n locations
tctntccctaacctgtggcataggcaacacagaaatgatgtctatgatgaagtaacgttntaaatatctcttggcaatctttctaggatctataacaagttcacctcgtccaaatacccgagatgaaggcgcaatgtaggcggtgcggaattgaaaacttatgcggaggagataaatgaaatcacatattgttctcattgtgacagcaaaacttgctaggctgttatctatggcgaggcaaaatgatttgtggttgaaataaggaaggtaaaagaagaagggatcgcatgctatagaaacaatgcacagaatctcaaaaaacttgttccaataaagaaggttcttatcttgaggatcaaatactttnttctcagacactttaagatcttctgggaacactgcccaagtagtcactccagtctttagtgatcttccanatgtctttagtccatctgaactcttcttcattcctagcctaaatgatttcgat

SEQ ID NO: 2013 - DNA, 447 bp, Glycine max
  unsure at all n locations
agcttgaagattntcaatctttcatttatgaaatataaatcacatccttcaaaagctcctgtaaattaaaagagaagccccatatacttctaaagcgggagaagaaattttttataatttataataaaaagcaaaatcagactgatgcaaagccaggtgaataagaaaaaacatatgaaataagtacagcttgatttgatgttaaagaatatagtcataagcccaagaagtgaagatgatctttccaacaatagccaataaattcggcaagagaagcaaaacataccccagagaccttcacgaattgcccattttttgcagttctaagctcagagtctggataatgagtaacaaagcccataatagatcttcttccccaataagtattccaagtgaaagatgcagcaactaagccaaaaagaatcacaactacaataaggagaatag

SEQ ID NO: 2014 - DNA, 422 bp, Glycine max
  unsure at all n locations
cggaagctgacgcganactaanatggtcattacatttcacacggaagtccgattcaggcgcataatatatcgagacgctcgatattgaacaacgtatggtgtcgataaattcatatggtcataacttgtcatacggatgtccgattcaggcacataatatatccagatgctctaaactgaacatcgacagctctcgagaaattacaatggtcataactattcacacggaagtccgattcatgcgcataatatatcgagacgctcgaaattgaacaacggaagctctcgagaaactcatatggtcataacttatcacacggacgtccgattcaggcgcttaatatatcgagacgctcgaaattgaacaacgtatggtgtcgagaaattcaaatggtcataacttgtcacacggatgtccgatt

SEQ ID NO: 2015 - DNA, 175 bp, Glycine max
gcttgaaattgaacaatggaagctgtcgagaaattcaaatggtcatatcttgtcacacagaagttcgatttcagcgcacactatatcgagacgctcgaaattgaacaacggaagctttcgagaaattcaaatggtcataacctattaaacggaagaccgaatgccgcgcataata

SEQ ID NO: 2016 - DNA, 456 bp, Glycine max
  unsure at all n locations
agctgttaactgaatntacaacgttccaattgatttcaaaatggtgtaatctgattacaacatattggtaatcaattactagtgcatctgaacgatgcacttcaagacattgtgaagagtcacatcctttcataaaaagcgttgagtaattgactacaaggatttggtaatcgattactactgacaagttttgaacacaagatcaaaacatgacacctcttcaagtggtttcttgaccagacttgaagagtctatagaagcaataccttgattggcatttgaagagcacttacaacacttacaacctttacaaacaactactcgacatgatctataacaaccttcgaatctcttcgaacatcttacacttcttcttattattcttttgcaaaagctatctaaagtattctggttttccaaaccttgaaaacagaagtgtgctatatctcttattct

SEQ ID NO: 2017 - DNA, 446 bp, Glycine max
agcttaactggttgaagctttcagaaacatgtatctcatgaggtgacataaattaaattatttatatcaatattattgaagatacacgtttatgagcataaacaatcaatctaaaaattataataattttattgaaaaataaacttatcttatttaaatgactttttgcacaattttaataagttatcaagaatatcacagtaaaccttaaaatgttcattatattatataaataaattagattttgtttttatctctattttgatattaaaaaaatatcacaagttaagtctttaatcttaaaaaaaaacttttgatgagtaagacctaaattcggtctatttctcctcctattcacatctatagaagatagtggttcaaaataatcagaaagatgctattcagcttatttttacctctttagagtatgtctctatcgtgttagt

SEQ ID NO: 2018 - DNA, 481 bp, Glycine max
  unsure at all n locations
gtgaagctcctgtttagctatacccgattntactcaaccattcgtagttgaatgtgatgctagtggagttggcattgtggctgntttgatacaaaacaaaacgcctatagcttatttctcggagaaattgggaggagccagattgaactattgcacctatgacaaagagttctatgccattgtaagagctcttgatcattggaatcattatntgcgttctaatcactttatattgcattcagatcatgagtcattgaagtatatcaatgggcagcagaagttgagtccaaggcatgctaaatgggttgaatntcttcaatcttttaatttctcttcaaaatacaaggatggtaagagtaatgtggtggctgatgcactttcaaggaggtatgctttaatatcaattcttgaaactcgtttacttggttatgagactttgatagattattataaagaagatgttgattctcgtgaaatatac

SEQ ID NO: 2019 - DNA, 453 bp, Glycine max
agcttcttagtttcagatgatgcagctgagtctgtagctacctcatgcactcctctaatgactatagcatcatttctggtgctaaactgttgggagttggaagccatcttctcaattaaatttctggcttcagcaggagtcatgtctccaagggctccaccactggcagcatttatcatacttctctccatattactgagtccttcataaaaatattggagaagcagctgctctgaaatctgatggtgagggcaactggcacatagttttttaaatctctcccggtattcatacaggctctctccactgagttgtctaatacctgagatatccttcctgatggctgtggtcctagaagcagggaaatatttttctaagaatactctcttcaggtcatcctagctcgtgatggaccttggagcaaggtaatacagccagtcctttgccactccc

SEQ ID NO: 2020 - DNA, 392 bp, Glycine max
  unsure at all n locations
ntctctntgaagttntgtatgatattcctttcatacaaaatttcatactttgcaacgganaaacataattaatgccaaaagtatactatcgaaacatgtaattgaaaatacatgtaatagaaattaaaatccctaaatttcataattaggatttatacataattgagagaaattaaatcatccctagatttaataattagggttcatacataattggaagaaattaaatcattcttggagaatcataaatttcataacacatgttttgatatcacatgtaaaacattaagggggttcttagactatcaattataggaaacaacatgatcttaaaacatatgattctcacatacaatcaataaacaatagataatggtgcatacctttcttca

SEQ ID NO: 2021 - DNA, 455 bp, Glycine max
tgtagttaagaccgcagacaacttctgttcatgtttgaagcttgatagaaacacagatgttagctatagtaatatgaggaaggctgcttctcgagaagatttgactgacaactatttatactgtcctaaagctgtagatcttcagtacaaggatttaaggcattttcagtggcattgggaaaagggggagcctgtcattgtcagcaatgtgcttgaatgtacatctggtttaagctgggaaccacttgtcatgtggcgtgcattacgtcatgtaactaataccaagcgtggccaacatttggctgagaaaacaattgattgcttagattggactgagggttgcttaatttcccaatctttaactttattgaccttggagagctctttacacaaattttattcttcaccttcattctcatgaagattatgtctaattgtttaatgttggtacttat

SEQ ID NO: 2022 - DNA, 462 bp, Glycine max
  unsure at all n locations
caagcttgcttcttcacaaaggtagtgctcatgcctttnttntggaataatgtggtttacactcttaaagtcatggctccacttgtgaaagtgcttcatcttgtggatggtgaaaggaaactagccatgggctatatttatgaagcaatggacaaggcaaaagaaacaattatcaagtctttcaacaacaatgaaagcaagtacaaagatgtgtttgcaatcattgataaaagatggaattgtcagcttcatagaccattgcatgcagctgcccacttcttaaatctagagtgcttttatgacaacactgacttggagtttgattttgaggtcaccaatggtttgtttgagtgcattaagaagttttgatttagaggtcaccaacttgggacaaaatagaatgctgacctatctaggagggcttaatggaatgttaatcacaaaatccaatctagcttttat

SEQ ID NO: 2023 - DNA, 431 bp, Glycine max
  unsure at all n locations
tactcagctanacattcaatttcgagcgtctccatatattacgcgactcaatcagacatctgagtaaaaagttattgtcgnttgaattggctcagaggttcaacattcaattttgagcatctcgatatattacgggactcaatcagacatccgagtaaaaagttattgtcgtttgaaatggctcagagctttaacattcaatttcgagcgtctcgatatattacgggactcaatcagacatccgagtaaaaagatattgtcgttngaattggctcagaggttcaacatataatttggagcgtctcgatatattacgggactcaatcagacatccgagtaaaaagttattgtcgtgtgaattggctcataggttgaacacttcaattcgagcgtctcgatatattacgggactcaatcagacatccgagtaa

SEQ ID NO: 2024 - DNA, 371 bp, Glycine max
  unsure at all n locations
ctgcggcatgcaagctntaagccaattcatacgacaataactgtttactcggatgtctgattgagtcccgtaatataacgaaacgctcgaaattgaatgttgaagctctgagccaattctaacgacaataactttttactcggatgtccgattgagtctcgtaatatatcgacacgctcgaaattgaatgttgaagctctgagcctattcaaacaacaataactttttactctgatgtccgattgagtgacgtaatatatcgggacgctcgaaattgaatgttgaacctctgagccaactcaaacgacaataactttttactcggatgtttgagtgagtcccgtattatatcgagacgctcaaaattgatt

SEQ ID NO: 2025 - DNA, 462 bp, Glycine max
  unsure at all n locations
agcttccgagaatcaacatcaagattcaagaatctagagaagacttattctatataagtattaaaaagttttttcaaaaactgagtagcacatagattcttaacaaaaccttttaccacagggtttttactctctggtaatcgattaccagattattgtaatcgattaccagtagcaaaattctgttcaaaaagctgtcaactgaacttacaatgttccaattgatttcaaaatgttgtaattgattacaatgttctggtaatcgattaccattgtgtttgaacgttgaaattcaaattcgaatgtgaagagtcacatcctttcacgaaaatgctttgtgtaatcgattacactgatttggtaatcgattaccagtgataggttctgagcaaatcagaagatgtaactcttcacatagttattgactctttcacattggtttaagttnttctaaacgtcata

SEQ ID NO: 2026 - DNA, 427 bp, Glycine max
  unsure at all n locations
gctctctctgtcaatgttaggttcatatgctcaactacaccattgagttgaggtgttcctggcatggtcctctcccttctaatattgtgctcatagaaaaactttctaaatctgtctacatattcaccaccattgtcagttctgtgccttatgatctccaatcctgtctcattttcagccatggctttccatatcttaaaagccacaaatacttctaacttgtattttagaaagtaaactcataccttcctagagtgatcatctataaaactcataaagtattgtttgccaccaatggatgacacatatgttggtgtacacaaacatcagagtgaacaagctcaagtntttccttctttagggttctgctatctgtctaaaagctgactctnttctgattgccaaatatgcagtcttcacacatgta

SEQ ID NO: 2027 - DNA, 473 bp, Glycine max
cttttcttcttcactggttaagcagtttacaacatttaccaaagctctttccagcgaagtctgtggagttgcaagagcgctaatgttttccttgtcaacttcctccaccttgaagcacttcctgttctcctctagatattttattgcttcaaacaggttgaaggtcaccttctgaatgtcaatgctcatctccagatttccattccccatgtccaccacacagttggcagtcaacatgaagggtctacctaagataaaaggaatctccgtgtcttcttcgatatccatgatgacaaagtccactaaaaaggtgaagtggcagaccttgactaggacttcttctaccaccccatacggtcttgtgattgagcggtctgctagctgaagcgtcatcctagtagggtctatcttcagattaccaattcttctgcacattgataggggcatcaggttgatgctcgcccctaagtcaa

SEQ ID NO: 2028 - DNA, 346 bp, Glycine max
  unsure at all n locations
agcttctacttncatggcttattctctagtggatggcgcctcctctcacctcttctcctttatctttcattgaaactccatgactgaaaaccaccattgaaagagcttattgaagctcaaagatccaacctccatagaagcttctcaagcaagcttccatcacttaggctataaacagaggccttgtgtgtgcaatttttcaactttgatcatttgagaaattacacttcaaggtttacaactcatatgaggcataaattgggtgccccttctatacctgtccatccactcataatctgcttcctttaagctcttatcgatggcttactatggtggtgagcttgta

SEQ ID NO: 2029 - DNA, 459 bp, Glycine max
  unsure at all n locations
agctntattntaatctttagttacactccagatatgcagtatgtaagaattaatgtctcatgtgagagacatttgacttatgtaaggactaataagtaaataattaacgattaagagctaaattgtaattgggcttaataggagaagtttctaggattaactgctacttgatgggagtagtggttataaaaggggcttaatacccactaacgtgaaataaggtccccttcctgaccagaaaagtgttctctctcactcatagccatcactaacggagagaggcagaaaagaaaggccaaaggaagtgaaatcttatttctctcatctttcaaggaaatcaaagtaacggagagaagttcctatggagaaaggtacaagtcttcctatggagaaaggtacacatcattatctattggtgtttattgattgtntgtgagaaccatatgtttcaagatcctg

SEQ ID NO: 2030 - DNA, 443 bp, Glycine max
  unsure at all n locations
agctggatgctaattatgtcttctggaaccaacactgaagcatcttcttcactccattntccatcacgaagtacctgctaaggtaaattagattagatgtcaaatgaaatggaaacaagacagtataacaaagtcattggaaaaggaaaacttaaacatgcaatagtgatgtaagtagctactgttaaatcagtgaagaggggaataacctttgctttgggggctaatctggccataagggcagcagctgcattgccagcattgttttcttctatgaaactgatggtggagtttataagtagcaaaagaactatgccagcaaaatcttgataatctccaccttcaccctgcagaagtttgagttattatattaaatataatggattgtaaattgtaacatcactgttttcagacagtaaaaattgactgaccgataatgaaac

SEQ ID NO: 2031 - DNA, 493 bp, Glycine max
  unsure at all n locations
atcctctaactcacctgcggcatgcaagcttcatggtcttctccttgtagaatttggaattctcataggcttctaaacgaatctcatctagctcacttagttacaacttcctttcctctctagcctgatccatagagaagttgtaggtttttacagcctagtaggctttgtgctctatctctacaggaagatgacatgccttgctaaagacaacccgataaggtgacattcctatgggtgctntgtaggcagtcctatgcgcccaaagagcatcatccatcctggtgctccaatcatttctgttcggctgcacaatcttctccaagatctttnttatctccctgtttgaaatctcagcctacccattagtttgggggtggtaaggtgtggaaattctgtgcacgaccccatactttntgagcaaggcatacatggacctattacaaaaatggtgccttgatcactaacgatggctctcgggactccaaacctg

SEQ ID NO: 2032 - DNA, 399 bp, Glycine max
  unsure at all n locations
tcaagcttaggactcattctntaactgccaacagagagagatgcagttttgctaagcccagactagagtatcttggccacatcatttgtggttttggggtggcagcaaataaatccaaggtggcagcaatgagttcctggccagttcctaaagattcgaagagtttgaacgggttctagtacagatgcaaaaaatatataaggtttattctagaatgaataaaagagggcttggatttacttagttgagccggttggtggttaacattttacgcgaatattacatgatacaacaatatttaacatgcgctatcattaatgtcatatgacgcatgcagagttctgagtggaacaccgagtgtaacatataagatgtggggtatctttaaggttttaaaaa

SEQ ID NO: 2033 - DNA, 295 bp, Glycine max
  unsure at all n locations
gagtgaagatgagaagaagaagcttgaatagttgaatgtagaagttgacaacctctgcaaggtgatcaaggatgttttgggtgacaaggttgagaaagttgtggtctctgaccgcgttgtaaattcaccatgctgtcttgtgactggcgaataccgctggaccgcacacatggaaaggataatgaaggcccaagctctaatggacaacagcatggcagggtacatgtcaagcangaagaccatggagatcaaccctgagaacccaatcatggaggagctcacgaagcgtgctgat

SEQ ID NO: 2034 - DNA, 207 bp, Glycine max
ccggatccttaagtcacctgcggctgcagcttaacatcagaccacttacagggtgctggttctacttcacatggacttgatggggcctatgcaagttgaaagccttggaggaaagaggtatgcctatgtggtggtggttgatttctccagatttacctgtgtcagctgtatcagagagaaaacagacacctttgaagtattcaaaga

SEQ ID NO: 2035 - DNA, 509 bp, Glycine max
  unsure at all n locations
tactaagcttgaggtangagaagatgagtggagggagagggagagaaggtgtgctcatatttatgccttaaatgaggtctgaaattcgaagtctaatttctcaaatgattaaaggtgaaaaaatgcacacacaatacctctatttatagcctaagtatcacacacaattggagggaaatttgaatttgtattcaaatttcactggaatttgaatatgaattggtggagccaaattttcactaattatgattagtgaattgtggttatggttcaacccactaatccaagatcaagttcaagattctccactaagtgtgcttaggtgtcacgagacatgttaaacatgaaggacatgcacaaagagtgactgtatgatgtgacaatgtggtgtatcaagaaaatgctcatttcccccttataatggtccaaaatttaattggattgcgcttctcccaatttaattaaatntatcctccaatacacacacatcagatagtgcacttaatgcg

SEQ ID NO: 2036 - DNA, 459 bp, Glycine max
agcttgtccttgactcatcttttccttgaagtgacatctctaatgatctttcttccttctccattctcctgtcattgatcttcaagaaacaaaggacttcattgatgaagaagatccaaggcctacaagctccacatggagctacatcaaggaggaagcacactatgatattgatttacattcttataataatgctatcccttttaatgttgccaacaatgcaaagtttaagaagatgcttgatacagtttcctagcatggtccaggatctgtccctttatcatacaatgatattaggatgaaggagaaaactcatctttctttgaagaatcatatagcttattggaagacatctagatgtgctataatgacacatggatgaaccgatacgaggaagacgatgacctatttactaattttggtaaattatccacttggaactatgttttgaagtctgta

SEQ ID NO: 2037 - DNA, 418 bp, Glycine max
  unsure at all n locations
ggatcttatagaactccttcttcttacggtgcttcatattttcttaccattgtcaatgattgctcacctgcagtttgggcttttttgttgattgataagaaagaagtatcacgggcacttacaaatttttttgctattgcagaaaggcaatataaaaaaatggttaaaactatgagaagtaataatggaacagaattcatttgcatgaaaaaatattttcatgagcgtgggatagttttccaaccttcttgtataggaacaccttagcaaaatggcagggtcaaaagaaagcatcggcatatcctcaatgtggtgcgagctttgtgatttcaaagaagtttacccattgaattttggggcgaatgtgngtngacaacatgatacttgattaatcgtactccaagctcagtcttaaaag

SEQ ID NO: 2038 - DNA, 311 bp, Glycine max
ttcgagtgtctcgatatattacttgactcaatcagacatccgagttaaaagttattgtcgtttgaaattgctacgagcttccgttatcaattgcgagcgtctagatatactaacggacacaatcgtacatccgacaacaaagataatgtcgtttgaattcgctcagagcttgcgttttatatttctgagcgtctcgatatactacaggactcaatcggacatccgagtaaaaagttattatcgttggaattttctaggagcttctatctttaatttggagcacctcgatgaattgccggactcaatccgac

SEQ ID NO: 2039 - DNA, 445 bp, Glycine max
  unsure at all n locations
agcttgctatccnctccaagaaaaggattaaaatttcctcatccgattctgatgatgatgtcgaactagatgtctcgacatctaagagggccaagaaatctggaagaaaggtgcctggaaatgttcctgatgcaccattggacaacatctctttccactccattggcaatgttgaaaagtggaaatatgtgtatcaacgcatacttgcggttgaaagagaactgggaagagatgccttggattgcaaggagatcatggacctcatcaaggctgctggactgctgaagactgtcagcaagttgggagattgctatgaaggcttactcagggaattcattgtcaacattccttctgacataactaacagaaaaagtgatgattatcaaagagtgtttgtcagaggaaaatgtgttagatactcccctgctgtgatcaacanatatct

SEQ ID NO: 2040 - DNA, 438 bp, Glycine max
  unsure at all n locations
cgtctcgacccggatacttaagtcacctgacgctgcagctttgcaactttataaanaattgtttcttatttgacattagttctatattaaaattaacttttcatatgtttcaatgtgaaatatatagttgaaaccataaaggtatcacatgtgatatatatatgagttactttttaactatgcacatttttttacttaaagtaaaatagtgtgatatttcatatatctttaattgatatacttcacgattaagagaagaaacacgatgattaatatgataacgaatgtgataaaaagagatgaatgtgttcaattaggtttcatatgaatataaaattggaaacttaacatagttgacataaatacgattattaaatagtgaattctatagcatataatcagatgatggtgggaacttattatacacagataatatat

SEQ ID NO: 2041 - DNA, 409 bp, Glycine max
atttcgagcgtctggatatattacgggactcaatcaaacatacgagaaaaatgttattgtcgcttgaatttgctctcagcttcaacattcaatttcgagcgtcccgatatattacgagactcaatcagacatccgagtaaaaagatattgtcatttgatttggcacagagcttcaacattcaagttcgagcgtctcgatatatgacggaactcaatcagacatccgagtaaaaagttattgtcgtttgaatttgctcagaggttcaacattcaatttcgagcgtctcgatatattatgggactcaatcagacatccgagtaaaacgttattgtcgttagaattgtctcataggttcaacattcaatctcgagcggctcgatatattacgggactcattcacacatccga

SEQ ID NO: 2042 - DNA, 393 bp, Glycine max
  unsure at all n locations
gagtntggagtgcacattgtagttactaagatgtggagagacatgaaagaagcaaagccactagtggaagggaatgagaggaaacaatatgccaaagtatttgattatgcacatgaattgttgaggagcattcctggatcaacagttaagatcaacacagtgccaagtccaggaggtccaccataatttcagaggctatatatttgtcttgttggctgtaagaaagggtttgttgctggatgtagaccattcacaggtctagatggatgtttcctaaagagtgcatttggaggaaacttgctctctgttgttgggcttgatggcaataaccacatctttgttatttgctatgctgttgtggacatcgagaacaaagacaattggaaatggttt

SEQ ID NO: 2043 - DNA, 296 bp, Glycine max
atgttgttagtcgtcatctggatgtcgagagtgttatcttgttggattctgagaagaagatcaataaaatcttggtcctctaattcagctccatcttcttttgcaatattgttcttttcttgatgctctctgatgatgttttccaggaccttgtcaacctgcttgtgcaacttcttcaatctggtcatgtttccagttaggaaatataacaatggaattgaaggaaagacatcagcaatgtcgaatccttccccggattctacgattcttcggatcaaagacacaacaaactcatc

SEQ ID NO: 2044 - DNA, 363 bp, Glycine max
  unsure at all n locations
tgtaatcgattacacacatactgtaatcgattaccagaggagtttttcagataacattctcaacagtcacatctttttatctgtttcttaaatggccatcaaaggcttatatatatgtgacttgagacacgaatttaacaagagttttcaagaacaaaaaggtcttatcctcttaaaaagaaaaatagttntatcctcttacaaattccttggccaatacacttgtgattcaataaggaattatttgagcgctcaaattgttgaatctatctcttccaagagagatttcttcttctcttcttctttattctgaanagggattaagagaccgagggtctcttgttgtgaaagaattctaaacac

SEQ ID NO: 2045 - DNA, 413 bp, Glycine max
  unsure at all n locations
gcttttggaggtctattngcataatacacctaggggttcttccctttatagtataccccttcatcaactcagttgcaatgagaatatgattgtgaacgacttgaccgggcacaaaagctgcttggctagtatgaacaatatcctgaatcacactccctagcctcctagtcaaaaaatattatatcactctataaaaagtagagcaacctgcaataggcctgtaatccttgacagtcttagcagtaatagatttaggaatgagtgtcacaagagtactattaaaaacctttaatagagttcctttctcgaaaaattcattcattgcagcaataaaatctttctttactatatgccagctatttttgaagaattgtgccctataaccatctatgccaggtgctttcatatcacca

SEQ ID NO: 2046 - DNA, 315 bp, Glycine max
  unsure at all n locations
gcttgcttctcataagaggcatgctaagtgggtagagnttctacttctatcttcatatgccatcaaacataaaaaggggaatgggaatgtaatggctgatgctgtgtctaagatacatgctttacttgctatgcttgagactaaactgtttggtctcgagtctttgaaagtcatgtataatcatgaggtggactttgctgaaatttttgctgcatgtgataagttttctgaaactggtactataggcataatggagttttgttaaagcaaataaatttgtgtgcctaagtggtccattaaagagttgcttgtgag

SEQ ID NO: 2047 - DNA, 338 bp, Glycine max
ttcgagtgtctcgatatattatgttctctgtatcggacctccgaatgaaaagtgatgaccatttgaatttcttgagagctacctttgttcaatatcgtgcgtctcgatatattatgcgcctgaatcggacctccgagtgaaaagctatgaccatttgaatttctcgagagcttccgatgctcaatttcgagcgtcttgatatattatgcgcctgaatctgacctccgtgtgaaaagttatgaccattttaatttttcgagagcttccgttgatcaatctcgagcgtctctgactatgatgcgcctaaatcgacatccgagcgaaaagtatgaccattg

SEQ ID NO: 2048 - DNA, 307 bp, Glycine max
tctcgatatgttatgcgtctgaatcggacatgcgagtgaaatatttgaccatttttatattccgagagcttccgttgttcaatttctagcatctcgatacgctatgtgcctgaatcggacatgcgagtgaaaaggtatgaccatttgaatttctcgagagcttgcgctgttaaaattctagcgtcttgatacgctatgcgcctgcatcgaacatgcgagtgaaaagttatgaccatattaatttctcgagagatttcgttggtcaatttcgagcgtctcgatatgttatgtgcctgaatcggacatg

SEQ ID NO: 2049 - DNA, 451 bp, Glycine max
  unsure at all n locations
actaagcttctacattcaatntggagctgttcgatatattacgggactcaatcggacttccgagttaaaagntattgtaggttgaatttgctcagggcttcggtattccatttgagcgtctcgatatattacgggactcaatcggacatccgagtaaaaagctattgctggtagaatttgctcagagcttccggattccatttcgagcagtctcgatatattacgggactcaatcagacatccgagtaaaaagttattgtggtttgaatttgctcagggcttctgtattccatgtcgagcgtctcgatgtattacgggactcaatcagacatccggagtaaaagttattggtcggtgaattagctcagagcttctgcattcaatttcgagcgtttcgatatattacgggactcaatcagacatccgagtaaaaagttatatgtcgttgaat

SEQ ID NO: 2050 - DNA, 413 bp, Glycine max
taaggagggaattccaggggtggaacatgctctattcaaagcatgattggtgggacgaagtttcacacaatgtgagggaattgactacaattaagtgtttttacctgttgtgaaaaacacttcaatcaaaatggttttggccttagttgcacaagaagacatggaattggaacaacttgatgtaaggatagctttcttacatattgagcttgaagaagaaacctacatgactcaagcagaaggttttgtcaaaatatgtgaagaaagaaaggtatgcttgctaaaaatgtccctttatggccttaagcattaataaaatggcttaaaaaggtatgagtatgactggtgtgtctacttgaagaatattgagcatgatgttattgtctacttactgctctatgtaaatgatatgc

SEQ ID NO: 2051 - DNA, 389 bp, Glycine max
  unsure at all n locations
atatatgtatgtgngtntatgtagcatgataccttggatatgcatgtatataacagagatacctcacaaaatatatatatgtatgtttaggtagcaagataccttggatatgcatgtatatagcaaaaatatctcacaaaacatatatatgtatgtttaggtagcaagataccttggatatgcatgtatatagcaaaaatatctcacaacatatatatatgtatgtttaggtagcaagataccttggacacacatgtatatagcaaaatacctcacaaaaatatacatatgtgtaggtagcaaaatacctcatggaaaaagaaaaagagataaataagaaaaaaaataattattagttgtctagctaaaaaaacaacatgctttgtgaa

SEQ ID NO: 2052 - DNA, 430 bp, Glycine max
  unsure at all n locations
ttatttaattnggacgaatctgcaccgtttaacatgactcttattaaaaagtagtagcatcaacatcaaattacattcaaaatttcaaatagtaatagtattatttatgtaagttttttttttctcactcagaatcacatgtatttcttactttttctcactcagaaaattgacctaataatcaatggcgtatccagaaagtttttccagtgggagcaaaaaatagtctaatattttttcaaataaaaaattatataagtttttctaaaaatggtaataaaaaattaaaaactataaaatttaaaaggataaagtgattgctcattaaagaatttggctagacagcagaatgacgtgattgctcattaaagaaatatcattccttcccttagaattttaattatcattaaaaatanataaagatagactc

SEQ ID NO: 2053 - DNA, 429 bp, Glycine max
ccttctattacggacctatgaaactaagcttttttctttttatctaagcagattagaaatgttcacctaattaatttaaatttaatcacttgataatatattaaaattaatttatctgttttttacgttgaaattaatttatgtgtttgtttctatctttctcatgtaaattaaaatttgactccaaattgtttgtgcttttaattggccaatattagttttgtgttttaaatagtttttaattggtcaatgttgttagttttaatttattgttgtaattaataattaaatgcaaatatttgtatttaaatttggatttattattaattgtacttagatattagttgttctgtaattattttttatataacattgataaattattcatactcatattagttgtacttaatagtgattattcatacttaa

SEQ ID NO: 2054 - DNA, 394 bp, Glycine max
  unsure at all n locations
gggaagaagtgtacatggagattccacctggatatggtgccactaatggaggaaataaagtttgcagactaaagaaggtcctatacagtcttaagcagtcttctcgggcttggtttggtaagttcactcaagttatggtatctttggggtacaagcaaagccaaggtgaccatactcactttataaaacactcccaagatggaaaacttactttgctcttggtctatgtcgatgatataattattgcaggcgatgatgaacttgaaaaataaaacttaagggagaggttagctgcccaatttgagatgaaggatctcgggaagctaaagtacttcctcgagatagaggttgcacactctangcaagggatcttcatttctcagaanatatatac

SEQ ID NO: 2055 - DNA, 391 bp, Glycine max
  unsure at all n locations
tgtgcatccaataccatgatgaggatgtcccatatgttcttaatactggactgatccatttgcttccaaagtttcatggccttgcagatgaagacccgcacaaacatatgaaagaatttcatattgtctgctccaccatgaaacccccagatatccaagaggatcacatatttctgaaggcttttcctcattctttatagggagtggcaaaggactggatgtattaccttgctccaaggtccatcacgagctgggatgaccttaagagagtattcttagaaaaaaatttccctgcttccaggaccacaaccatcangaatgatatctcaggtattagacaactcagtggagagagcctgtatgaatactgtgagagaattaaanactatgt

SEQ ID NO: 2056 - DNA, 284 bp, Glycine max
gacactctgagtaaaaaagttattatcgtttgaatttgctgagagcttcaacattcaatctcgagcgtctcgatgtattacgggacttaatcatacattcgaataaaaagttatcgtcgcttgaatttggtcagagcttccacattcagtttatagcgtctcgatatattacgggactcaatcagacatccgagtaataagttattgtcgttcgaaaattcttagagcttcggtattctatttctgagcgtctttgattattacgggacttatcagacatccga

SEQ ID NO: 2057 - DNA, 336 bp, Glycine max
  unsure at all n locations
agcttgccttgccccttgatatattagagggactcatggtcactatgaatgacaaattccttgggataaaggtagtgttgccatgttttcaaagcccgtactaaggcatacaactccttatcataagttgaatagttaagggtaggaccacttaacttttcactaaaataagcaattggatggccttcttgcatcaacacagccccaatcccaacatttgaagcatcacactcaatttcaaaagatttttgaaagtgtggcaacgcaagtatggnggcattagttagctnttgcttaagaacattgaaagcttcttcttgtttctctccccatttg

SEQ ID NO: 2058 - DNA, 450 bp, Glycine max
  unsure at all n locations
agcttaccttgctcggcgggctcttgattacttgattgggtttaacatttcaccattactatggaggaagttaccaggttgccaatcagctggaagagttcaatctgctgcactttctcttatatgtgatagagaaatggaaattgatgaatttaaaccgaaggagtattggactgtggaggttcaaatgaaaaagaaagagctgagatcaaacaagaaccttacttttcctgctcacttgacccattttgattcaaaaaagttgaataagttttcaattacttctgataccgaggcaagagatattcgaagcaatataaactcagctgattttcatgttgttagcttgaaaaanaacaaaagtcgaagaaatcctccaacaccttatataacatcgacacttcagcaagatgctgcaaacaagttgcatttcactgcaagtcacacaat

SEQ ID NO: 2059 - DNA, 217 bp, Glycine max
agcttatcttatggatgcttgcgatatggctacttattataattccaagcaacttctgggcagtggaagtaaccgtgtttgtcaagcaaggcacaacaatggaaaggaacctgggccagaacttgcatataccaacagccctcctatggaactttgtggaggacaccattctcatttgtctccccatttacgaacgttactatgcaccattcatgcg

SEQ ID NO: 2060 - DNA, 315 bp, Glycine max
  unsure at all n locations
agcttgtaatctattacacacatactgtaatcgattaccataggagttnttcacaaaacattctcaacagtcacatctttatatctgattcttaagtggccatcaaaggcttatatatatgtgactagagacactaattttatcataagttttcagatcaaaaaggtctaatcctcttaaaaagaaaaatccttttatcctcataccaattccttggccagaacactggtgactcaataaagaattatttgagtgctcaaattgttcaatctatctcttttaacagagatttcttcttttcttcctctcattctg

SEQ ID NO: 2061 - DNA, 441 bp, Glycine max
  unsure at all n locations
agcttccttatgaagatntcctaaaaagctagagcttagttacacatacctctctaatggctaagctcaccttcttgagatgagaagctagagcttagctacacacctcctataatagctaagctgaccccatgaaaatacaaaaaaaaatccctactacaaagactacttaaaatgcctcgaaatacaaggctaaaaccctatactactagaatggccaaaatacaaggcccaaacgaaggaaaaacctattctaatatttacaaagataagctggctcatacttagcccatggactcgaaatctaccctaaggctcatgagaaccctagggcattcccttgaatctctggcccaatttacttggagtcttctatccaatgcccttgcggggtaggatggcatcacaagtaccctccacttgaactgatccacaagagat

SEQ ID NO: 2062 - DNA, 239 bp, Glycine max
agcttcaacatcagaccacttccagggtgctggatctacttcacatggatttgatggggcctatgcaagttgaaagccttggaggaaagaggtatgcctatgttggtgtggatgatttctccagatttacctgggtaaactgtatcagagagaaatcagaaacctttgaagtattcaaagagttgagtcttagacttcaaagagagaaagactgtgtcatcaagagaatcaggagtgac

SEQ ID NO: 2063 - DNA, 357 bp, Glycine max
  unsure at all n locations
agctttgagcaaattcaaacgacaataactntattatcggatgtccaattgagtcccctaatatatcaaactgctccaaattgaaaatggaagctcgtagcaaatttaaacgagaataactttttactcaaatgtgcgattgagtcacgtaatatatcgagacgctctaaattgaaaacggaagctcatagcaaatgtaaaccgtaataacttttaactcggatgtccgattgagtcctgtgatatattgagacgctcaaaattgaaaacagaagctctgcgcaaattctaacaacaataactttttactcggttgtccgattgagtactggtatatgttgagacgctcgaaattga

SEQ ID NO: 2064 - DNA, 362 bp, Glycine max
  unsure at all n locations
agctnttaactcggaggtccgattcaagcgcataatatatcgagacgctcgaaattaaccaacggaagctctcgagaaattcaaatggtcataacttttaactcggaggtccgattcatgcgcataatatatcgagacgctcgaaattgaacaacggaagctctcgagaaattcaaatgttcataacttttcacacggaggtctgattcaggcgcataatatatcgagaccctcaaaatttaacaacggaagctctcgagaaataccaatggtcataactcttcactgggatgtccgattcaggcgcataatacattgagacgctccaaattgaacaaccgaagctctccacaattcaaatg

SEQ ID NO: 2065 - DNA, 396 bp, Glycine max
  unsure at all n locations
agctntataactngngtcanagctaccaggaatgagtatactcccatcaataaactcaaatgtgttcttagcacctaaggcgcgtctcataaaacgagcccatgcatggtaattagagccatttagcacaggagtgactgttacagacgaaggtccatctcctacatgaacataatacgggctggaaggatcttgcgatggatctgcaagaccacctccatgattgttgccggaaccacctggacgagccatcagagttacgcagatatggagctagacgctctgtgataccatgttaataaatgaatataaaagcaaggaaggagacaatatggagaaatgcattgacactcaattcatggaattacatcaggctgatgcttgttatttatatga

SEQ ID NO: 2066 - DNA, 278 bp, Glycine max
  unsure at all n locations
agctntatgttcaattgccccaatgacatctattcttcacatggaanaaggccaagaggcggacatgactttcagacgatggggcagaacattgacattgttcgcatacgctcgacatatatggcatttacttacatgggtgcagcaatcgctttccataacgagccaagaataacctgctctaaggatcttcctggccatagcatgcccattggcatgtgtgccaaatgaacccccgtggacttactcaatcatgtaggtcggctctatggcatcta

SEQ ID NO: 2067 - DNA, 389 bp, Glycine max
  unsure at all n locations
agctntacattactcctcatgcttctcaccatgtctaataaggttcgatttcttcattctaccacaccattctgatccggagaaccaggcatagtgtattgggcaacaatcccatgttcttgaagaaatttcgcaaatgaacctggtgcttgtccatcctctgtgtatctaccatagtattccccacctctatctgatctcacgatcttaatttgttttccacattgtttctcaacttcagccttaaaaactttaaaggcatctaaagcttcattcttagaatgaagtaagtagagatacatatatcgtgaataatcatttataaagcttatgaagtatttctgactatttgcgtccatgtctagacaacatatgtctgtatgtatgat

SEQ ID NO: 2068 - DNA, 465 bp, Glycine max
  unsure at all n locations
agctntactaattaanaaatgtactcttctaaggcttttacttatgttgttaagagaataaggagtagaagagaaacttaaccaaacgtaaaagtggaaattaaaatgcacagcggaaagtaaaagagtagggaagaaggagacaaacacacaagagtttttaaattggttcaacaacaacccgtgcctacatccaatccccaagcgacctacggtccttgagatttctttcaaccttgtaaaaatccttttacaagcaaagatccacaagggatgtaccctcccttgttctctttgaacctagtggatctaccctccactagaactgatccacaagagatgtaccctctcttgttctcagtcaaacccaagtagatgtaccctctacttgtaccacanaggatgtatcctccaatgtgttaagacaaagatctcatgcagtcaaacctttgatactttgtgaat

SEQ ID NO: 2069 - DNA, 391 bp, Glycine max
  unsure at all n locations
gcttgcatgcttgctaagatgcattntgaagaatcataccaagaaaagtattacaatttataatctgaggcttgcacatcatgtcatgttgacatgagaagcatatataattgaacaagaaggaacataaattgtgtttattttattgaatacataccaagaataccagtataatatgaaagcggaacatcggtgtgctcaatgttgaaaagtatttgagttggggacaccaagctgaattcttcccattntgtagatccccacactaaagcacctttcttgaatctgggtgccagatttaggactattacactccataccctgtaatggctgatgtacacaacggtagagttagaccagccaaatttatgatcccaagagtatntcaaac

SEQ ID NO: 2070 - DNA, 415 bp, Glycine max
  unsure at all n locations
agctagagtatcattccaaatgtatggcttcaattacctgctaaaggcaacaggcacaattccagctctatattcagcaatttgcaagaaggcaggttcagccatatcaaagtgttgcagaggagggttgcaccaacccccattgttgttaggcaaagaacggtttggggggcagaagttagtggcagttacagtaatggagccaggtttgcaccatcttgggtcatcatcacatctcatttcatagcaagatccacagcttaagccattgttgaacaaagcagtgcttatagccacagtgtcagttccatagccctggctatacaaatttccatacccacatgctccacctgcatgtatanaatacanagcataaacatacaactcatcacttaactttcataaacacactcta

SEQ ID NO: 2071 - DNA, 421 bp, Glycine max
  unsure at all n locations
acacgttaactcgcttntgatctctatgaatctgctgcaaatcaactatcaagacgtcaacgattgcgcgagttgcttaaacaatcccaatcagctcctcttaccgaggaagaacagataataactatttatactggaacgaatggttatcttgattcattataaatgggacacgtaaggaaatttcttgttgagttacgtgcttacttaaacacgaataaacctcaattcaaagaaatcatatcttctaccaagacattcactggggaagcagaagtccttttgaaggaagctattcaagaacagatggaactctttttactacaggaacaggtagaagaaaattgattaatcgtttaataactctataatgtcactttcaaattcttatacattagatcttttaatatctctttatttc

SEQ ID NO: 2072 - DNA, 359 bp, Glycine max
agcttcctcttattagtgcacagctccttcaagaatttggcatattttggaattttctttattgcatccagcagaggtatgtttacctctacttttctgaatgtctccaagatctctttctctgcctcttccatttttttgttggaaactgctcttggagggaatggaagaggagggatgtgctgcttctgcaaattaccagtggaagattcacctgcacagaaattgttaggtaaatttttgtcatcacctttttctggagtagagtgaagtttggcagattcatttgtagatgaggaaggtgctatgggttgaggtccttgacactgctttcccgacctcaatgaaatggcactgac

SEQ ID NO: 2073 - DNA, 410 bp, Glycine max
tgcagctttgagcaattcaaatggtcataacttttttcggaggtccgattcaggcgcataatatataaagacgctcgaaatttcacaacggaagctctcgagaaattcaaatggacataacttttaactcggatgtccgatttatgcgcatcacatatagagacgctcgaaattgaacaatagaagctctcgagaaattcaaatggtcataacgtttaactcggaggtccgattcaggcgcataatatatcgagacgctcgaaattgaacaaaggaagctctcgagaaattcagatggtcataacatttaactcggatgtccaatttaggcgcataatatatcgagacgcttgaaattgaacaacggaagctctcgagaaattcaaatggacataacttttaactcggat

SEQ ID NO: 2074 - DNA, 304 bp, Glycine max
taccttgctctgcgggctctcgaatactattattgggttcaacatctcaccattattatgtgttgatgttaccatattgccaaacaactggaatagttcaatctcgctgcactttctcttatctgtgatagagaaatggatattgtagaatcttaacccgcagcaccttggactgtggacgttcaactgaaaaagatagatctgtaatcaaacaagaaccctacttttcctgctcacttgacccattttgtattcaaaaagttgaatatagtttcaattacttctgatcccgaggcaagagata

SEQ ID NO: 2075 - DNA, 338 bp, Glycine max
  unsure at all n locations
agctntggagtttccaagtgccaattcgtcttcttcttttgtccagtcttcttctggcttcaattcattagagggctttccttctgtgtccagcatcttgggatgttcccagcctttgatgacagctttccaggttctgctatccagtgatttgaggaaggccaccatccttgctttccagtattcatagttggttccatccagaattggtggtctgttcacttgtcctccttcttttctcatgttcatcagaaattatctccctagatctcactcagtgatttcgagtgcctgctctgataccaattgaaattctgatactggggacagatgtcgta

SEQ ID NO: 2076 - DNA, 398 bp, Glycine max
  unsure at all n locations
actaagctatgctgcaatattacaatagacctcctcaacctcatcagcttaatcaaccacagcagaacaattatgacctttccagcaacagatacaaccctggatggaggaatcaccctaacctcagatggtctagccctcagcaacaacagcagcctgctcctttcttccaaaatgctgctggcccaagcagaccatacattcctccaccaatccaacaacagcaacaaccccagaaacagccaacagttgaggcccctccacaaccttccctcgaagaacttgtgaggcaaatgactatgcagaacatgcagttttagcaagagaccagagcctncatttagagcttaaccaatcagatgggacaattggctatccaattgaatcaacaacagtcc

SEQ ID NO: 2077 - DNA, 261 bp, Glycine max
atacttagactatcctaaaaaatgatagctctttcaattggaaacccaagattgctaaccagacctttaagtcagatcccatcctttattgcttctattagagcatgcactctacctttgtagtggataaaaccacaatgggctaaagagtttccttccaactatcaagagagttgccaatcatgaatgcgtaccttgtcatagttctccttgcatccaaatctacagcatagtcaaaatctaaataaccaacaagagcac

SEQ ID NO: 2078 - DNA, 289 bp, Glycine max
agcttctcctttgctccctataactgattgcagttctcgagagtgttggacctctttttagcattagggtggaaattagataccgagctattacagagagggtcggagtttcgcctattgtatagaagatggtggaaaatatacttaggtggtttgggcatgtacagagaagaccggaagactctgtattgaagatgagtgacctgatggagagaatgcacacacttcgatgcagatgaagacccacaaagactattcgagaggctatcaagaacgatctcgaacttaa

SEQ ID NO: 2079 - DNA, 412 bp, Glycine max
ctatttcaattacgagcgtctcgatatattacgggattcaatctgacattcgagtaaaaagctatcgtcatttgattttcctgagagcttcagttgtcaatttcgagcatctcgatatactacacgacacaatcggacatccgagtcaaaagttattgtcgtctgatttttcttagagctttagttcttaatttcgagcgtctcgatatactaccggatacaatcggacatccaagtcaaaagttattgttgtttgaattttctcagagcttctgttttcaattacgagcgtctccatatattgcgggactcaatcgggaatccgagtaaaaaggtattgtcgtttgatctttcttagagcttcaagttttaatttcgagcgtctcgatatactacgggacacaatcggaca

SEQ ID NO: 2080 - DNA, 310 bp, Glycine max
  unsure at all n locations
tctatcctcaattacgagggtctcgatatattacgagactcaatcggacattcgagtcanaagttattgtcggttgactgttcttagaggttccgttttcaatttcgagcgtctcgatatattacacggctcaatcggacatccgagttaaaagttattgtcgtttgatatttctcagaacttcccgtttcaattacgagcgtctcgatatccttcgggactcaatccgacactcgagtcagaagttctagtcgattgaatntactcagagcttctggtttcaattacgagcgtctcgatatattacgag

SEQ ID NO: 2081 - DNA, 322 bp, Glycine max
  unsure at all n locations
agctntgagaaaaatcanacgacaataagtnttatctcggatgtcctattaagccctgtaatatatcgagacgctcgaagttgaaaacggaagctctaagaanagtccaacaacaataacttttaactcgaatgtccgattgagtcccgtaatatatcgaaacgctcgtaatttaaaacagaagctctgagcaaaatcaaacgacaaatacttttaactccgatgttcgattgagccctataatacatcgagacgctcgatatgaaaacgggagctcttaagaaagtcaaacgacaataacgtttgactcggatgtccgatt

SEQ ID NO: 2082 - DNA, 390 bp, Glycine max
  unsure at all n locations
agcttactntaagtatttctaatatttctgttgtgggaattcttttgtatntttttaaagcagattcccattcttttatactttnttttaaacaagttagaacctattacttccaaagccagtggaaggccagaagcataagttactgcacgttgcaagacctccacgtaatttggatcagctttttcctttttaaaagctttccatgtaagtaactgaagagcatcgttctcatccaattccttcacctcatatgttgtaataacttgatgaggtgctagcaattgtttgtcccgagttgtgatgatgaatttgctgccgggaccaaaccaatctggtctaccaacaattgcctgtaattgctcgtgcttgtcaacatcgtctagaatc

SEQ ID NO: 2083 - DNA, 379 bp, Glycine max
  unsure at all n locations
tctatgatcaatcaagattataaagtggtgccctanaagatactgtctccattntttaacagcaatggtgattgtagcgagttcacgaacataagttgaagaagaaagtaacttgcggcaaaactgcttgctaaaaaaagctatcgggtgtcttccttgggacagcaccgcacctatacccgaacctgaggcatctgtctccaccacgaaaggtttcgtgaagtcaggcaatgctaagactggagaatgtgtcatagcatgcttcaatttgttgaaggcaacatcagcttccacggtccagtggaactcttccttggtcaacagacttgtaagtggtgttgccaacgttgcgtagctccttataaatcttcgataaaag

SEQ ID NO: 2084 - DNA, 443 bp, Glycine max
  unsure at all n locations
ntagcttcttaaggagagtttctcacagaagcttctcaaggaagttttcttaagaaagcttctcaaggaagttacctagtctataaataaaagcatgtgtaacacttgttataactttgatgaatgagagtcttgtaagacacaactcanagttcaacttctctccctttttcttccttcaatttcgtgctccctcctctctttcttttagcaaatgctcacccccccctctaaaatttaattggattgggcttcttccaattcaattaaatntattttcaaccacacacatcaaatattcacttaatgcatgccaaattagaaaactacccctaatacaaaaaactagtctaggtgccctacaatacaagagatgaaaaatcttacatttctagggtaccttaactatattgtggagccctaaatacacggccaaaaataat

SEQ ID NO: 2085 - DNA, 223 bp, Glycine max
  unsure at all n locations
tgtcctctgccaaccaattntccaacagatttttcttgttctgtttcacaaccaaccgcgataattctaatgattcagaggcatttcagctttccctttgtaaaaagggtcaaaatactgaacagaggaggagttgcccagcttgcacaggaacactcttgcacgtaaaggagataatcggcaccttaacattataactaattgaccaaacaaaaggacacca

SEQ ID NO: 2086 - DNA, 351 bp, Glycine max
  unsure at all n locations
ctgcagcttatgtaagtcaatttaggaggcatctcggataggatcttttccgtgcatatttgcgcanaatctcttgaactaggaagatgttgtccatcatctttctgttcttaatgaaggcagtttgagtttccccaataatagtctcaagcactggggctatgcggttgaccaaaattttagacataatcttgtataacaaattacaataagatatgggtctaaaatgggtaacctgggagggctaatcatgcttaggaataagtgcaataatagcatggttgatctgctntannaattttctagttgtaaagaattcattaaccgcctcaaagatatcatcaccaatga

SEQ ID NO: 2087 - DNA, 367 bp, Glycine max
agagaggtgcaagtaaggaagcaagtgaagttggatatttcgattggaaagtacaatgataaggtgttttgtgatgttgtttctatggaggccaaccacttactcttggggagaccatggcaatttgataagacggataatcatgatggtttcaccaacaagatccctttcacgtattaaggaaaaaaagatagtgctcaaaccattgagtccacaagaagtgtgtgaggatcaaagaataatgagagagaaaattcttcctacaagagagaacatgagaaagagagctaaacacttgagagttcaaaagtgacgacaataagagggaaacacaagagaggaaaaagatgagtgaaacacttgaagt

SEQ ID NO: 2088 - DNA, 403 bp, Glycine max
  unsure at all n locations
tttgattgctctggtagagttcccaaacgtcaaagagaatgagaagggattgaagcctncattctgtactgtcttcgtgcaattntgttccctctctccgtggatattagtaaatcccaacagtgaaggtgtgtggaattgaatcgtgaccaacatatcaaaattttacgacaatccaatggttaacgagttcaggatcgtagttttaccgagacagttttggatttctgcgggaaaagaaaaggctacgatgcgaactgtatttctctcagctccgacatgatttcgaaattcccaatggtgaaagtgttcataattgagttgcgaacttggtatttaaatttcacgacgatccaacggtgaatgagtctgagattgtcatttctctgagatagatttggtg

SEQ ID NO: 2089 - DNA, 382 bp, Glycine max
gatgcaacatatggagaggttaatgaaacaacgagatgatgcgctccatgagagggtggatcaaatggagaatagagatcataatgaagaagaaaggaggagaagagggaatgatggtgttcctagacaaaaccgaattgatggtattaaactcaacattcctccatttaaaggaaagaatgatccggaggcctacttggagtgggagatgaaaatagagcatgttttctcatgccacaactatgaggaggaccagaacgtgaagcttgccgccacagagttttccgactatgctcttgtgtggtggaacaagctacaaaaggagagagcaagacatgaagagccaatggttgatacatggacggagatgaacaagatcatg

SEQ ID NO: 2090 - DNA, 284 bp, Glycine max
  unsure at all n locations
agcttcaagagatcatccnctcgacaacattattggtgatatctcanaaggggtaacaactagacactctcttaaagatttatgcaataatatggcttttgtatccatgattgaacctaaaaatataaaagaagccataatagatcataattggatcattgccatgcaagaagaactaaaccaatttgaaagaaacaatgtgtggaaattagtagaaaaacctgaaaattatcctgtcataggaacaaaatgggtttttagaaataaattagatgaacatggta

SEQ ID NO: 2091 - DNA, 412 bp, Glycine max
acgtgcatttgtgtgcaatacacaattccttgtacaccacaacaaaatggtgtatcagaaaggcggaataaaactttaatggatatagttacgagtatgttaatcaattagactttatccgtatcctctgggatgtataccttgaaaactgccttgtagttgctgaacaaggttcctagtaaggtagttccaaagacaccttttgaactgtggacaaataggatacctaatataaggcacctgcatgtttggggttgccaggcagaaataaggatttataatccgcacgaaagaaaattggatgcaagaacaatcagtggatatttcattggttatcaaaaaaaaaaaaagttaacagggtatatgtctgattggtctaatcatagtatgagaactttcaaaactggaaatg

SEQ ID NO: 2092 - DNA, 317 bp, Glycine max
agcgtctcaatatattacgggactcaatcagacatccgagtaaaaagttatcttcgtttgaattagctctgaggttcagaattcaatttcgagcgtctagatatattacgggactcaatcagacatccgagcaaaaagttattgtcgtttgaattagctcagaacttcataattcaatttcgatcgtctcaatatatttcgggactcaatcagacatctgagtaaaaaaggtatggcgtttgaatttgctgagagcttcaacattcaatttcaagcgtctcgatctattacgggactcaatcagacattcgagtaaa

SEQ ID NO: 2093 - DNA, 394 bp, Glycine max
  unsure at all n locations
cttataatcgattaccacaagttttttaaactttntataacatcctctagaaatttgaatttaaattctaaagcttgcaatcaattacaacttgtgtgtaatcgattaccagacatgagaattcaaatttcaaatctgaagagtcacaactcttcagaaactaactgtgtgatcgattacaacaattatgtaatcaattaccagcaaggaattgtcgaacataactcccaagagtcacaactgttcaagaagttttgaatggctatcaaggtctataaataggtgacttgngacatgaaattctgaaaaagagaatttcctgacaaattgtctatcctctcaaaccaaattgcttatactctcaaaagaattcttgtcaaacacttcaaattaa

SEQ ID NO: 2094 - DNA, 472 bp, Glycine max
  unsure at all n locations
taatggcttctttagattctntgtctntcanaagttttttcatgtatagattattccaagatcatgatgaagacgaagtcaatttgtgtctcatgacagaatctgatgagaataacaaagaagattctataatgaagaaatggtacatagacagtggatgttctaagcacatgacgggtgatgtatccaaattcacaaccatttcccccaagaaaagtggacatgttacatatggtgacaacaacaagggcaaaattattggagtaggtaaaataggaacgagttcttctactcctattgaaaatgtgttacttgtagaaggtttgaaacatagtctattaagtgttagtcaattatgtgataaaggatataaagtatctttcgattctgaanaatgtgttattaagcatgagcttgacaaagatattgaacatatacgttttagagaaaataatgtctacatgattgatct

SEQ ID NO: 2095 - DNA, 386 bp, Glycine max
  unsure at all n locations
ctgagcaaatcgaaatgacaataactntatactcggatgtccggttgagtcccgtaagatatcgagacgctcaaaatttatatccgaagctctgagaaaattgaattgacaataactttatacacggatgtccggttgagtcctgtaatatatcgagacgctgcaaaatgaaaacggaagctcgtaggaaattcaaacgacaataactttttacttggatgtccgactgaatcgggtaatatatcgagacgctcaaaattgagactagaagctttgagcaaattgaaatgacaataactctatacacggatgtccggttgagtcccgtaatatatcgagacgctctcaatttagatccgaagctctgagaaaatcgaattgacaat

SEQ ID NO: 2096 - DNA, 262 bp, Glycine max
  unsure at all n locations
catgcaagctnntcatttcatatttcgaccatctcgaatattaccggactcatccggacttccgtgtataaacttattgtcaattcaatnttctcagagcttcggatcaaaattttgagcatcttgatatattacgggactcatttagacatccgagtaaaaatttattgtcgttagaatttgatacgagcttccgttttcaatttggagcatctcgagataaaatgagaccctctgtcgggcatcccgaaaaaacgttatt

SEQ ID NO: 2097 - DNA, 420 bp, Glycine max
  unsure at all n locations
gcttgagcactgagtgaagcttctgtgaatattactacatatatttcttgcatgatactattctncatatgtaattcttcagtgctgcatctaaactcactcacaatatcttcaaagaaacatttatatacatcctgaattattgaaacttgagtatgtgcatcctctatatcatccttaagcttctgaatgggttggaacaaatttttctgtgtcagttggtgctgtgaacaattttccacagaagcagaaagctgggaagatagactcttaaattcctttttcttatctgatagtgtgtccttcagttgatgattctccgattgtaagaagtccaatctatcctttaaactgctaagagattcaatggtttcactgaatggatgtactttctcattttcatcaacggattcattcaat

SEQ ID NO: 2098 - DNA, 374 bp, Glycine max
cttgagaggaatactagagaagctagagcttatttacatacacctctctaatagctaagcgcacctccttgagatgagaagctagagcttatctacgcatcccctataatatctatgctcacccccatgccaaaatacatgaaaatacaaaaaaagtccctactacaaagactactcaaaatgccttgaaatacaaggctaaaaccctatactactagaatggccaaaataaaaggcccacaagaaggaagaacctattataatatttacaaagataagcaggctcatacttagccaatgggcccgaaatctacctcaaggctcatgagaaccctatggccttcccttggatctctggcccaatctacttggag

SEQ ID NO: 2099 - DNA, 332 bp, Glycine max
  unsure at all n locations
agctagaggaaacccttcgcattgtaccttttatttcccgcaaaacccaaaactgtctcagaaaactatgatcctggatttgttaaccgctggattatattcgaattgngatatgttgttagaaattcaattgcacaaactttcactgttgggatttgcaagataatatttgtggagggagaaaaatgaatcacatgaagatagtgcaagtggagacttcaattccttctcattctctcntaacgttggggaccctatcagagcaaccagaggaatctcaagaacttgttatagatgtctctattcgctgcggaagacatgtgaacccgctt

SEQ ID NO: 2100 - DNA, 424 bp, Glycine max
  unsure at all n locations
cgcatgcaagcttattgatgttattgcttaatttattggtaatttgttgcgtcttttgacctatgtcattttcttctccggccacaggtatgccaggaatgactgcttatgctggtttctttgaggtaggttctcccaaaaaaggagacactgttttcgtttcagctgcctctggtgctgttggtcaacttgttggccaatttgctaagttgactggttgctatgttgttggaagtgctggaagtaaagagaagggatttgtttaattattgttggtatatgtccctggataaacgaataatcagcttaaatgttggatatttattctactgcttaaaatactattattttgaattaacctaattacaataacagccaccanagccttttctataatgtagagttgaattggcccaattatatt

SEQ ID NO: 2101 - DNA, 458 bp, Glycine max
  unsure at all n locations
agctgntgcctcanaacacattgnttcccacatcctatgctctagtaatcgattaccagacagtttaatcgattaccagaagacaattttaaaaatcagattttaaaaaaggttttgaattagaatttcgaatcatgtaatcgattactagatgtttgtaatcgattaccagcaacgacacttcagaaaaaactttgaaaagtcatgacccttcaaaatataactgtgtaatcgattaccagtgaagaattttagaaaaagctttttgaaaagacacatatcttcaaacaattttcaaaaggcacaaagggcctatatatgtgtgtctgcattgtaaaatcaagagagagatattctaagagaacttaattgccaagtgctctctcaacaacttttgggaaaaacacttccaaatctattgagaattcatccaggaacttcaaantgtattatcatct

SEQ ID NO: 2102 - DNA, 470 bp, Glycine max
ttaagtcacctgcggcatgcaagcttcttagtttcgtacttggtgacttggcaatcaacgcattgagcaacaaagcgagagacgtcatcttgaaggccgggccaataaaaattggtcatgagacgagccacggtcttggcgacgccggcgtggccaccggtgggggtggcatgatactctgtcagcagggtggtgatgatgggtatatcggaaggcaaccagatacggcctttatacaacagcagtttgtcagcaatggagaactcacggtggtggtcgggatgattctgaacatcaagcatcttttgctgaaaggtcgaattcgtgcgtgactggtcatggagctcatctaaaaaagtgagacaagggacggagagaatgagaaaggcttgagaagctcctttcggtaacctagataaggcatctgctgcctgattatggctccctgagcgatactggatatgataatc

SEQ ID NO: 2103 - DNA, 338 bp, Glycine max
  unsure at all n locations
agcttgaaattgaacaatggaagatcttgagatattcaatcggtcttaacttttcactcggaagtccgattcaggcgcataatatattgagacgctctcgtgaaattcacatggtcataacttttcactcagaggtccgattcaggcgcataatatatcgagatgcacataattgaacaacggaagctctcgagaaattcatatggtcataccttttaactcggagttctgatctangcgcataatacattgagacgctcgaaattgaacaatggaagctctcgagatttcaaatggtctaactctaactcggaggtccaatcaggcgcaaatatatc

SEQ ID NO: 2104 - DNA, 448 bp, Glycine max
  unsure at all n locations
agcttctcagatccggtcatggaaagacttggctactgccttcattangcagtaccaatacaacacggatatggctcctgatcggaaccagcttcagagtatgaccaagcgagaacatgagtccattaaagaatatgcccaaaggtggagagatctcgcagcccaagtcgtcccgcccatgactgagagggagatgatcacaattatggtagatacgttgcctacgttctactatgagaagctgataggatacatgccagctaactttgcagacctcgtcttcgccggagaaagaatcgagtccggactgagaaaagggcaatttgaatatgcctccaacgttgcccccaacaacaacagaagagccccagtggtgggcgcgaggaaaaaagaaggagatacccacgcggtcaccaccgccccaacatggatgaaagcgccccaaatg

SEQ ID NO: 2105 - DNA, 418 bp, Glycine max
  unsure at all n locations
agcttaacctacttaggtttctatgttgaaggattgtggttctatcttntctagagattagattggattaaataaatttttaaggggttgaataaatatctactctaattaattttgattaacatttacagttaaagttaaccattcacattatagtttaacgattaaaatttcaacaattttgtaatttcctttacatattaaagtattttataatgattttagttattagttcttaatgttattaaaaagtcaaaatatcatttgattgcaaacttgtaaactaaatctaaattttcttaaaaaatggacctgacagcgggaggggatttataaccatacatctaatttattctctgttcaatgtagaaaatgcattttgattagattgcgcttcaatagtgtataactaaaaaat

SEQ ID NO: 2106 - DNA, 421 bp, Glycine max
  unsure at all n locations
agctnggccaattggaagaattgcaaaattntgtctttatatgtcaaatctgcatttcttaatggccctttagatgaagaagtttatattcagcaactccccggatatgaagtcataggcagtgaagacaaggtgtacatacttagaaaggctctatatggactaaaataggctccaagggcctggaataaaagaatagactcctttctacatggtgaagactttaaaaaatatattgtagagcatggtatctatgtgaaggcaactaaggatggtggagtcctgctaatatgcctatatgtggatgatttgctgattatagggagtaatccagctgagatagaaaagttgaagggcaatctcaaatctgaattcgagatgtcagaattaggcttgctatcatacttccttggtattgagt

SEQ ID NO: 2107 - DNA, 421 bp, Glycine max
agcttgtgctattccaagttcattaatcatacctttaagccagaatgcttccttcactccttcagctagggccatgtactctgcttcagttgttgaaagagcaacaactgattgttgatttgctttccaactgattgttgtaccaaacaaagtaaacacatatcctgttaaagatttccttgtgtctacatttcctgcaaaatctgcatctacataacctgtgattgctgcctcatatgctgtcttcttgtaccttaatccaactttcgaagatccatttagataccttagtgtccacttcacaacttcccaatgtgcactgccaggatctcccatgaatctgcttataatacttacagcatgagctaagtcaggtctgctacaaaccattccatacattatgcttcaacaccactggcat

SEQ ID NO: 2108 - DNA, 458 bp, Glycine max
  unsure at all n locations
agctnggcagctgacattggctttttggaatcattcgcagacatgtcttctgaacctgaaaccagcatctcaggcttgatggtggttgagccgtccatggattgactatgctggtgtctaactctgggcctttcattagtcccaataacaacattctcggtagaagaggtgggtgcccctgacgccggtgttgaagccgatgctcccacagcattagacggctcaaccatttgaaacgtggacgttgccgacgatgaattgaacttatccatatcaaggtacatggacagcaagtcctcctcggcatcatcggagaaggaaggaccatcaccacctccaacaacaccaaggtcactgtcgaaactaatatcatccggtaaagtgagaatctccgaatgagcacgcctatgacctctatttctcggnggattatcaggcattctgctaatatcatgact

SEQ ID NO: 2109 - DNA, 457 bp, Glycine max
  unsure at all n locations
agcttgtgctccaggaaaccactttttatgatgatcaaatgaangcaaattttctgtcactaatgcatcaccaattgaaaaatttgaatcactaaaactccaagcaagaatcttagcactgtctattatcctccctgttgaataattatttgatatcagtagtgatgtttttgttcttcaactgggtgttgacatcagccacaaacagttcacttttcctggttcctgatgctgtagtagtcttcgtattgtgaaatttgaaattaatattgttgcaaaggcagaacaatggaaatttcaaaatatgaaagtgcgaactcacatgtggaaatctatcaatgaattttgctgcattagcaacttcagtggcagctctgatttcttcatttgttgccccatccttaccataggcaatgttttctttgatgctgcaactgaagagtattggttcctgact

SEQ ID NO: 2110 - DNA, 338 bp, Glycine max
  unsure at all n locations
agctntgagcaaattcaaacgacaatttctntttattctgatgtccaattgtgtcccataggttatcaagacgctcggaattgaaaacggaagctcttagaaaaatcaaacgacaataatttttaactcggatgtgcgattgagtcccataatatatcgagacgctcataattgaaaactaaagctctgagcaaattcaaacgacaataacttttgactcgaatgtccgattgtgtcctataggatatcgagacgctcgtaattgagaacggaagctctgagaaaaatcaaacgacaataactcttaacttggatgttcgatggagccctgtaatata

SEQ ID NO: 2111 - DNA, 457 bp, Glycine max
gcttgcacacaagattctccttggctggcacttcataactctttggttgggtcttatagatgtcttcctctaaatccccatgcaagaatgcagttttaacatctagctgctccaagtaaagattctctgcagcaacaatactcaaaataactctgatggtagtcatctttacaactggaaaggagtctctgtgatatcaattccctgtttctactgaaaccctttcaccacaagtctcgccttgtatcttcttctaccgtcagattcttcctttagcctacagacccacctattttgtaacgctttctttccttctggcaatttagttaaagaccacgtcttattcttctgaagggatgtcatcttatctttcatcgctagcttccactcaatagtgtcattcccctgcatagcctcactgaaacattctggctcaccaacatcagttaacaacaaa

SEQ ID NO: 2112 - DNA, 361 bp, Glycine max
  unsure at all n locations
agcttaaacattcaatntcgagcgtctcgatatattacatgactcaatcagacatccgagtaaaaatttattgtcgtttgaattggctcacacgctcaacattcaattttgagcgtctcaatatattacgggactcaatcagacatccgagtaaaaagttattgtcgtttgaataggctcagagctttaacattcaatttcgagcgtctcgatatattacgggactcaatcagacatccgagtaaaaagatattgtcttttgaattggctcagaggttcaacattcaatttcgagcgtctcgatatattacgggactcaatcagacatccgagtaaaaagttattgtcgtttgaattggct

SEQ ID NO: 2113 - DNA, 436 bp, Glycine max
agcttccagcaaggtccttataatcagcaaggtctttgaaggaaacaccccgacaaccagttcaataaagaccagggtggatcctcaaacaagccaattcaacaagggcctaacatctttcagaggacgactaagttggaagagaccttgactcagtttatgcaggtaatgatgtcagatcataatagtattgagtcaacactaaaaaaccttgaggttcaggtgggacaactggccaagcagatagttgacaagtcattcaacagttttggagcaaatacaggcaataatcctaaggaggaatgcaaggctatgatgactaggagtaaaaagtttgtggaagctgaggatgaagagagtgtggtgtacaaggagcaaatgggtgaaaagataggtgctgaggttaaggaaaatgatgtgaagggtaaagagaatc

SEQ ID NO: 2114 - DNA, 383 bp, Glycine max
  unsure at all n locations
tgcaagctatcccatgacagctaagtgaccgggatatgtcactccggagacagctccaagaagacttgtgggtagctgcacaacatcatgaatctttgcttcgtcagaagtcgagagcaagatgggtcaaggagggagattctaattcccattattttcatttgctagtaaatgcaagaagaagagataattctctgcaaggtttatggattgatggagcttgggttgaagatccgccaagggtcaaggagacaggaagacaatttttcatctgcagattccaaaaagtggttcacaatagacccctcctagatggngtagaatntcagtcattagatcagtaccacaataacttgctgagtgggagatttacggaggaagag

SEQ ID NO: 2115 - DNA, 402 bp, Glycine max
  unsure at all n locations
agcttgtggagacctttactactaggcagtggtatcttgtggtggacatcttgggtatgcatgttaggtcggctctaactgcaatggtatatcgaaaggggctaaggatatcaagcttggccaagcaaagtcacacgagtggggaggttgttaactacatggctattgatgttcagagggtaggggactactcttggtatcttcatgacatgtggatgcttcctctgcagattgttcttgcccttgcaatnttgtataagaatgttggaattgctgctattgcaacactgattgctacaataatttccatcgtcgtcactgttcctattgccagngtccaagaaaaatatcaagacaaattaatggctgctaacgatgaaaggatgaagaaaacatctgagt

SEQ ID NO: 2116 - DNA, 402 bp, Glycine max
  unsure at all n locations
agtcacctgcggcatgcaagcttctcattctcacctttctttgcctatagttctccagatatactantttcatgtttggcgctgcatctcaagttcagacttgcgtaaaagtggaagcaactacgagtagcttccacgttttttgtgatagtataacgcgatttgagcattaaatgcatatacttgaagtggctccatgctatgactcttaattcaaaattaagttatttttaatgttttctattttctttgtcatgaatagaaatatgttgatttgaaaaaggagttgagcacaacagatagacatattttgatagaaacgggattcattcgtcaatggtgaacatcctcataagttcatattaaattaccttgctaccctcgaaacacctacagaattga

SEQ ID NO: 2117 - DNA, 459 bp, Glycine max
agcttatgctgcaaacacttataatagaccccctcaacagcttaaccaacaacagaagaataattatgatctttcaagcaacaaatacaatccaggttggaggaatcatctaaatctgagatgggcaagtcctccacaacaacaacagactatccctcctttccagaatgttgctggtccaagcaagccatatgttcctcctccaatgcagcagcaacaacaacaacaacaacaaagacaacaagcaactaaggccccttctcaaccttccttagagaagttagtgaggaaaatgactatccagaatatgcaatttcagcgagacaagagcctccattcagagtctaacaaatcagatggggcagatggctacttagttgaaccaagctcaatcccaaaattctgacaaatttccttcacaaactgtgcagaatccacaaaatgtgagtgtcatcatct

SEQ ID NO: 2118 - DNA, 411 bp, Glycine max
  unsure at all n locations
agcttcttatactaacgtcacaaggaatgtggttgttagattcataaagaaggaggtganttgtcgatacggactccccaagaagatcattactgataatggcaccaatctaaacaataagatgatgcaggagatgtgcgaagacttcaagatccagcatcataactctaccccttatcggccaaagatgaatggggctgtagaggctgcgaataagaatatcaagaagattggtcaaaagatgacggtgtcatacaaggattggcatgagatgttgcctttcgccctacacggatacagaacctcggtacgaacttctactgggggcaacaccgtattcttggtttatgggatggaggcagtactcccatttgaggtagaagttccttctcagaggataatggcggagtc

SEQ ID NO: 2119 - DNA, 383 bp, Glycine max
  unsure at all n locations
agcttgtgcatccaataccctgatgaggatgtcccatatgttcttaaaacaggactgattcatttgcttccaaagtttcatggccttgcaggtgaagacccgcacaaacatttgaaagaatttcacattgtctgctccaccatgaaacccccagatgtccaagaggatcacatatttctgaaggcttttcctcattcattagagggagtggcaaaggactggttgtattaccttgctccaaggtccatcacgagctgggatgaccttaagagagtattcttagaaaaatttttccctgcttccaggaccacagccatcaggaaggatatctcangtattagataactcagtggagagagcctgtatgagtactgggagagatt

SEQ ID NO: 2120 - DNA, 422 bp, Glycine max
  unsure at all n locations
tagtggatgggcctctctacctttctctttgttttcgtgcattcatggtggaaataccattaaggacctcattgaagctcacagatccagcctccgtagaagccccacaagcaagtttccatcatgaactntgaactataattctaaaatgatcaaagttcacaaaatgcacacatatggcctctatttatagcgtaagtgtcacacaaaattggaggaaaatttgaatttctattcaaatttcacatgaattagaaattgaatttgtggagccaaaatttcactaattatgattaatgaattntatntatggttcagcccactaatccaagatcaagtccaagattctccaataagtgtgcttaggtgtcatgagacatgtaaatcatgaacgacatgcacacagtgtgactatatgatgt

SEQ ID NO: 2121 - DNA, 450 bp, Glycine max
  unsure at all n locations
actcggatgtctgattgagacccgtaatatatccagacgctcgaaattgaataccgaagctcttaaaaaattcaaacaacaataactttntactcggaagtcagattgagtcccgtaatatattatcgagttgctcaaaatggaataccgaagttctgtgcaaattcaaaccacaataactctttactcggatgtctgattcacgcccgtaatatatcgagacgctcgaaaatgaataccgaagctctgagaaaaattctaacgacaacaactttttgctcggctatccgattgagtcctggaaaatatcggaatgctcgaaattgaatgctgaacctctgagcaaattcaaacgacaataacattcttactcgggtgtctgatggagccctgaatatatcgagacgctcgatattatataccgatgctctgagaaaattcacacaacaa

SEQ ID NO: 2122 - DNA, 333 bp, Glycine max
  unsure at all n locations
tcccttgccgctgcagcttaacattcaatttcagggtttcgattattacgggattcaatcatacatccgagtaaaaagttattggcgtttgaatttgctcagagcttcngcatgcacagtcgagcctctcgatatactacgggactcaatcagaccaccgagtaaaaagttattgtcgtttgaatatgctcagagcttcggcatgcaagttcaagcgtttcgatatattacgggactcaatcagacatccgagtaaaaagttattgtcgtctgaagttgctcagagcttcgataatctatttcgagcgtttcgatatattacgggactcaatc

SEQ ID NO: 2123 - DNA, 378 bp, Glycine max
  unsure at all n locations
tagccttgttcctncctaccttacatgtttcatcaaacttggttctgaacactcactttgctccaacaacagattatcctttggggagttctacaagctcccatacatcattattctgaaactggtctagctcttcttgcattggtttgacccaatattaatcagacatggnatcatctatgtgtttttgctcaatctcatataagaatgatgtgttcttaagagagttccttctctgtacttatgccataggatcacatatgatctacgctctagatgttgtttcctcaacaggcatacagttggttctctggcctcttcaggttggttgtccactggtgagttagacgcaagttggttctgactcgacacaacagt

SEQ ID NO: 2124 - DNA, 319 bp, Glycine max
agcttgcatgatttacatctccccctttctcaagcaaattcttcttgatatcatcaaaatcttcatgatcccgactcgttggtggaggatgcatgaatgacaatcaattcatggggctccgaataaaagtggagattggaggataggcgaatagcgctaggcaatcaattcgcggtgtttccgactcgttggtggaggatgaatgaatgacaatcaactcatggggcttcgaataaaagtggagaatggaggataggagaatagcgctaggcaatcaattcgcggtgctgcagactcgatggtggaggatgcatgaatg

SEQ ID NO: 2125 - DNA, 340 bp, Glycine max
  unsure at all n locations
tcagaattcaatttcgatcgtctcgatatattacaggtctcaatcagacatctgaggaanaaagttattgtcgtttgaatttgctgagagcttcaacattcaattttgagcgtctcgatgtattacgggacttaatcagacatccgagttaaaagttattgttgtttgaatttgctgagagcttcaacattcaatttcgagcgtctcgatattttacgggactcaatcagacatccgagttaaaagttattgttgtttgaatttgctgagagcttcaacattcaatttcgagcgtctcgatgttttacgggactcaatcagacatccgagtaaaaagtta

SEQ ID NO: 2126 - DNA, 470 bp, Glycine max
  unsure at all n locations
tctataaaactaagcttacanatctggcaacagagaaatatatggtaggtacctagtactggtacaaggtttatagtgtgacagcaggaacatctcacacttgtagcaccacgtgtgtacattagcaatgtcgtacagcctccacaataaagttgtgacatgtccattcctgcacgggcaacatgaaattaaagggttccccagatgtaaccatttagttaaagtccaatacatgttaatgaatacttaatcaagctgaatgcatagtttcttatcagattatctctgtctccagctctctccacacacacacacacagagtatcttttaaaataatatgccaatgttagctacacacacaatttcttgattctttttatcttaataaaagcatatagctaacatttctattgatctttcatcatcattgatcttcaatctcttgaagaatctattanacaagcataatc

SEQ ID NO: 2127 - DNA, 472 bp, Glycine max
  unsure at all n locations
tgtgcctcttcacgtctggaatatgaatgtagcatatagatccaaagacccttaggtgctttgctgatggcttcttcccgttccaagcttcaattggagtcttgtcttttacagacttagttggacatctgttgagtatgtaaacagcagtgtagactgcttcagcccagaatttgttaggtagtcccttctccttgagcatcgatctagctatttccataactgtgcgattctttctctcggacactctattntgttgaggagaatatgagactgtaagttgtcgctcaatgccttcatcctcacaaaatcttttaaactcgcgagaggtgtactttntgccgcgatcacttcttagtacttttatccgttttccactttgattntcagcaagggccttgaactntntgaatactccacagacttctgattttatttaaaanatataccatgtcatctagagaagcatcat

SEQ ID NO: 2128 - DNA, 414 bp, Glycine max
  unsure at all n locations
tcattaagaggcttcctcaagaagcttcctcgnggcttctntgataagctctctcattagacttctttgagaagcttgatgcaatccttcctacgaagggaccaatcactagaaccaggagcaagaggctccaagaagattgggctagagctgctgaagaaggccctagggttctcatgaaattcagggtagatttctgagcccatgagccaaggttgagtccaattatctntgtacatattagactacgatgtcattatatttggtccttatatttagggcttcatattgtaggtagggtaccctagaaatataggattttttcagcccttgtattttanggcacctagactagttnttgtattaagggtagtcttgtaatttcacatgcactaagtggatatttgatgtgtg

SEQ ID NO: 2129 - DNA, 463 bp, Glycine max
  unsure at all n locations
tgtcattggtcaatacatccttctatgctaataatcatttaattcgttctctntattgaatggattaattattgtgatgtaaatttcaaaattaaaaatgaagtgaattactcatagaattagaattggtagaatcattaaaagacgatccttttatcaagaaacctcaatttcaactcatttttatttattggctgatatcttataaactaataaagcaaatctatacacctataaaaaaaattgcagctccaatgataatagctggagagactcggtcatatgcatttgcaatatacgcaacaagaaatgccaataatcctgccaacagtgtcccgaatcctctgttgagccctttgcataaagttacccctagaaccaaaagaaattaaaaaaatattaagatcatgcacaaataacatgcnacagaaacacattatntaacataggaatatagaaatat

SEQ ID NO: 2130 - DNA, 282 bp, Glycine max
  unsure at all n locations
catgcaagctntgaatgctctattctatggagttgacaataatatcttcagactgatcatacacttgcacagtggccaaagatgcatgggagatcctgaaaaccactcatgaaggaacctccaaagtgaagatgtccagattgcaacttgtggctacaaaattctaaaatctgaagatgaaggaggaagaatgtattcatgacttccacatgaacattcttgaaattgccaatgcttgcactgccttgggagagaagatgacagatganaagctggtgagaa

SEQ ID NO: 2131 - DNA, 453 bp, Glycine max
  unsure at all n locations
tctgaggttgtcgtgtgtatattagaggatatgttcaatgaattatccagacaaggtaatgaaggccttgatatgactttctaggtctaatattaaaaagtgtgaaataaatatgatgcttatttttattgatctatatattattcttgtgtaatgtctaagattattatcctttcaatcgtaaaggaagaaaaaattaagaggaagaccaggcagcatcccaatgagcaatcccacattntgattgaggttgatttacttgctaatattgttgacataaggctttggcaagctcaagaaattatagaattgctcaaacctacggtaagttccttcacaccatgtcttaatcttctgtcctgtgggttatgttgtgtgaatcgactgctatcgagggttactttcatctctggtcagtattattaagtttgtgatccctaacagtgatacata

SEQ ID NO: 2132 - DNA, 463 bp, Glycine max
  unsure at all n locations
taagcttaatgatcagcacanagccatcatttgtaactatccaggacccagcattaaaaatgtataagctgtaatcaaatagaanattcctttccaatcatcaagattagtatccaaagaanaaaaaaacatgaaaaaaaaggaaattctgatttaatatacaagcactggccactcagtcatgtaccagcattgggcagggctgccataaaggaattgtaagaagactcaagatcaaagtgaagctgcctcgcctgttgttccgtcaactcatcagctgcacccatcttagataaccttgcaatccattccttcattntggttntcccctcaaaatcaggcggcaggaatgtcaacttattaagcgaagcataaaggtccgagagcaatgggtgcacctgatccacagccaccatgttaagtttcaaggaatccattgaagtaataaaattctgaacacact

SEQ ID NO: 2133 - DNA, 421 bp, Glycine max
  unsure at all n locations
tatccaaacaggaaaaaataacatatgctttctatgcttctgatagacttgaactttatatatttgatcaaataaagagtacactagatgaatttctcaataaatatttataggagaaaaaaataataaggtaaaatgaattaaatntctttgtcttcaactaacacagctaatttaactcataagtacttactgagaagtttatccaaataaggtctaaagcttaatcagataccgaaacgggtatggagggagtaaaantaattttaacaaaaagagtgtgacaaaaaacaatgaaatgaaagagtacttcgaaattggtcttctacaggtgtactgatggcccatccattattacgacagataanaacaacagggggcctcatgactgctgcaaaattcatagcagcatgaaaaatct

SEQ ID NO: 2134 - DNA, 458 bp, Glycine max
cggaagctctcgagaaaatcgagtggtcatatattttcacacagttgttcgattctgcgaaataatatatcgagacgcacgacattgaacaacggaagctctcgagaaatctgaatggtcataacatttcactcggatgttcgatccggggacataacttatcgagacgctcgaaattgaacaaccgaagctctcgacaaattagaatggtcgtaactcttcacgcgaatgttcgattcggggacataactcatctagacgctcgaaattgaacaacggaagctctcgagaaatttgaatggtcataagttttcacacggatgttcgattcgggaacataatatatcaagacactcgaaattgaacaacggaagctctcgagaaaatcgaatggtcataacgttccacacagatgtccgattcagggacataactcatctagacactcgaaattgaac

SEQ ID NO: 2135 - DNA, 392 bp, Glycine max
  unsure at all n locations
agcttgtaggccttagatcttcttcatcaatgaagtccnttgcttcttgaagatcaatggcagcggaatggagaaggaggaaaggtgattagagatgtcacttcaaggaaaaaatgagtcaaaatcaagttcaccaccataggaagccatggataagagctagaaagtatggaaagatgagtggagggagagggagaaaaaagagggtaccttagtaatgtaggatttttcagcccttgtattttangacacttatanctagttttgtattaagaaataatttataatttcacatgcattaaatgtattatttgatgtgtgtatgttggtagataaaattaattgaattagaagaagcacaatgcacatgatgtactaccatgtgagatgtg

SEQ ID NO: 2136 - DNA, 381 bp, Glycine max
  unsure at all n locations
agcttgagaatggagaatngcactaagcaatcactacgcatagttccaaactcgaaggtggaggacacatgaacgaaaacacaattcatggggctccgaanaaggggttgagaatggagaattacactaagcaatcactacgcatagctccaaactcgaaggtggaggacacatgaacgataacgcaattcatggtgctccgaaaagattgagaatggagaattgcactacgcaatcactacgcatagctccaaacgcgaaggtggaggacacatgaatgaaaacgcaattcatggcgctccgaaaagaatgagaatggagaattgcactaagcaatcactacgcatagctccaaactcgaaggtggaggacacatgaatg

SEQ ID NO: 2137 - DNA, 424 bp, Glycine max
  unsure at all n locations
nggacagttcagcagaccacaggtttgtggttaggattcttccctcaggaacccaatgagcatatacatccttcaatgtttgaatggctttttggccttctggggtctccctgcctccaatgaggacacggtccggattgaaaagatcttggattgcagttccctcagcaaggaattcagggtttgaaaggatttggaacttgattcccttgccattgtgagtcaaaattttctctatggcctcagcagttttcacagggacagtggatttctccaccacaatcttgtcactcttggatacatcagcaatcatgcgtgctgcactctcccagtacgttaaatccgcggccttaccggctccaagaccgcgagtttttgtcggggtgttgacagagacaaacactatgtctgcctcatagacatg

SEQ ID NO: 2138 - DNA, 413 bp, Glycine max
  unsure at all n locations
agctntacattntcgtgaatgtgacaatctatttcttagtggattgattcaccttaacagcccacaaaatcatataagcataattagatgcaacaactcactcatctccaatcttcatatgattgcaccaaatgaaagcccaaacactgatgagaatgttatctcacattcatccaacatttccataaagaactccaagatggaaattggtaaatcatatataagttacaatctttaattgcataattattatatcttgtccttaaatcattcaatgagaatgcatagccctttaattcctagttntttttataaggctactcaagtggtagatcctctcttnaattttttattaaaaaatatgtgatggtaaatattcattttctcattaagttgcaatcttatgtataaaa

SEQ ID NO: 2139 - DNA, 455 bp, Glycine max
tcatgtcaaagagagaacgtttttctctgtccaaaagcactctttgagctttctccaatcaacttaaatgcagcttctgcaccagcaaagttgtttttgtcaggatgaagttggagagcaaacttgctatattgcttcttaattattgcatcaccagctgtctgttcgacctgaagaatttcataccaatccatctcattaccatacaatttctgctcagcagagcagtgcacatcacaaacaacaagcatttgagctatattttccagatcaaggtacagctgctgagcctttagagcaactttgcgagccccaacaaaatccctgttttccatcttcttttcagaatgtccttggcccttaaggcctcttctttattgcagtccatcaaagatccagatgggaaaatattatagtggatgctatggccaagtgaagctacatttaatccaaca

SEQ ID NO: 2140 - DNA, 378 bp, Glycine max
  unsure at all n locations
gcaagcttgctcagctagctgatataatcatgcatacttttctgatgatgaccgaggaacaattagggatcaacttgaaacttatgtgcttcacgtgagaagaaatgcttctttttccacttgtgaagatgttcaaagtttggctatgaagatggttcaaactgagaaacatttggtatttccattggtttataaacttattgagctagctttgatattgccggtgtcgacagcatccgttgaaagagctttttcagcaatgaagattatcaagtctaaattgcgcaataagatcaacgatgtgtggttcaatgacttgatggtatgttacaccgagcgggagatattcaagtcacttgatgatatngatattattcg

SEQ ID NO: 2141 - DNA, 450 bp, Glycine max
  unsure at all n locations
tgttagctntaaggaggtacctctgagatactacatacctacattggttgtgcccttaaggtatttaatgatccttttaacggctgttaagtgagattcctttggattggccatatatcttgcacacaagcaaacacttagcatgatatccggtctacttgcagttaggtagagaagtaatccaatcatacctctatatcttaactcatccactgatttacctttctcatctaagtcaaggtaggttgaagttgcattggagtatatgcttctttgcatttttccatacagaatttcttaattagttatatacaataattggttcgactaaggaaggttccattctttatctgcttgacctggagtcaaagaaagaagttcaattctctaatcatatacatctcanattctttctacatacaacttgaaaattccttacacaaaatttca

SEQ ID NO: 2142 - DNA, 445 bp, Glycine max
  unsure at all n locations
gtacagcagatgtcactctactccaaattcttgaaggatatgtttacaaggaaacataagtacattcactaggaaaacattgtagtggaaggaaattgtagcactgtgattcaaaagatccttccacctaagcataaagaccctgagagtgtaactattccttgttcaattggagaagtcactgtgggaaaggctcttattgacttangagccagtataaatntaatgtcactctccatgtgtagaaggttgggagagttggagataatgcccactaaaatgactttacaaatggttgaccgctctattaccagaccatatggagtaattgaagatgtgctggtcagagtgaaacattttatcttcctgacagacttcgtggtaatggatatctgtgaagatactgacattcctgtaatattgggaagggcattcatgttaactg

SEQ ID NO: 2143 - DNA, 432 bp, Glycine max
agcttcttagtttcagatgatgcagatgggtttgttttacctcatgcactcctctaatgactatggcatcatttctggcgctaaactgctgggagttggaggccatcttctcaattaaatttctggcttcaacaagagtcatgtctccaaaggctccaccactggcagcatctatcatacttctctccatattactgagtccttcataaaaatgttggaaaagaagctgttctgaaatctgatggtgagggcaactggcacatagtttcttaaatcgctcccagtactcatacaggctctctccactgagttgtctaatacctgagatatctttcctgatggctgtggtcctggaagcacggaaaaaaatttctaaaaatactctcttagggtcatcccagctcgtgatggaccttggagcaaggtaataca

SEQ ID NO: 2144 - DNA, 453 bp, Glycine max
  unsure at all n locations
agcttcattcctttntcactcatgtgtccaagtctttgatgctcacatggttgaattattgacagcctcagtaattgctaccatatcctcatctgcaatcatgtaaagagatcctcgcttctttccacgagccacaatgagattgccttttgttaccttccaagctccatctccaaaaggggtgtaatgtccctcatcatccaactgccctatagatattaaatttctctttaaggcaggaatatgtctgacattgtgcaatgtccatagggatccactagaggtcttaatgttgatatcacctcttccgacaatgtcaagagattttccatctgcaaggtaaactttttcaaatcttccagaaacatagttagacaataaatctttagagggagtagtgtggaacgacgcacctgagtccatgatccatgaatcaacaggactatccaaact

SEQ ID NO: 2145 - DNA, 452 bp, Glycine max
  unsure at all n locations
ggcttctacattnttcatggtaccaattggttctttctttgtatagcttggatgattcatatgcgttgaggcgcatctctttaagttcctgtagctttaccttcctcctctctctacatgttgtagagtcaaagttgaggaacttcatggcccaataagcttttatttctaactacccttgtaggtggcatgcttttccgtacaccatttgaaacggngagaggccaatgggtggtttgaaggttgttttatatgcccataggcaatcatcaagctttgcagcccaatccttccttgaagtagctacggtcttttctagtatcctcttgatcctccctatttgaaacttcatcttattcatatgtttgtgaataatagggtgatactactttatgttgaacattatagtattggaggacctttgagagttgagcattacaaaagtgtgtacc

SEQ ID NO: 2146 - DNA, 255 bp, Glycine max
  unsure at all n locations
tcttgtctctctttcttgacttcctcaacgtctcctttacaccttggcttaacgaggcttcatcttgctccttcaagcccttctctacgatatcccacacatcttgagctcctagtagcgccttcatcttgatactcccaattatcatagttgtctttgtgagcatcggcatttggaaaggaaaaccttcattcgccatcttttgaggatctttgagctctgataccacttntgtggaaataaggctttttatgt

SEQ ID NO: 2147 - DNA, 430 bp, Glycine max
agcttatgctgcaaacatttacaatagacctccttaacctcaacaacaaaatcaaccacagcagaacaattatgacctctccagcaatagatacaaccttggatggaggaatcaccctaatctcagatggtctagccctcaacaacaacaacagcaacctgctcctttcttccaaaatgttgctggcccaagcagaccatacattcctccaccaatccaacaacagcaacaaccccagaaacaacaaacagttgaggctcctccgcaaccttccctcgaagaacttgtgaggcaaatgactatgcagaacatgcagttttaacaagagaccagagcctccattcagagcttaactaatcagatgggacaattggctacacaattaaatcaacaacagtcctagaattctgacaagctgccttctcaagct

SEQ ID NO: 2148 - DNA, 375 bp, Glycine max
  unsure at all n locations
agcttagtcctataccattgttcactgaactctttataactgttggggaacaggtccttaagtttcccacacctaaagtaattcaaggtagtacattaaaagcatattcctgatcctagcaatatttatattcataaataaacatggtaagctgatacatcttttgaaatgttttttatttggaacagtgaatctgtctggatggatgactgatgaagagtttgcaagagagatgattgctggagtaaatccacacattattaagaaacttgaggtaaatttactattgaactgttaagtacataacactantaaacatttatccacttgttaaatttgcagttgataaccttaactcattgcaaattatattta

SEQ ID NO: 2149 - DNA, 379 bp, Glycine max
cacacggaagtccgattcatgcgcataatatatcgagacgctcgaaattgaacaacgtatggtgtcgataaattcaaatggtcataactttgtcaacggatgtccgattatgcacataatatatccagatgctcgaaactaaacatcgacagctctcgagacatacaatggtcataacttttcacacggaagtccgattcaggcgcataatatatcgagaagcttgaaattgaacaacggaagctctcgagaaactcaaatggtcataacttatcacacggacgtctgattcaggcgcttaatatatcgagacgctcgatattgaacaacgcatggtgccgagaaattcaaatggtcataacttgtcacacagatgtct

SEQ ID NO: 2150 - DNA, 340 bp, Glycine max
  unsure at all n locations
agcttgtaaatgaacaacggaagctctcgagattattaaatggtcataacttatcacacggaagtccgattcagacgcataatatatcgagaagcttgaaaatgaacaatggaagctgtcgagaaattaaatggtcataacttgttacaccgaagtccgattcaggcgcatactatattgagacgctcgaaattgaacaacggangctcttgaaatattaaatggtcataacttattacacgggagtccgattcgacgcatatatattgagaccttgaaattgaacaacgaatgctctcgagaaattcaaatggtcataacttttcaaacggaagtccga

SEQ ID NO: 2151 - DNA, 469 bp, Glycine max
  unsure at all n locations
tctatggaaactgggatcttgagcttcaatgaagtccttcaatggtgattttcaaccatggagatgcagcggaagataaaggagaagatgtgagatgatgtagcttcatgtagagcttgtaggccttagatcttcttcatcaatagagacttttgcttcttgaagatcaatggcagcggaatggagaaggaggaaaggtgattgtagacgccacttcaaggagaaaatgagtcaagaacaagctcaccaccatatgaagccatggataagagcttgaaggtangagaagatgagtggagggagagagggagaangggcatganatgtatgcctcaaatgaggtttgaacattgaagtgtaatttctcaaatgttcanagttgaaaaaatacacacacaaaagcttctatttatagcctaagtgcacacaaaattggagggaagattgaatttctattcaacttcacttg

SEQ ID NO: 2152 - DNA, 421 bp, Glycine max
agcttctgttttcaatttcgagcgtctcgatatattacgggactcaatcggacatccgagtcaaaagttattgcggtttgaatttgatgtgagactccgttttcaatttgtagcgtctgaatatattatgggactcaatcagacatctgacttgaaagtttttgcggttttaatttctaggggcatctgctctgaatttcgaatgtctcgatacattatgggactcaatcggacatccgagtaaaaagttattgtcgtttgaatttgctacgagattctgttttaaaaatggagcatctcgatgtattacgggactcaattggacatacgagtaaaatgttattgttgtttgaatttgcccagagctctcgttctcaatttggagcgtctcgatatattaccggactcagttggacatccg

SEQ ID NO: 2153 - DNA, 446 bp, Glycine max
  unsure at all n locations
aattactttggttcggtcaaaattatttattttaggataatttatttttaccaaaatgtgtaggcttttatttttctttttattactaattatagggatgcaatctttgttttgtaaagccataagtccacttgtatgttcttcagttaattttggaattatgcttttttcaaaattttcgtaaagaaaatctacagttttttctatttggtttagtctgatttccaaagtggaaatcctattgttcataattttatttccatgatcattttctttcttaaagtctggaaattctattttcagaatagtttgtacactagttntgcagaaattcttatagcataaactacagtgagctcttagtgttttgtgtggatatcttttacagaaataacattctttgtgatctggtcctatgtggaattgtatttcatgttcatggtcat

SEQ ID NO: 2154 - DNA, 472 bp, Glycine max
atactcaagcttcttagtttcagatgatgcagctgagtttgtagttacctcatgcactcctctaatgactatagcatcatttctggcactaaactgctgggagttggaagccatcttcttaattaaatttttggcttcagcaggagtcatgtctccaagggctccaccactggcagcatctatcatacttctctccatattactgagtccttcataaaaatattggagaagcagctgctctgaaatctgatggtgagggcaactggcacatagttttttaaatctctcctagtattcatacaagctctctccattgagttgtctaatacctgagatatcctttctgatggatgtggtcctggaagcaaggaaaatgttttctaagaatactctcttcaggtcatcctagctcgtgatggaccgtggagcaaggtaatacaaccagtcctttgccactccctctaaagaatat

SEQ ID NO: 2155 - DNA, 458 bp, Glycine max
  unsure at all n locations
ntattcttaattttcttgaacttgataattgggaatttgctttatttntgacaatacactntcccattcgtcaatcctcctaccatgtaagtaagatccaagaacttcaagagctagtagtagtcctccacaataagcaactacatttcttgcaagttcattgaagtcttcttttggatttggttctccaaaagcgtgaaaacaaaaaagctcaagagactcattttcgtccatttcctccatttcataaacataatcaactntaaataggttcagtacacctgcatctcttgttgtaatgattattacagatccttgaccgaaccattcacaatttccacataaatcttctaattggcgaatctccttcacatcatcaagtacaatgagcaccctttttcctgaaagtctattctctatcatagttggtcccatcccaatgctatgtatcttgacct

SEQ ID NO: 2156 - DNA, 458 bp, Glycine max
  unsure at all n locations
tttgagcaattcaaatggtcataaatagtcactcggaggtcttattcangcacataatttatcgagacgctctaaattgaacaacggaagctctcagaaaatttaaatgctcataacttttaactcggaggtccgattcatgcggataatatatcgagacgctccaaattgaacaatggaagcttttgagcaattcaaatggtcataaatagtcactcggaggtccgattcaggcgcataatttatcgagacgctctaaattgaacaacggaagctctcagaaaattcaaatgctcataacttttaactcggaggtccgattcaggcggataatatatcgagacgctccaaattgaacaatggaagctgttgagcaattcatatggtcataactattcactcggaggtccgattcaggcgcataatttatcgagacgctcgaaattgacaacggaagc

SEQ ID NO: 2157 - DNA, 397 bp, Glycine max
  unsure at all n locations
ctaagctgaatagacattcgtgtgaaagtatgacatttgatttttcgagagtttccgatgtttaatttcgagcgcatcgatatattataagcctgaatcggacatccgtgtgaaaagttatgaccatttgaattttagagagttcccgatgttgaatttcgagtgtatcgatatattatacacctgaatcggaccttagtggtaaaagttatgaccatcntgaattcacgagaagctttgttgttcaatttcgagtgtcactatatgtgatgcgccaaaattggacattcgagttaaatgttatgagcatttgaatttctcaagagcttccaatgttcaattctgagcgtttcgatatgtgatttgcctgaatcggacatccgtgtcaaaagttatg

SEQ ID NO: 2158 - DNA, 341 bp, Glycine max
agcttcaacctagaggagacggaccattccaagtgttggagaatatcaacgacaatgcctacaagattgacttgcctagtgagtataatgtaagtgccactttcaatgtgtctgatctatctctttttgatgcagatggaggagccttggatttgaggacaaatccttttcaagaaggagggagtgatgaagacataaccaagggcaaggaccatgaagcacttgaaggttccatgaccagaggcagacttaaacaagcccaacacgttatagagacaacgctggtcatttgtatagctgccattgatgatgattgaaggcccaagtggagaaagatgaat

SEQ ID NO: 2159 - DNA, 462 bp, Glycine max
gtcttatttcagcagatgaagatgaatccatggccacatcatggactcctctaaggacaatagcatcatttcttgcactgaattgttgggagttggaagccatcttctcaatcagattcctagcctcaacaggagtcatatcaccaagagctccaccactggcagcatcaatcatactcctctccaggttgctaagtccctcatagaaatattgcagaaggagttgctcagaaatctggtggtgaggacagcttgcacacaatttcttgaatctttcccattactcatacaagctctctccactaagtttccagatgcctgaaatgtcttttctgatggcagtggtcctagatgcaaggaagaatttctccaagaacacactcttaaggtcatcccagctggaaatggacctcagagcaaggtagtacaaccaatccttcgccactccctccagagtataaa

SEQ ID NO: 2160 - DNA, 456 bp, Glycine max
  unsure at all n locations
agcttctaaactntatacaagaatgaagctctgataccacttgttagacatgtggcctcagatatcttaagaaggggggttgaattaagatattacaaactgtttccccaattaaaaattctactttgattctaatgcaagttccaagttcccttaaagatgaatttctaaatgatgattcaaattaaacaatctgaatgtaactgttaagcaacaataaataaaagagtttaagggaagagaaagtgtaaacacagtttttatacaggttcggcaaagtccgttgcctacgtccgatccccaagaaagccgcttgggagttccactatctcgtaatcctttacaccttctgaaacacacaaggacatcccttcctttgtgttcagatgctttacaacaagagactctcagtctcttagccctttgatcagaaagagaggaagaagaaatgatctt

SEQ ID NO: 2161 - DNA, 452 bp, Glycine max
  unsure at all n locations
tctaccctggatcgaatggtcacataacacctcttgtaacgtctgcacaggcacaactccttatgaggtgacgtttggaagaaagccatttaactttccagagtatatcaaaggaacatctaacatcgaagcattgaatgcttattgactgacaaagatgccactttccaaacgattcgcaaaaagcttcttaaagcacaggaagctatgaaaaagtaggccgatagcaagaggcgcaacaggcaataccagataggtgattgggtcttgctccggcttcgtcctctccaccagacatcagccaaagggcctcaaatagcttctggtaaactcgcaaaacgattctatggacccttccaggtaatagatcgcattggcattatggcctacaaactgaaattgccggagacagctaanatccaccctgtgttccattgctctaaacttaaacc

SEQ ID NO: 2162 - DNA, 411 bp, Glycine max
  unsure at all n locations
agaagtagtatatttcaccttcaaaccaattcaatcaactatcaaatatganattacaacacataaaggcgccaatgaaccgaatagcactcaaaaaagagtacatcgcatgctaaacgtgacttacaggaaacgcattatagaccatgtgatgctcaatatcaagcagctccccagtctccaaacacgaaggtctgtgaactggaaagctagttttgagaaactgttccaatcgatgcgcatcgatgtttgatctgtagcctccgtctcactaaaaccaatcagaaccacgttcacttcaagcggaactcgaaacgggacctacacgaaccacagactaaagcattcacacttaatataacacatcaattaattggatagcgaatgtgaatttgatttttgtggtgacca

SEQ ID NO: 2163 - DNA, 448 bp, Glycine max
agcttagaaagacaatacttcattcatgacatcaaataaactttaaagtcatccgcaatattcaaataaaacatatatgaattattggaaaagataaaacacaatgccaaatgtgagtgcataccactagtcatatatcattaaagtaattaagtttaagacacataatcatgaacaacctagagcacgtcaatataatcataatgttcagtcatactaagcaagtgttaaaagaaatactaagtattcaaatgtcataaaaacatagtcaaagacaaggcttaaaaacaaaatataattataatctaaatatattatcagagaatctaagcttaggtttaagtaacaaaaattagttatgaacacatacatggtgactcattacttatcttgattaattaaccactagattttaagtatgatataacaatcatgaacacatatcata

SEQ ID NO: 2164 - DNA, 455 bp, Glycine max
  unsure at all n locations
ntggaagcaatcttgtattggtgcttccttcatcattcctgtttatgccttcagcaaccaagtcaaacagtaggggggccaaaggatccctttgtctcaaacctctttgaggcttaaattcagaggttgggcttccattcactagaatagatatagaggctgatgtgaggcaccccttattccatccaatccatatatcatggaaccccattcttctcatcatataaaanaggaattgtcaagacattgaatcataggctttttcgaaatccactttataaagacacacccacacacacacacacacatttcctctcaactaccttatttgcaaccagaacaccatggagctactgtctacccttcacacagacacacccacacacacacacattcacgttgggacacacccactcatactcacacacacacactcactcggacacacacgcaca

SEQ ID NO: 2165 - DNA, 448 bp, Glycine max
  unsure at all n locations
agcttcaagaaaaagatggcctcagcaaattccttatttccagaagggaattctatcaatagacctccaatctttaatggagagggttaccactactggaaaacccgaatgcaaatttttatcgaggcaatagatctaaatatctgggaagccattgaaatagggccttatatacccaccacagtagaaagaagttcaatagatggtagttcatcaagtgaaagcataaccatagaaaaacctagagatagatggtctgaagaggatagaaaacgagtacaatacaacctaaaagccaaaaacataataacatctgccctaggaatggatgaatatttcagagtttcaaattgcaagagtgctaaggaaatgtgggacactcttcgataacacatgaaggaactacagatgttaaaagatctangataaatgcactaactcatgagta

SEQ ID NO: 2166 - DNA, 435 bp, Glycine max
  unsure at all n locations
agcttgccttgccccttgatatatttaagggactcatggacactatgaatgaaaaattccttgggataaaggtagtgttgtcatgtattcaaagcccgcactaaggcatacaactccttatcataagttgaatagttaagggtacaaccacttatcttttcactaaaataagcaattggatggccttcttgcatcaacacagccccaatcccaacatttgaagcatcacactcaatttcaatagatttttgaaagtttggcaacgcacgtatgggggcattacttagcttttgcttaagaacattgaaagcttcttcttgtttctctccccattcgaaaccaacatttctcttgagcacttcatttagaggtgctgccaatgtgctataattcttcacaaatcgttataaaaacttgctnaccatgaaactctca

SEQ ID NO: 2167 - DNA, 430 bp, Glycine max
  unsure at all n locations
agctntatgngatgtaaagacctgcaacttctctattgatcatgctggagaaggaaatgaagtgcaactaagtgagctagatgagatccgtttacaagcctatgagaattccaaattctacaaggagaagaccaagaagttccatgaaaacttgatagctaaaaaggactntgtggttggacagaaagttttattgtataactctaggctcggactcaagagtggtaagttgaggtcaaagtggattggtccttttgtggtggctaatgtttttccttatggtacagttgagatcaaaagtgaatccacatataagagttncaaggtcaatggacaccggctgaaaccattcctcataaatcccttcttagcggatgtagtggtggaggagaccctcttacttcaccctacttctcttccgccatgactt

SEQ ID NO: 2168 - DNA, 306 bp, Glycine max
  unsure at all n locations
agcttgtagggttaaagtctcacgattgtcatgtgttgatgtaacatcttgccaaacaaagtcaggttagccataactcgcctgtgctttttcttccatgccatatatagcaaagtcgttgatcctgtcaagtatgatgagctggaaaatgaggccgaaattatactatgccagttggagatgtatttttcccctgctntctttgacatcatgattcacttgattatggatctggtcagagaaatcaaatgttgtggtcctgtttatctgtggtggatgtacccggctgagcaatacatgaagatc

SEQ ID NO: 2169 - DNA, 455 bp, Glycine max
  unsure at all n locations
ntacattactcctcatgcttctcaccatgtctaataagggtttatttcttcgntctgccacaccattctgatccggagaaccaggcatagtgtattgggcaacaatcccatgttcttgaagaaattttgcaaatgaacctggtgcttgtccatcctctgtgtatctaccatagtactccccacctctatctgatctcacgatcttaatttgttttccacattgtttctcaacttcagccttaaaaactttaaaggcatctaaagcttcattcttagaatgaagtaagtagagatacatatatcgtgaataatcatctataaaggttatgaagtatttcggactatttgcatccatgtctggacaacatatgtctgtatgtatgatttctaataaattagaactcctctttgcaccttcttagacttgttagtttgcttacccttaatgcaatcta

SEQ ID NO: 2170 - DNA, 462 bp, Glycine max
actaagcttgtgctgtgtacttttactctctcaactctcaattactggggcctttagcttgcgtttgtgtccttctatgctatattatgcagtaaaaagatttgagagatttttcttacagtaaaacactaaaacattctgtacttcatgatatggttttgaagttctgaggggacattttattttcctgtggtggtttgcatcttttgcaagtatcagataacactccttgatggggttgggagtgtttggttctgttctggttttggcactcttattcaagcatttggcatctcaacttccaaatactgatgagttctctgtgtctgagttcttgaagaagatgatgggtttagcatctttccaaggctacaacttctctgcttctgtctgttcatggaaaggggtttcttgtgatgccaatagagaacatgttgctgacttagtcttttctggtatgga

SEQ ID NO: 2171 - DNA, 532 bp, Glycine max
  unsure at all n locations
tcaggctgctcaattgctccaggttgctgcatggaagggcaaaggtctgtatggtggtcatcagaggagcacaaaccacaaacccttgcgacaggtacaaatttctgattcaaggccagctgggttaccaagttgaccaacgcatccagtttgccttcaagcttcttagtttcagatgatgcagatgggtttgtagctacctcatgcactcctctaatgactatggcatcatttctggcactaaactgctgggagttggaggccatcttctcaattaaatttctggcttcagtaagagtcatgtctccaagggctccaccactggcagcatctatcatacttctctccatattactgagtccttcataaaaatattggagaagaagttgttctgaaatctgatggtgagggcaactggcacatagtttcttaaatctctcccagtactcatacaagctctctccactgagttgtctaatacctgagatatccttcctgatggctgtggtccttgaaacanggaaaaattttt

SEQ ID NO: 2172 - DNA, 514 bp, Glycine max
agcttcacatggagctatatcatgtggtatcaagagcaacttcttctatgtaatgttcttttgctttctctatcttttgttcagtcaattcactttcattccttgttcttcatcttattctccatgtatctcttccattttcttatggtttggtgttttttagagtggatccaaaaaaataaatcgattaaatcttagatctacacttgttcttgcatttctatggttcaaattttataaatctactcttgaatcatgtttttgtgttgattttaggttctataatttttcagtcataatcttcttgtactaaacctttaaatttcaattttcttgcaaaatattgattagaaaagaaaacacaaaaatctaagtgtaaatcacttaatccatgttgtcttagagtcatgtttagtcataataattgtcacattatgttctaagtttgcgttcattttttattttgttgattgaattctagataccatttttttatttattcttgcaattctta

SEQ ID NO: 2173 - DNA, 317 bp, Glycine max
agcttgaaattgaacaacggaagctctcgagaaattttttgtgttataaatttacacacagatgctcgatccggggaaataatatattggagacgcacgaaattgaactacggatgctctagacacaggtgaatggtgataacatgtcactcggatgggcgagactgtgccaatttctatccagacgcttgaagtcgaacaaccgattgtctaaacatattacaatggacgcaactgtttacgcgaatgttcgattgggggacaaaactcatgctgacgctcgaaatggaacaacggaagctctatagaaattcgaa

SEQ ID NO: 2174 - DNA, 537 bp, Glycine max
  unsure at all n locations
gtttgatcttctgattcacgtgcttaaaatgctctcgatacttttattcttcctctcaaactctttgaactcttccttgcacttcctcatatcattatctaactcctattttatgaaaatgaaagaaaaaaacaatgactagattacttcctcaaaagcttatcattaagaatcatatgaccagcaatataatcatgcaaactgattcaattagaaaacccgtctcatccaaacctcttgtcttttcatatagttgttgggcgcagtttcaagctctttgagagtttgttcactatcttggattttatccctggaataagataccaccatgttcttcgcgaggaaagaattcaaattcaccaaataaagaaaaaaaaattccccattgaaatccaaatgtacctttctgccttgagatntcttttagagtagcaacattcccttgtaactcattcatttttccacctgtatcatcaagggccaactttgtagctttctgtgccatttaaacagagacaactccttaacatgtatgct

SEQ ID NO: 2175 - DNA, 500 bp, Glycine max
agcttgtagggttaaagtctcacgattgtcatgtgttgattcatcatcttgccaaacaaagtcaggttagccataactcgcctgtgctttttcttccatgccatatatagcaaagtcgttgatcctgtcaagtatgatgagctggaaaatgaggccgaaattatactatgccagttggagatgtatttttcccctgctttctttgacatcatgattcacttgattatggatctggtcagagaaatcaaatgttgtggtcctgtttatttgtggtggatgtacccggttgagcaatacatgaagatcttaaaagggtatacaaagaatccttatcatctagaagcatctattgttgagaggtacattgcaaaagaagtcattgaattttgttcagaatacattgagaaggctaaacctattggccttcctgagtctcggcatgatgacaaagtgggtggtaagggttcaagaagactgcatgtgatcactccaagtctaaa

SEQ ID NO: 2176 - DNA, 475 bp, Glycine max
tccgactatgctcttgtgtggtggaacaagcttcataggtttatacaagaaatgaagagcccatggttgatacatggacggagatgaaaaagatcatgaagaagcggtatgtgccggctagttactcaagggacttgaaattcaagctccaaaaactaacccaaggcaacaagggggttgaggagtatttcaaggaaatggatgtgctcatgattcaagcaaatattgaagaagatgaggaggcaactatggctcgatttcttaatggtttgactaatgatatccatgatattgctgagctgcaggagtttgttgaaatggatgatttgcttcacaagatgtccgattcagtagcataatataacgagacactctaaattgaacaacggatactctcgagaaattcaaatggtaataacttttaactcggaagtccgattcatgcgcataatatatcgagacgcctgaaattgaa

SEQ ID NO: 2177 - DNA, 500 bp, Glycine max
  unsure at all n locations
agcttgtaccttcacagtctacaaaatcgcattctaaattgattgagaggtgttttggctaaagaaaactttagattttttgtattttagagcccggccaaatgcagcttcctaatcacaaaagatattcttcaaaataacattatcttgcaaattttctctagaaaacaatcatccacgaataataaatgcaaaatcccaggtgctttcccacaaatcttaatgccatgaatatccctcctattttcaacccttctcaataaagatgtaagaccttgagctaaaattataaatataaaaaagggagaagggatctccttgccagagatctcccaggggagataggatcaaccttgtcatgattcactaccactacatactaaacagttttgacacacatcatcatccactcggtccattgattgcaaaatcacaacttgacaaggattgcatctagaaaccccagtcaacgaggtcatangccttacatatatcaatct

SEQ ID NO: 2178 - DNA, 529 bp, Glycine max
tgatggacgaatggcctcactccaagcaacaagaatgttcaccgcaggagctcctaagttaggctttagaatttcaagggtgagaaaattaggccttcttgatgaaaatgctggtactacaggagatggtttgattcccaaccttgtgcctttaaaagctagagttgcagtagaacttttacttgataggagataacttttgagcttttttccttctttctctcctatttcaactactagaaggaggtgagaatctgcaaccaattcttctccattggcttccgtgtttgtgagaatcattcccacccctcctaaacttctcaccacatcacccttttgcactctaggactaaggcttctatcacaaattactatctttcctgacagcactttaggatccaaggtcccttccaagcatatagatcttggatcaaccctactagaattgctcaccatgtaccacccaaggtattgtttctcaattgatagcacatttttccatttatagagtgaaactccaatcattttt

SEQ ID NO: 2179 - DNA, 515 bp, Glycine max
agcttgatagacctgtaattcttacacttgctgggttaccactctcaacattgggcaatgcttgtccgtacttaggggctcgacaaaattatcaccccctacctgtcaaggctaccaccccggacattagacaatcttcaacgcaggacaatctcttttgcctgcaagtcggctcagagcttggtgttagacaagtggcctcagaaatcttaagaagggggggttgaattaagattatgctaactattcccccaattaaaacctactcagatttttatgcaagttctaagtttcctttataacaaattacttagatgatgaatcaaatgagcaaactgaaatgagactaataaacaacagtaaatataagagataaagggaagagagaatgcaaaaccaaatttatgctgcttcggtcacacccttgtgcctacgtccagtccccaagcaacccgcttgagagttccactatctttgtacattctttacaagtactgaacaccacaaggactttc

SEQ ID NO: 2180 - DNA, 364 bp, Glycine max
  unsure at all n locations
tctaaactttatacaagaatggagctctgataccatttgntaatttatttttctcagatatcttaagaagggggattgaattaagatatcacaaactattccctaattaaaaattctattttgattttaacccaaatcccaagattccttttaaaatgaattcctaaataattattcaaattaaacttactgaatagaagccatatacaataagaaataaaagagtttaagggaagagaaagtgcaaactcaattttatactggttcgaccacacccttgtgccttcgtcgagtccccaagcaacccgcttgagagtttcactagcttggaaaaatcctttacaagctctttaccacacaagga

SEQ ID NO: 2181 - DNA, 415 bp, Glycine max
agcttttggtacaatgaagaagaagaagttcaaagagattttatgcttgtaaaggattgtaagagattgattggaagagtattcaagattgaatgaattaatagaaaatgcaaaaacaaagtcttgcttttatagactcttcatgtctggtcaagaagaccatttagaagagttataacatttagaaaagcttaaaaccaatttgaaaaagtcaaaaaccttttgaagagttacatcttttgatttattcagaaacagtcactggtaatcaattactaaatcagtgtaatcgattacacaaagcttttatgtgaaaagatgtgactcttcacatttgaatttgaatttcaacgttcaaaggcactggtaatcaattaccaaaacattgtaatcgattacagctttttgaaattaa

SEQ ID NO: 2182 - DNA, 554 bp, Glycine max
gctgcatgcatgctatcttgccattgataggttcacgaatcttgggaaaccatttacctcaaatcctctgcctcacacctccgaactcgcaatcggagttatgaggccctccctttcgtatgatgcatccttttgtagaacctttcgcttgaaccatgtgaatcactatcgccccattttgtgtacaaccaacttagggctgcctgatgtacttcttccactttgtaagagaggcctccacagaatcactttcagcactgcaacatttccgcgatttcctgtttctgcggccattccgaaaccaacaaataaacagaaacatgttgcgactttgcacttactttcttcaataaaacgttggctaacgtctcagactcgacacaatcacatattgaaacataacggaagcataacaaaacggagcttatgcagctaccacaaattgattataacaaatagcgcgtgaattgagactataaagaatatttacattgtccttcaatcaatcataaactatcctgtgtgacaatccatgaaaaataaatttgactgaa

SEQ ID NO: 2183 - DNA, 615 bp, Glycine max
tttatgagtggccaatataccaaaatcaacatttttttaactaaagtttttgttttattttctttttaatgtaaaaatgtgtaaaactagttgacactcctctgtaattggtttggataggatgttaagtacatgtaaggactattagtagcaaaatttcatcttgttgttcaagtctaaattataagcaatcataagtttacaattattcaactagtttttaagtgttaggagaatctacgtgaaaaagatcatccacatcaaataaaattttagtaacatcaaaagagaatcaaatttatatccacaaaaaagataagagtcatttttagatttttattaatttgtatcgacctgtcttgttataaaaatttaaaatagttctttttttaattattttatacttaatagttcttattaaaattaaaagatttatcatatagacagtataataatttgtgaataaataatataaaaaagtaaataaattatataataatcataattataatatataataaacttattgaattttaaataattaaatatgcacactgaaatttgattaatagtcaacataattctcatatacataaaattaaaaacataaaaaat

SEQ ID NO: 2184 - DNA, 605 bp, Glycine max
agcttcaggaacacaaaatggaactcatgagactaaatcttcatgaagaaaatgacaagaaaaagaaaggaatgacacttaaagttttatcttcagttcaagaagaaagtgataaagaagacttgaatgaagtagaagagatgatgatttcagtttcttcgtaaagagattaaataaattcctaagaaacaaagaaaatcaaagaagatcaaacttcaaaccaaagaaaagaggagaggattcatcttttgttccaaagtgttatgaatgtaaccaaccaggacatctgagagttgattacccgagtttcaagaaaagaatggaaagatctaagaggaaaactttcaatgataagaaagcaaataaagcttacatcacttgggaatataacaatatggattcatccgaagactcagaaaatgaagtcatgaatctaagtcttatggcaaaaaaatatgaaagcgaagaagaggtaacatcttctaacaataacttatctatttcctttgatgaacttcaagatgcattcactgatttacataaagaatcagtcaaacttgcaaaacttgtttcattttccaagaaaactattttaaacttagaaa

SEQ ID NO: 2185 - DNA, 467 bp, Glycine max
ctacctgcatgcatgcttcacaattatgaactcgtagctactatagaattttcattatatgattcattatagtttactgctctatgtacattctttctaactatttctagcatttttcccccgttcaaaatcatcattcctgttttgatgctctacaacatctcatgttaaagtctctttgaactatccataacatatgatgatgtacaattcccccatcccacgcaaagtcatctattataactttagatgaactcattgtcaatgacgtaattgaaagtccatattttccatctctaatggatagagaacaacatattaaaggcagtggtgatcttcgtagctgctccaacaacactgaaactgacattcctcctatttctaatccaagcattgataaagtaattacatcaagtccagatgcaagatttgttaaaaaaaggcgacatcgttgcttggaggtaaca

SEQ ID NO: 2186 - DNA, 509 bp, Glycine max
ggtcggatttatcgtgaggctctttgatagaagtctgtcagtggggtcgatttttgagcataacccaatcccctatttggtaattaacgtcacagtgtcgagtatctgcgtgttgtttcattaaagcctgggccttgatcagcttcttttagatgtagttgaagttgtcttccctatgggccaatattgcatcgacgacagcaacgtttgaagttcctattccgggaaattaaaaggcttatggacaaacattatttcatatggtgtagtgtcggtgccgacattccacgaggtattatacgaacactcgacccaagggagtaatttgtgttatgtccccggtcatcggtgaacaaaagtgcacagatactgttcaacgacgcgattcagaactttggtttggctgtcactttgcagttgataagctgagctcatccgcaattttgtaccactcaatcaaaaaattcttgccaaaagtgactgacaaagagtaggtcacaaatcgagac

SEQ ID NO: 2187 - DNA, 563 bp, Glycine max
agctttgaggagcccgcaaggtaatctggaaaggagaatgttttgtgtccaaatattatctcgtaaggtgtggagcctgtgctactattccacgaagtgttatgggataactcaacccacggcaataacttgccccatgtttctggccaacgatgcacaaaggcacgcaaatattgttcaattaccctgttcattacctctacctgaccatcactctgaggatggtaggcagaactcattcgaagatgagtgccactcagtctaaagagctctttctagaagccgctgatgaataagggatcatggactgaaactaagcttctgggaatgccgtggagtttgacaacaatgtcaatgaacaacaaaggtaccatgtgagctgtatgagcctgaggtataatgccgaagtgaatcccctttgaaaagcggtcaacaaccacaaggagtacaatcttgccctgaaaaaaaggaagaccaatgacgaaatcaagggagaggtcctcccatggtctgaatggaactggaagagggcacaacaagcccacaatatgtttcgtttcata

SEQ ID NO: 2188 - DNA, 541 bp, Glycine max
agcttgtagggttaaagtctcacgattgtcacgtgttgatgcaacaattgttagccgtggctatacgagacatcttgccaaacaaagtcaggttagccataactcgcttgtgttttttcttccatgtcatatgtaacaaagtcgttgatcctgtcaagctttagtcaaacagaaaaatccaaaaatgtcaaagaattgggtgttgaaaaagcataacaagactttctgtgattggattaaagatacaatctttgcagatgaaaatgcttcagaaacattaagaaatctagtagatgggcctaaaagaaatgttattacttggcaaggatacgacataaacaagtattcattttacacaagagcacaagacgataaaagtacaatgcacaatagtggggtcaccctaagggctgaatctcaacaacttgcaagtgtgcatgatgtcaatccctatgtagcttccatcccttactttgggttcattcatgaaatttgggagcttaactatgggaaatctactgtttggctttccaaaggaaat

SEQ ID NO: 2189 - DNA, 551 bp, Glycine max
tgtagggttaaagtctcacaattgtcacgtgttaatgcaacaattgttagccgtggctatatgagacatcttgcgaaacaaagtcaggttagccatgactcgcctgtgctttttcttccatgccatatgtagcaaagtcgttgatcctgtcaagtttgatgagcagtgaaatgaggctgcaattatactgtgccagttggagatgtattttccccctgctttctttgacataatgattcacttgattgtgcagtggatgtacccggttgagcgatacatgaagatcttaaaagggtatacaaagaatcaatatcgtctagaagcatctattgttgagaggtacattgtagaagaagccattgaattttgtttagaatacattgagaaggctaaacctgttgaccttcctgagtctcgacatgatgacggagtgggtggtaatggttcaagaggactgcatgtgatcactccaagtctagaagatttgttacaagctcacttgtttgtcttgaacaacaataatgaaagtttgccatacatacttaagcatg

SEQ ID NO: 2190 - DNA, 530 bp, Glycine max
agctttgatgtttgtgttgaatgcattaaaggtaaacagattcataagcaagaaattaggtgcatatagagctacagacgtgttgaaattgatacatacaaacatttgtgggtcatttcgtacacctttatggaatggtcaccaatattttatatcattcatagacgattactctagatatgcatacctgtttcttatacatgaaaagtcacaatctctggatgtgttcaaaaaatttaaagttgaagttgaaaatcaaatcaacaaaagaatcaagagtgtcagatctgaccgtggtggagaatactatggaagatatgatggttcaggtgaacagcgtccggggccttttgccaagtacctagaggaatgtggaatcgtcccacagtacaccatgttggggtcacctaacatgaatgatgtggttgaaaggcgaaacaaaactcttaaggatatgataagaagaatgatttgtcattccaacttactagagtcactctggggagagacactaaagactgtagcttaca

SEQ ID NO: 2191 - DNA, 554 bp, Glycine max
tgtagggttaaagtctcacgattgtcacgtactcatgcaacaattgttagccgtggctatacgagacatcttgccaaacaaagtcaggttagccataactcgcctgtgctttttcttccatgctatatgtagcaaagtcattgatcctgtcaagtttgatgagttggaaaatgaggccgcaattatactgtgctagttggagatgtattttccccctgctttctttgacatcatgattcacttgattgtgcatctagtcagagaaatcaaatgttgtggtcctgtttatctacggtggatgtacccagttgagcgatacatgaagatcttaaaatggtatacaaagaatctttatcgaccagaagcatctattgttgagaggtacattgcagaagaaaccattgaattttgttcaaaatacattgagaaggctaaacctgttggccttcctgagtctcagcatgatgacaaagtgggagggaagggttcaagatgactgcatgtgatcactccaagtgtagaacattttgttacaagctcacttgtatgtcttg

SEQ ID NO: 2192 - DNA, 571 bp, Glycine max
  unsure at all n locations
ttaaccatgatgatcaatctatgatgaagattgcatgatccttatgcatcttattctcatgagaaatgtagaaaaatcccctttgttgactcttaaaagtgatttcagaaggtaaggttcataaaatgagttacaaaagagaaaaaaacaagatatggtacttatagattttaactaatataattgtaataatcgattaccaaaacttgtaattgattaattcaatcaaatacccttagttttacatttctagaattgtgctaatcgattatcttgatcaagaaagaacaaacataactcttttagaagcaatgtaatcaattatgatatttgataatcaattatttcaacttccagaaagcttcctaaatttttcaaaggcaatgtaattgattacaagaaatgataattgattatcttgatgtacaaagccttccttcttcttgattatcttgatttgcaatatttattggttgttaggaaatgatgtaaacccatttgcacaagggttgaggatggatctttaaaggnttctttttttacttgtatgaaaatttaaaaatggaatgga

SEQ ID NO: 2193 - DNA, 509 bp, Glycine max
agctttgatggtgttgagaagaaatcacatgtttgttatttcaaaaagggggagaatgtgaatgtatgtatacatgattttgatgatgtcaaaagaagaatcaaacaaggctcattttgcttcaagattaatacaagattgtttcaacaaacaaagccttgattcaatatttcttcaagatcaagccttgcctcaaagtgtagagatttcaagtcatccaaggcacatgtaatcgattaccaatacatgtaatcgattaccaaggcacatgaaagtgtgtaattgattacacatcatatgtaatcgattaccagagactctgaacgttgggaattcaaattataactgtgtaatcgattacacaaacattgtaatcgattaccagttgaaagttttcagaaaatctgccaacagtcacatcttttcattagatttgtgaatggccatcaaaggcctattaataggtgacttgggcacgaattttatgcagaaagttttgcttgcaaaaa

SEQ ID NO: 2194 - DNA, 484 bp, Glycine max
ttgatagattgcaagtgtataattagttaagaaaactatatgagggaagttttacccaaatcatttttgtatggcaataatgctgcagtcctatgcttaatctccttacactaatctccttacacctaaacatgtacataaaaaaatgatttgatcaggtaaaaggaggaacattgagagcttctgattcattccctactggtcgacatctagttgagttatgggctccaaattcccaaaagcttccaaaaacatcagttttgaacagcataaaacttcagcaacctaatggcatttactatgaagacataacatttagggacatcctctttgattctagctacaagggtggagggatattcattgttgattctgttagaacaaggatcaacaactgctttttcttgcatttcaccacagaagggattctagtccaaagtggccatgagaccttcataacaagcagtttcccttggcagcactc

SEQ ID NO: 2195 - DNA, 498 bp, Glycine max
tgaatcggacatccgtgtgaaaagttatgaccattttaatttcccgagagcttccatttttcattttcgagcgtctctatatgtgaccgaatcggatatccttgtgtaaagttatgaccatttaaatttcgtgagagtttccgatgtttaattttgagcgtatcgatatattataagcctgaatcggacatccgtgtgaaaagttatgaccatttgaatttctcaagagctttcgttgttcaatttcgagcttgtcgacatattatgcgctcgaatcggacatctgtgtgaaacgttatgaccatttgaatttctagagagtttccgatgtttaatttcgagcgtatcgatatattataaacctgaatcggacctcagtgtgaaaagttatgactatttgcatttcgcgagagtttccgatgtttaattttcagccgatcgatatattattagcctgaatcggacattcgtgtgaaaagttatgaccatttgaatttc

SEQ ID NO: 2196 - DNA, 485 bp, Glycine max
  unsure at all n locations
tgaaggaaaactagatgcattggttaacttggtaacccagctggccttgaatcagaaatttgtacctgtcgcaagagtctgtggtttgtgctcctctgcagaccaccatacagacctttgcccttccatgtagcaacctggagcaaatgagcagcccgaagcttatgttgcaaacatttacaatagacctcctcaacctcagcagcaaaatcaaccacaacagaacaattatgacctcttcagcaacagatacaaccctggatggaggaatcaccctaatctcagatggtctagccctcagcaacaacaacagcagcctgctccttccttcaaaaatgttgttggcccaagcataccatacatttctccaccaatccaacaacagcaacagccctagaaacagccaacagttgaggctcctccacaaccttccctcgaagaacttgtgaggcaaatgaccattcagaacatgcaatntcaacaag

SEQ ID NO: 2197 - DNA, 470 bp, Glycine max
ttgtttaagtctatgtagtcaatacacattttccacttcccattagactttttcaccattaccacgttagccaaccacttggtatactacacctctctaatgaaagcaacacttagtagtttctttgcttcttcatctaccgcctttcctctctcaggttgagcttcttctttctttgggcaatgggtttagcctctgggcagctgaataacttgtgatagtggaaatttgagtcaattcctggcatatctgatgcagaccatgcaaataggccgacgttggctggtatcactcaggccactaactcttctacttttttactctcatcaaacacctaagtttggttaactctgagggatctttgtcgagttggaatagtttgacttctttttttggcttggctctctgttctgcttctcatggatcgagttcagactctactaggctttttattaagagaggtgcatgct

SEQ ID NO: 2198 - DNA, 477 bp, Glycine max
tgagttgttgtgtgctgtaaaagatgttcctctaatctaacattctgtattaccacgtgttatctcacagactttgactgcagttatggtcaaactaatccatggctctctgcttctgggtacagattacagattacacctgtttctgttccttccattaattgctgaagggctatttctactcactaatttcctttgattaagttttataaatttgaattttaacaattaaatttaatgtatttcgaaatgagtacattttaataacaataagaataatgatatattagtaataaaatttcttaacttaatattatttattttcaaatatatatatatatatatatatatatatatatatatatatatatatatatatataaaataaaatatgtcattagtttaatattaccttttaaattttataatgtaagtatatattggctaatataaaacgttaacgaaattaactaattt

SEQ ID NO: 2199 - DNA, 352 bp, Glycine max
agcttatctaccttactataacaaggccatatattttcttttgttttagaagggtgagtcaattcatgcagactggtcattgtgatcattgggatgcagaaatccgaattttgagatacattacacggaccccaggaccgtgactactctatgaagaccaaggaaacactcacatagttggattgtgcgatgctaattgggaaggatcacctattgataggcgtactatttcaggatctagtgtgaatattgttagaaatatcgtttcctggaagagtgaaacacaaacagttgttgcaccgctatttcaaaggctgaaataaagctgaggctgaagccacatgtagagccg

SEQ ID NO: 2200 - DNA, 472 bp, Glycine max
agcttatctacctcactattacaaggccagatatttctctttgcatttggagtggtgagtcaattcatgcagtctcctcataatgatcattgggatgcagtaattcgaattttgagatacattaaaaggaccccaggacaaggactactctatgaagacaaaggaaacactcaaatagttggattttgcgatgcagattgggtaggatcacctattgataggcgttctatttcaggatatagtgtgtctattggaagaaatcttgtctcatggaagagtaagaagcaaaatgttgttgcaaggtctagttcaaaggctgaatataaagctatggctgtaaccacatgtgagctgatttggattaaacaacttcttcaagaattgaagtttggaaatattcaacaaatgaagctatgttgtgataatcatgcagccctacattagcttctaatccagtatttcatgagagaac

SEQ ID NO: 2201 - DNA, 499 bp, Glycine max
  unsure at all n locations
tatgctacattagcggngccactaactgatttgttaaaaaaagaagcattatgttggaccaatgccaccgagcaggccttcatcaaattgaaacatgccattacatcaacccctgtattggcactgcctgactttactcagccttttgtgttagaaacagatgaatttgaaattggagtagaggctgtgttgagtcagaatggccacccaattgcatacttctccaagaaattgctccctagaatgcaaaaacaatttgcttacactagggagtttattcactgtaacagcagcattggctaaattcgggcattatttgttgggctagaaatttgtcataaaaaaaattgaaaagtttgaaaagtctcttggatcaatcgctacaaactcttgaacaacaagcatgttttcataaattcattggttatgattntcgaattgaatacaagccaggtaaggataatgtcccagctgatgctctttcccgagtgttctttat

SEQ ID NO: 2202 - DNA, 416 bp, Glycine max
tgtgaagaaaatggaggaatggttcagggataacggggcagagtatgcatatatggctacggagaaggacaacgttgcatccgtcaagttgttcaccgacaaatgtgggtactcaaagtttcgtaccccctgcattctcgcgaatcctgttttctcgcatcctgctagaatctctcacaaagtgactatcattgaactctctccgagcgatgccgaaatactctaccgcagcaagttttccacaacggagttcttcccgcgcgacgtagactccgttctccgtaataagctctccttaggcacttttcttgccgtccccaaaggcttgtaccgggctgacacgtggcccggctcaacccgctttcttgagggtccaccaccctgttcttgggccctagtcagtgtgtggaactgca

SEQ ID NO: 2203 - DNA, 570 bp, Glycine max
agctttcatctcattcatctgtagaattatatttgataacatacatgaattgcttcagccaatgccatgctacaagttacacattttcaagatatcattacaaaattttaacttgtatggattttaatctatatataaatataaaatcaccaagagaataaattaaaaataaaagcagatgtttgcaggcaatctagctgctgatactaatacattatgttaagaaatcagggaaaatcatagtaagcataattcgacaaggatctgccatgtattacactccataccttgtattagataagcaaagaaaattaattctgactgggtatctgatctagggcaaaaacaactgcaacttttatttcacatgaacaagtgttaaactaaagctgagtgagcttaaaccacaaaagtagtagaccttggttgtaaggtaggcaggtgaaaatttgcactatgaagattcaacagcataactttctatggtaatttttcaatgcccatacatactccatataggagatatactaatttatttgatggaaaaatagtaaaactatgtgttgggtg

SEQ ID NO: 2204 - DNA, 162 bp, Glycine max
tctcgatatattatgcgcctgaatctgatcttcgtgtgaaaagttatgtttatttgaatttctcgagagcttccggtgttcaatttcgagcgtctcgatctttcatgcgcctgaatcgggcattcgagtgaaaagctatgaccatttgaatttgtcgatagc

SEQ ID NO: 2205 - DNA, 558 bp, Glycine max
agctttcttacagtacttcctgcaccatctgtaccaataatgatgttacagtgaatgttctgttctacacgcttccctttaatgatagaagatgcagttactgttacaaagtcattgctggcatcaatggaaacacactcatggcccatcattatttttttctcacaagactgttcatttccttccaaactttcaggcgcacatatttggaagcctaggttttcaagtcgcttgagtagtaacatagttagcttgtactgcgagaagtgtgcaacagagaccgggctgacaaaatgctcaagatctgataacaagtacaagatatatgaatattctaaaactcaatattgtccaaaacgaacaatatcatgcagtctatgtgttgatatactgcatattttgaaggctatgtataaatattgtcaaaactacacttgaaatagaaatcttcctattgctatcagactggaaattggctctcatgaactacagaatagcaccttgaggttgtatgtgatcaaccgatccaagaattgaaccagagagggaagttcaata

SEQ ID NO: 2206 - DNA, 561 bp, Glycine max
  unsure at all n locations
tacacaatcaatcaactgttggaatatcttcctacctacagcttcttttagtttacctttggatgcctgtgaagacaaatagttcattgattgtcattgccaattaggcaatagatcatcatgtatgtattatgaataataaacaagcaaatgctccttacaattttgtcaaataactctcctccattcacatactcaagtaccatataaattttggttttgctagccaagacctgcataattacaggtacaaatcataatcagaacatcaaggtttcatagagtcaagctgctttgtaaatgcaataaatcactttattgttctacaatctgaggtttgaagctgttagagatgtgacaaatcattcacatgtcttacacctattagtttaaacatttgtgtctcaatattcttctactaaaaagctgaatagtaatacaagacaaatgttcttgtgcaatatttacgttttaagcctaaacccttcgtgtaaagggtgtaatatataatataaaatcattcatgtgtttctactangcagattaatcttttggaatata

SEQ ID NO: 2207 - DNA, 526 bp, Glycine max
agcttgtgagcgtttcttcttcattcttcaaataagacaattctatgattttttatgagttctgttagtccaatacttgtaatcattgtatgtggcacaaccgaaatcattgtgttaaattatctaatgtttgaatttttaaacttataacctctggtaacaaacctctcaattcttgttgcagttcataaaccatctcatcaatttggttgccaggcatcagtaaaaaaagatagcttgccaattggaaaagaagcaatgcttggagcattttcgttactcaaggttattgagtctgagctacaagcatacttgtctacaactgagggtcgagtggtatgtatccttagaatttcccattgcactttttctttaattttgtatgattctttggtcattgctcttattttatttcaaatattcaacttgcttgttcctctttaatttgtctgattattttttcacttgggtactcatggagtgaatactaattttctagacccctttaacttttttttaagtgggg

SEQ ID NO: 2208 - DNA, 418 bp, Glycine max
tcttctgctcaacagtatatgccgttcatggctccttttccatactattattctccaatgccttatgtgccaaatgctggaatccaagccaccattgctccttcagctccttctcaagccaacatagctactgctagttcagcaccttcaaacagatggaatccggattctagtgcatcccaccatgtcaccaatgtttctcaaaatatacagcaattaacaccttttgaagggtcagaccagataacacttggtaatggacagctccttgacattaactccacaggtctaacttcatttcaatctcctttaaaccctacgtttcctctaattcttagcaatttgctatatgttccttcaattactaaaattcttattagtgtgagttagttttgtaaggataatctaatttattttg

SEQ ID NO: 2209 - DNA, 497 bp, Glycine max
  unsure at all n locations
tcagcaattacaccttggacatttcaccaatatgaattagtattagttttttggattagngaggaattaccttagaaacttcatcaacaacttcgttggagattttggttcctccaaatgaattgatgatatttccaaagtcattaaggccatggagattccattcccaatagcaccaacagaccccataaacatcaaaaaatgatccaaaggatcatcatatgagaaaagcttctataagggcactgtttttgcagattcatctttggcctcactgttctttgagtctttcttgctggtaggatctccattcaagtcaatatcctctgccattttcttcattgaagactttacacacccttatactaattagtaatcactgtaaacggaaaaaacctgcagaaaatgcattacaggttcaagttagtaacacacaagattgtgctcttcaaagcgtaacctcatagtgaaatttcatttttttcttcttcttggat

SEQ ID NO: 2210 - DNA, 584 bp, Glycine max
agcttgaaggtgcgtaacccaccattttttcatagtaaaacactggtaatgggtctactattattatgatcattttcttctccatcattggaggtgccacttgagctgccaagtctctccatctttaggcgtattctttgaaagatttgtgcccctttttacccatgttctttagttgcatcctatccggagccatatcagaattgtactgatattgcctaacgaaggcaaccattatgtccttccaagaatggactagggaaggttccaagttagtgtaccaggtgacagctaccctagtaagactttcttggaagaaatgtatcagaagtttctcattttttgcgtatgcccccatcttctgacaatacatctttagatggttcttggggcaagtagtcctcttgtacttgtcaaagtctggcaccttgaacttgggaggcgtgacaaaattgggtactaggaacaactcttctatgttagcaaaggcataatctctgcctcctttaatggcattgagcctttcctctagatgatccaactttcccattttttccatagcatgaaggttttacttgctgtgg

SEQ ID NO: 2211 - DNA, 572 bp, Glycine max
  unsure at all n locations
tgaaggtgtgtagcccaccatcttttcatagtagaatactggtaatgtgtctactatcattgntattatttttttctccgtcattgaggtgccacttgagctgccaggtctctccacctttgggcgtattcttttgaaagattcgtgccccccttttgcacatgttctgtagttgcatcctatctgaagacattatactgacactgcctaacgaaggcaaccactaggtccttccaagaatggactcgggaaggttccaagttagtgtaccaggtaacagctaccccagtaagactttcttggaaggaatgtataagcaattcctcatcttttgcgtatgcctccatcttctgataatacatctttagatggttcttggggcaagtagtccccttgtacttgtcaaagtccagcaccttgaatttgggaggggtgatgatattgggtactaggaacaactctcctaggttagcaaaggcataatcttcaccttcttcaatggccctgagcctttcctctagatgatccaactttcccatttctgccacagcatgagggtttttacttgtcgt

SEQ ID NO: 2212 - DNA, 559 bp, Glycine max
tcattaatagcaccaaaaactattccttgcacaaagcttcattagtagcacctaaaactatgtcatgaacataaatttgcacaagcaacaactcattgtttgatctcttgataaacagtgttttgtcttaacctcttacaaaagattgctcaattaagaaattgctcaacctttcataccaagatataagtgcttgtttgaaaccatacagtgccttttctagcttgtaaacatgattaggatgtttgaagtctacagaacctacaggattctcaacatatatctctttttcgatgtatacattgagaataacacttttcccatccatttgatataacttgaaacccatattacaagctaaagcgggaataaccttatagctttcaaccttgcaactgaggcataagtctcatcatagttaatgccttcctcttggttgtatcatttagcaaccaatatggccttgttcctaactatgatgcttgatgaatcaagcttgtttcgaaacacccatttggttctgattggcttgtgagaggcacgtttatggactaaatcc

SEQ ID NO: 2213 - DNA, 459 bp, Glycine max
tgtaaggatttgggtgggaaatgatagtgagactcaacttggataccaagcttgtgcttcaacaattgcaacaagacccactatccataatgagagaacaatttttttttaaaaccttgcatctcgtatgaaatatgttctctctttaggtttgggttaggtcagcggatttactcccaaggagccttctcaccattagaagatcaccttcttcatagggtaaacctcttcaatatgctcatcacccatggcttcaccttcatttccacttgaggaaggagaagaagtagcctcctcttggctactatagatgtcttgacccctcataatcatggttttctttgtgggggtattgagaagcaatggggcctttcccaatacatttaaagcacttaatgctactagcactatcttaagaactagcccgttggagtgatttccttcctgcatataccctta

SEQ ID NO: 2214 - DNA, 500 bp, Glycine max
  unsure at all n locations
tatgctgcaaacatttacaatagacctcctcaacctcagcagcatattcaaccacaacagaacaattatgacctctccagcaacagatacaatcccggatggaggaatcaccctaatctcagattgtctagccctcaacaacaacaatagcagcttgctccttccttccaaaatgctgctggcccaagcagaccatacgttcctccaccaatccagtaatcgcaacagccccagaaacaacaaacagttgaggctcctccacaaccttcccttgaagaacttgtgaggcaaatgactatgcaaaacatgcagtttcaacaagagaccagagcctccattcagagcttaactaatcaaatgggacaattggctacacagttaaatcaacaacagtcccagaattctgacagattaccttctcaatctgtccaaaaatccanaaatgtgagtgccattacattgaagtcgggaaagcagtgtcaaggactttaaccagcaac

SEQ ID NO: 2215 - DNA, 442 bp, Glycine max
agcttgcgtggctctatccatatttgaagcagagtatttctctgctggaggatgttgagctcatatcttttggatgaaacaacaactagaggatttcggtatctttcttgatcacattcctttgatatgtgacaacacacgtgcaataaacttgaccaaaaatcttgtcatgcattctagaactaagcctataaaaataagacatcatttcattagatatcatgtgcttaaaggagattgtgttatagtatttgtagatacaaccaaccaactagttgacatctttacaaaacccttgtctagggatagatttataaaataggacatcatttcattatatatcatgtgcttaaaggagattgtgttatagtatgtgtagatacaaccaaccaactagctaacatctttacaaaacccttgtctagggatagattctactcca

SEQ ID NO: 2216 - DNA, 421 bp, Glycine max
  unsure at all n locations
tcatggatttccttctacaattatatcggataaggatgcaatttttctcatcagttntnggagggagatgtttaaattggctagaactagtcctaagcatagcacttcttatcatccccaaacggatggtcaaaccgaagttgctaatcggtgcttagagacctatcttaggtgctttgctggccctaagcccaagacttggttgaattggttgcattgggctgagttctggtttaacagtaactacaatatctttgctggaatgacaccttttaaacctttatatggacgagatcctccattgttgattaagagctgcaccattccatcaaagttggatgatgtaaatcagttggcccaacaacgagatgatttgcttgcggaattgcgacaaaaattgttgaaatcttaagacccgatg

SEQ ID NO: 2217 - DNA, 628 bp, Glycine max
actaagcttccccggggccatttcctgcgaaggcaaacatttggaaagttagttttacccgtgggacactactcttaaaacaaaaatggcatacaacctcctcccatatatacaaacatcaatgtaaatttagagcaagcttatgcgcatatttccttacgaacgttcacttgcacaagacattctattaactaagaaaaatgcacccatatacaatcaaggcagcttcgttacctagattatttacatgtacttccaaggtgtatttgttacttacatcacacacatctccttggctaaatttacatacatgcatactcaaagcattttggggtaccaaaaattgcacatgtgcacatcttggaatttctaatacctatacatacacaaacttcatgatgaatcttgactatctacaataaggcgctacatttcttgctcttttcaaatttttgctacctaaagccgcatgcaaattcaagtatattttcctttgctgactaaaattgtattcaaattaaaaggtatatatttttttggtatgtattttctttacataacatgcaacaaatttatatatatatttttttgggagaccatttgactaccaaaaattacatgcacatac

SEQ ID NO: 2218 - DNA, 644 bp, Glycine max
  unsure at all n locations
ntacaagttagggtcacttataatttaactcattgatttgccgagaaaacttatgaattaacgagagtgtgtaatgatttttttttttgtcttgtatgaacatcctttagtaaaatgaacatttctctctatatgattaactttggattttgagtcataccttatccaaaactagacatacatgactttttatacaggtaaagtttataaaattttgttatctaataagtataagttatgcaatagttttataaatactctataaaaggaaaaaaaatgaaaacttgagtattaatataaatttataatccgataaatatatttatgtataaatttggtttgggttggattagattgaattttaaaatcaaatccaaaatctgattttatccaaaacaaatgggtttattaaattttaatttgttcgactattggtttatttgattttcagttttttgcttgatttattcataaagttatttgataaaattagtttatgaacattcctaagaaaaccgataaagtaaagacatcanatgtacaattaagtctattaactagtaaagtacgccttttgtgacaaatctacagtgttaaacattcggagattaatatgtatagtacattcttttgcctatgattct

SEQ ID NO: 2219 - DNA, 368 bp, Glycine max
agcttgcactgcccaaagtggacaaccttccagaaaacgttgattctcaccattgatgtcccttatgatgtcgttcagtatctcaaaaaagcctacgatgatttggaagaacccttgacctgttttctcaaatcttccaaagttgattggcatttctatgacccatatatgttacagttaccaaaaaggttcaaagagaaaaccaaatggtgtggaatagtaagccccggttgggcaccatagttgaaggtattgagccacaaggcagttggtggggttttgactcactctggttggacctctgtggtggaggttgtttagaacgaaaaacctctagttttgttaatgcttcttgtataccatggatt

SEQ ID NO: 2220 - DNA, 285 bp, Glycine max
taacacctctcattcttattactttttcaatattgaaaaagtaataagaatgaaaaatgaaaaggtcgtcttattcaaaaccccaaccaattatgaaatcccctatctcccacttcacacctcggaacgcaccgttcttatagagagaggcgctttcacatcttcttaggctggggagaggaaatgttcccattttttaggatactccggggaacagatatccagtggagatgacggggtggggcctgtacctcataggattaaagcacgtggctacgaaccacg

SEQ ID NO: 2221 - DNA, 382 bp, Glycine max
atacgtataataacggtgctattaggagctactatacctattgctcaacaagatattaagaaaaatttggcttattccacactgtctcaattgggttatatgatgttagctctcggtatgggatcttatcgagccgctacatgctttttgaatactcacgcttattctttgacatggtagaattattgtgagtgatcaaattatttcacaaactatttagctcgattatatatacaaaacttgaatttatgactactaattaaagttcgaataatttggccacaattaattcaatcattttggcttttataattcgttatctggctgactttacgtacaaatgttatttaccacctatctgatccaatttaagtctacctac

SEQ ID NO: 2222 - DNA, 483 bp, Glycine max
  unsure at all n locations
ccgcttaaggttatgcggnggtttggcggttgttctggagtggcagtgagtgtgtttattggaattggaagggttcgggcgagttcgagttcttcttcttctgaggaggaggaggaggcagtgagtgtgcagtcaaaagtgactcaaaaagtatacttcgacgtgagtattggaaatccagttgggaagtttgtgggacggattgtgattggactgtacggcgacgatgtcccccaaacggctgagaacttccgtgccctttgtactggcgagaagggctttggatataagggttctaccgtccatcgtgtcatcaaggatttcatgattcaaggaggagactttgacaaaggaaatgtatgtatgttttaatggttgatgctttgctttctcattttcgattcattctaaattccttcccttccttgtagggaactggaggcactagtatatatggtcgtactttccaaaatgagaatttaa

SEQ ID NO: 2223 - DNA, 440 bp, Glycine max
agcttatttgaattaatgctcggaaatatatagaaccactttctattaagatgaactattgatattatcagttaaaacaactaactaaagaaggataaaactgtcatcaagaaagttttttttttttttttacaaaacacatgcatcctttataagaaccaattttatttgagaaggtaaaattattatgagtgataaaattatttcacaaactatttaactcaattatatatacaaaacttgaatttatgactactaattaagtttgaaataattggcaacaattaattcaatcattttggcttttttaattcattatctggttgattttatgtaaaaatgtaattcaatcatatctgatccaatttaagtcgatctagattggatcgatttttcttattttaatcatacttttttagaaaatattaaataaatgataa

SEQ ID NO: 2224 - DNA, 502 bp, Glycine max
  unsure at all n locations
tgtaagaagaataacaatataggagaatgtttntggttgattgataaagactatattntaatcataggttaaggagttgtacaactgatggagatatattacacttagttagggatgcttttgaaaatgagaatgagataaatgtttattttcatcatgaagtagatccaattttagaagaagtcccacagatgttgtacttggaatgtgatccaattccagaagctgttgagaatgaggatgatttagatgatgtacctgttgctggccatgaggaaactaagttttaattcatttgtacttggtccgacatggttactataattaattaatatgattaatttttacttgatcaccattgatgcagatgttggtgctggtgagcatgttggtgctggagagcagagagatggtggtgagcaaagggatgctgatgctattgaatagagagatggtggtgagcagagggatactgatgctggtgagcaaaaggatgctggtg

SEQ ID NO: 2225 - DNA, 445 bp, Glycine max
tattaaaactaaggtgtatgaaactgttttcttttagtaagaccttgtttttacattcgttgacgtattggtctactgtatttttattattttttgttcaatttttactgatttttttatcctattttcagctagatgtattggctattgaatttaatttatggatcttttttactgtttgattattgatacttgcatgatagagttttctatatgggggtgacatatatatcaaactttttgtggcagagcacaagttgtgggatggccaccaattcgatcttttcgaaagaacacgatgatggcttataatttggcaaaatgtgacaacgaagctgaggagaaatcaggagtaggttgtctttacgttaaggtcagcatggatggtgctccatatctcagaaaggttgatctgaaaacctacagcaactatattgaactttct

SEQ ID NO: 2226 - DNA, 504 bp, Glycine max
tcatccaactgaaacatggaaagaagacagtatataccagacaccgaatgtttttgaaaccttttcacccgtatcagcgattgaagaaagctcttaatggaagtcaggagaatgaaagtgtgccgcaaccattagctagaaatgaagtttatgatcgggtgaaggacatcataactatctttggtaagacccaaaagtagacgtcatctgagatgaacatatggaagaaaaggtctatattctttgatcttccatactggtctgatctacatgtgcatcattgcctagacgttatgcatgtcgagaaaaatgtttgtgataatttaattggtacccttcttaacattaaaggcaagaaaaatgatggtttgaaaagtcgtcaagacctggttgacataggaatacgagagcagttgcatctaatatcacaaggtcgttgaacatatctgccccagcatgccacacaatgtcaatagcagagaagagaagtttttgtcaatgtct

SEQ ID NO: 2227 - DNA, 433 bp, Glycine max
  unsure at all n locations
cttcactacatcaagaatcatcgggttgagtcttctttgtggctctcttactggtttagccncatcttctaaatttattcgatgcatacatgtggatgggctaataccaggaatgtctgccacggtccagcctatagccttcttatgcttcttgagaactgataacaacttctcctcttgctcatcaacaagggaggcagatataattactggaaaacttttgctatcatccaagtaagcatattctacatttgatggcagaggcttcaattctggtgtggatggctggatagtggcagaaagagatggtttctcancctgtacctcataaagaaagtcagaggtattgtgtacttctgacacatgcgtatttctatctgactctatanattcaatctcaagagggtaaacatcagcagacatggtatcaata

SEQ ID NO: 2228 - DNA, 343 bp, Glycine max
agcttatctcacttttttcttattatcttctcctagaagctctggagaaatttatccaagcatgcccttagtaattattttgctggaggtttgcttgctatacttggctatatttacttttcttttttaaatgtatgatgataatactaatcaatgtttacggatgacaggctcacacagtgcttgagatgaactatactgagcagcaattaacagcagctgtcgtttctgatggattacggcctgtccttgctgccgatgacttgggtataccgtcaagattattatcaatgattaaaaaatgctgggatgcagatcctaataacagacctgcttttgatga

SEQ ID NO: 2229 - DNA, 429 bp, Glycine max
  unsure at all n locations
gcttgtattgatacacacatactgtaatcgattaccagagaagattntcagacaatattctcaacagtcacatcttttcattgtgttcttaaatggccatcaaaggcttatatatatgtgacatgagacacgaatttgctaagtttttttcagaacaaaaaggtcttatcctcttaacaagcaaaattgttttatcctcttacaaattccttggccaaaacactcgtgattcaataaggaattatttgagtgctcaaattgttcaatctatctctttcaagagagatttcttcttctcttcttctttattctgaagagggattaagagaccgagggtctcttgttgtaaaagaattctaaacacaaaggaaggattgtccttgtgtgtttagaacttgtaaaaggaatctacaagatagtggaactctc

SEQ ID NO: 2230 - DNA, 366 bp, Glycine max
  unsure at all n locations
cttagcacttctgtatggtttcagggctttccatcagctctgattaatctgccatatactcagccggtattacgcctcatgagctttctcatatccagcttactggatttagtttgggtgacttcccttttagatacttangtgttcccctcttatcatcgagattaaatgtatgtcattatgctcccttgcttctcaagattactggcctgacttatggatggagcaagaagtctttatcttatgcangtaagttagagttgattagagcacctattcaacgaattgtgaatntctggatggagattctctctttgccgccatctgttctggaccgaatcaacgcttcgtgccgtaattttctgt

SEQ ID NO: 2231 - DNA, 353 bp, Glycine max
  unsure at all n locations
ctgcacaagactcttaatatttgaagagtattcttgcggaaccttcaaccgatgaagacactaacaaaaacttatattcttctttatggacaaagtatggcaagcccggggcaagcaaattttggtgccatcagaccctggatgcaactgtgatcgaatccacatatcagctagatcttgatgggtattcaagccatccttcgtcttgccttgaatgttaagaagcgtccccatcacactgtcacatacatttttctgcacatgcataacatcaatacaatgtctaacgtctagatcataccagtacggaagatcaaagagnatggacctcttatttcatatgcaactcttac

SEQ ID NO: 2232 - DNA, 408 bp, Glycine max
  unsure at all n locations
ctggtgaatatgtccacgagttgcatggaggatgagacaggatggagctctacgagacccgcggtgactntgtggcggataatatggcaatcgatctcgatatgcttagtgcgttcatggaaaacgggatttgttgctatctgaattgcagactggttgtcacaatacaaggtggctggctgaatgaatgctacaccaatgtcttggagaatatatgttagccattgcagctcacaggtagtagatgcgagagcttgatactcgacttcggaggagctgcgggagacagcggactgcttctttgactgccaccaaatgagtgaagaacccagatagacaaggaaccctgtagtggatgtttgagaatctttacatcccgcccaatctgaatcactgaaagctcgaagt

SEQ ID NO: 2233 - DNA, 411 bp, Glycine max
  unsure at all n locations
tattcctttctcatgataagggatattctatattacttggttgatatggaccaaccttgagataaacacgtcgtatttcatctctttgatcaaaaggaaactcccacatcattgaacgcaatccaggatcttgctctatattaataacatccatatcttctacttcaattcttctacattttaaaggttgtacttcatcaaattaaattaacaatcttgtgtgacatttgaagcttgtggaatacgaataagctgagatgaatcaataatattattgttgtctttcttctttaagaatgaacaaagagttttttgagttgacatcttcaacaatacacctgtagtatatttcttttacaaacaaataaacatacaaaataaaagtaanataataatatattaagttaagat

SEQ ID NO: 2234 - DNA, 473 bp, Glycine max
  unsure at all n locations
atacaagaatgaagctctgataccacttgttagacaagtggtatcagatatcttaagaatggaggttgaattaagatattacaaactatttccccaattaaaattatatttcactttctattcaagttacaaattcccttaacaatgaactcttaaataataattcaaatagaacaatctgaatataaatataaaacaataataaataaaagagtttaagggaagagaaagtgcaaactcagatntatactggttcggtcacacccttgtgcctacgtctagtccccaaacaacccgcttgagagttccactatcttgtanaatccttttacaagttctgaacacataaggacanacccttctttgtattcagaattcttttacaacaagagaccctcggtctcttaatcccttagagaaatagaaagaagagaagaatgaatctctcttgacagagactagatttacaatct

SEQ ID NO: 2235 - DNA, 446 bp, Glycine max
  unsure at all n locations
gctccttaactgcacaaggctcttaatattngaagagtatacttgtggaactcttacccgatgaagacactgacaaaaacttatcttctcctttntggacaaagtatggcaggctgngggcaagtaaattntcttcccatcagaccttggatgcaactgtgatcgtatgcccatatcagctagatcttgacgggtattcaagccatccttcgtcttgccttgaatgttaaggagcgtcccaatcacactgtcacaaacatttttctccacatgaataaagagtttagtccncattgagcatttcaagaagagcatggagggagtgtgtcacaattcggtgaagcagaagccctttcttggacaataaagagtggaatacccanngtagtggtcttgactatggcaatgacttcgtgcaatgtctggagacaaacaacaaagttcta

SEQ ID NO: 2236 - DNA, 400 bp, Glycine max
  unsure at all n locations
agcttatgctgcanacatttacaatagacctcctcaaccttatcagcaaaatcaaccacagcagaacaattatgacctctccagcaacagatacaaccctggatggaggaatcaccctaatctcagatggtctagccctcaacaacaacaacatcagcctgctccttccttccaaaatgttgctggcccaagcagaccatacattcctccaccaatccaacaatagcaacagccccagaaacagccaacagttgaggcccctccacaaccttccctcgaagaacttgtgaggcaaatgactatgcagaacatgcagtttcaacaagagaccagagcttccattcagagcttaactaatcagatgggacanatagctacacaatngaatcaacaacagtcc

SEQ ID NO: 2237 - DNA, 342 bp, Glycine max
taaggaagcagctccattgatatcatttaatttatgcaatgcttaagcccgaataagagaacttgtatcacaggaaaagatctaatccaagtcgaattagggatcatactgattgtggtggtaaaactggcttgaagtagccatctgggtaatatccaaaccacgaagtttcctttggtattaaaacagtgtcgtgctcaaactgttaatgtataaaataagattacaaatatataagcttttctcatgaaatcaattagcaatattctattcataatatcacacaaatacattcagaggacttaccatgataagtaccaaattctgctagctactaaatct

SEQ ID NO: 2238 - DNA, 426 bp, Glycine max
tgtcagttataatatataccgtgctgagacatcaagacaacattatacaataacaacaagggtgtctgcaatcatcattcacttggacgatatttctagttcaatcaaatagggtcactagtcacaacagcaataatctctcaaccaaaacatcaagataaaaaacaggataatgcataacaattttaagataaaagcttgtcataaactggatgatccactaatccaattgacagacaattataaatggatcattctttcttcttttactggaggagcttcggaatagattgactctctctacgacccatcttattgacgggaattatcactacgttagcggctcactcggttactcgagaatccaaattattctatttcctgactgtagcaatgcatagcggtcaataggaacattttcttctc

SEQ ID NO: 2239 - DNA, 457 bp, Glycine max
acatgcctcatgacacctaagcacacttagtggagaatcttgaactcgatattggattagtgggctgaaccatatatgaaattcactaatcataattagtgaaatattggctccacaaattcaatttcaaattcaagtgaaatttgaattgaaattcaaatttccctccaattttgtgtgacacttaggctataaatagaggctatgtgtgtgcatttttccaactttgatcatttaaaaattaaaattcaaattttatagctctcttatagtacaaaatttcgtgcttttctcttgctctcacttcattcatctgcttcttcctccaagctcttatccattggcctctatggtggtgagcttcttctacgctcatcttctccttgaagtggcgtctcctctctctcttccttctccattccactggcattcatcttccaagaagcaaaggaatcca

SEQ ID NO: 2240 - DNA, 466 bp, Glycine max
  unsure at all n locations
agcttgtgccttttcacgtctggaatatgaatgtagcatatagatccaaagacccttaggtgctntgttgatggcttcttcccgatccaagcttcaattggagtcttgtcttttacagacttagttggacatctgttgagtatgtaaacagcagtgtagactgcttcagcccagaatgtgttaggtagtcccttctccttgagcatcgatctagccatctccataactgtgcgattctttctctcggacactccattntgttgagaagaatatgcgactgtaagttgtcgctcaatgccttcatcctcacaaaatctttcaaactcgcgagaggtgtactctctgctgcgataacttcttagtacttttatccgttttccactttggatttcagcaagggccttgactttttgaatactccaaagacttcttgattttcttttagaaaatatacccatgtcattct

SEQ ID NO: 2241 - DNA, 440 bp, Glycine max
  unsure at all n locations
agcttaagagcgaanactacggntgctaacttattatcgngtatggaataattcctttcatgtatcttgagctgttgagaagcatangccactacttgtccccactgcataagcactccacccaaacccatcttagatgcatcacagtacaccacanagggttcactcgggtcaagtaacactaaaactggtgcagtggtcaacctttccttaagggtacgaaaactactctcacactgtgcatcccacacaaaagcttgacccttacgagtaagcttagtcaaaggtaaggctagcttagaaaaaccctctatgaatctacggtagtatcctgctaaaccaaggaaactcctaatctcaaacactgacttaggactctcccaactcatcaccgcctctaccttggaaggatctatngctatccctcccctggatataac

SEQ ID NO: 2242 - DNA, 310 bp, Glycine max
  unsure at all n locations
agcttgccttgccccttgatatattttatggactcatggncactatgaatgacaaattccttgtgataaatgtagagttgtcatgtcttcaaagcccgcactagagcatacaactccttatcactaattgaatagataagggtaggaccacttaactttcttctaaaataagcaatgggatggccttattgcatcaacacagtcctaacccatcatttgaagcatcacactcaatctcaaacgatttatgaaaggttggcgacgcaagtatgggggcattagtcagcgtttgcttaacatagaaagcttc

SEQ ID NO: 2243 - DNA, 419 bp, Glycine max
  unsure at all n locations
ctgcagcttgacagaatcattctaatttcaagatttctgtaaaagatgaactgcccttttgttctgcttgttgtatgggaaagattcatagatttccttctaagttttctcanaccgtgtataattctcctttggaattaatatacagtgatctgtggggccctgctcctatgaattctcattgccaattcagatattatatgtcctttgtagatgcttatttgtggtttacttggatatattttttaaagaataagtctgatgccttgtctgtttttaaacagttcaaatctcttcttttctgtcagaattggggattgttcataggctgacttgtccacttacacatcaccagaatggtatagtggaaagaaagcatcgtcacatagttgaattaggtctttctcttcttagtcatg

SEQ ID NO: 2244 - DNA, 505 bp, Glycine max
  unsure at all n locations
cgttattccgactacttgtctaaaccactaaccaagcgacatgtatatatgcagctcttgagaaccttattcacaacatatcgttttctgtattagagtatgatttgactatatcttcggatggaatagatgtttcataaactcctttaatgcattctatctatattcatgaatcataagacaagttattctcctcggatgatttggattattaaaaatgtacataatgttatatgtgtgtatgtacgtacgtataagttggatgaggcatttcttatttatgagacttgctngctttgtgtcacggaatatatattgtgatgatatagatgcatgtgtgggcgattaatgcagcatatcttacgaatctattctaatgacaatgacaagagattgtgaacgcttaatggtgcgcataattaaggagcgaacaccganagaccatatcgacctatctatatatatatatgaatcttctccacattatattttgcgttcctatgtt

SEQ ID NO: 2245 - DNA, 463 bp, Glycine max
  unsure at all n locations
agctnntggggcatatgtactttaagtgagagatatgatatttaaaattggaataataattaatattacgagtaaataacatatacaaagatgattaattnttacataatcaatcacatattatcatataatgtaaattgattgatagtaataataaaaatataaaattcatattaattatgatttaagttctaaacattatagatgatatgataaaaaaaatgtgtataaaaatgagaaattaagcaataatgagagataataaaattgaataatgaaagagagaaagagtgtgaccgtcacagcttccaatagattggtggtgtcgtgcaagtacttgacgacccatgttagaacacttgctgtggtgtcatgtgcagcanagatgacaccaatgagaatatcaacaactcgagactctgtgtgctgctgatagtacatcttggtcttctcacctcgagct

SEQ ID NO: 2246 - DNA, 491 bp, Glycine max
  unsure at all n locations
actctacctttacagctntactatttccactgcttcatattgttctcaaactaccacttgtaggccttgcattctgtcatttgtttatgatttgctgattatatttatcaagaacgtacgagatttgcattgttatccatgatatttctatttcattatttttctttatagatttttaatatgatatttaataatacatcttacttggctacatgctcacagtggtataatattctatatgcagtgttnttttgatacaccagggctcatgttgaattgcggtggatttccttatanggatgtcaaggtccgtgttgaaagtgcttggagttcagtcaatctctatgaagtgctcatagtcatttctgacgttcatagacatattaccaggtcanagggttatttattaaatggatgagtagtcctatactcgtgtttaccctatttcttctatatatagacttgttcgataacttcttataagactatag

SEQ ID NO: 2247 - DNA, 337 bp, Glycine max
  unsure at all n locations
gcttcattaatanatcgagtcctactagctctagtcctcttcatattatctattctgatgtatggcggccaacttcaataaatccaataaaaggatattcctattatgtcatttttattgatttattttcacattatgtttgctggctgtatccaatgaaattcaaatccgaaatttccattattcttccagtttttaaatcctttgttgaaaaccaataaaatgtcaaaattaaaattctttatactaacaatgatgatgaatacattaagttacggtcgctccttctaacttatggaatatctcatgtaacaacttcccatacccgtgaatatta

SEQ ID NO: 2248 - DNA, 438 bp, Glycine max
agcttgcaatcactaagagactcttttaacatcgatagactaagacttagctttcttattgatctttgttttcttggtcttgatttggacttaaaataaaacttgtgtttcttttgtcttggcatcatcaagaccatcatacacatacattcacaaacatcgctatattgtcgtaacaacccattgtcttttgaaccatggatccctcccactcaagttttggtgttatgcattgtaaatcgcaacgtgtctcatcaatcggatgccctctcttacactaaaccaaaaagctccattagaagtcttgtttcatcgtccatcaaattatagtaaactaacagcttttggttatctctggtttccttgggtcactccatatacaactaacaaacttcagaccaagtccgtaccatgtgtttctaggttacaatcttactc

SEQ ID NO: 2249 - DNA, 432 bp, Glycine max
ctaagcttcttcccaatccattggcaaataccaatgcaatctgagttggttactctaaaggccaataatacttggtttctcacacctctccctcctggaaagcaagctattagttgccgttgggtctacaaaatcaagtgcaaatcagatggttctcttgaacgctataaagcacaattagtagcaaaaggctacacataacttgaagggattgattaccatgacactttttcatctactgctaaaatgcgtacaatacgttgtttattagctctggcagttgctcaaaattggtcacttcatcaacttgatgtccacaatgcatttcttcacgaagatctttttgaagaaatttatatgtctcttcctcctggttctcagcgacagggggagaacctagtgtgcttctcaacaatcttatatggataaaac

SEQ ID NO: 2250 - DNA, 451 bp, Glycine max
agcttaataaatcaatctatggcttgtagcaagtctcctgccaatggtatttgaagtatcatgatgtcgtcacttcatttggctttgaaaagaacatcatggatcaatgtatataccaaaaggtcagtgggagtaagatttttttcttgtgttatacgtggatgacattttgcttgcaactaatgataagggtttgctatatgaggtgaaataatctctctcaaagaactttgatatgaaggatatgggaaatgcattttatgtcattggcattaagatccatagggaaagatctcgagcgaatttgggtttgtctcaagagacttatattaacaaatttttagagagatctaacatgaaagaatgttcaccaagtgtagctcccattgtgaagggtgacaaactcactttgagtcagtgcccgaaaaatgattttgagcgggaacacatg

SEQ ID NO: 2251 - DNA, 416 bp, Glycine max
  unsure at all n locations
agcttccaatcatgcttctgtacagactntgatcaacactggtgccagcttcatcctttgacagcttcaagtgagtaggtgcaggtgttcttttatggctggaattttccatcccaaacttcttgacaatgttctttgcatacttgctttgtgagaggaacatgaagtcttccatctgcttcacttggagtcccagaaaataagtcagctctccaacaagactcatttcaaattcagattgcatctgttgaacaaaatgtcgaagcatctcattcgacatccctccaaacacaatgtcatcaacatatatctgtgctatcatcaagtttctagcatcttgtttgacaaagagagtcttgtcaattcctcccttcctatacccttgctgagtaagggaactctgtagcctttcatac

SEQ ID NO: 2252 - DNA, 403 bp, Glycine max
  unsure at all n locations
gcttggcaataacacaacctcgactctcattgagtgtagaacactttcaagtggtgctcagttggagaatagtcatgagctatgatgcaatcctaccccgcaagggcattggatagaaaactccaagtagattgtgccagagatgcaagagaaggccctagggttcttatgagccttacggtagatttctggcgcatgggctaagtacgagcccacttatctttgtaaatattaaattaaggtttcattatttttgggccttgtatttacggctccataatgtatgtagggtaccctacaaatatacgatttttcagcccttgtattttacggcacctagactagtttttgtattaagggtagatntgtaatcttacatgcactaagtggatattngatgtgt

SEQ ID NO: 2253 - DNA, 461 bp, Glycine max
  unsure at all n locations
agcttctgagagtggtaacaaccaaaataaagtgctatggcctatgggtacagtcagataagaacactcacagaatcaacggtcttcatagcctgaggcccaggaaatgtcttgccagaaccatggctctttggaagtagtcgcccctcaacttcttccccactgattcctctagcaatattccacaaccaagtactgcaatgctgtaaaagctagaatcaggaatagaataccaacagattgcaatgaagacaatcaaatggacagtcatgagtaattaagtaactaaatcaaaactgcatggcatgcaattggagaataacacaaaagttgcaatttaaaatatgagatcccanaaatgaaatcagcanagacagccaaatgatgctttggtagtagatatatataacatcatgtaagaacttagaagacatactcacccagtattgatcccataccac

SEQ ID NO: 2254 - DNA, 458 bp, Glycine max
  unsure at all n locations
agctntggagtttccaagtgccaattcgtcttcttcttttgtccagacttcttctggcttcaattcattagagggctttccttctgtgtccagcatcttgggatgttcccagcctttgatgacagctttccaggttctgctatccagtgatttgaggaaggccaccatccttgctttccagtattcatagttggttccatccagaattggtggtctgttcactggtcctccttctttctccatgttcatcagaatttatctccctagatctcactcagtgatttcgagtgcctgctctgataccaattgaaattctgatactggggacagatgtcgtacaggatgtcacgacatcacgcttcagaacatgcagattgtctttgactgtatgaacaaattaaacaagttaataacacaagagaattgttaacccagttcggtgcaacctcacctacatc

SEQ ID NO: 2255 - DNA, 486 bp, Glycine max
  unsure at all n locations
gctttcttggagaaacttncttgagaagcttctntgagagaactttcttgagaagctatagcttagctacacacacccctctaatgactaagctcacctccttgagaagcttgcttgacaagattcctaaagaagctagagcttagctacacacacctctctaatagctaagctcacctccttgagatgagaagctagaacttagctacacccncncctataatagctaagctctaccccatggcaaaatacatgagaatacaaaaaaaaaagtccctactacaaagactactcagaatgcctcgaaatacaaggctaaaaccctatactactagaatggccaaaatacaaggcctaaacaaagganaaaacctattctaatatttacaaagataagcgggctcatacttagcccatgggctcanaatctaccctaaggctcatgagaaccctanggtcttccctgggatctctggcccaatctac

SEQ ID NO: 2256 - DNA, 325 bp, Glycine max
cgcacccttcttcaaacattcggtcataggacttgctatagtgctaaaattctggataaagcgtcgataagatgatgcaagaccaacgaaagatctcacctccgaaactgttgtaaggctcgggcaagtcttgatagcatccacttttgtttgatcaacggatactccatctttagacaccacatatccaacaaacaccacactctctaccaagaaatcacactcttccctcttcccatagagtaattgtgctcttacggtctcaaatatctgtttaaatgagtgaaatgctcctctatagacttgctatacaccaatatgtcat

SEQ ID NO: 2257 - DNA, 206 bp, Glycine max
gactcaatcggacatccgagttaaaagttattgccgcttacatttgctacgagcttccgctttcaactatgatcgtgtcgatatattactggactcaatcgaacatcggagtaaaaagctattgccgttagaatttgttcagtgcctccgctttccattcagagccgctcgatatattacgggactcaatcgaacattcgagtaaa

SEQ ID NO: 2258 - DNA, 391 bp, Glycine max
agcttgaacagttaccaatctccaaatgaatcttccctgacaacatgttatcatagagaaacattatcttcaatttaccaagcctcccaacctctctggggagatcaccctgtaaattgttgcgaaacaatgcaagtgtctgcatgttagtgaggatccctatgaaaggagagattgaaccaaccaaagtgttggtttgaagcaatagatcagttagccccaacaacccataaacctcaataggtattgacccattgagaaaattgtttgacaaatcaagttgcttgagtgagtggcaccgacccaactcagctggtatctcaccatgaattccactacctgacatcattaaattctacacacttgtaacattggaacatatggttcttgg

SEQ ID NO: 2259 - DNA, 395 bp, Glycine max
  unsure at all n locations
cttctcatcaatggactcctgacgtatacgaatgagtgcggttcgttcgataaattcctatctctntatctatttctgagatgtttggatttttcaaaactccatggacatgcagaagagaaatgctattcccactcggaccaagacataactttacttgttcaaataacaattaaggtgaagcagagtcaggaacaacgaatccctttatgataaacagattcattttgcaagttcgttattacgggtagttcctacaaaggatcggactaatgacgtatacaatacttgaattctcgatgtagatgctacatagttggttctcatccttcacagactacgagtataatangagcatccgtcaacanaaggatcaccctaagatgatcatctcg

SEQ ID NO: 2260 - DNA, 452 bp, Glycine max
  unsure at all n locations
ctaagcttagtcctgttgatctgangttgaaggtaggacccccatacttggggtatccacaactctggcatgctgtcctcttcttgaaatttatatgctcgcaaacaccacacatccaatctcctccagaccagctcattttcctgatcaatatccacacttgaatttttgaattataagaatttttggttccatcaattctcggtgcaaccagataaggactatatgtgcatgtagcctacttacacagtaatgagaaatattattagtccttgttttatgcattatgagttatgacttatgaccctaacttctattaaaggcatgcaattttctatccatatataggttatntgcacaaagaactactgtcttgggtgatagaatactctgtcaagatggcatagcaatcttgtcaagttttctactctactcaatattaatctattcat

SEQ ID NO: 2261 - DNA, 455 bp, Glycine max
  unsure at all n locations
agcttgttttgtgtataaaaaatgatgcatatgttaccaataatgtgagaaataataactctaatttagggggaaaaaggataaattgaaaacaatgaatgatatatgcctaaaaaatgaaacttattagacatatgaagaaatataaaaatcaaaattgatttattaatataatatccagctcaatatttaaccagttaatttatattatgaagttattttttaattaattgactgcgtgacatttgttataaatctgaattagaatatacattattgttatcatttaataagttgaatctagatatatactcgtggtagtaatttgaatgcttaaatcataaaaattatacttattataacgaccttacttatgtatnttttaataaatagagaaataatacaaattattctacttcaatgaaatatacgatatataatattttatatgaaat

SEQ ID NO: 2262 - DNA, 493 bp, Glycine max
  unsure at all n locations
atgataaatctttatatataaaanagtagacatgacggtattattgtaatttaaatcttgccgctcattttgagggtacatgcaattaattctatcacttcttttgtttccataatcagatttttaaaacgtaatttataactaattntgattacgattatttcttcttcttttaaaatataagaatggttaaatacttaattgcccattctaaattctcataaattatttcttattttccgttntatattctatgtagtgtgtaaggattttaacaaattagtgtgttagtgatcaaggttctctattaatatgagttcttataagtcacattgtcatttagtttgtttcctttcaactgattgtaattatcgtatgtaaaaatcacgatgttggaaatggatgatggttggtccgcagctattgttgttcaaaanaaaaatattngcgggacacatggtncactagtgagaactatgcatatcttatatac

SEQ ID NO: 2263 - DNA, 312 bp, Glycine max
  unsure at all n locations
ctaatgtgtgttcccgtatgatgcacaagttgataaaataatattnttcattttctaaaaattaatttaagattaaatatatctttaacagatagtacagttaattatattatgagaaaaaagtcacgcattgacatatataaatgtgtattatactcttacttttttttaacataccactcttttctttatataccactctgagctgattatgtaaaagagttaagctcaagtttttcttttaatttcatatattacatgttaagctcattcttttaattatcttatataaaaacattgattaaatattat

SEQ ID NO: 2264 - DNA, 362 bp, Glycine max
  unsure at all n locations
cattccacccaaacgcacccttcttcaaacattcggtcataggacttgctatagagctaaaattctggataaagcgtcgataaaatgatgcaagaccaaggagagatctcacctncgaaactgttgtatggctcggccaagtcttgatagcatccacttttgtttgatcaacggatactccatctttagacaccacatatccaagagacaccaccctttcaaccaagagatcacacttttccctcattccatagagttnttgtgctcttaggggctcaaatatttgttcacatgagtgaaatgctcctctatagatttgctatacaccaatatgtcatcaagagtaacaacaacacacttac

SEQ ID NO: 2265 - DNA, 373 bp, Glycine max
  unsure at all n locations
gaagtgccttatgaatcctcccgtacttatgccaccagtacctggaaggcctctcatattgtacatgacaatcttatacgagtcaatggggtgtatgctgtggcaacatgatgaatccggagagaaagagcgcgctgtttactacctaagtaagaagttcacgacctgtgaaatgaattactccctgctcgaaagaacgtgttatgctctantatgggcatcccatctcctacggcagtacatgctgagccatactacctggttgatatccaagatggacccggttaagtacatctttgataagccagctctcactggaagaatcgcccggtggcaagtgctgctattcgagtgtgatatagtctacgtcacc

SEQ ID NO: 2266 - DNA, 467 bp, Glycine max
  unsure at all n locations
agctntatcaaatttcccttctaataagttttgtattccaagactttcggtttggtatgtatgatttcctagtcttggaaattagtggtataattntcaaggggatacctgtgactcgattggtgaaataggatctctcttcaaaaaagcatgttttttttaccattgcaaaaagaaaagattttgttgcgaatgaacaagatatcgagaaattgtccatacgtaaaatcataattattgatacaggccttttccacgtaaaaagagaatcttttgttacaatagaagcagaagtgatattgattattcaagaatcgaagtcaatttgctttatacatttacataatatatggcataatagagcctgcgattctttgatttgatgtctagtcaaatntcaaggtggaagttatagttctgaatttatccatgttangatgggaaaatgtgaaaaaaagttggatatg

SEQ ID NO: 2267 - DNA, 284 bp, Glycine max
  unsure at all n locations
agcttcttctagacttatctcctcactactagataatacactttcaacatcggttatttagaacattctacatcggttctaaaaccgatgttgaaagtgacgatgttgaatgtatgaattttaacatcggttttggagaaccaatgttaacatacatatgacaacatcggttctccaaatacccgatgttaaacacaatgaacaacagcaaaaaaagtgcaggcatgatgaacgttgacatcggttnttcagtaaaaccgatgttaatatgttagtttaacatc

SEQ ID NO: 2268 - DNA, 436 bp, Glycine max
  unsure at all n locations
tatgccaaaactntcattatattcttcggatatagtatcttcaaagcttgagtgttgaagtgaccaaatcttcaatgccataaccatgaatcatcaattgtaactctcatggcaatgccagtattagtagtatacttaaagcttattggaaaaaacttatatttcctttctccattttaactntggcaatctcttgccttttgggtatttttatcatagataatgcacgtatcttcttcaaggtgaagataatagcctttctccatcatttagccaatgctcaagagattatctttatgatttggaactagtaagacatctttttatgatctcttacctttctttgtctncaccatgacagtgcacttttcttttgactctaccatggtggtcatttccaattgaactntgactctgacagtggtcgcaatttcct

SEQ ID NO: 2269 - DNA, 342 bp, Glycine max
aattcatttttatcgtttttgtaaaatacttggatgaataatacaattaatattacgctacattgaaatgtgactttatgtataatgcatactctcacttatcactacaaccaatatattatacataaatatgtactataatacactacacctttatgattctatgctatgcaattactaataatttatacataatttgatataatatacaatatcaaccattatcttttacaataaaatattactatacaaatctatataaacatatgataactatcctatgattttattttttaatcctaaacttattcatttaacataaactataatactattgacgta

SEQ ID NO: 2270 - DNA, 383 bp, Glycine max
  unsure at all n locations
tctgttgttcaactttgagtgtctcgatatattatgctcctgaatcgaacatccgagtganaagctatgagcattcgaatttcttgagagcttacgctgctcaatttcgagcgtctcgacatgtgatgttcctgaatcggtcccccgcgtgtatagttatgaccatctgaatttcacgagagcttccgctgctcaatttcgagggcctcaatatgtgatgtgcctccaacatcccagtgaaaagttatgacaattcgaatctctagagagcttccatcgctcaatttcgagcgtctncggatattatgcgcctgaatcggacatccgagtgcaaagctatgaccatccaactctcttacccgcttcatagttcgatttccacc

SEQ ID NO: 2271 - DNA, 436 bp, Glycine max
tctacttcatagtctaccacattcatatgatcaattcatcatcaacattattgtcagtcgtctaacctttgatgatgttgccagaactattcctaaagaagaattctaacaaaagaataagaaagatacgcaggaaaattccaagcatgcaaaggctttaatgatgacgaaggtagatcaatgtaatgtggctctaatgggagttaaaatcatggcagatcaaagtcttgaagaagaaagaacctcatatactataattgtggcaggagatgacacttaaagaaagattgttggcctaaaaagagtggaggagataaactatagagaatcgagctctcaacgttgtgttgctagcacctcacataatatggaagccatgtgtagtgaaacaccaattggttttagaggtggaagacaacttcatgatcgttggata

SEQ ID NO: 2272 - DNA, 436 bp, Glycine max
  unsure at all n locations
ggataagagtagtaaatgatgaagtgatacctttaggcaatgatgcactgccatgaaattcctgaatgccttcacaaatatcagctcccatcgtgctccaacaagctttgaaaaaatcgaagttgaagctgtatggtccaaggcttttgtctccagcacagcttcaaacaattgctttgatctcttcacaagaaaatggagcttctaaccaattactatcctcattgcttatctgtttgaaatccaccctttccatctggggtcgtgaaacatagttctcctaaagcatgttagaaaagaagcgtttaacttctttcttaacccctaccacatcttcaatataactgcatcagaattaacgcactntagtttattcttctgacattctgttcaaaggcaagagtggaaaaattgggtattgataatcccaagtttc

SEQ ID NO: 2273 - DNA, 488 bp, Glycine max
  unsure at all n locations
ntctacaaaatcaaacgaacaataactttaactcggatgtctgattgagtcgcgtaatatatcgagacgctcgtaattgaaaacagaagcattgagcaaattcaaacgacaataactttttactcggatgtccgattgagtcctgtaatatatcgagacgctcgtaattgaaaacagaagctctgagcaaattcaaacgacaataactttttactcggatgtccgattgagtcccgtaatatatcgagacgctcgtaattgaaaacagaagctctgagcaaattcaaacgacaataactttttactcggatgtccgattgagtcccgtaatatatcgagacgctcgtaattganaatagaagctctgagcaaattcaaacgacaataactctttactcggatgtccgattgagtcccgtaatatatcaagacgctcgcaattgaaaacagaagctctgagacaatcaaacgacaataactttttactc

SEQ ID NO: 2274 - DNA, 311 bp, Glycine max
tttcgagcgtctcgatatactactgtacacaatcggacacccgagttaaaagttattgtcgtctgaaatggctcacaacttttgtttcaattacgaacgctttgatatattacgggacttcatcggacatcccagttaaaagtttatgtcgtttgaatttgcttaaagcttctgttttcaatttcgagcgtctcgatatattaccggactcaatcggacatccgagttaaagtttttgtcgtttgaattttctcaaagctctctgtttcaattacaaagcgtctcgatattctacgggacacattcggaca

SEQ ID NO: 2275 - DNA, 488 bp, Glycine max
  unsure at all n locations
cttcattntcaattacaagcgtctagatatattacgggacactttctgacatccgagtaaatagttattgtcatttgaatttactacgagcttctgttttcaataacgagcgtctcgatatactacgagacacaatcggacatccaagtaaaaagttattcctgtttgaatttgctacaagcttccattttcaatttcaagcgtctagatatattacgggacacaatcggacatccgagtaaaaagttattgtcgttaaaattttctaagagcttatgttttcaatttcgagcgtcacgatatattacgggacttaatcggaaatccgagttaaaagttattgtggtttgcatttgctacaacctttcgttntcaatattgagcgtctcgatatattacgggacacaatcgaacattcgaataaaacattaatgtcgtttgaattgctatgagcatctgttctcaataatgagcgtctcgatatacta

SEQ ID NO: 2276 - DNA, 375 bp, Glycine max
  unsure at all n locations
agctntgagcanattctaacgatagtaactcttttctcggatgtccgattgggtcccgtagtatatcgagacgcacaaaattcagaacaaagcctctgagcaaaatcaaacgaaagtaactttttactcgtatgtccgattgagtcctgcaatatatcgagacgctccaaattgagaacagaaactctgagcaaaatcaaacgacaataactttttactcggatgtccgtatgaatcccgtaatgtgtcgagatgctcgtaattgaaaacggaagctctgagtaaattctaatgacaataactttgtactcggatgtccgaatcgtaatatatcgtgacgctcgtaattganaacagaagctcttagcatattct

SEQ ID NO: 2277 - DNA, 492 bp, Glycine max
  unsure at all n locations
ntacatgaattntattaacataaaaaatttcttcaatcatagtacctttgatatatctaataattctcttagctccttgtagatgactaacgcgtggctcctcaatgaatctgctaagcaaactaactccaaattatctggtcttgttgcaaccagatatctcatatttccaatcaaactcttatatagagttgcatccacctttttttccttcaacatctcttgtcaactttagctcttcttcaactagtgtggaaacatgctttgaattttccatctcgaatttcttcanaatatcacatgcatacttcctctaggagatgaanatcccaccatctcgctaattgacctcaatgccaagaaaatangacatcaggcctaaatctgtcatctcacaacatcttatcatagcttccctagattctgaaatcaactntgaattcgtgtcagtgaagattagattatcaacatacagacacacaatgagaatat

SEQ ID NO: 2278 - DNA, 270 bp, Glycine max
  unsure at all n locations
agcttgtcctctccgatggaagaataccgtgacatatgtctcctgggccttataaaggacaatgaagtcaaagtcaacctatgcttgtacctactncatgccaattgaatggccacagcaacccaagttctccaccctggtgagtaataccttgcacttctcttcaccttttccttaacaaatgtgtacctgaaatgttgtgtcacatacttcacgtcctgtgctataaggccgaacgcctcggtggtttccaacgtgatgagtgtggat

SEQ ID NO: 2279 - DNA, 309 bp, Glycine max
  unsure at all n locations
tatggacaataaaatacgcggtattgagaagagcattttgaaagaagcttctgtgcctgatgctgagaaagatgttncactatcttacaccccgaatgtttctgtgcctgatgatgagaaagatgattctacatcttccggcctaaatgctgagggactccctttatccacgggagaagaatcaacagaagaagaggatttagccctaaatgagactcctgtaacgcgggcgcctgaagctgctgcagtgaactaatgacctgtagacattaatgtgtgaagaaccattgccacacgtggccctcgttt

SEQ ID NO: 2280 - DNA, 328 bp, Glycine max
  unsure at all n locations
tgcaagctggaatcatttatcctatctcctacagccaatgggcgagtcccgtccaggtagtcccgaagaagaccggcctcacagtgataaaaaatgagaaggaggagttgattcctactcgggtgcagaacaggtggagagtctgcattgactataggaggctgaaccaagttaccaaaaaggacaattttcccctgccattcattgaccaaatgcttgaacgcctggcaagaaaatctcactactggttccttgatggtttttctggttatatgcacaatactattgctcctgaggatcangaaaagaccacattcacctacccctt

SEQ ID NO: 2281 - DNA, 347 bp, Glycine max
agcttatatagaaagttcgttcctaatttctctattattgcatcacctctcaatgagatagagaagaagaatgtggcatttacctgtggtgaaaaacaagagcaagcctttgctttgctcaaagaacagcttactacggcacttgttctatctcttcctgacttttctaaaacttttgagctacaatgtgatgcttctggagtgggagttggagctgttttgttgcaaggtgggcaccctattgtcttatttagtgaaaaacttcatggtgcgacccttaactactccacctatgataaagagctttatgccttaataagagcactcagaacttgggaacattacct

SEQ ID NO: 2282 - DNA, 313 bp, Glycine max
  unsure at all n locations
agcttcggtattcaatntcgatcgtctcgatgtattacgtgactcaatcagacatctgagtaaaaacgttattgtcgcttggaattgctgaaagcttcaacattcaatgtcgagcatctcgatatatttcgggactcaatcagacatccgagtaaaaagttattgtcgtatggaatttctgagagcttcaacattcaatttcgagcgtctcgatgtattatgggactctatcagacatctgagtaaagaagttattgtcgttggatatgtgccagagcttcaacactcaatttcgagcgtcttgatgtattac

SEQ ID NO: 2283 - DNA, 294 bp, Glycine max
tcttgaaccctcaccgcgcactctttcataatacggagactcctgacacccatcaagtgtacccctttctatgctctctggacatgaatacgcctggttggtttgcaccaaccacgcggatatgaatggaaggcttcttgccacttcattggctctttaaagtcgcatacttcactatattattgctcgtatcttactccccagatcttcaaaccttgcacacgtttctgaagaagatcttatagtcatgtgggcctttcatatcgaccgaccaagcgattgggccacttaacc

SEQ ID NO: 2284 - DNA, 312 bp, Glycine max
  unsure at all n locations
agcttctccanagaacacaggatcatcatcatactgcaggatatccacaggaaccttgttcttccccaccaggaagcttttgaaacatgtttgagatacttgttgcctcataaaccctgttaggccttcagccactaaatcaaagagaaaaggggccaaaggatctccttgtcgcagccctctttgaggtttaaactctgaagtagggcttccattaacaagaatagatatggaagctgaagagaacaggcctttatccatctaatccatctctcatgagaccccattctcttcatatataaatgagaaatt

SEQ ID NO: 2285 - DNA, 463 bp, Glycine max
  unsure at all n locations
ttgagcaattcanatggtcataaatagtcactcggaggtcctattcacgcacataatttatcgagacgctctaaattgaacaacggaagctctcataaaatttaaatgctcataacttttaactcggaggtccgattcaggcggataatatatcgagacgctccaaattgaacaatggaagctgttgagcaattcaaatggtcataaatagtcactcggaggtccgattcaggcgcataatttatcgagacgctctaaattgaacaacggaagctctcaagaaattcaaatggtcataacttttaactcggaggtccgactcacgcgcataatatatcgagacgcccgaaattgaacaacggaagctctcgagcaattcatatggtcataacttttaactcggaggtccgattcaggcgcataatatatcgagacgctcgaaattgaacaacggaagctctcg

SEQ ID NO: 2286 - DNA, 486 bp, Glycine max
  unsure at all n locations
tctagggattaaacataattaagggtattgaaaaacaaatatttaacagaaacattgtatgattctttttcttgggaattccaacggcatgaatgagttgataattggttgattttgatccacaggtcactcaattgagatttgaagccaaggctccaattatgtggtaaattatgactattattgttggcaacacctaaaggacatgacaacttcacgacgagcatttaagatagatagaacaatcttggttcagatctggctggagagactgcagcagccatggtagttacttccattgtgttaaggaaaaccaacccacattactctcacttgcttctacaccaggccatgcaagtgagtcattactcaatgctttgtgtcctagagatcacaattgaatgcactattatactntgaattaaaaataaaatagattagtactgcaggtataattcaatctacgtatagtatatatatactact

SEQ ID NO: 2287 - DNA, 379 bp, Glycine max
atcttaagtcacctgcggcatgcagcttaacatttcaattcgtgcgtctcgtatgttactggactcaatcagacatccgagtaaaaagttatggtcgtttgtattggctcacagcttcaacattcaatttcaagcgtctcgatatgttacgggactcaatcagacatccgagtaaaaagttatggtcgcttgaattggctgagagcttcaacattcaatttccagcgtctcgatatgttacgggactcaatcagacatccgagtaaaaagatatggtcgtttgaattggctcagagattcaacattcaatctccagcgtctcgatatgttacgggactcaatcagacatccgagtaaaaagttatggtcgtttgtattg

SEQ ID NO: 2288 - DNA, 271 bp, Glycine max
  unsure at all n locations
agtgaactttatagcgggggtgatcacagaatggaaggatattccagttgagcttttgatgcagattttgtcacttgtggatgatcaaacggttatgatagcttctgaagtttgtcgtgggtggagagaggcaatttgctttggcctgactcggttatcactctcatggnacatcatctgtttttttaccttcccttctaatgctttatttcacttttgaggttattatgcttgtggaggcagtgaatattgaaaagggtgattttttttt

SEQ ID NO: 2289 - DNA, 441 bp, Glycine max
  unsure at all n locations
agcttccttaagaagattcctaaagaagcttgagcttagctacacatacctctctaatagctaagctcacctcctcgagatgagaagctagagcttagctacacaccacctataatagctaagctcacccccatgacaaaaaacatgaaaatacaaaaaaagtccttactacaaagactactcanaatgccccgaaatacaaggctaaaaccctatactactagaatggccaaaatacaaggcccagacgaaggaaatgcctattctaatatttacaaagataagcgagctcatacttagcccatgagctcgaaatctaccctaaggctcatgagaaccctagggccttcccttggatctctagccaatctacttggagtcttctacccaatgcccttgcggggtaggatggcatcatttggcacataactaanatttcat

SEQ ID NO: 2290 - DNA, 395 bp, Glycine max
cctgtattggccttacctgaatctacaaagactattttagtggaggcggatgctatatgagtgggggtcagagccgatctcataccagatcaccattgcatagcctttataagtagaagcttaaatgttcagcaacaatccatgtcaacctataagaaggaggtactacctgtggtgcttgttgtacaaaagtagagacattacttattacctaagcagtctgtaatgaaaactgatcacacaagtctccagtatattcttgaccagagactttccacagctttccaacacatatgcgtggtaaaacctatggaatttgatttcattattgaatacaagcacggaagtgagaaccaagctgctgatgcactctcaagagttgaatgtgctactat

SEQ ID NO: 2291 - DNA, 495 bp, Glycine max
  unsure at all n locations
ntanacttgttcttacttgataatggttatagacttatagttataattnttaagcaacaaacaaaagaactcatgtgagaattgactcatggtcaagaagatgttctatttattttaattactatcaatttagaatttatggtgaaataaaaaaataaagcaacctgttaaactcggtagaatgatagaaaatttagataatttatatggcatcttaagtatacatcttattatcaccattatataaaacaaataaataaaattaacaaaaggagaaaataatttatctgccaaccatggattttttttttatacttttatctaatcataaattaacatatacaataaaattgttgattnttttatagtaattattttcaagttatagttatcataattnttaattaactgatagtgtaaaattatatattaataaaatataaattaaattcattaacaaaagaacattataaagtgtctgtgcaaaatgaaatg

SEQ ID NO: 2292 - DNA, 259 bp, Glycine max
atataaacttcttcaaacaaatctctattcaaaaaagcattattaacatctaattggagaagacactagtttctaacagcaacaacacagagcaaaactcttacagtggtaagcttggccattggagaaaatgtatcagagaaattgattccagcttattgagtataccctttggcaaccaatcgagctttgtatctatccacaaagccatcattttatatttaaccttatacacccatctacaaccatacatgcttat

SEQ ID NO: 2293 - DNA, 502 bp, Glycine max
  unsure at all n locations
atactcagctagaagaaataagactagtggctgaggatagatgattagtatctctggcggtttaagttatatgagtgacaacaactctgtacaatattntgatgcacttcaagaacacacacttgagggttttaatctaataagaaagtttgagacggaattcacctaaacttaaatntttataaaatggatttatagaattattaatttgtgatatcgacgatactaaaagattatatatattacgatagaaaatgttattatattaatttattgaaatgatagattttgcttgtatggccgaagttatggccacaaatatatattttagagaaaattattaatttttgaaagtttatatgtaacttgaaaaacttagccaattgttataatgtgaacttatgcttggtattcgactggcgacgattgttagtggagtcggggactgtaacttaccttctagagcctatattattaccataactgtgatgtaatcattata

SEQ ID NO: 2294 - DNA, 486 bp, Glycine max
tatctctagaagacaaataaatgagtttctttgtactctcaaattagtttatgcactttatagaaactctcttctctcatatatagctcctttaaagatgaacaaatttctaaaaattaacttatataatttatgtagaaactcttgattcttctttttcttaaagcgtatatgaaaaaacttaccaaaaaagactctgtcattaagaaaaaattatgaagcttatccgttggttttgttttattataagctttttatcttcatgtgcgttgttccctgattcgtagtaattgctaatgtaacatgagtttaatggaacatattgtcggtgtcaaattacagaataaagaaagtagaaaatcataactaataagactcttaacccagtaaataaactaatcttatagcttgatttgtaattaaataatattatacaactacttttagttattgatacatagcctatcctatcatcttacatttcat

SEQ ID NO: 2295 - DNA, 315 bp, Glycine max
gcttgtaatcgattacacatatactgtaatcgattaccataagagaatttcagaaaatattctcaatagtcacatctttttatttcattcttaaatggccatcaaaggcttatatatatgtgacttgagacacgaatttgctaagagtttttaagaacaaaaaggtcttatcctcttaaaaagtaaaatcgttttatcctcttacaaattccttggccaaaacacttgtgattcaataaggaattatttgagtgctcaaattgttcaatctatctctttcaagagagatttcttcttctcttcttctttattctg

SEQ ID NO: 2296 - DNA, 471 bp, Glycine max
taaagtttgtaggcctgaggattctctattatctctctcacacgcacatatataatagttctatatataataatatattcatgctgataggctcgttggcgtatttgacttcgacaagtttcttcgcttgtttataaaccttaattcaaaatagacttattataaatagacttttgtgacaaatctaactcttaaacaactcagactagacttaacaaatcaataaatagtttctttgagtaatattagattctattcttttaagtaagattttatatttaagttttattgatagaaaaatatgattggaagaaaaaatctcattaaaaatagctcattaggttctttgatagagattaattatcgacaaaactaataaatactctattccaatagcataattaagaaaaataaattaaacttaacaaggatatataataggcaaatgagttacgctagactttgtaatta

SEQ ID NO: 2297 - DNA, 431 bp, Glycine max
  unsure at all n locations
cgcttgccttagcacactntacttncatctatttcagactatattatttatacgggttggacaaaatgtttccgaagactaatatcatattgttgattaccttgtatatgtaacaatttaccttattattgtggagtttggcattgggtgcataaagggctcgatgacataaaatcactttacaaacatcttctttctactcatcacatctacaacaaatagaacaatatatccctatttgctgatgagtacataatacatttgacttgtttttgccaatatacggatgagttcatcacatttttcttattttggcatcaaaatattattatttaagataaaatatgtgttacatgttattctatatcattatgtgatgtgtcggtttatgatataactatgttcttcctactcgagatatactcattttt

SEQ ID NO: 2298 - DNA, 469 bp, Glycine max
  unsure at all n locations
agcttacagcaaatgatagaatgtctatagttttatcatttgacaatttattggtattatatgtcttatccttcatatatatagactctcttttttcatctttttcaactgtgaatttttacataattcataaattttatttgataccttgcatagcattgcatttagcaaatacaatttaacatgcttggtttataagtattgacacaaaaaaggcttatgaaaataccttgtattgcatgttgctagggcttattaaaaatatcaaataattttacatgtgtctgtgaaatcagacttattaatgatgcgataaattatgtaactatcatgtctctcgttgatgttgctaaaaaaattgtttaggaagtatanggattaaaagtgcattttgcaaaaagtttaaagatcgagaacataattaacccatttaaatattatcaatanaataaccttaaatttaaaatac

SEQ ID NO: 2299 - DNA, 511 bp, Glycine max
  unsure at all n locations
tcggacctataaaactaagctgggtatctccttcttcactacatcaagaatcaccgggttgtgtcttctctgtggctgtcttactggtttagctccatcttctaaatttattcgatgcatacatgtggatgggctaataccaggaatgtccgccagggtccagcctatagccttcttatgcttcttgagaactgacaacaacttctcctcttgctcatcagcaagggaggcagatataatcactggaaaactcttgctatcatccaagtaaccgtattttaaatttgatggcagaggcttcaattctggtgtggtcggctggacagtggtagaaggagatggtttctcancctttacctcataaagaaagtcagaggtatgtgtacttcctgaaacatggttagtcctatctgactctataanatcaatctcaagaggtaaaacaccaccaccaggcatgcaatcaatatcactctcagattcactctcagcatcaaagtcagacatatga

SEQ ID NO: 2300 - DNA, 449 bp, Glycine max
ctaatgtgttctcccttgtagaactactaactgcagtaacagttgcagcccaactatccagtagtgatgacaatagaatcaatgccttcacctcatcctcaaatttaatctgcacagattccaattgggcaagaatagtattaaactcattaatatgatcagttacagagataccttctcccatcttgaggttgaacaaccggcgcatcaagtatactttgttggctgctgacggcttctcgtacatatctgataatgccttcattaagcctgcagtagtcttctcgttcacgatgttgaacgcgacgttcttggctaatgtcaatctgatcacgccaagagcctgtcgatctagcaagttccattcttcttgcttcatgtcttctggcttaacccctgataagggctgatacagctttttctgatatagataatcctctatctgcatc

SEQ ID NO: 2301 - DNA, 337 bp, Glycine max
  unsure at all n locations
ctgagcanattcaaacgacagatcactgtttactcggatgtcttattgagtnccgcaatatgtcgagacgctcgaaattgaagaccgaagctctgagcatattcgaacgacacataactttttactctgatgtctgactgagtcccgtaatatatcaagaagctcgaaattgattatcgaagctctgagcaaactcaaacgacaataactttntacttggatgtctgattgagtcccgtaatatatcgagatgctcgaaatggaataccgaagctctgagcaaattcaaacgacaataactttttactccgatgttcgattgagtatcgcaatatat

SEQ ID NO: 2302 - DNA, 378 bp, Glycine max
agcgttaggatcggaagagtgactatgataatctattatggccaacggaaaaatgaggggttgattgtcaatgcaatttgggggtagctctgctggcttcgacgtcattggcaaaccgcggaatggtttgagtgtggaacaatggaaaatatggtgaattcgtgctccttttggtacttgcaagcggtacgccatgggacctattctctctatgatctgaaatggcccgtaatacctctttgctaatttgcccatactagccggagttccttttgtcgatgtttctcggtatggtcggagcttgactataacccagtcaccacattcataattgaccttgtgccgcttcttatcagcatatgtcttcatacatgcttg

SEQ ID NO: 2303 - DNA, 482 bp, Glycine max
  unsure at all n locations
ngagcttaaatctaaactcagttattcaaatgagataagctcatgctgtatatgtttgataaaagctcacaaacaacttgtgtttgtgtatgtgtatattctatacaaaagattgtcattttaaatgagaaaatgtatgtatactaataataataatttatttattgttattacttagtaaattgttatcttattgatttattactgtctactatttacgtaacgctacttttcaaagagtttctttactctcttcaacttctagcataaagatatgtactcaactaaatgctaaattaataaacatagaaagaatacattggagaaaatttgaggtacgaaaagaaaattattgttagaatttagaatatgttgaatagtaactgtcatgttgaatgttntatgactgaaagttagcagttacatattattaaatatgcgtaatacgggaatagagggatatgtgtgtatcggtttctagt

SEQ ID NO: 2304 - DNA, 424 bp, Glycine max
agcttatgacaattgaaattctcgagagcttccgaatacgtgtgaaaagttatgaccatttgaaatttttgagagattccgttgttcaattttgagcgtctcgatatattatgcgcctgaatttgacttgcctgtgaaaggttatgaccatttgaatttctcaagagcttccgttattcaatttcgagcttctctatatgtgatgtgcctaaatcagacatacgggttaaaagttatgaccatttgaatttctcaaaagcttcggtagttcaatttcgagcatctcgatgtattatgcgcctgtatctgacatccgtgtaaaaagttatgaccattttagtttatcgggagcttccgcttttcaatattgagcgtctctatatgtgatgcgcctgaatcggacatccgagttaaatgttattac

SEQ ID NO: 2305 - DNA, 468 bp, Glycine max
  unsure at all n locations
tgtttcgaaaccacccattggttctgataggcttgtgagaggcatgtttagggactaaatcccacacttcattccttttaaaatgaattaattcatcgtgcatagccaacaaccaatgctcatcatgaaatgcttcatatatggttctaggttcaatctgagaaacaaaagttgtgttcaagatccttaaccttggtttcatcttcaagtgcagcttgcgtatcctaaaaacctgcttcttcattttccaaagcattttcttgaacaaaagagccagtttcctcacgaataatatttttaggttcttccacacacaaagttctcctattaagcactctataagccttgcgttgtaatgaataaccaagaaagattgctcatcagttttgcatcanattanaaagagatccttttcattattaaatcaacatttacatcaaaccctaaatggatatattggttcttcat

SEQ ID NO: 2306 - DNA, 473 bp, Glycine max
  unsure at all n locations
tctatagaaggttcgttcctaatatctctacaattgcatcacctctcaatgagctggtgaagaagaatgtggcatttacctgcggtgaaaaacaagagcaagcctttgctctgctcaaagacaagcttactaatgcacctgttctagctcttcctgactgttctaaaacttttgagctagaatgtgatgcctctggagtgggagttggagctgtattgttacaaggtgggcaccttattgcttattttagtgaaaaacttcatagtgccaccctcaactaccccacctatcataaagagctgtatgccttaataagagccctgcaaacttgggaacattaccttgtttccaaggaattngtcattcatagtgatcatcaatcacttaagtacattagagggcaaagcaagttaaacaagaggcatgcaaaatgggtagagtacctagagcaatttccatatgttatcaaatac

SEQ ID NO: 2307 - DNA, 443 bp, Glycine max
  unsure at all n locations
agcttcattcctttttcactcatgtgtccaagtctttgatgccacatggttgaattattgacagcctcagtaactcctaccatatcctcatctgcaatcatgtaaagagatcctcgcttctttccacgagccacaatgagattgccttttgttaccttccaagctccatctccataagtggtgtgatgcccttcattatccaactgccctatggatattaagtttctctttaaggtaggaatatgtctgacattgtgcaatgtccatagggatccaccagaggtctttatgtcaatatcacctcttccgataatgtccagagattntccatctgcaaggtaaactttcccaaatcttccaaaatatagttagacaataaatctttagaaggagttgtgtggaacgacgcacctgagtccatgatccatgaatcaacaggacta

SEQ ID NO: 2308 - DNA, 238 bp, Glycine max
tgtaatcgattaccccttcggaactttccgagatggctcccaagagtccctactgtatatattgtattatgtatggcctccctggtctttcaatatattaccagacatgcaagttccaagttcaagtctgatgagtcacaactttttatatactagttgtgtgatccgattcaaccattatgtaatcgattaccatttgcgaatgttcgataatagctcccgagagtccacctattca

SEQ ID NO: 2309 - DNA, 496 bp, Glycine max
  unsure at all n locations
ggaaccttgatngaatttccatccaatgttggagaaaggttcttgtgtaaagtatagatgtcaaagagggttaaagaaatgttaatcttataaaatatgatcttgtaaacaataaaagattattacttactttttgctaacattttcggtagtagttatcgctatgttcaaagtaagcattgtttttttatattgattactagtgagagtttccatgattntcttattattgttggaagtaatcattgataanaatgtttaagaaggaaaaaaattatataaaaagtatgcaaaatactagaaaggaataatttcatgtgaaaaagtgattttgatatttataatggttttgaagtaattaactaacaaaaatagacactccagtaataataacataacgttcatgtatctttntctctagctaacttaatttggatataacataacgttctttaataacannatatngacatcattgactttgagaaaaaacaca

SEQ ID NO: 2310 - DNA, 383 bp, Glycine max
  unsure at all n locations
agctnggctgtcttcctattcatccatcaacatgtagaatgcttattctttccatattgatgatatgtcttgatccagctttaactcttgcttgtgcattcgagtttaatgatccatttgtgcatcccattttacctgatgaaaagaagagagcttcagctgctagatctgagcttggttctttgtatgggggttgtggtgaccagtttgctatagtagcagcatttgaatgctggcataattcanaggaaatgggtctagaatcacggttttgttctcagtactttgtttctcaaagcattatgaacaagttatctggaatgcgtaagaatttagcagcagaactatatcagaatgggcttattcatgggcagtttacaagc

SEQ ID NO: 2311 - DNA, 409 bp, Glycine max
tcgattactagaagtttttacgtttttaacaacctttagaaatttgaatttaaattttaaagcctgtaattgattacaacttgtgtgtaattgattaccaacatgagaattcaaatttcaagtctgaagagtcacaactcttcagaaattaactgtgtaatccattacaacagttatgtaatcgattaccaataaggaattttcgaaaataactcccaagagtcacaactgttcaaattttttttgaatggtcatcaatggcctataaatcaattaccagacatgaaaattcaaatttcaagtctgaagagtcacaactctttagaaactaattgtgtaatcgattacaacaattatgtaatcgattaccagtaaggaattttcgaaaataactcccaagagtcacaac

SEQ ID NO: 2312 - DNA, 403 bp, Glycine max
  unsure at all n locations
tgtagcagantagaactacaataactnttcactcggaagtccgattgagtcccgtaatatatcgagacgctcgaaatttaaaaccgaagccagtagcaaattcgaacgacaataacaattcactcggaagtccgattgagtcccgtaatatatcgagacgctcgaaatttaaaaccgaagctcgtagcaaattcgaacgacaataacaattcactcggaagtccgattgagtcccgtaatatattgagacgctcgaaattttaaagcgaagctcgtagcaaattcgaacgacaataacatttcactcggaagtgcgaatgagtcccgtaatatatcgagacgctcgaaatttataaccgaagcctctagcaaattcgaacgacaataacatttcactcggaag

SEQ ID NO: 2313 - DNA, 436 bp, Glycine max
  unsure at all n locations
agcttcggttntaaatttcgagcgtctcgatattttactggactcaatcggacttccgagtgaaatgttattgtcgttagaattagctacgagcttcggttttaaatttcgagcgtctcgatatatttcgggactcaatcggacttccgagagaaaagttattgtcgttagaattagctgcgagcttgggttttaaattttgagcgtctcgatatattacgggactcaatcagacttcctagtgaaaagttattgttgatcgaatttgctacgagcttcgatttggaatttcgagcgtctcgatatattacgggactcaataggacttccgagtgaaatgttattgtcgttcgaatttgctacgagcttcgggtttaaaatttgagcgtcaccatatattacgggactcaatcggacttccgagtgaaatgttatt

SEQ ID NO: 2314 - DNA, 473 bp, Glycine max
  unsure at all n locations
acaatggttttaaaatgtggctcataaacttggaatccctatccgacacaatgctcctaggaaatccatgaagagtcactacctctttgaataaaagatacaccacatgacaagaatcatccnctttgtgacatggaatgaagtgtgccatcctagaaaacctatcaacaaccacaaaaatcgaatctttctcctcttggaccttggaagaccaagtacaaaatccatggaaatgtcggtccaaggggaggtaggaattggaaatagagtatacaaaccatgatgcatgactntagactttgcgttatgaacaaaanttgataatatcatgtttcattntaggccaaaagaaatgttcatgcaaaatgttcaaagtcttttaaactccanaatgtcctggttaaccccctttatgagcttcacanatcatgagttcatganaggaactttgaggcaacacaatcttttatttt

SEQ ID NO: 2315 - DNA, 444 bp, Glycine max
  unsure at all n locations
acattgagatgctataaattgagatatggaagttcttgagagattcaattggtcataacttttcactcggatgtcagattcaagagcaaaatatacagagacgctcgaaattgaacaacggatgctctctagaaatntaaatggtaaaattttttcacatggatgttatattcagacacataatatatcgagacgttcgaaattcaagaattcaaaaattaaagttctcaagaaatatagagatgaaaaattatgaccatgggtgtacgattgagacccatgatatatcgatatgctcaaaattcaaaaattggtccaattcanaaattcaaagagccctaactntngacatgggtgtacgatngaggcccatgaaatatcgagaacgctcgtaatgaaaaattgaagttcttgagaaattcanatagtcataacatttaactt

SEQ ID NO: 2316 - DNA, 399 bp, Glycine max
  unsure at all n locations
agcnttatgagagagtcaaagatcaaatggagaggaaaaattataactatgctaaacaagccaacaaagggagaaagaaggttgtcttcgaacccggagattgggtttgggtgcacatgagaaaagaaaggtttccggaacaaaggaaatcaaagcttcaaccaaggggagatggaccatttcaagtgcttgaaagaatcaatgacaatgcttacaaagttgagctgcccggtgagtataatgttagttccaccttcaatgtctctgatttacctctttttgatgcagatggagaattcgatttgaggacaaatccttctcatgagggagagaatgatgaggacatgaccaagagcaagggcaaggatccacttgaaggacttggaggacctattgaca

SEQ ID NO: 2317 - DNA, 349 bp, Glycine max
  unsure at all n locations
atgcctacaaatgaggaaatccatcanactatcaagtttatggtgagtctcacagcaccaacactggatgggtttcatgtnttgttcttcgaacatcattggagtgtaatggggagagatgtctacaatttcactagagctttcttttaggatccaacaaaaattgctgaagtgaaccaaacttttttaactctgattctgaagaaatgtgaggtcaattctattaaagatatcagacctcttagactttgtaatgtgatttatgaagctatgactcgtcttatctctcaacgcttgagaccaatgatggtgaaattagtgggtcatttccaatctagccttaccccaa

SEQ ID NO: 2318 - DNA, 408 bp, Glycine max
tctgtccctgagaaactggttcccagaagacaacatggagtgtagattgctgtaaaccctagccttgcaacaagttctagggaagtagacacggagatggacaagaaaatccgcagtatggtgagtagcattttgaaagaagcctctgtgcctgaagctgatgaagatgttccaacatcttccaccccgaatgtttctatgcctgatgttgagaaagatgttccaacatcttccggcccaaatgatgaagtactctcttcctccagcaaagagagatcaacagaggaagatgatcaagccgcagaggagacccctgcaccaagggcaccagaacctgctccaggtgacctcattgacttagaagaagtcgaatctgatgaagaacccattgccaacaggttggcacct

SEQ ID NO: 2319 - DNA, 409 bp, Glycine max
  unsure at all n locations
atgttctgttatcaccgtaacattaaattcaatgttaattataaccctatcaaccatttaaagctagtatatctcatcatcaggaatatctggngttaggaatttcctgggatctttacttatttcttcatagtttagggttgatttcaccctttctggcactggcatgagaggaataatgctatctctatcgattacaccatcaataattccgtattccactgcttcaattggagacatatatttatccctatcaatatctctttgcacttgttcaaatgagcgtccagtgaaacttgatataattcttgtgatattattcttgttgtgcataacttctttagcctgaatttctacatctatagcttgtccactagcacctcctagagggtgatgaatcataattcgt

SEQ ID NO: 2320 - DNA, 433 bp, Glycine max
  unsure at all n locations
agctattnccatgggtcgagcggtcttataatatattatggaatgcaggcacaggcaccactccatttgagataaccttcgggcggaagtcctttaattttccagaatacattgcggggattgcaaaggtggaagctatggaagatattctatcagaaagggaggccaccttctaggcaattcgaaagaagctcttgaaagctcaagaacgcatgaagacatatactgatatgaagcgccgggaggtcaattatggctccgatgactgggtcttggtcaagctccgaccatatcaataaacatctgctaaaggaacacaggccattacaggcaaattggtgaagaggtattactggccattccaaattaaagagaggataagcccagtggcataccgcctacaattgccgaacggagcgcgaaatcaccctgt

SEQ ID NO: 2321 - DNA, 500 bp, Glycine max
  unsure at all n locations
tacctcgacaccaacagtgacaatggcagcgagagtggcagtgagaaagaagagtcgcanaaggaaccaataatattaaggtgtggaattgcgagactggcagtgacaatggcagcgagatgcggaggcacggagttgcgatgaagacgatgacgcgggcgacactagagttgcggcagagacttgaatgaattagggcgtggagccaataatatttttaaaaattgagtcgttaacatcggtttttccatcaaaaccgatgttaacaaagtgatgtttacgttaacatcggttntttttataaaaaaaaaattgatgttaacttataatttaccaacatcggttntttcaaaataccgatgttaaggaagtgatgttaaccttaacatcgattntntaagaaaatcgatgttaacttatcattntccaacatcgganttttgaaaacggacgttgcgtntcatgtaacatcggttctcaaaaccgatgtaacctactat

SEQ ID NO: 2322 - DNA, 421 bp, Glycine max
  unsure at all n locations
gacactatgaaactaagcctatctagttataatggattcactggaggaatagtggacactacactattcanaaagggctagaaaggaaanttgttgattgttcaaatctatgtagatgacataatctttggtgcaaccttagaaaagatgtgcaaagagttttctgggctaatgaaaggtgaatttgaaatgagtatgatgggtgagttaaagttcttgctagggcttgaaatcattcagaaagatatgatggatatttatccttcaagaaaaatacacaaaggacatacttaagatgttcaaaagggatgaagccaaacctatggctattcctatgtatccttctctagtcattgataaggatgaaagaggtaatgatactcgtaaaaagataactgctagtagaccagatattgtattt

SEQ ID NO: 2323 - DNA, 310 bp, Glycine max
  unsure at all n locations
tttaaatttatgatttaattnnttttgaggtggagttgatattgagaaggaggaantaanagatttgagggtaaatnntttttaaggggaagaaaatgatgnaatnttttntaggaagggannagtnattagaagtatgagnaagagggtttaagagaattgggttagagntgntgaaaaagggggtagggtttttatgaanntnaagatagatttttgagnnnatggannaatgttgggttnaattatttttgtanatattaaantaggatggtattatatttggtnnttgtatttagggttnnataat

SEQ ID NO: 2324 - DNA, 344 bp, Glycine max
  unsure at all n locations
atcaaatcttatcttatccagattgtattccatccagactttattccgtctagattttatttcgtccagattntattttatccatcttatcttatcttgtccagattttattttatttcgtttatgggcttggacttaaaatagatttgtaagctntgtggctaagaacctcatccatacattttttaatagtatgctctctttattttcttttgatatactttgtgttttaacgacttgaattcaatatgaatttgtttatcaattatttgtggagttgtacattacttatatgaaattttataagtttattgttttagttagatttcactacgttctaaaat

SEQ ID NO: 2325 - DNA, 453 bp, Glycine max
  unsure at all n locations
agcttccattgttcaatttcgagtgtctcgatatattatgcgcctgaatcggacctccgaatgaaaagttatgaccatttgaatttctcgagagctacctttgttcaatttcgagcgtctcgatatattatgcgcctgaatcggacctccgagtgaaaagttatgaccatttgaatttctcgagagcttccgatgttcaatttcgagcgtcttgatatactatgcgactgaatctgacctccgtgcgaaaagttatgaccattttaatttctcaagagcttccgttgttcaatttcgagcgtctctatatgtgatgcgcctgaatcagacctccgagtgaaaagttatgaccatttgaatttctcgagagcttccgttgttcacatttgagcgtctcgatatattatgcgcctgaatctgacatccgagtgaaaagntatgaccatttgaatt

SEQ ID NO: 2326 - DNA, 225 bp, Glycine max
  unsure at all n locations
ntagttgacagatatgttaaccaagggacttcccacggagtatcttcaagaaccttattgcaagctgtgaatgatagatatgcattcaccagcttgagggggagtgttgtgatacattccataattaacacagattntattatgtacagattctattccattgtatttctttccttaattaggttgcttgcagcatataaataaatcttgtattcacttctttgt

SEQ ID NO: 2327 - DNA, 449 bp, Glycine max
  unsure at all n locations
tgcgaggctgcaagtgtagcatatatgcacaacagcctcaccgtagaaatcccacgtgagagtgaaaactcaacagctatgagaatgttgtctctctacgacaacattgctagaagacatgttcccgccaaactgggacagttctctgcgatggtggttcttgatttgtcggagaacaagaatagtggaccgctgccaaccgatgccagcaagggacgtacactctaggacttggtcgctcttgataacatgttttctggcgagataccacacagttatgcgaactgcatggtgctgtcgaagtacaaagtgatctgcaaccgtatggaggggtccattcccgctggactcatcaggttgtgacacgatacaatcattgatttgagtagcaacaactntaccggtccggctcctgagattaacggacattctagaaaattatctgagct

SEQ ID NO: 2328 - DNA, 456 bp, Glycine max
agcttacatctaggaaaacactggcttagaatgatgtgcttcatgttccctctatcaaagttaaccttatttctgtagcattgtggggagaggttggggtaaagatatcctttgagtctaataagatagttatgactaataataatgtatttatggggaagagatattgtgatcagggtgtctttgtactcaatgtttctgaagtgattaatgagaatgcatcttcttatgcttacttgattgattcttatgatatatggcatgctagattaggacatgttaatccaacttatgttatgaaattgcaacaatcatgtttaattaatatgcatgagaaacacagtaagaaatgttaaatatttgttgaatcaaaattaactaagaaatcatgtccttctgtacaacatgaaattgaactgctaggcttaattcattatgatcttgcatatttaaaac

SEQ ID NO: 2329 - DNA, 384 bp, Glycine max
  unsure at all n locations
tgcagacatgggacatcgtatagtatatatgattcacgatcttgggacagacggttttcaacaagcacatgcacccttgtatgacaaaatacaaagtcattcaaagaagtctgtgtattcgaggtgcacatctttcacatagttgtcagcggtgttaagtctggccaacttgaaggcatgatttgcatggagtgacaagagcttcatcaaattgtttgtgttattgaanagcatgctttctgaggataacacattgccgaggaatcactatgaggcatagaagattgtatgttccgtgggaatgcagtaccagataatctatgcatgccctaatgattgtagtttgtacataaatgattntgtagagatgcgtacatgtcccat

SEQ ID NO: 2330 - DNA, 402 bp, Glycine max
tgcctacaacaatctttaaatatttatgtaggaataataaatcaaagaagttactaatgacaaaaaaatcaaagaagttaaatataaatttaattttgatcaagaaatgacaaatgaaaattaatgtgtttttgaaattgccaagagctgattgaaaatgtaaatttatgcacttcgattcaaaggtcaaggtaaaaaagaaatagaacattacatgtaaatttaatgaaaagaataattgaattgttttggttaagatgacgagttagaaaggaggaagtgaaattttcaaataacttttttatataaaactattcaaggatgatataaaaactatttttaaaatagttttagctgagtgtcattaaaataattgttttattgaaaaatagtagtagatgt

SEQ ID NO: 2331 - DNA, 433 bp, Glycine max
  unsure at all n locations
ctcagtagtagtataattggcttgggcatcatctaaagtcctagaagcataatatatcaccctgcgcaatttatcaattntttgagcaaggacagcccccaatgcataatttgatgcatcacacataagctcaaaaggggctgtccaatcgggtgcctggatgatgggggtggtagtcaacgctcttttgaggcaatcaaaagcctctttgcatctgtcattaaagtcaaactccacctccttttgcaacaagttggacagtggaagggctactatgctaaaatcccttacaaagcgcctgtagaatcctgcatgaccaagaaaagatcgcacctctcgcacacaagaggggtaaggcaattgtganataacagaaatttntgcaggatctacttcaatacccttattggaataatgtggctanaactatacc

SEQ ID NO: 2332 - DNA, 368 bp, Glycine max
tgaatcacaaatctgaacctgtcgacagactctgtggtttatgctcctctgccgaccaccacacagacctttagccttctgtgcaacaatttgaagcaattgaacagcttgaagcttatgctgcaaacatctacaatagacctcctcaacctcagcagcagaatcagtcacaacagaacagaacaattatgacctctccagcaacaggtacaatctcgggtggaggaatcatcccaaccttagatggtcgaatgcttcaccacagcaacaacaacaacaacaaccttattttcagaatcctaatggcccaagcataccatacgttcctacaccaatccagcagcaacaacagcaacagccctagaaac

SEQ ID NO: 2333 - DNA, 491 bp, Glycine max
  unsure at all n locations
tctanactntatacaagaatgaagctctgataccacttgttagacaagtggcctcagatatcttaagaagggggggttgaattaagatattccaaactacttccccaattaaaaatctatttcactctttactcaagttatgaattcccttaatgacaatcttcttaaatattgattcaaataaaacaatttgaatatgaatataaagcaataataaataaaggagattaagggaagagaaagtgcaaactcagatntatactggttcggccacacccttgtgcctacgtccagtccccaagcaacccgcttgagagttccactatcttgtaaattccttttacaagttctaaacacacaaggacaatccttcctttgtgtttagaattcctttacaacaagagactcacagtctcttaatccgttagagaatgaggagaagaagaagaataaatctctctagaaagagatggatttacagaatgagactc

SEQ ID NO: 2334 - DNA, 297 bp, Glycine max
  unsure at all n locations
aactctttntatagcagatttgttggtgctacttcacaaccccttgaactacttcacattgatttatttggtccctctagaactatgagtttaagtggaaattactatgtctcggtaattgtggatgattactcaaggtttacttggaccttgtttataaaaactaaaaatcaagcttttgatgttgttcgcaaacttgccaaggtgatccaaaataaaaaaaaaggtctttacggtgtttcatctagaagtgatcatggagatgaatttaccaatgagtcttttgacaacttctat

SEQ ID NO: 2335 - DNA, 456 bp, Glycine max
agcttcaagaaaaagatggcctcagcaaattccttatttccaaaaggtaattctatcaatagacctccaatctttaatggagagggttaccactactggaaaacccgaatgcaaatttttattgaggcaatagatctaaatatttgggaagccatagaaatagggccttatatacccaccacagtggaaagagtttcaatagatggtagttcatcaagtgaaagcataactatagaaaaacctagagatagatggtctgaagaggatagaaaacgagtacaatacaacttaaaagccaaaaatataataacatctgccctgggaatggatgaatatttcacggtttcaaatcgtaagagtgctaaggaaatgtgggacactcttcgattaacacatgaaggaactacggatgttaaaagatctatgataaatgcactaactcatgagtatgaatta

SEQ ID NO: 2336 - DNA, 462 bp, Glycine max
  unsure at all n locations
cgatgctgaggggtgcttgtttgatcggtcaactcattnttctgagtagtgcgttacacttttattatttgttcatttcaggttcaacactgtagcatatttgcagcaaatatggtggtttgaggtggatggggagttcagcttcccttttcctgctgatatttatactctctcctttaggcttcaccttggacgattttccaagaggcttggtcgacgtgtctgcagttatgaacatacccatggttgggatataaaaccagtgagatttgagttgtcaaccatggatggtcagcaagcatcatctgagtgctacttggatgaaactgaacctgatgatttacacggcaatcacaagcgtggacattgngtagattacaaggtgggtgagtttatcgtcagtggatcagaacctacaactaaagtaagattcttcatgatacagattgattgacacactct

SEQ ID NO: 2337 - DNA, 451 bp, Glycine max
  unsure at all n locations
agctaggctctagaccttgtcattggatcctataactcatgaagtgcttctaggcccttatactctttgaatatctcgagaatgaacaatggaacatctcgagtaattcaaatggtcataacatttcaatcgaatctccgattctagcacgtaatatattgagacacttgaaatcgaacatgaaagctctcggcaaattcaaatggccataacttttgactatatgattgaggcccatgatatttccagacgctcaaaattgaacaacggaagctcttgagaaattcaaatggtcataacttttcacttggatgtccgattcaagcgcataatatatcgagacgcttgaaattgaacacaaaagctctgaccaaattcaaacgaccataactnttcacatggataatcgattgatgcccatgatatatcgagacgctcgacaatgaacaac

SEQ ID NO: 2338 - DNA, 421 bp, Glycine max
agcttcctagacgactactccggatacaaccagatcagaatggatcctctagacgaggagaaaatgacatttatcactgcggatgccaacttttgctatagggtcatgcctttcggcctaaaaaacataggcacaacataccaacgactgatggatcgagtcttcaaacaacagatcagactaaacattgaggtatatatggacgacatggttggcaagtctcacagcataccccaacatgtggtagacctagaagaagtcttcagggaactccgcaaatatgacatgcacctcaaccctaaaaaatgtactttcggggttggcggaggcaagttcctcaacttcatgatcacacaccgagggattgaagccaaacctgacaaatgcactgtcatactggagatgcgcaacccagccaaca

SEQ ID NO: 2339 - DNA, 432 bp, Glycine max
  unsure at all n locations
agcttatgataaacttgagaaggtttgaacctcatattagttgtggatgatcttcatattctattgtagaaagcaatttatttttggcctcatgtctgttcagtatctttgaaattttcctgttagcataattactttaattttctcattagtaaatgatagatttataagccaagattatcatttcaaatatagaatagataattnttctttattgttctcatggcaattcttacactattaaaaaatatactttcaacatcaattttaaaaccgatgttgaaagtaccaatgttaaatgtaatattgttaacatcggttttgaaaaaccgatgttaacataaaaattctaacatcggttttcaaaataaacgatgttatatacaaagaactacaacaaaataagtgtatgcataatgaatattgacatcg

SEQ ID NO: 2340 - DNA, 498 bp, Glycine max
  unsure at all n locations
ggtgtagcactacccactgcagaagctgaatatattgcagctgcaagttgttgtgctcaaagtctctgatgaaatcctatcccccaagggcataggatagaagactccaagaagattgggccagagatgcaagagaaggccctaggattctcattagccttatggtagattntgggcccatgggctaagtatgagaccacttatctttgtacatattacattaatgtttcattatttttggcctttgtatttaggactccataatgtaggtagggtaccctagaaatgttggacttttcagcccttgtattttatggcacctagactagttntttgtattaagggtagttntgtaatttcattcgcattaagtgaatatttgatgtgtgtgttgngaaataaatttaatcgaattgggagaagcctaatccaattaaattntagagggggaggtgagcattngcttgctacacnccattgccacatcatatagtcaca

SEQ ID NO: 2341 - DNA, 380 bp, Glycine max
  unsure at all n locations
agcttgtggagtataagaagtcacagaattgtgttaggttggaaggtaaccgttttgtgttccctggaggtggcacttcgtttcccgaaggagtcgatgcttatgttaatgctctaaaacgtcttcttcccgtgcctttataatctggggatgtcaaaacaatgcttgatgttggatgtggggtgagtcancttctatatcttattatgctttctccttccttggattctctttctttattttctttcgtcctctcttaattgttcgccctgttatcatttcattcgccttcttttagcttgtacttttacatgttactacaagaggagtttcttgagcaacanagacagagaggcttttcaatcaaatgagagcttatg

SEQ ID NO: 2342 - DNA, 430 bp, Glycine max
  unsure at all n locations
agcttgtgaacaaggaagacatagatgatgtgataagagaggtgcaaatcatgaaccatctctcgggtcaatctaacatcgtggaacttaagggtgcctatgaggataaacaatcggtgcatttggtcatggaactttgtgcgggtggtgaactttttgatcgtatcattgctaagggacattacactgaacgcgccgcggcttcattgctgagaaccataatgcaaattattcacactttccattccatgggtgtcattcatagagatcttaagcctgagaatttcctcatgttgaataaggatgaaaattcacccgtcaaggtcacagattttggtctatccgtctttttcaaagaaggtttcccttaattctatttcatatattctctattattntttctctcttccacatctttttttttttcaat

SEQ ID NO: 2343 - DNA, 452 bp, Glycine max
  unsure at all n locations
agcttgccaagaaatatcatgttcttctagcttctgaagcagtcatcaagcaaattcctcgtcttttggggcctggtttaaataaggcaggcaagatgattgccttgctatttgctcttgattggttctgcgtaaaatatgtgagttctcaaaccaaataatgtcaataagagaaataccgcagaagctataaactgtagcttctgttgtgacacacgcccgattgggtaaaacaatcaaatagaacagtttcagtgtttcctgtttgtgttcttagcttggttccagaactttccttcacttatcttgaagaaacggtgtttcttttggcttctttgagtgtcttttatgatatgcattgtgatttacggagaacttattgatcacattctctgtatttatatccctgcaactntgtcaagagtagacgaatattgcactgatgataatac

SEQ ID NO: 2344 - DNA, 407 bp, Glycine max
  unsure at all n locations
agctngctaacccatggaagctcctataatctcccacactntntagggtgggccattcttggatggccttgattttctcaaggtccacttggaccccatttctaccaactacaaatcctaagaaaactatattatctacacaagaggtacacttctctatatttgcatagagggtgtttttcctaaggactgaaagaacttgcctgagatgtcctaagtgatcatctaggctcctactgtacactaaaatatcatcaaaataaacaactacaaatctacctaggaaatcccttaagacatgatgcataagcctcataaaggtgcttggtgcattagtgagcccaaaaggcatcactagccattcatacaaaccaaacttggtcctgaaaagcggtntccactcatca

SEQ ID NO: 2345 - DNA, 343 bp, Glycine max
agcttctgttgttcaattttgagcgtctcgatatactataagcctgaattggacatccgtgtgaaaagttatgaccatttgaatttctgcagagcttccgttgatcaattttgagcatctcgatatattataagcctgaatcggaccttattgtgaaaagctatgaccatttgaatttctcaacaacttccgctgttgattttcgagcgtgtctatatgagaatcgcctgaatcagacatccgaggtaaaagttatgaccatataaatttctcaagagcttccgctgttcaattacaagcgtgtcgatatgcgatgcgtatgaattggagatccgtgctgaaa

SEQ ID NO: 2346 - DNA, 654 bp, Glycine max
tcaaaattgataatggacaagaaagttctcagaaattttactctaccaactacatcagggttgtccaagaatgaagaattgaatttggaaaatgacaaatgacgagtcttggtgtcgatctttgtttctttcccaagttcttctgatctaaagtaaaaatctccaccgagtgacgtcgctagatcatgcatgaggtcatgcatcacaaaccatttccgatcatgcttgaggtcaggcatcaaaaaccatttccgatcagaccaactacttctatttgaacgttggaaaaatgatctcgaaaccaaatcatcaaaatactcatgaccaacctcttctaaagtcctaccatttcttggtttcttcaaaagatcttcggccatccacaacaagattaattcatttttttcaaactcgtaatcttgaggatacaaggaacaataaacaaagcacctttttaaatgtggagggaggtaatgataactaagtctcagtgctggaataactttacactcactttcagaaagttcccaaatgtcactattcagaatattattccaatccacgatgtcatgctttcttctcaacatgcctccaagcgactctgctgctaaaggcagtccatcgcactttttaacaatcttctttccatttttt

SEQ ID NO: 2347 - DNA, 593 bp, Glycine max
ttggagtttccaagtgccaattcgtcttcttctttagtccagtcttcttctggcttcaattcatcagtgggctttccttctgtgtccagcatcttgggatgttcccagcctttgatgacagctttccaggttctgctatccagtgatttgagaaaggccaccatccttgctttccagtattcatagttggtcccatccagaattggtggtctgttcactggtcctccttctttctccatgttcatcagaatttatctccctagatctcactcagtgatttcgagtgtctgctctgataccaattgaaattctgatactggggacagatgtcgtacaagatgtcacgacatcacacttcagaacatgcagattgtgtttgactgtatgaacagattaaacaagtaaataacacaagagaattgttgacccagttcggtgcaacctcacctacatctgggggctaccaagccagggaggaaatccactaaaatagtgttagttcaaggtctaacagccactgtttacaaccttctcacctaaccactacccgtgcgatctctacctaagagccactcttaaatatgagaaacccc

SEQ ID NO: 2348 - DNA, 555 bp, Glycine max
tgttgggttcaacttcaattaagcgctcggggcatcctatggactgagcgaaaaggctcaggtcatcaaatactacacatcttttaaagcacaaagcgaggatcggaacctcaaccctacgttcttttgaaagactacgatgagaaaattacagaggacatgaatccctgggggaaaccaagaagaacacacaaaaataaaaacaagcaacgacttccttaattgccccagatcttaagcgtagtatcgcttgacaacgtcggagttcacgggtgagggtagctcctcgacatccatgttggcgagcaccagggtccctccggagaaatccctttttacaacgaaaggcccttcgtagttcggggcccactttcctctattgtctttcagagcttgggagacttttttcaacaccaagtccccttcactgaacctgcgcgagcgtaccttcttgtcaaaagcattcttcactcgtttctgatataaacgcctgtggctcatggcggccaaatgcttgccttctatgagattaagctgatcgaaacgtgcctgagc

SEQ ID NO: 2349 - DNA, 539 bp, Glycine max
tgcccagagaaggagtccatggaggaaatgcttaccacctcaaaagacttttagcggtttctaatgactcctctgcggcttccacataatgcatagaggatgggaagctcaccaagatgtcttcctcgcctgatacgatgaccagatgcccttccactatgaatttcaacttttggtggagtgttgagggaacaactcctaatgagtggatccacgggcgccccaacagacagctgtagggagggttaatatccattatttggaaagtaacttgacaggtgtgagggcctatctgtactgggagatcgatctctcccctaacctctcggcgggtgccgtcgaaggcacgaaccaccgttgaactcggctttaagtgggaggcattgaatggtaatttctccaaagtgctcttaggcatcacgtttaaactggaaccattatcgatgagcactttggctacgatatggtgcatacacttgactgatacgtgcaaagctttattatgccctctcccctcggcggggatttcttcttccgcg

SEQ ID NO: 2350 - DNA, 604 bp, Glycine max
tgggctcttgcctcactcatcgcctttttggtttcatttctagctatcttatacttatcccaagtttcagaatttctacacctagaccactccttgaaacactccttttttactctaactttgctctgaacattttcattccaccaccacgattctttacccctaggtccaaaacctctagattcacccaacgtctctttagccactttaataatctcttgggacatcttgttccacatatcatttgcacttccttgtgattgtccacaccaaccctcccatatcttttgttggaagattccttgtttctcacccttcaagtgccaccatttgatccttggtgctaccataggacttcttctctttgccctatctctaattcttacatccataaccaacactctatgttgggtagtcaagctctctcccgggataactttacagttcaagcaatacttcctatcagacttcctgataaggaagaaatctatctgagaacatgtccctccacttttgtcagtgataagatgttcctctcttttcttacaccatgtattggctatagaaagatccaaagccttcggaaacttcaagatggatttac

SEQ ID NO: 2351 - DNA, 636 bp, Glycine max
tgcatgtcatcaagtaataatccccggacgaaattagggtatgacagttttccctctttacttgcctctcatcggagataagaggaaagcaaagataggacactgatttcgtccgtcctgccgtttccgtgatgacgactctcgtctctattccttcttttttcttctgcataaaacaaaatacaaacaacaacaagaacaacgaatataatatacatatacacatatacacatatccggcgaaggaaccgatccagaaaacaacagaataacgtgtttcccagtcaccagaggcttcgcgcttgacaatggaggacacatgaatagcgctaggcaataacattcatgaggctccgaaaaggggtgagaatggaggattgccttgagggtcctcacttaggcaatcatgaaaccagctccaaactcgaaagtggaggacacatgaacaaccctaagcaataacattcatgtggctcccgaaaagggtgagaatggaggattgccttaagggtcctcacttaggcaatcatgaaacacagtttcaaactcgaaagtggaggacacatgaacagccctaagcaataacattcatgtggctccggaaaacggtgagaatggacgattgccttgagggcc

SEQ ID NO: 2352 - DNA, 533 bp, Glycine max
cctatgatactcagcttcccaagtttaagttcttcctcaaaactgtcctaagcaatgttctttttgttctattaacaacttctgtttgcccatcggcttatgggtgacaagtggttgaaaataacaatttagtgcccaacttgtcccacaaagttctccaaaaatggcttaggaacttagagtccctatcactaacaatgctctttggcaaaccatggagtctcacaatctccttgaaaaacaaatcaaccacatgggaagcatcatcaactttttttacatggaataaaatgagccattttacaaaacctatcaacaaccacaaaaatggaatctctaccactgcttgcttttggcagccccaaaacataatccatggataaatcaatccaatgatactccggaatttgcaatggagtatacaattcatgaggctttaccttagactttgccttttacatacaatgcaatgttcacaaaatttcggctcatcctttttcatatgaggccaataaatatgttcttgtatatgt

SEQ ID NO: 2353 - DNA, 337 bp, Glycine max
  unsure at all n locations
tgtgcctctccactatgttccctcncctcactcttttgcgtcctccctcacgccctttgctcttgtcgcgcgcctatttgcttcttcatcttcgcctcctgtggtctcttcacttgcttctttatttagttccttctttcttcacttgcttctttatttagttccttcttcatttttgtttccctcggttcttcactttctctttacttccttcctcaactcaaggtgtgattttgtggttgttcactttggtggacacgccgccttcctgttttgtgctcctttcccggatatcctccttttctcgactgctcggcgctcgatctacgtggttcat

SEQ ID NO: 2354 - DNA, 391 bp, Glycine max
tgaggaagtgggttgtccaccaaatgcgagttcttacaacacaatgtttgtttcgctgtggagtagtggggacaaaattagagcattggggatgattttggagatgttgagcaacggtgttgatcctgataggatcacatataactcactgatatcaagtttgtgcagagatggaatggtggatgaggccattgggttgttggtggacatggaacggagcgagtggcaacctacggttattagttacaacattgttcttcttggattgtgcaaagcacacagaattgtagatgccattgaagtgctggctgtcatggttgacaatggatgtcagccaaatgaaactacttacacgttgttggtggaaggggttggatatcctggatggcta

SEQ ID NO: 2355 - DNA, 393 bp, Glycine max
tccattgttcaatttcgagcgtctcgatatattatgtgcccgaatcggttctccgtgtgaaaagttatgactatttaaatctctcgtgagcatctgtcgttcaatttcgagcgtctcgatatattatgggcctgaatctgacatccgagttaaaagctatgaccatttgaatttctcgagagcttccgttgttcaatttcgagcttctctatatgtgatgcgcctaaatcggtcatccgagttaaaaagttatgaccatttgaatttctcaagagcttccgttgctcaatttcgagcgtctcgataaattatgcacttgaatctgacctccgagtgaaaagttttgacccttcgaattgctccagacgctccattgttcaatttcgagcgtct

SEQ ID NO: 2356 - DNA, 449 bp, Glycine max
tgaggaagtgggttgtccaccaaatgcgtattcttacaacacaatgtttgtttttctgtggagcagtggggacaaaattagagcattggggatgattttggagatgtcgagcaacggtgttgatcctgaattgatcacatataactcactgttatcaaaatatggcatagatggatatggtggatgacgccattgggttgttggcggacatggaacggagcgagtggccacctactgttattagttacaacattgttcttattggattgtgcaaagcacacagaatttgagatgccattgaagtgctggctgacatggttgacaatggatgtcagccaaatgaaactacttacacgttgttggtggaaggggctggatttgattcatgctcaatcaacaaattgtattcatttatcaacagcgtttttcctttcatttgaactaaattt

SEQ ID NO: 2357 - DNA, 471 bp, Glycine max
taaaggaagtgaacgaattaccatgggcagaaatgtctccgattgattttaaatctgttcctcaaattcctggaaaatgcaaagattcacgtacattcagcataccttgtattatagggaatagtaagtttgacaatgccatgctagattcaggagcttctgttagtgttatgcctctgactatgtttaattctttatctctacgtcccttgcagtcaactgatgtggtaattcatttagctaatagaagtgtcgcctatcctgttggcttcataaaagatgttttagttagagttggtaaactgattttccctgttgattttcatattacgaatatcgaggatggatttcctcataaatcagtttctattcattctatgctgaccctttatgataactgctacaactaatattgatgtatatgcatgcacactatccatggagtatggtgatataaccggtcctttttat

SEQ ID NO: 2358 - DNA, 568 bp, Glycine max
tggtggctagttcatggcattaatgctccaatacttcaaaaggttgcctttaagctacttgcgcaaccttgctcatcttcttgttgtgaaagaaattggagtacatattcatttattcattctttaaagagaaacaagatggcaccacttagagctgaagatttagtatttgttcatagcaacctacgacttctctcaaggaatactccacaatatcatcaagaggaaactaaaatgtgagatgtaactggagatgattttgggttacttaatgaatgtggcattcttgaaatttctaatttgtctttagatgaaccacagttagagggtgtctttttcaatgatgattgctagtttgtagaattcttgaagacttgaagttgctaattcatcatcttgctttataattattcttttcgaaagaaacaaagtgtacaaatcgtataatgaggtctcttagtatttcttgtgacttattatcataggaaaagtttttttgagatgatgatgaatatataaatcttaactttcaattaagatcctttatgcatatcgctcatatttaatc

SEQ ID NO: 2359 - DNA, 579 bp, Glycine max
tttttcaatcttctgtaagggtgatgagcttttacaaaatgacgatgtctattgtacactgtttttctaccatgtttcagttgtatgtagcttgtgtcttcttcacagatggggcatgcaagatgacccttaacactgtaaccgctgaaattcttatatgctggaaagtcattaatggtacaaaatagcattgcacgcatttgaaaagtctccttgtgaaacccatcaaatactaaaacccccttatcccacaactttctcaggtcttcaatcaaccgacttaaataaacatcaatgtcatttcctggttgtcttgggcctgatatcatcatagacaacatcatgtattttcgcttcatgcacaaccaaggcggaaaattgtaaaatactaatagaactggccatgaactgtgttgagtgcttaaattgccatatggattcattccatcactggctagtccaagtctaagatttcttgcctctttgccgaaattcggatacaaactatcaatcctcctccactgggagcaatcagctggatgacggaccattccatcagaatttctcccatttgcatgc

SEQ ID NO: 2360 - DNA, 614 bp, Glycine max
tattgtagaactgctcaccaaaatatcaattgaattttttatgtacaattttattcaaaagaaacttggacaatgacaaagtacaaggaaataagaatgtactgattattcacctctctccttctctcagctcgttcaccacacttaaaactgaatccataatttggaagtgttcccaccctttgaggtttggcatcttctgtgttggaacttctaggaggattaaggttaaaacacaatatacacagcaccacactcaataataaatttaaataatagagacccagtagttccagattttcactcataaatatacaaacccaaaaaaggatacaaggaagattctgcttctccttgaactttatcaatgggttcttttctcgatgattttggttttgtcttctccctgtatccaaaacatcacagtccaccagttaaataataacaacaatctatctttctagcaatggaacatagacaagaaatacaagcattacatacactgatacttcagaagatgttgcatcagacttcaaaggtgctgagaaaaacaaagtgcaaaaactatcagggaatgcccaaactataaacttgatttcccaaaagagataaaa

SEQ ID NO: 2361 - DNA, 535 bp, Glycine max
tgcatcgacaggagcccagattccgtcgtttaccctgtagatagatagattttataacttagatggcatatttctcccaaatgcatcttgagtaaagtcccattgatatcgataaaattgctgtaatcaggctctacacatgcagggtgtcagagggttctcccagaggtcgtagttagggaaagtctcttctggcaatcccgtccgagtctggtgagtaacaacaacatcttctacaaaaggagcccaacccatatatggatccccaaaagacttggacattagccctttgtcaggcttaattgattttagacggtgacccatgtatctacgtgctccaatgatcaacttagcaaaattgcctccatgggtcatcacgaatacatttgacttcaagcacaccaagaaatcaagagctgccaggcttgtcacatgctttctgaaaccatctaactcctctttagttgccaactcctccttggaacctgttgcaaatgggggaaatattaattaccttgcaaaagaatcaaaaata

SEQ ID NO: 2362 - DNA, 608 bp, Glycine max
tgaagccaaaaggaaaaaagaacttgtagctgttcaatgtactctccataataaagtgtgttcaatgcaaagttaccactccattccatccaaccttgaggattgataaagccatcaagacaagtcttcattaaaactgttcttgaatattgcttccatggtcttcgaagataagtcctaaccgggttttgaaccagtctcaaatctgaagtagctgtgactcaagaattgcgaattgaaattccagtgttttagtttggatcagttctgccttgtgcagtgatggtgttgactatgttgggagggtttcttgcaaggtgttgcagttttgtaacacaacaacaacatgctacaggagatttccatcaacttccctgccacaggcgtttgggtaaaaacaaaatgttaagtcaactaatagccaggaaattccattacactttcacatgcacacagtaaaaagaaacaagttatatattcagagggtgattagaatcaatgaattttatatcccttctaaattcgtaccaaacaatttaattgtaagaaaataaggaatccaaaatatgtacttgactagacttatgatatagtggaataaatgatat

SEQ ID NO: 2363 - DNA, 628 bp, Glycine max
tccgttgttcaatttcgaacgtgtcgatatattatgcgccttgttcggttctccaagttaaaagttatgaccatttgaatttctcgagagcttccgttgttcaattacaagcgtctctatatattatgcgcctgaatcggacctccgagtgaaacgttatgaccatttgaattgctcaagagcttccattgttctatttcgagcgtctcgatatattatgcgcctgaatcggacatgcgagtgaaaagctatgaccatttgaatttctcgagagcttccgttgttcaatatcgagcgtctcgatatattatgcgactgaatctgacatctgaattaaaagttatgaccatttgaaattctcgagagcttccgttgttcaatttcgagcgtctcgatatattatgcgcctgaatcggacctccgagttaaaagttatgaccatttgaatttctcgagagctttcggtgttcaattcgagcgtctctatatattatgcgcctgattcggaacttcgagttaaaagtttgacccttctaatttttcggagcttccgttgttcaattacaaccgtcttatttttatgcgcctgaatcggactctccagtgaaaggttttacctttgaatttt

SEQ ID NO: 2364 - DNA, 605 bp, Glycine max
tgccagaataatgggttggatacagatcattctgggagggttggtcatctttgtaagccttttgagtctcactagattctactcagcaggatttttcctccacaatgaagatatatgccaacacttctacaatctgagggatgtttctgatggttttgatgtcaaatcattctctgatagagttggagaagtgatagacatgttggaagctttgcaggccaagcttgagtcaaaagttcaagaaatggagaaaaacaaaggcaccatgttggacaagaagtttctagaggatcaaatagttagccctcttcatagtgctaatgttgctctaaggcagattcgggttcccaaggttgatgaagggacgaactccacagtgaaggaggatcatttgatcaattttttcatcattgaggaaattagaaagtacataacccccaaggagaatagggttggtaagatcaacctatatggtgcagacaaggtttacaacacaataggccatgcttgtgttttgtacaagaaagagttagagaagtacatggactatgacattggctcctattgggatgatgattggaatttgctcagaagcctatgctaat

SEQ ID NO: 2365 - DNA, 373 bp, Glycine max
tcccagtttctaactcttcctaaaactgtcctaagcaaagttcccatttttttattaacaacttccatttgcccatcgggtcgtgggtgacaagtggctgaaaataacaatttattgcccaacttgctccactaagtcctacaaaataggcttatgaacttaaagtccctatcactaacaatgctccttggcaaactatggagtctcacaatctccctgaaaaacaaatcagccacatgggaagcatcatctatttatctacatggaataaaacgagccattttagaatacctttcagcaccacaaatatggaatctctaccattggttgtgttcggcagccccacaacaaaatccctggttaaatcaaatcc

SEQ ID NO: 2366 - DNA, 592 bp, Glycine max
tatagttattggagggagaataaaacaatccaaaatcaattgtacctttttgtaacgaagaattctttttgcggcttttagatgaggagaggtaggagcctccataaagcgacacacaactcccaccgcatatagaatatcgggccttgtattggttagataccttaaactccccacaagactcttgaagatcatggagtctaccttctctccttcatcaaactttgataacttcaagccaccttccataggtgtgttcacgggattgcaatcaagcatattaaatttcttcaacacttcttttgtgtacctttcttgtgagacaaagataccattctccgtttgcttcacttccattcccaagtaatatgacatgagtcccatatctgtcatatcaaattcacgagacatggactccttgaagtcttcaaacaaatttgggttattgccggtaaagataaggtcatccacataaagacaaataaataagacatcaccattattaaaagttttaacataaagagcataactcatttgacaacgaacaaacccattgtcttggaagtacttgtcaatgcgagtattccatgcc

SEQ ID NO: 2367 - DNA, 677 bp, Glycine max
  unsure at all n locations
tatatcagaaaattaaggccaaaaaggttattgaatgaagaacatgaactatttagacagcaaaacctagactacctaaactgggagcagcaggacaaacaattagtgtctttggcttctaccatcaatggcaccgagtcttcacacaaaaggatggttggaagatacttgaaacctaaccttttagaccaaagccaaaatcaaacaactaaaacagaaactaagtgtctaatagataggagcaatgaatgtatatttttgaaacataatcatagtaacacgaatgggtaagaaaaactaactggttttgaaacaaaattaactataatgacttagtatcgtcttagtctaatttaaatctccaaattcacagtaacacgaatgggtaacaaaacctattgttcagaaaaataatcatattgactagtctcatcttagtcaaatatcaatcatattagttagtctaactatggtttcgaaacatgagaatagagatagaccactgaacaatggattttcatcattaacagagaatagagacataccttcgatggcttccctggcagtcttaaagccaagcccaatggacttccaaaatcgattcccacccttttcgagactttntcctttcctagttctcttcgagctgcaaaagtgaccaaatgttaaaatgagga

SEQ ID NO: 2368 - DNA, 618 bp, Glycine max
tatggcggcaaagggtaagctaccaagcctgaagcatgttggtgttggtgtttgtgaacactgtatccttggaaagtagaaaaaggtcagcttctcaagggcagggaagactcctaaagttgaaaggctagaattggtgcacacaaatgtttgggagccaaccctagtgaaatctattggaaactcacgctattatgtcacctttatcgacgactctaccagaaaggtatgggtttattttcttaaaaataaatctgatgtgttttctgtgtttaaaaggtgaaaaacagaagttgaaaatcagacaggtctaaaagtctaaaatatgacaatggcggggagtatgatagtcaggagtttaaagacttttgttcaaaacatgggatcagaataatcaagacaatacctggaacacctgagcaaaacggtgttgcagaaaagatgaatagaaccttgaacgagaaagtgaggtgtatgcagatccaatttggcttgcctaaagcattctgggcaaaagcaataaacacagccacatatctcatcaatagaggaccatcagttcccttgaaatatcacgtcgcccgaagaagtatggtctgaaaaagaggttaaactttc

SEQ ID NO: 2369 - DNA, 663 bp, Glycine max
tatcgttattggagggagaataaaataatccaaaatcaattgtacccttttttaacgaagaattctttttgcggcttttagatgaggagaggtacgagcctccgtaaagctacacacaactcccaccgcatatagaatatcgggccttgtattgattagataccttaaactccccacaagaatcttgaagatcgtggagtctaccttctctccttcatcaaactttgataacttcaagccaccttccataggtgtgttcacgggattgcaatcaagcatattaaatttcttcaacacttcttttgtgtagcttccttgtgagacaaagataccattctccgtttgcttcacttccattcccaagtaatatgacatgagtcccatatctgtcatatcaaattcatgagatatggactcctcgaagtcttcaaacaaatttgggttatggccggtaaagataaggtcatccacataaagacaaataaataagacatcaccattattaaaagttttaacatacagagcatactcattttgacaacgaacaaacccattgtcttggaagtacttgtcaatgcgagtattccatgccctcggtgcttgctttataccatacaacgcccttgtcaatttcaagacttttccttcttgacccttgatgac

SEQ ID NO: 2370 - DNA, 641 bp, Glycine max
tagccctagaggggatggaccttttcaggttttggagagggtcaataattttgcctataggttggacctcccagatgagtatggaatcaacaccacttttaacatttcttatttaattccttttgcacgtggagctgatattgacgaggaggaactaacagatttgaggtcaaatcctcttcaacgggaagggaatgatgcaatcctccctaggaagggaccagtcactagagccatgagcaagaggctccaacaggattgggttagaactgctgaagaaggccttaggattctcatgaacctcaaggtaaatttcttagcccatgagctaaggttgggtccaattatctttgtacatattagactaggatgtcattatatttggtccttgtatttagggctccataatgtaggtagggtaccctagaagtataagatttttcagcccttgtattttagggtgattttaggcagtcttcttgctaagttaacctgcacattaaaaggatttcaaaaaaatgttcaagtgattgacgttagaaaaggacatttgcttcctaaccatagagcccatgttacaccatagagcacttcttaagtcttaagcataaactaacttgacaacagtaaagggaatttga

SEQ ID NO: 2371 - DNA, 587 bp, Glycine max
tcttatgatgcaaacgagttacccgctacctcatgcactcctctaatgttttattcatcatttctggcgctaaactgctgggagttggaagccatcttctcaattaaatttctggcttcaacaagagtcatgtcttcaagggctccaccactagcatcatctatcatactcctctccatattactgagtccttcataaaaatattggagaagaagttgctcccaaatcggatggtgagggcaactggcccatagttttttaaatctctcccagtattcatataagctccctccactgagttgtataatacctgagatatccttcctgatggccgcggtcctggcaacatgaaaaaaaaaatgctaaaatactctcttatagtcatcccaactcgtgatggaccttggagcaaggtaatacagccactcctttgccactccctctcaaaaatgaggaaaagcccttacaaatatgtgaccctcttggacatctgggggtttcatggtggaaccgacaatattaaattctttcacatgtttgtgcgagccttcacctgcaatgccctgaaactttcggaaccacatgga

SEQ ID NO: 2372 - DNA, 506 bp, Glycine max
ttgacgccatacaaacgacaataacttttttctcggatgtctgattgatttttttaacatatcgagacgctcgaaattgaaagctgaagctctgagccaatacaaacgaccataactttttactcggatgtctgattgagtcccgtaacatatcgagacgctcgaaattgaatgttgaacctgtgagccaattcaaacgacaataacttttttctcggatgtctgattgagtcccgtaacatatcgagacgctcaaaattgaatgttgaacctctgagccaattcaaacgacaataactttttactcggatgtctgattgagtcccgtaacatatcgagacgctcgaaattgaatgttgaacctctgagccaatccaaacgacaatagactttttactcggattgagtgatagcgtcccggaacatatcgagacgcttgaaattgaatgttgaacctgtgggccaattaaaccgacaataactttcttctccgatgtctgattgag

SEQ ID NO: 2373 - DNA, 636 bp, Glycine max
tcttatgatgcaaatgagtttgtagctacctcatgcactcctctaatgactatagcatcatttctggcgctaaactgctgggagttggaagccatctcctcaattaaatttctggcttcagcaagagtcatgtctccaaaggctccaccactagcagcatctatcatactcctctccatattactgagtccttcataaaaatattggagaagaagttgctccgaaatcggatggtgaaggcaactggcacatagttttttaaatctctcccagtattcatataggctccctccactgagttgtataatacctgagatatccttcctgatggccgtggtcctggaagcaagaaaaaaaaattgtaagaatactctcttaaggtcatcccaactcgtgatggaccttggagcaaggtaatacagccagtcctttgccactccctctaaagaatgaggaaaagccttcagaaatatgtgatcctcttggacatctgggggtttcatggtggagcagacaatatgaaattctttcagatgtttgtgcgagtcttcacctgccaggccatgaaactttggaagcaaatggattagtccagttttaagaacatatgggacatcctcatcagggtattggatg

SEQ ID NO: 2374 - DNA, 607 bp, Glycine max
  unsure at all n locations
tgtatgagtactgggaaagattcaagaaattgtgtgcaagttgtcctcactaccagatttctgagcaactccttcttcagtatttctatgagagacttagcaacatggagaggagtatgattgatgctgacagtggtggagctcttggtgatatgacccttgcagaggctaggaatttgattgagaagatggcttccaactcccaacaatttagtgcaagaaatgatgctattgttcttagaggattccatgaggcagccacggattgatcatcatctattgaaaataaaaagcttgaaggaaaacttgatgccttggtcaacttggtaactcaacttgccatgaatcagaaatctacacctgttgcaagagtctatggtctatgttcttctgcaaatcaccatacagatctttgtccttctttgcagcaatctggagtcaatgagcaacctgaaacttatgatgtaaacatttataatagacctcctcagtagcaaaaccaacaacaacaaaataattatgacctttcaagcaatagatacaatccaggttggaggaatcatccaaatctgagatggacaagtcctncacaacaacaatagcatgt

SEQ ID NO: 2375 - DNA, 488 bp, Glycine max
  unsure at all n locations
tgatccaactcaaccatggatagacaaaatatctaccagacaccgcatatactaaaagctctnacccttatcgcgattgaactactttaaggaagtaggggaatgaaagccccccataaccattaactgggaaccaagttcatgatcgcgtcaacgacattgttaccgtgtttgggaagtcccacaagaagacatcatcttccaacaacatgtggaagaaacgctcaatattctttgatctttcatactgggctgatctatatgtgcgtcactgtctacatgttatgcatgcggagaaaaatgtgcgggatagcttaatttgtactcttcttaaccttaaagggaagaaaaacgatgggttgaaatttcttcacgacttgcgtgacatgggaatacgagagcatttgctttccatatcacaaggtccgggaacatatttaccccctacatgccacacacttgtctacatcagagaacaaaaacttttg

SEQ ID NO: 2376 - DNA, 623 bp, Glycine max
tcatccaactcaagcatggaaagaaaaaagtatataccagacaccgaagatttctaaaagcttttcacccttatcgacgattgaaaaaagcttttaatggaagtcaggggaatgaaggccccccagaaccattaactggaaaccaagttcatgatcgcgtaaaggacattgtaaccgtgtttgggaagtcccagaagaagacatcatctcccaacaacatgtggaagaaacgctcaatattctttgatcttccatactggtctgatctatatgtgcgtcactgtctaaatgttatgcatgtggagaaaaatgtgtgtgatagtttaatttgtactcttcttaacattaaagggaagaaaaaggatggtttgaaatttcgtcaagacttggttgacatgggaatacgagagcagttgcatcccatatcacaaggtcggcgaacatatttacccccagcatgccacacactgtcaacagcagagaagaaaagtttttgtcaatgtctgcggaatgtctaagttccacaaggatactgttcaaatatcaagagcctttgtgccctcaatgatcttaagttggttggcttgaagtctcatgattgccatgtctttatgcgacaatta

SEQ ID NO: 2377 - DNA, 536 bp, Glycine max
tgactgcgtggagatacgaaccatgtgcctctccaagatacgagcagtcatatttacctcataacctaacacagctcatactttgctgtacccttatttacgtgactatatatatggaggaacgatggtttcttgatttaaacatacacactttgataaattctcaccttcggactttgactccagaggatgtcaagataatttatcgggaacaccgtgcaccatatatcttcaacatttgaccgtcaattcgattcatacttggtcacctgcagcctatttattgcatatggtaccttctatgatgcccacataaatacgtgtatcagaaaccatacgtattattctaaaatatatatgatgcacatcagtgaaacctccaagagtaactgtattggatacgtatccactacggatgtgtgaaacaaattggactattggcgtgcttcatataccttaccgggagttgctgcactaacactcttatgtatccaggtggagatcgatggagtccctatgatactgttgtcaagaaa

SEQ ID NO: 2378 - DNA, 419 bp, Glycine max
ccagaaaccatgggagttggctgagatttagaggacctacgtccttcaaagaagacttgttaagatgagcaataagagaggtgatttcaaaagaagaagagttggtgaagattatatcatcaacatacaccaacacataggttttagaggtaggtgtaaatcacatgaaaagagaagtatcactcttggctgaattaaatcccaaggacctcaaagtcaaactgagtttgtgaaaccaagacctggaggcctgtttcaagccataaagagctttgagcagtttgcatactttgtgtttgtcggatgaaacaaagcttggtggttgagtcatatatacagtttcttgaaggtctccatgcaaaaaggcattgttgatatccacttgatgaataggccattgttgagaaaccacaaaggac

SEQ ID NO: 2379 - DNA, 364 bp, Glycine max
gatgaagacgacagggaccaccgagggggttccaatgagccgcatgagggcgcgttttaggtccttgcctcttggatcctcgtccagctcgtgcacggttgggttcacacccatgccgcagaagagcctcttgatggcgtggcacatgcagcacgtgctcacgctgaatatcaccaccgcgctctccgacgccagcctctctatgcgctccagcgggtcccccactaccgccgccgccgcgttccgaggggccgccacgtagctcccccaccacgccgccgccgctgcttggtaatgcattctcagaagaattttatgtgatgaaagaatgacacgcacaatgtatgaaaatgagagtgagaat

SEQ ID NO: 2380 - DNA, 408 bp, Glycine max
  unsure at all n locations
agctntgagcaaattcaaacgacaataactntttatctcggatgtgtgattgagtcccgtcatatatcgagacgctcgaaattgaatgctgaacctatgagccaattcaaacgacaataactttttactcggatgtctgattgagtcccgcaatatatcgagacgctcgaaattgaatgttcgacctgtgagccaattcaagcgacaataacttgttactcggatgtcggattgagtcctgtaatatatcgagacgctcgaaattgagtgtttagactgtgagctatttcatacgacaataactgtctactcggatgtctgatagagtcccgtaatatatagagacgctggaaattgaatgttgaaactctgagccaattcatacgacaataactttttactcggatg

SEQ ID NO: 2381 - DNA, 337 bp, Glycine max
ccacaaaccatgggagtcggctgagatttacaggacctatgtccttcacttaaaacttgttaagatgagcaataagagaggtgatctcacaaacaccaagagttggtgaacattatatcatcaacatacaccaacacataggttttacaggtacgtgtaaatcacatgaaaagagaagtatcactcttggctgaattaaatcccaaggaccttaaagtcaaactgagtttgtgaaaccaagacctgcaggcctgtttcaagccataaagagctttgagcacgttgcatactttgtgtctgtccgatgaaacacagcttggtggttgagtcatatata

SEQ ID NO: 2382 - DNA, 324 bp, Glycine max
  unsure at all n locations
agcttgtaatcgattacacatataatgtaatctattgccagagcagattttcagaaaatattctcaacagtcacatctttttatgtggttcttgaatggctatcaaaggcctatatatatgtgacttgagacacgaatttgctaagagtttttcagaacaaaaaagtcttatcctcttataaagaaaaattgttttatcctcttacaaattccttggccaaattacttgtgattcaataaggaatttttgagtgctcaaatngttcaatntatctctttcaagagagatttcttcttttcttcttcttcattctgaaaagggat

SEQ ID NO: 2383 - DNA, 399 bp, Glycine max
  unsure at all n locations
tctccatctctacaganacaaacgtaacttcatcattcaactctgccattctgagctgatttagagtccttttggcatagacagtgaatgcaatagaggtaactattgccataatgaaagaaataatgttgtatacgatatccacaggagtcaagcggtgcttcccatactgtgcgtctgccaatgtctctattaaccgaccactgagagatggagaaaaagataaatctcaagatgagatgttagtttatttaacagaagtaaaaagataacacgttctaagctgatccacatctatatgactatatccatcagaagtcatatatgcttctcaacttctcaattctcattttcatacatgtggagctaacaaaaactcgggtacggtagggaactcat

SEQ ID NO: 2384 - DNA, 469 bp, Glycine max
  unsure at all n locations
agctnggttcgaatgactttntaatgaaaaattgttatcaaccgaactaatattttatggtttggtttggttcgatttttgtaatttttacaaaatattatttcactaaaatttataattttttttaatattttgaatcaaattacattaaaaaaattgttaataacaatctatgaaacttattaatatgttaaacattctaaaataaaaattttcaaaaatctcatctatttctaacatatcttaaaaaaatcatatgaaaaaaagtaatatgcattatataagtcttatatacatgacaataaaaaacattgtgaaactcaagtgatacatgcataaaatacataacactaaagtaatataagtattagtacaagtattatggtttgatttgcgttcaaaaacatataccgcaaatcgaactgaaccaatcattttgagaaaaacattcaaacaattcaaaaaaagt

SEQ ID NO: 2385 - DNA, 465 bp, Glycine max
  unsure at all n locations
agcttggtctctntntcatttctagtttagttatgaaacatgttcaagtttgtctctgttaagaggattataaaattcccacctatatatgatgtacatattataaaatgcagtgtttactaaaagatgcataacaactacacaatccctgtcactggcctaataataaaattttgaggggatgtctctttgattaatctggcataaattaaaaaaaattgaaagaaaagtataatacatttacagtgtaaatgttttggaagtatcataagcattttgattttagagatcgagaaataaaaaagatatatcagttataaaaatgtgtgtaaaagtaatatagtttactaatttgtcctgtacttttttgttctatgttttaaatagtgattctgtaaaacacaacataacactttttaaagaaagactaaaacaggacagagacatgtatgtctgatgtctata

SEQ ID NO: 2386 - DNA, 461 bp, Glycine max
gtaacaatctcaaaacttctcaacattgtcttaatgaccctcacattttgcattgatgcttcaccaaagaatatggtatgatctgcatatcacaggatactaatttccactgagcttcttcccaccaagaggcctttaaactgattttttttagagcttctctcattagacccgttaatccctcagccacaatattgaacaggagtggggctaacagatccccttatctaagtcctctttgagggaaaaattctgctaaaggactcttattgatcaatatggagacaaaagctgatctaaaacatcctgtgacccaagttatccactttagggtagaatcccatcctcctacgcatatataccagaatatcctcactaactgaatcatgtgccttctcatagtcgactttgaacaccaagcagctcatatcacctctcttcacttcctccacttcattggc

SEQ ID NO: 2387 - DNA, 385 bp, Glycine max
  unsure at all n locations
gcttgccgccatggagtnttccgactatgctcttgtgtggtggaacaagctacaaaaagagagagcgagaaatgaagagccaatggttgatacatggacggagatgaaaaagatcatgaggaagcgatatgtgccagctagttactcaagggacttgaaattcaagctccaaaaactaacccaaggcaacaagggggttgaggagtatttcaaggaaatggatgtgctcatgattcaagcaaagattgaagaagatgaggaggtaactatggctcgatttcttaatggtttgactaatgatatccgtgatattgttgagctgcangagtttgttgaaatggatgaatttcttcacaaagcaatccaagtagagcaacaattaaaa

SEQ ID NO: 2388 - DNA, 392 bp, Glycine max
  unsure at all n locations
tgaatgtgttactntgacactctctgatgaggaatacaccatagtccatagctctagaagcgccacacaaatgtggaacaccttagccataacatacaaagggtgctcacaggtaaaaaggaacaatattaaactaagactcctaacacataagtatgagatgtttagaatggaggaaggcgcagacatacaatgtatggttgaatgcttccaaaccattttaaacgagcttacagcatagtgtagaactcttgacaattatgataatattgataaaatactaagaagtttatcaagaaagtggagatcgtacgttacaactttaatagctataaagaatcttgatactctgtctctagaagaatgtagtggaaccttaaaggtcatgaaca

SEQ ID NO: 2389 - DNA, 354 bp, Glycine max
tgtgcctcttcaggtctggaatgtgaatgtagcatatagatctaaatacccttatgcgctttgctgatggcttctttccgttgcaagcttcaattggagtcttgtcgtttacagacttagttggacatctgttgagcatgtcaacagcatcagagactgctatagtctagaatgcgttacgtagattcgttctcttgagcagtcatctagccatctccataactatgccattctttatatcggacactccatattgttgacgagaatatgccactcgaagatggcgctcaatgccttaatcctcacaaaatgtgtcaaactcgcgagaggtgtactctttgtccaatcacttct

SEQ ID NO: 2390 - DNA, 315 bp, Glycine max
cttgcactattatatttattttggtaacagtatatattttgcctgaggtctggttattacgatgaagcaagaaatgttgcccaatcttcacgtgcttcacatcaatttgctcctttggtacatactgtggtcactacttatttactaatttatgatttaatctttcttaataatttacttatttctgacagctgacagagtggattaataaaggagggatggtaccagaagagattgcagctgctgcatctgatgaatgtgaaagaatgttgagaactggtgaccgggtaggtcgaactgcatatgacaagaaaa

SEQ ID NO: 2391 - DNA, 361 bp, Glycine max
  unsure at all n locations
tgcttctaaactttatacaagaatgaagctctgataccacttgttagacaagtggcctcagatatcttaagaaggggggcattgaattaagatatcacaatcttttctaaattaaaaattctattttgattttaacccacatcccaagatttctttcaaaaatgaactcctaaataattatgcaaattaatcttactgaatagaaacaataagcaatatacaatatacaataaaagagtttaagggaagaaagattgcanactcagaattatactggtttggcacacccttgtgcctacgtncagtccccaagcaacccgcttgagagttccactatcttgcaaaagtccttacaagttct

SEQ ID NO: 2392 - DNA, 472 bp, Glycine max
  unsure at all n locations
cgctgcatgcaagcttctacanaaatccttattaaagaaagacttcttgaaagggaggaccattatttactgtgaacaatttgctcaattgacaacaaggttagatcaaatttgttactaacaatctttatattatgtcattttcaatcaatcaattatattttttaattttctttaacacaggtccatcgtctacaaatttattctattgggtggggttctataacacataaactcaactttagaaaatgataaaaagagaatgattatctcaaatgatacaaaggtaatatagtgagattattttaaaatatttatgtactctaatttaataaatgcatatatttaattttaaattttctatcactttcatacaaaataatttttcaaagacaagacactatgaatgatgtgtataaaaaaaactaagaagactcattccaggttaataattattcaaatttatatcatt

SEQ ID NO: 2393 - DNA, 386 bp, Glycine max
ctcagctataatatatcgaatatgaacaacggaagctctcgtgagatttatatggtcataacttttcacactgacgtccgatacaggtttataatgtatcgatacactcgaaattaaacatcggaaactctctagaaattcaaatggtcataacttttcacacggatgtccgattcgggcgcataatatgtcgagaggctcgaaattgaacaacggaagctctagagaaattcaaatggtcataacttttcacacggatgtccgattcgggcgaatcacatttcgagacgctcagaattgaacaacggacgctctagagaaattcaaacggtcgtaacttttcacacggatgggcgattcaggctcatcatatatcgatacgctcg

SEQ ID NO: 2394 - DNA, 425 bp, Glycine max
  unsure at all n locations
ttgaatttctcaagagcttccgttgttcaatttcgagcttgtcgtcatattatgcgcccgaatcggacatccgtgtgaaaagctatgaccatttgaatttctagagagtttccgatgtttaatttcgagtgtatcgatatattataaacctgaatcggacctcagtggtaaatgttatgaccatttgtatttctcaagaccttccgttgttcaattctgagcgtctcaatatgtgatttgctcgaatcggacatccgtgtgaaaagcaatgaccatttgaatttctcaagagctctccgtgttcaatttcgaccctctcgacatattatgcgcccgaatcggacatccgcgtgaaaaggtatggccatttgaatntctcgagagcttctgatgtttaatttcgagcgcattgatatattataagc

SEQ ID NO: 2395 - DNA, 315 bp, Glycine max
tctgaataggacctccgtgagaaaggttatgaccatttgaatttctcgagagctttcgttgttcaatttcgtgcagctcgatatgtgatacaccagaatcggacatccgagtgaaaagttatgaccatatgaatttcttcatagcttccgttgttcaatttcgtgcatgtcgatatgtgaagcacctgaatcggacatccgagttaaaacttatgaccatattaatttcccgagagcctccgttgttcaatttcgagcgtctcgatatattaagcgcctgaatagcacctccgtgtgaaaagttatgaccatttg

SEQ ID NO: 2396 - DNA, 406 bp, Glycine max
agctctgctttaggggcaatgatacgaccactgataagcaatggaagcatgagaaaacatgtgggcgtgccctaggcctaagatttgacaaagagagtggagatctatacatagcagacgcatactatggacttgttgtggttggacctaatgggggactcgctacatcgttggcaacccatgttgaaagaaagcccattctcttcgcaaatgagcttgacattcataagaacggatccatcttcttcacagacaccagcaaaagatacaacagagtgtaagcctttattactcatatactatacatcatttgagtatattcatgcactcattattgctttcaatggattattattgtttacaacgtacttattacttgtttgcagcgcgcattctattatattat

SEQ ID NO: 2397 - DNA, 387 bp, Glycine max
  unsure at all n locations
cataccatctactatgccaacaaagttataaatgatgcacagatgaattatgctaccacagaaaaagaaatgttggcaattgtctatgcacttgaaaagtttaaatcttatttggtaggctcaagagttatcatctacactgatcatgcagctattaaatacttgctcaacaaggctaattccaaaccaagattgataagatggatttttttgttgcaagaatttgatttggtgattcgcgataaaaagggatcaaagaatgttgtagctgatcatctgtcaagattagtgaatgaggaagttacagcaaaagaagtcgaagtgagagatcaattccctgatgaatcanctattttaataagtgaaagaccctggtttgctgatata

SEQ ID NO: 2398 - DNA, 478 bp, Glycine max
  unsure at all n locations
ttaagtcacctgcggcatgcaagctntaagagcaattcctttctttntcttatcattctcctcatgttgattcaatctcatcaattccatttcatgttcgtgtaactttccaaacaaagcagcaagagacatgttagatagatctcgtgattcagtaatggctgttaccttgggttgccattctctgcttaagcatctcaaaactttattgataagatcttcatttggaaatgtttttcctaaagatgcaagatgattaattatgtgtgtaaacctcttttgcatgtcttgtatggtttcatttggattcattctaaataattcatattcatgagtcaaaatatttatcctagatcttttcacatttgttgttccttcatgggttacctgtaaggtatcccatatatncttttgcattttacaatttgatacactaaagtattcattcatcgctaaagcagatgtaattatatttttg

SEQ ID NO: 2399 - DNA, 438 bp, Glycine max
cttaagtcacctgcggcatgcaagcttggttcccaacgctttgttcagactctcctaaaatctagaggtgaatctaggatctctatcagacactatgctagatggcacactatgtaatctgacaatctcactaatatacagggaggtcaacttctccaaggaaaatctgatcttaatgggaatatccttagggaacacttcaggaaactctctgacaatagggaggtcacccatggaaacctttgtctctacttctaggttagacatgatcatgtagacttaagcatcttcttttaaagatgtcacaacttggttggcaaagataaacatcctatccttactcactccagaatcatcaaacactgcatttttattaaaacaatttaacaagacatggttggaagataactagtccattcccagaataacatcaatttg

SEQ ID NO: 2400 - DNA, 391 bp, Glycine max
  unsure at all n locations
tgtgttttcccttgtagaactactaactgcagtaacagattctcctgaaatctgttgagtcccacatcgagtagaagtggaaaggttgagcaccatataagtgaggagaagacccataaatctgagccttaaggttttgggttagagtgtgatgtcagatctccttatgtggtggctcgtggtccacaggtgtacccctcgaatctccccaacaattggtatctgagctgatggttcaagttggtgaccggctcagacgagtatgcaagtactgcaggtggccaaaatggctagcggcacagcgtgccccgcaggtggagcggngtggccagaatggctagcgggcacggcaagtaccgcaggtggccatggctatacttgtggatgataa

SEQ ID NO: 2401 - DNA, 256 bp, Glycine max
  unsure at all n locations
agctngatgctgcaaacttatctgtatccaagattggagagcacatgtcaggaggttctagtggcggctcctcagctggtggttctcacggaggcgaccaggctcccgaggcagaatacgatgaggagaagaagtaaggcgaggaggggtttgtatccacttctactgagttattttggctagagttagagatgaatcatcttttttcattcagcatatgatataaggtattttgtactacaaggctggagttcat

SEQ ID NO: 2402 - DNA, 450 bp, Glycine max
  unsure at all n locations
agcttccatcacanaatagctactaaggtcttgttgtcgagattnttctggccaacactttttaaagatgcccatcaccatgtcttaaagtgtgatcaatgtcaaagaatggtggatttcccgaaggaatgagacgcctcttcaaaaaattatggaggttgaagtttttgattgttgggttattgacttcatgggtcctttcccctcatctgctagtaataagtacatcgtggtagctgtagattactgtgaatgtatgtatacatgattctgatgatgtcaaaagaagaatcaaataaggctcatttgcttcaagattaatacaagattgtntcaacaaataaagccttgattcaagatgtcttcaagatcaagtcttgcctcacaatgaaaggtttcaagtcatccaaggcatatgtaatcgattaccaatacatgttgtcataccct

SEQ ID NO: 2403 - DNA, 424 bp, Glycine max
tttgtagataatgttaatgcttcacctgtaccgttgaatgtgttgtcagtgccatggttgttcttaatgtggggcatagatgtgattggggctatcgagcccatggcttcaaatgggcattgtttcatcctagtccccattgattacttcaccaaatgggtggaagctgcctcatatgctaatgtgattacgaatgtggtggttagattcatcaacaaggagataatttgtagatatgggttgcctagaaaaataatcaccgataatactactaacttgaaaaacaaaatgatgaaggagatgtgtggggatttcaagatccaacaccataattcgacaccttatcgacccaagatgaatggtgaagttgaggctgccaataaaaatatcaagaagctcattcacaatatgaggatgtcataca

SEQ ID NO: 2404 - DNA, 393 bp, Glycine max
agcttaccttcaattattgtgattcatggtatattgtctaattacacttcttacttattcatacaatactatgtttcagatttatccatacacttgttattatggataaaaataaatgaaatacttttacactcaatcttattactataaaaatctctattgaatctcactattacatttgattaccacattattataattaaaggatatataagggaggaaatactttataatgatcagaggagggaataaggtgaaaggaaagaagatatagggtcataatgtcatgcacaaccagtgtatctctttataccatgtataataatacatcagtctctttataccatgtacaactagtacatcaactatcttatacatttgctcaggccttta

SEQ ID NO: 2405 - DNA, 428 bp, Glycine max
  unsure at all n locations
gtgatggtgtcgagaagaaatcacatgtttgtcatcatcaaaaagggggagaatgtgaatgtatgtatacatgattntgatgatgtcaaaaaagaatctaacaaggctgcttcaaatgataagcatttgcttcaagaataattcaagattgcttcaacaaacaaagccttgtttcaagattcactaaagaccaagccttgccttaaaacaaagtgatttcaagacatgcaaggctctggtaatcgattaccaggaagtgtaatcgattaccacaagacggcgttgagaaatagctgttgaaaaaggttttgaatttgaattttcaacatgtaatcgattaccatatgtctgtaatcgattaccagcaacgaaactttggaaactcanattcaaaagtcataaccctctcaaatataactgtgtaatcg

SEQ ID NO: 2406 - DNA, 258 bp, Glycine max
  unsure at all n locations
ntntagcaattcagatggtcataacgtttcactcggatgtctgattcaagcgcataatatatcgagacgctcgagattgaataatggaagctattgagcaatcccaatggatataacttttaactctgaagatcgatagatgcacatgatatattgagacgctcggaaatgaacaacggatgctctcgagacactcgaatggtcataacttttaactcggacgcctgcttgagacgcattatatatcgtgacgctcta

SEQ ID NO: 2407 - DNA, 334 bp, Glycine max
  unsure at all n locations
agctttcagaaaatgtctatgccgagtgtataccattnttcttccatgtttcagttgtacgtagcttgtgttttcttcatagatagggcaatcacgatgtcctttaacactatatccactcaaattcccatatgctcgaaagtcattaatggtacaaaatagcattgcacgcaacttgaatgtctcatttcgatacccatcaaatacaacaaccctctcgtcccacaactttgtcaagtcttcaatcaagggactgagataaacatcaatgtcatttcctggttgtcttaggcttgatatcatcatagaacacataatgtattttctctacatg

SEQ ID NO: 2408 - DNA, 108 bp, Glycine max
attcttatgattgcctatgcgtggaccctcaagtgcaatcctccattcttccctctattccgagccccatgaatgtcattgcctactgctggtcatgtgtcctccacc

SEQ ID NO: 2409 - DNA, 259 bp, Glycine max
tcgacactatgatacattgtgcctcctcattgttgaatggagtagcttcaaaactgataatagacaagaaagatctcatacattgtgctctatcacaactatgccagttgaacaacctcttgatggcgtggcacatgcagcacgtgctcacgctcaatatcaccaccgcgctgtccgacgccagcctctctatgcgctccagcgggtcccccactaccgccgccgccgcgttcccaggggccgtcacgtatcttcccat

SEQ ID NO: 2410 - DNA, 304 bp, Glycine max
  unsure at all n locations
tcatactatttcaagaaactgaatncttggtctccatgttatcaaaaacaactctagcatctcttaacatccctgactttgaaagcatactaattagagaaggtgccacaagtctttctggctcaaaaccgagccttacaacccaagcatggatttgcattcctataaccaccggacccttgatggccaaagctgcaattacagtagaaacagtataatagtcacgtctgtatcccctaacttggatcagacagaacaattcccacacctgatcattaaatctattccatgaataacccgtgag

SEQ ID NO: 2411 - DNA, 463 bp, Glycine max
  unsure at all n locations
agcttcttcttcagactntgtgaacagtgtcttgttatttatcgaanaatcatccattgcatcaatgcttgaagaacctgctatgtgttggggaatattggggggtttcttccaaaggtgatttcatagggggaaagtctggtgcttgaatgaattgatatgttataggaccattcggtctatatcaaaaacttaccccaggacaacgggcgatggtgaacggaggctcgtaagtactgttcgacaactcgatttagcattttcgtctgtggatgataggcagagctcatacaaaagtttgtgtcgctgagttggaacaattcttgccaaaagtggctgatgaacaatgggtctcgatagtagaccaagctatgaggcattccatgaattttcccaacaatgtccatgaaaaggattgcaatagtgtgagtcgtgaagtgtgacttgagcttggccaggtgga

SEQ ID NO: 2412 - DNA, 278 bp, Glycine max
agcttaactctattcgcattcttatctctcttgctgctacacatcattaacctttatttcgataggatgtacagaatgctatcttgcatggtgacttacatgaagaggtgtatatagagcaatcacctgtgtttgttgcttaaggggtgtttggcaaggtgtgccgcttaagggagttgttaaatggcttgatgcaatcacctagatcttggtttgggagatttagtggtgtggtccttgcatttggactgaagctgagtcaaagtgatcatactgta

SEQ ID NO: 2413 - DNA, 400 bp, Glycine max
tcatcaaactacttggttcccgagggaaattctataaacagaccttctatctttaatggagtgggttaccactactggaaaacccgcatgccaatctttatagaggccatagatttaaatatttaagaagccctagaacaaggaccttatgttccctctataatagctgcaagtgcaacaatagaaaaacctagagcagattggactgacgaagaaagaagattagtaccatataatttaaaggccaaaaatattattacatctgccttatgaatagatgaatactttacggtttcaaatcggtaaagtgctaacgatatgtgggatacactacaagtaacacatgaaggcacaacatatgttaaaagatctagaataaacactttaactcgtgaatatg

SEQ ID NO: 2414 - DNA, 386 bp, Glycine max
  unsure at all n locations
agcttataaggtttgttgccagcagcattgaatgattcaatgaactccacattgtccttgaatatctggaaacgttnttccttctctgcagcatccttatatatttttccatattctgccatccaattttcatgtctttctcgcaaggctgtttgatgcagcttgcggngcatcacttgggaaatcccaactgcaaggaaaaggaatagggctaacatgtgttgctnttggccagtgaaagccatttcttaattatcagcaatgatcagttttgtaagaaaaggcttagttggtatatttgtgtaaagagagaaatgtgaattggtatgcattgaaatgaatgaatctggagggttatatagagatcatagtaccttatgctatgg

SEQ ID NO: 2415 - DNA, 312 bp, Glycine max
  unsure at all n locations
acacatattttatccatagcaacataaaaaatctctgcacggtaatgatgaagaataatgatagtccttccttctgctcttgaacgancccgaactggtatttcgtcatccatatttggtactagaatacttttagcaacacaaanatcttggacatccgcaaaaaaattattccagccactctctctcattgtgcccaaccgagctttgacaacatcaactaattncatggcattcacaatattaagaatctttctttgcaatatattttgaaagctcgttgtgataccaaacaactttaacattaacctc

SEQ ID NO: 2416 - DNA, 426 bp, Glycine max
  unsure at all n locations
cttgcgtaagaaccagnttatncaatggaacgatgactgtcatttgtattcggaangatcaaatgatgccttatgaatcctcctgtgcttacgccactagtgcctggaaggcccattatcctatacatgaatatgttggatgaatcaatggggtgtatgctggggcaacatgacgagtctggaaagaaggaacatgccatctattacctaagccagaagctcacatcatgtgaaatgaactactctttgcttgaaacgacatgttgtgccttggtatgggcagcccaccgtctaaggcagtacatgttgagctacaccactcttgtggtgtccaaaatggacccagtcaagtacatatttgagaagcccgctctttacatacggatcgctcggtgtaggttctgctatataatttgacatcgttat

SEQ ID NO: 2417 - DNA, 402 bp, Glycine max
  unsure at all n locations
ctgcaagcttgcttctacactaaagggtttccttttacatttaaatataaagactatcccataaaggtgtctattttatatatcactaatgtccataaattagggatgttacactgcggacaaaaaagtatattaataagaaaaaatgattgataaatagttatatgaaatggtaaaaaaattactatgaatatattcacattaaagtatcaaattccttgaaaggaaaattcaagttatataaatgatttcttttaatattatagttaaaactcccgtgcattgcacgggttttaattaagttcttgaacattttttaaaaaaaattttccctgaacataaaaattaattcataatttcttaaaaatatataacaaaatnttaagcaaaccacaaattaac

SEQ ID NO: 2418 - DNA, 405 bp, Glycine max
  unsure at all n locations
agctttgaccacaaccccgatcttatctctacctatttttactcaaccatttattgttgaaacagatgccttaggccaaggaattggtgttgttttgtctcagaatggccatccaattgcttttttctttaagaagctttcttctcgtatgcagaagcaatcagcttatgttcgtgagttgtatgcaattactgaagcagtggctaagttttgtcattacctttttggtcattattccattatctggacagaccaacgtagtctcaagcacattacggaccanatcattcaaacaccagagcaagagtccttgttacctaagcttcttgacttcaacttctcgattgagtataaacctggacccactaatncaagtgctgatgctntatcatggtctttctatat

SEQ ID NO: 2419 - DNA, 411 bp, Glycine max
  unsure at all n locations
agctnttgcctcanaacanagtgtttccaagagatcaagactttggtaattgtttaccagacagtgtaatcgattaccagaagacaattttgaaaaacagcttttaacaagggttttaaatttgaattttgaatcatgtaatcgattaccagatgtttgtaatcgattactagcaatgacacttcataaaatactttgaaaagtcatgacccttcaaaatataactgtgtaattgattaccagaaacctataatcgattaccagtgaaaaatttcagaaaaaagtttttgaaaagatacatctcttcaaatcattttgaaaagacacaatgggcctatatatanggtgtgttgactntataaagtaaagagagaattctagagaacttaattgtcaattctccaacaactc

SEQ ID NO: 2420 - DNA, 355 bp, Glycine max
agcttgagggtaaactttatcccttagtcaacctattaactcaacttgccatgaatcagaaatctacacctgttgcaagagtctgtggtctatgttcttctgcagatcaccatacagatctctgtccttctttgcagcaatctagagtcaatgagaaacctgaagcttatgctgcaaacatttataatagacctcctcagtagcaaaaccaacaacagtagaataattatgaccttccaagcaacagatacaatccaggttggaggaatcatccaaatctgagatggacaagtcctccacaacaacatcagtctgtccttttctttcagaatgttgctggtccaagcaagcctta

SEQ ID NO: 2421 - DNA, 391 bp, Glycine max
  unsure at all n locations
agtcacctgcggcatgcaagctttggtccaattcatacgaccataagttntgtcatggttgtacgatttaggcccatggtatatggagacactcgaaattgaaaaatgaaaggtctcaacatattcaaatggtcataacttttcactcaaatgtcagatgcaggtatataatatatagagatgctcgaaattgaacacggaagctctgctccaattcaaactgatatgaaccctcatggaacaagggctgacttaggatcgtctaggattaaaccttgatggaaaatgcggaaattgattaacgtaaggatggaacataaggtggttaatttcgtgggtcttaatcacgtggctcttggcataaaatggatgaatgggatgggtaaatgta

SEQ ID NO: 2422 - DNA, 208 bp, Glycine max
ttcttcacagatggggcatgctagatgacccttaacactgtaaccgctgagattctgatatgctggaaagtcattaatggtacaaaatatcagtgcacacatttgaaaagtctgcttgtgaaacccatcaaatactattaccccctcatcccacaactttctcacgtctgtcctcaacggacttagataaacatctatgtcatatgct

SEQ ID NO: 2423 - DNA, 407 bp, Glycine max
tcgtctgcgatgggtgtagttttatgatgtggtggcttgcggttgttgcggcggacagttttgatgatgagggtgaagaagctgacgaggaaggcatagacaacgagagtgcccagtgtctagatgaagacctagcgactaacaatgatgcagcccagatatatgtaccttttcttcttctttttatggtctcctttgcccaagagccacctatgttgggtctcaccaaagcaccttggtccagctcatggagattcggtggcggagtctatggtgtgaatctcaagcaggcctccccacagatccctactgtgcatactatattttcgatcccttatgataaacaccagactcacatactgctagtaagtactacctagtaactcgtatttctctcgttctaaact

SEQ ID NO: 2424 - DNA, 372 bp, Glycine max
  unsure at all n locations
ctcagcttgatcggaatttgcaccagaattcgtagctcgctctgttgatctttcacctttagtctacgtctacgactcagcgcgtcaaatagttncagagcgaactccttagagtccttcatcccttcaaaaaattaaacaaagcatacaaaactcttcaaacaaggagtgaaaatgacaaaccgattaaatgcacatgccaaacgcaagaatctgaactgaaatttgaaaaggaatcgtacctatgcattgcgcaaaatcagtgcgataaagataacccgtcttggcaagactatagaaatggctttgcacctcgttccaggcgtcagcgccattggatntactgctaataaatttcagtccacggagcgc

SEQ ID NO: 2425 - DNA, 329 bp, Glycine max
  unsure at all n locations
agctggcattcgatcatcggagccatagagagcatgatagcgctgaatacaacggtcctgcattntgctcagagctttggccaaagggtagcttatggcgaaaccgcccccaccataggccatgccgtaggagaagaatatgttctgcaagtgactctccgacaagctcccaatgtagtacatgtagttgtggtcgtacttgtttaaaatcctcagcagattgtccgtcacgaaaacggtgtcgtcgtcgcccatcacgaaccaccgcacgttcttgtgccccatacgcagcgtttccgtcacgatgcgcgatattcgaatcgcggagc

SEQ ID NO: 2426 - DNA, 448 bp, Glycine max
  unsure at all n locations
tcacgatctcacacgtcgaactacatgtatncttcattggaagatcttagaggggacatgcttaataaataactctgacactcaaataagtacatgaatgagttgagtatgaaattgaaaagggtgaaataagatctgatctttataacgtgagataggagtttcgagtccttgattgtaagagagttattacagtgatgtaacaactctagataattcctaacttggtaataatatatagtagaaaaatcatagcttggtaataatagttaatagataattcatcacttatagattatccaatggattatagataatccatttattatagataattcattactagtagataagtaagtacctgtaactttgataagaaataataacattatcactaagattcaaatatatagatatttgtaacaacatgttggccctatagctcgac

SEQ ID NO: 2427 - DNA, 341 bp, Glycine max
  unsure at all n locations
gtacgattgttgcccatggtatatggagacgctccgaaatgaaaaatgaaagttctcaagaaattcaaatggtcataacttttcactcaaatgtcagattcaggtatataatatatagagatgctcgaaattgaacacggaagctctgctccaattcaaactgatatgaaccctcatggaacaagggctgacttangatcgtctangattaaaccttgatggaaaatgcggaaattgattaacgtaaggatggaaaataaggtggttaatttcgtgggtcttaatcacgtggttcttggcataaaatggatgaatgggatggtaaaatgtacgttaagtgg

SEQ ID NO: 2428 - DNA, 442 bp, Glycine max
  unsure at all n locations
agctttaattaatcgcgtacagaattccaggcatttctgtcgttcaatgtctcttgttcccaatcccaaacacctcagaagtttattagcaaaagccagtctagcaaatgacatgtacatgacataacctttcaatttcgtgttcgtgtattatatatgcaaactgtgatggcatgtattcaattcaccctataaaaaacattccagtttctattcatgaaaatgaattatcatttctatacatatttttaatttaatttaatcaaaatacatggacatttacatcattttttaatcctataggaagagcattatatgttatgcatgaccaaactatcgatatatgtattggaatgattttaaaagatacaattgagataattntaattagtttataatctaaaattctttgcaccaataatatatcaaaattattattttt

SEQ ID NO: 2429 - DNA, 253 bp, Glycine max
ctggttcaaccttcttaacaggtactttatagctgcatggtctgtatgaacaataacacgagtaccaagtgaatatgaacgaaatttctcacgagcacaaactatcgctaatcgctcattctctgtgggcgtgtaatttacttgaacaacatccaaagttctggaagtgtgatagatcactcgaggtagcttatcaatctttctgagcaaggacagcccctaatgcgtaattggatgcatcgcacattatctc

SEQ ID NO: 2430 - DNA, 246 bp, Glycine max
tatacacacacacacacacacatatatatatatatatatatatatatatataatttgatcttaattaattattaccggtgggaagattaatgacataaaaataagaagtgtcatgatcatgtattcatgtggtacaagttttgatggaatagaactacatggagcaaatgggtacttgctggatcagttcctaaaggacaaagtgaacgacgaagatgatgagtacggaggtactatataaaatcg

SEQ ID NO: 2431 - DNA, 401 bp, Glycine max
gcttggaaaaaatcctcacacagagagtcattattagcatcgaatatgatatcgtccacgtatatctggatgattaagaattgactaccataatctttgtgaaacagagtagtatctacctttcctcttataaagccattttcaattaaaaatgaacttagcttttcatacaaagctcaaggagctatttttaaaatatacaaagccttgttaaatttgaaaacatgataagggtatatagaactctcaaaccccagggggctgttcacatcaacttcttccttgataagtccattgaggaacacactttttatgttcatttgatacaacatcataccgtgataagcaacacagttaaattggtttgtccagcttgtttctaaacactcactgagttctac

SEQ ID NO: 2432 - DNA, 371 bp, Glycine max
  unsure at all n locations
agctntacagcagatgcccctttactccatgttcttgaaggatatgttaacaaggaaacataagtatattcaccaggaaaaaattgtagtggaaggaaattgtagtgttgtgattcaaaagatccttccacccaagcataaagaccttgggagtgtaactattccttgttcaattagagaagtcactgtgggaaaagctctgattgactcgggagccaacattaatttaatgtcattctccatgtgcagaagggtgggagagatggagaccatgcccactaagatgactttacaactggttgaccgctccattaccagaccatatggagtaattaaagatgtgctggtcagagtgaaacattntatcttcc

SEQ ID NO: 2433 - DNA, 376 bp, Glycine max
  unsure at all n locations
agctntctatactaatgtcaaaattcaagaaagctctttgatctctgaggtttatgggataaaaatggtcattgaccaatcccttttctatgacttgacccaattatctagtgaaggtgtaccatttgaaggtacactgaatgatgattggaaatttgatttctctgtgcatgatgcccgccggttggtttgaaccaaccaagaggatatgactggaaggcttcttgctggatcattggcttttgaaagccatatccttcactatctcattgtgtgtattttacttccaagatcttcaaacctttgctcaggttctgaagacgatcttatagtcatgtgggcttttcataccggccgacaaaatgatttggcacac

SEQ ID NO: 2434 - DNA, 379 bp, Glycine max
  unsure at all n locations
agctntgaatgcactattcaatggagttgacaatatcatcttcagactgatcaacacttgcacagtggccaaagatgcatgggagatcctgaanatcactcatgaaggaacctccaaagtgaagatgtccagattgcaactcttggctacaaaattcgaaaatctgaagatgaaggaggaagagtgtattcatgacttccacatgaacattcttgaaattgccaatgcttgcactgccttgggagagaggataacagatganaagctggtgagaaagatcctcacatccttgcctaagagatttgacatgaaagtcactggcatagaggaggcccaagacattngcaacatgagagttgatgaactcattgggtctctt

SEQ ID NO: 2435 - DNA, 206 bp, Glycine max
agcttgaatcggacatccgcgtgaatagttatgatcttttgaatctctcaagagcttccggtggtcaatctcgatcctcttgacatattatgcacccgcatcggacctctgtgtgaaaaggcatgatcattcgtatctttcgagagcttccgatgtttaagtcccagcgtatccatatattattaactctgaatcggacctcagtc

SEQ ID NO: 2436 - DNA, 163 bp, Glycine max
tttcgagtgtctcaatatattatgcgcctgaatcggacctccgagtgaaaagttatgaacattcgaatatttcgagggctctcgttgattaaattccagcttctgtatatattatgcgcctgaatcggacctccgagtgataacgtatgaccattttaatatc

SEQ ID NO: 2437 - DNA, 413 bp, Glycine max
  unsure at all n locations
ataatggagacacatgaacatcgctaggcaatgactttcatggtgctccgaacaaaagtggagtatggaggattgccttgagggtccgcacttatgcaatcatgaaactcaactccaaactcgaaagtgaaggatataggaacagccctaagcaataacattcatgtggctccggaacgggatgagaatggaggattgccttgagggtcctctcttangcaatcatgaaactcaactccaaactcgaaagtggagaacacatgaacagccctaagcaataacattcatgtggctccggaacaggatgagaatggaggattgccttgagggtcctcttttangcaatcacgaaactcaactccaaacttgaaaatggagaacacatgaacagccctaagcaataacattcatgt

SEQ ID NO: 2438 - DNA, 382 bp, Glycine max
  unsure at all n locations
agcttcgaaatccaaagatctaatccaaggtagatgtttcataaatgggattcctttgcttgtgttgtttgattctggtgccacccattcctttatatcttggttgtgtgtagaaaaacttaagctttttgtgtcttctttaaataaagatctagtagtagagacccctactagtggttctgtgttaacttctgatgtgtgtttgaattgttctgtggagatttctggtaggatattcttgattgatttgatttgtttgcctttgagctagaatgatgttattcttagtatggactggttatcttccaaccatgtcttgttgaactgttttgaaaaagtgtggtgtntgatgattctggagtgagtaaggatatgatgttta

SEQ ID NO: 2439 - DNA, 354 bp, Glycine max
  unsure at all n locations
ctgatgcatctaccccgcagggcattggatagaatagtccaataacattggaccaaagatgcaagagaaggccctagggttctcatgagtcttanggtagatntcgggcccatgggctaagtacgagcccacttatctttgtaaatattagattaaggtttcattatttttgggccttgtagttagggctccataatgtaggtagggtgccttagaaatataggatttttcagcccttgtattttagggcacctagactagtttttgtattatgggtagttttgtaatttcatatgcactaagtgaatatttgatcgtgtggttggaaactaaattaattgaattggtagaagc

SEQ ID NO: 2440 - DNA, 364 bp, Glycine max
  unsure at all n locations
ctttgcgtaagaaccagtttatccaatggaacgatgactgtcaagtggcattcggaaggatcaaatgatgccttatgaatcctcctgtgcttacgccactagtgcctggaaggcccattatcctatacatgactatgttggatgagtcaatggggtgtatgctggggcaacatgacgagtctggaaagagggaacatgccatctattacctaagcaagaagttcacatcatgtgaaatgaactactctntgcttgaaaggacatgttgtgccttggtatgggcagcccaccgtctaaggcagtacatgttgagctacaccactnntgtggtgtccaaaatggacccagtcaagtacatatttga

SEQ ID NO: 2441 - DNA, 399 bp, Glycine max
  unsure at all n locations
agcttatccncacaagagtgcataacaactggtgagtctgcattgattataggaggctgaaccaggtaacccgaaaagatcatttccccctgccattcattgaccaaatgcttgagcgcttggcaggtaaatctcattatttttttcttgatggtttttctagttatttacaaattcatattgctcttgaggatcaagaaaagaccacattcacctgtccctttggcactttttcctataggaggatgccctttggcctatgcaacgcccctggtaccttctgtcgcaacctacccttttgcgggcaagcgaggcgaggctcacgggtgccttttccaaaggaggaaaatgcgcggagtcgtcaccaacgtttatttgtggaaaacgtcgaaaaaatcg

SEQ ID NO: 2442 - DNA, 396 bp, Glycine max
  unsure at all n locations
agctnggatttcctntgctccggatacctctcctttctcatgtgaacccaaacctaatctccgggttggaaaacaaccttnttgcgccccttgtttgcttgtttaacatagctctcatttctctttttaattatggccttgactctttcatggagctttttcacgtagtccgctttggcttgtccttccttatgcttaaaaactgaaatattaggcattgacaacaaatcaagaggagttagtggattgaaaccatatacaaccttcaaaggagaacaactagtggtgctatgcacagtcctattataagaaaattcaatgtgaggtaagcaaacttcccaatttttaagattctttttaaaagggtccttatcaaggtacccaatgtcctattca

SEQ ID NO: 2443 - DNA, 473 bp, Glycine max
  unsure at all n locations
tcaagctcgcttctacaatgatgatggagtntaaagaagacattatgaagatctttgagatgaccgacctcggtttgatgagttacttccatggcatagaagtaagtcacagaaatgaagggatattcatctcacaaaagaaatacacaaaaggcttacttaagagattcaagatgtatggttgcaaacctgctgctactccactcaaaacaaatgagaaactacagaagaatgatggagcaccaaaagtntatgcatcccaataccaaagtctaattggaagcctcctatatctgaccgctacacggcctgatataatgtatgctacaagtcttctatcaagattcatgcagagtccaagtcacatacactttggagcaggaaaaagaattttaggtatctacaacgaacaaaagagttccgtatatgggatactaccgataccaactcacaattacttggctacactgaca

SEQ ID NO: 2444 - DNA, 446 bp, Glycine max
  unsure at all n locations
agcttaacctctatacccttaatccanaactctattaactaaaccctaaactctaaggcttagacaccaaaccctatatttgaaaacccgaaacccttaacccaaccttntaagcccttaaccctaaaatataaaaaataaaccctaaaccctaatggtttagacaccaaaccccaaacctcaaaaccctaaaccataaacccttaaccctaaattctaatccctaaaccctaaactcagaattctaatacctaaacccaaaactatgcattataaaccctaaaccctaaactctaaaccacaagggttagacaatacaccatacatcttaaaccctaatcccttaaccctaaaatttaaatactaaaccctaaacccttaaccctaacctttaaacccttaatcctaaaatatcaaaaataaaccctgaaccctaaacctaaaca

SEQ ID NO: 2445 - DNA, 421 bp, Glycine max
  unsure at all n locations
cttgtccatntatcacatgtccagcaatcatactattctaaganactgaatccttgttctccatgttatcaaaaacaactctagcatctcttaacatccctgactttgaaagcatactaattagagagttgcacacaagtctttctgtctcaaaaccgagctttacaaccaaggcatggatttgcattcctatagccaccgcaccctgattggccaaagctgcaattacagtacaaacagtataatagtcaggtctgtatccctcaacttgcatcagacagaacaattcccacacctgatcattaaatctattccatgaataacccgtgagcaaggaattccacgacaccacgtctctgtcacccatctcatcaaaaactctcctcccatctctaacattccccgttntcgtgtacatatc

SEQ ID NO: 2446 - DNA, 418 bp, Glycine max
agcttgtcttttctcttctggtcaaaaatcatatttacgagaattattaatttgaattctgcgaaggacatttgggactacctcaaatcagagtattaaggtagtgtgcaaactaaaggtatgaaggcacttaacttggctacagaatttgagatgcaaagcatgaaggagacaaaaactatcaaaagttatgctgacaaacagttgagcattgcaaacaaggtacgtctccttggtaagggatttcctaacgaaaggatagtgcacaaaatagttgttactatacctgaaaaatatgaatccaaaatatcagcattagaggagtcaaaagaattgtcaaatatcaccctcggagaattggtaaatgctttacaggcacaggaacataggagaatgatgagacatcgggtggcaatac

SEQ ID NO: 2447 - DNA, 483 bp, Glycine max
  unsure at all n locations
agcttacggcccatgaaaatactccaaaacttaacttttaaaatatagcangaaacaaaccacaaataaaaatttcatcctcatctctaagaatgatcccacagtgtcaacttacatagtataaaaaaatctgtaagtttgttctagatagtgtttgaaatttagtaagatcaaattacatagttaaactcaaaaaaatgcttttggtctcttagccccctccccncggatatttggtcttagttttttattttcaaactgatgaattaaaaaccaaattttgaaatgactaatttatattttaacattaaatataaaaaaatatttacaaatcattattcaataatatttcattaattaaactnaatttgaagatatttntaaactaaaaaagacaaatacatgtggttggtatatttaatttaatattttttaattattaacacaacaacctttccttaaagagaaagtgattacaaattt

SEQ ID NO: 2448 - DNA, 389 bp, Glycine max
  unsure at all n locations
tctggtgggacatcttgactggctntccaatctgactattacctcatattctgccttcttctattttcagattgggaatgcctctaacagcacctttgtcaatgattttcttcatgcctcttaagtgcagatgtccaaatctttgatgccatattctgacttcatcttctctggagaatagacatgtggaggagtaactggtttcttgaggtgtccataggtaacagttgtcctttgatctgctgcccttcattaggacttcactcttctcatttgtcaccaagcattctgactttgtgaagtttacattgaatccttcatcacacagctgactgatgctgatcaagtttgcagtcagtcccttcaccagcagtacttttgtccagact

SEQ ID NO: 2449 - DNA, 457 bp, Glycine max
  unsure at all n locations
ctaagcttacatcttcctgagtagctgccattggttgtattgtagcacttttataccttctaaaggaacaagtatagctggtaaattgtttgtttgtctgtgatgaattcctatggtattctccttttatagagctaggaatcaggactagctagtattcagcagatacgtaatcaattagaaaagatatacctatatacatatcatgggtatagtcaatagtggggacgataacaaaaaaatgggaaagtgctaccgtgtattaaattcattttgattgctgcgtatgaatgcggagacattgcacatgagaaggatctaganaaaatatgaaaaaactnttccctatcaagaagaatcctcagagntaacaaatgtggaaaaataaatgatgtaagagattgcgtaaaccgtgtagagaagattcctctaatatactcgatcctcaatcaaatat

SEQ ID NO: 2450 - DNA, 227 bp, Glycine max
gctgtacattcaatttcgagcgttccgatatattacgggactcaattgtacatccgagtaattagttatcgtcgcttgaatttgctcagagcttcaacattcaatttcgagattttcgatatattacgggactcaatcagacatccgagtaaaaagttattgtcgtttgaatttgctcagcgcttccgtattcaatttcgagcgtctcgatatattacgggactcaa

SEQ ID NO: 2451 - DNA, 262 bp, Glycine max
ccttcatctcttcggtgtggcaagcttgttttcttttgtgttaggatatctacatcgtctgcctcagtcattgtggtgcagtttatatatctgttggacaacttcacttaatgccacattgatttaagatgaaatctaacatgatatcagagcttatagtccggcttagttctctctaccatgttggttgtaaaagcagcagtacctgagattctcattcagttgtttgctcttagaagagccctacatactactaatctca

SEQ ID NO: 2452 - DNA, 288 bp, Glycine max
  unsure at all n locations
agctctgaatgcactattcatgtttttgacaagattatcttcagactgatcaacacttgcacagtggccaaagatgcatgggagatcctgaaaatcactcatgaaggaacctccaaagtgaagatgttcagattgcaactcttggctacaaaattcgaaaatctgaagatgaaggaggaagagtgtattcatgacttccacatgaacattcttgaattgccaatgcttgcactgccttgngagagaggataacagatgaacagctggtgagaaagaatcttatatcct

SEQ ID NO: 2453 - DNA, 374 bp, Glycine max
ctgcataccccaaggatccattaggaaattacttgtgaaagagatccatgagggtgggctcatgggccactttgggatagacaagacccttgtcttcctcaaagaaaagttttattggccccatatgaagaaagatgtccataagcattgcactaggtgtgtggcttgtttacaagccaagtctacggtgatgcctcatgggctatacacacccttacccatcccatctgcaccttgggtagacattagtatggactttgtccttgggcttcctagaacccaaagaggtgtagactctatctttgtggtggtggatagggttagcaagatggcacactctataccatgccacaaggtggatgatgcttcccaca

SEQ ID NO: 2454 - DNA, 385 bp, Glycine max
ttcggagcgtcgcgatatattacgggactctattggacattcgagaagaacgttattgtcgtttgaatttgatacgagcttccgttttcaatatggagcatctcgatatattacgggactcaatcggacattcgaataaaaagttatcgtcgcttaaatttgcttagagcttctattttcaattcggagcgtctcgatatattacggcactgaatcagacatccatgctaaaaagttaatgtcgtttgaatttgatacgagcttccaatttcaatttggagcgccgcgctatattacgggactctattggagatcccagaaaaaagttatgtctcgttgaaattgatatgagctcccatattcaatttggagcgtcttgatatat

SEQ ID NO: 2455 - DNA, 379 bp, Glycine max
  unsure at all n locations
cttgatgccatggtcaacctagtaacttagcttgtcatgaatcagaaatctgcatctgcacctgtngcaagagtttgaggtctatgttctatagcagatcaccatatagatctttgtccttctttgcaacaatctggagtcaatgagcaacctgaagcttatgctgcaaacatttataatagaccccctgagcagcaaaaccaacaacaacaaatacaatctatggtggaggaatcatccaaatatgagatgggcaagtcctctacaacaacaatagcctgtcccttatttccaaaatgttgctggtccaagcaagccatatgttcctcctgcaatgcatcagtagtagtaacaacaacaacaaagacaacaagcaact

SEQ ID NO: 2456 - DNA, 422 bp, Glycine max
  unsure at all n locations
agctatagaagaccgnggaantatttattgttgtgtggnctggatcttctgttggactagtttgacccctttgcttgacaccatgtggcccaagtactccacctgngtttgggcgaaggaacatttcgagagcttaatgaagaactggccctgcaacaaaaccttgaaagccaattccaaatgaagtaaatggtcattgaaggagctactataaattagtatgtcgtgatgtggacatcaaagcccaagcccatgacaaccaccagccccaggcccatgactagatggaagcccaagacccaatacaaggcataggaagacccatgacaagagcaagagctaaaaaggcacaagatgctttggaacatatggtgattattctgagggtagttcaaatgcagggagaggcccaacacttggag

SEQ ID NO: 2457 - DNA, 416 bp, Glycine max
  unsure at all n locations
agcttggttcccaacgctttgttcatactctcccataacctagaggtgaatctaggatctctatcagacactatgctagatgacacaccatgtaatctaacaatcttactaatgtatagggaggccaacttctctaaggaaaacctaatattgatggggataaagtgtgcagatttggtcaatttgtcaacaataacccaaatagaatcaaaacctttgggggtcataggtagtcctaaatcgaaatccatggagataccgtcccacttccactgnggtatctctaagggttgtaacttacctgaaggtctctgatgtttatcttagccttatgganactaaacatgaatacacaaacttcctaaccactcttttatgtgggccaccaaaacattatctttagactctaatacatc

SEQ ID NO: 2458 - DNA, 416 bp, Glycine max
  unsure at all n locations
ctgatgtaaccattggagaggttaatgaaacaacgatatgatgctctccatgagaggttggatcaaatggagaatagagaccatatgaattgctcaagagcttccattgttcaatttcgagcgtctagatatataatgcgcctcaatcggacctccgagttaaaagttatgaccatttgaaatgctcaagagcttccattgttcaatttcgagcgtcacgatatattatgcacctgaatcggacctgcgagtgacaacttatgaccatttgaatngctcaagagctctcattgttcaatcttgagcgtctcgatatattatgcgcctgaatcggacctgccagtgacaacttatgaccacttgaattgctcaagagctctcattgctcaatttctagcgtctcgatatattatgcg

SEQ ID NO: 2459 - DNA, 377 bp, Glycine max
  unsure at all n locations
agctntcactcggaggcccgatttatgcgcataatatatcgagacgctcgaanatgaacaacggaagctatcgagaaattcaaatggtcaatacttcgaactcggaggtcctattaaggtgcataatatatctagacgctcaaaattttacaatggaagctctntggctatacaaatggtcataacttttcactcgaaggtccgattaaggcgcataatatatcgagacgctcaaaattgaacaatggaagctcttgagcaattcaaatggtcataacttgtcactcggaggtccgattcaggtgcataatatatcgagacgctcgaaattgaacaatggaagctcttgagcaattcaaatggtcataacttgtcac

SEQ ID NO: 2460 - DNA, 421 bp, Glycine max
agcttaagcacgagtaaattgctacatgcttaagttgtgtttaaggtgcatccttaaagtgtatgcttaagaaagttatgcaaaatgcttttttttttaaaaaaatggtattccaagtgtgataaaatgaaaattggttcatgatatgagtatttatatatagtatggagttaattgtatgctaatatcatgcacttcacattcatatgaggattttgatgtggtgattgtaaaaattcatggtgttggatgtcttactatgcttaacaaactattgatggattcataagtgtgatgaatatatgaatggttaacttatgatatggtaatttgatgaaatatcgttataatgaaaagataattatattgataagataattatgtaaattattgaatgtctgagttatgtcgggttaatttc

SEQ ID NO: 2461 - DNA, 374 bp, Glycine max
ccatgaatcagaaatctacacctgttgcaagagtctgtggtctatgatcctctgcagatcaccatacagatctctgtccttctttgcagcaatctagagtcaatgagaaacctgaagcttatgctgcaaacatttataatagacctcctcagtagcaaaaccaacaacagtagaataattatgacctttcaagcaacagatacaatccaggttggaggaatcatccaaatctgagatggacaagtcctccacaacaacatcagtctgtcctttctttccagaatgttgctggtccacgcaagccttatgttcctctctcaatgcagcaacaacaaagacaacaagcaggtgaggcctccttttcaaccttctta

SEQ ID NO: 2462 - DNA, 340 bp, Glycine max
  unsure at all n locations
cggacatcccagctngaggttaatctcaaagctctattatcatattcttgttagaggacttccaaagctatcgtatcaagattcattttgtgtagcttcccaaaaagggaagcaagttaaaagttcttttaaagccaaaaaaaatctttccacttctaggccttttagagctcctacaccttgacctttttggaccaaccaagaatacacccctctttggatgcangtatggtctggtcatagtggacgattacaccagatggacatgggttaggttcctaacccacaaggatgagtcttttgataccttttataaactttgtaaatgattcaaaatgaa

SEQ ID NO: 2463 - DNA, 185 bp, Glycine max
taccatcagatccgagtgaagcctgaggatatactaaagactgcttttaggacccgttatggtcactatgagtatctagtcatgctctttggtgtggctaatgctccaggtgtgtttatatacttcatgaataaagtctttcacccttacctagatagttttgtggtacgattcatagatgatat

SEQ ID NO: 2464 - DNA, 409 bp, Glycine max
  unsure at all n locations
gcttcanaaagtcaagcagaacagcttaaagaagaacaatgtggcgatctctgatgtaaccaatcatgctcggaaagaagagttagaaactggccgttaataatttgcatctgtaattacagaacttgatgttgcaaagcaagaactgagtaaaattcgtcaggggtatgatttatccttggaagcaagagtttctgctctcaagcaaacagcagaagctgaagatgcaatgaaggcaaacatggaaagagcatgtgaggtatcctaaagaaatttggttgtgcaggaatcagttgagaaaatgaatgctgaatctgtccaagcacatcaactgcaagaagagacattagccggacaaaaagttcttagacaatcatatgaagccatccttgaagaatcaaaaaagaag

SEQ ID NO: 2465 - DNA, 463 bp, Glycine max
  unsure at all n locations
gtcacctgcggcatgcaagcttgtccattggcaaagttacagaaggccaatttataaaaatgatctattcagtcaattattcttcaccatcatttttaattatctaaagttcattggttggatttaacattaacaattagtcagtcaagttcaagaggacttaattacatgggttaaagaatatgtatctttttttctccaaaaaaaaaataagtcccttgatgcatttcataagttaatggaaaataaaaggtgtagaagaaatgcnattaaaggtgataagccatagcaagtgtttgcagtttaccgcttgaactcangtgactgcttatattngtcaaactcttgcaaccattcttcatccgagaaaggagggagagtaccggtgaattccaatcagtcattgaagaccagatcggtgagtcttgtaaactcccgagcaccaccatgctgaacacccatg

SEQ ID NO: 2466 - DNA, 426 bp, Glycine max
  unsure at all n locations
cacggttgcaccggcctctctagtgatcctccaaagtgttatcctgttcaacactgcacatggagagtgagtcatcctccacatcaagcagtgcaagaattatatgcgactgtagattactaggtggacacgcttcatcgtcaagcatttctggtgcgtccaaagcattaacttgtaacctagcccgcttgattgcctcggcgtcaccctgaaggagctntgagatctgtggtccaaatgtccgagagaatatccatgagattttcaataaaaaggactaatgtactgaatgagaatatttctatggngatcaaacaagaagataaagttaacggctgcactatagaggtcagataccacattgattaggataagcaaaacgcagaaagtccgtccattgtccaggatatacactcaatatgcaac

SEQ ID NO: 2467 - DNA, 445 bp, Glycine max
  unsure at all n locations
ctatgctgcanacatntacaatagacttcctcaacctcagcagcttattcaaccacagcagaacaattatgacctctncagcaacagatacaaccctggatggaggaatcacnctaatctcagatggtctagccctcagaaacatcagcagaagcctggctccttcttccaaaatgctgctggcccaagcagaccatacattcctncaccaatccaacaacagcaatagccccagaaacagccaacagttgaggctcctcccgcaaccttcctcaaagaacttgtgagacaaatgaccatgcagaatatgcagtttcaacaagagaccagagcctncattcagagcttgaccaatcagatgggacaattggctacacaattaaatcaacaacagtcccagaattctgacaagcttgcttctcaaatctgtccaaaatccaaaaat

SEQ ID NO: 2468 - DNA, 437 bp, Glycine max
agcttcatctatggcagccaagttctcagcaacttttaaatataatctcctagatccgatcaattggttcagtgcgatcctgcacagcaatcccttctgagacatcggcgagtgatttgagattgcacttaattaaggcctcaacgaagtagcaggtttcatctttggtgttgccctcaggtacatccaccacaaaagattcaattaccagtgtacctggccttccatcaataatttctgggtggagggacatgatagatgagtagttctgaaagataagagatacaacttatgttaaaaaaaattattgtgtcaggtgacacggacaagatagcttaatcatttagcccaacttcttagacaggccgggaaaacaaaaatctatataattactcatggtggacgtaatgcttggtgcgtctttaatacatgaatat

SEQ ID NO: 2469 - DNA, 335 bp, Glycine max
  unsure at all n locations
agcttganattgaataatggaagctctcgagaaatataaatggtcataacttttcactcggattgccgattcaggtgcataacatatcgagacgctcaaaattgaacaacagaagctctcgagaaattcaaatggtcataagttttcacatggatatccgattctgtgttataatatatcgagacggtcgaaattgaacaacgactcgagaaattcaaatggtcataacttttcactcggatgttcgattcaggcgcataacatattgagacactcggaattgaacaatggacgctctcgagaaatacaaatggtcataacttttcactcggatg

SEQ ID NO: 2470 - DNA, 477 bp, Glycine max
  unsure at all n locations
tatcccaataacactatcaacatagtatgaatnctacactatgagaatcctaattactgatattctaatcatttaacaccttgaagggcatacatgatattaagtaacaaaagcaagcagaagcttctttcccattaccaagcaaatgttctattctagacagaacaaggagataaaatacacctgttaatagcaattgtccatttactgtctataaagtcagttgctgcaagtaatgcagctggccaagccaaagcagttaagagtgagctcaaaacagtcatcattgcccctcgtttcatagctccatcgcaagtcctgatgcaagtcacagcaatactaacatcattcacagcactactaataaactgantacttagttttataagcacccctaaacctacaacaattacttgaagtaagccaatcttgaattcagtgctcacagaatcagatcttgactccactgagtgatac

SEQ ID NO: 2471 - DNA, 492 bp, Glycine max
  unsure at all n locations
agctntgatataacatgatatagttcttcacctatacanatatattaaaatggagtgaaacatatactttntatcttagagaaataatggatactaacttattttattcaaaaaatttccaagtcgaatctaattgattgtgtggatgcatgtcatttgtgaagataattatatgtaggttatttcatatgtgtacaaagaaacttgtgctttatctttagggaaaatggcatcaactatcatatgcatgtgaagacaatttgcatatattgctcagttganagatggacacactaaagaggatagaacaaaacatatntcttctaaagtcttctacactcgatctttgaaggaatggtgatataaacattcaacaaatttgttcaagtgagaatataacagatntctntacaaagtcttttgctaaggagaactntntagtaatcggtacacaagaattgaacttcgtgtcttatagacaatcatctacat

SEQ ID NO: 2472 - DNA, 427 bp, Glycine max
  unsure at all n locations
tctaaactntatacaagaatgaagctcagataccacttgttggacaagtggcctcagatatcttaagaaggggggggggttgaattaagatatcacaaactattccccagttaaaaattctacttttaatttaacccaactacccaagattccttttaaacaagaactccttgataataatgcaaatttatcttactaaataaaaataataagcaataaatagtaaaggagtttaagggaagagaaaatgcaaactcagatttatactggtttgaccacacctttgtgcctacgtccagtccccaagcaacccgcttaagagttccactatcttgcaaaatccctttacaagatctgaaccacaccaggacaacccttcctttgtgttcagaattctttacaacaagagaaccttggtctcttaatc

SEQ ID NO: 2473 - DNA, 414 bp, Glycine max
ctgagcagattctatcgacaataactgtttacttggatgttcgatatagtcacgtaatatatcgagtcgctcgacatagaatacacaagctgtgagataattctgacgacaataactatctactcggatgtacgattgagtcacgtaatatatcgagacgcccgaaattcaatacagaaactctgagcaaattctaacgacaataatcttttacttggatgtccaattgaatcacagaatatgtcgagacactcgccattgagtacacaagctctgaggagattcagatataaataccctttgactcggatattcgattgagtgccgtaatgtatcgatacattcgaaatagaatacagatgctgtgagcaaattctaatagaaataactttatactcggatgtgcgattgagt

SEQ ID NO: 2474 - DNA, 225 bp, Glycine max
tatgctgtacacatgtattataaacctcctcagccgcgaaacctacagcaatagaataatcatgacctttaaagcacttgatactatcctagttggaggaatcatcctaatatcagatgggctattccttcacaaacacaacagtatatatctccttttctgaatgctgctggtccacgcaagccatatagttcttcttcaatgcagcaattgcaggaacaacaa

SEQ ID NO: 2475 - DNA, 467 bp, Glycine max
  unsure at all n locations
gtactattattttgtatacacagtttctacattaggaagccttgaaaataagctgaataattatgataagtaggccattatgtcacaactaagccttctaatctgtctttctgaacaaggtgctatttgtataaatgtctggcttgtttgtcacgtttagcttatgcatgtacttatacaccaatttctagagattctgcgaaaccatgaataataactatgactgcatagctatgccatgtaaatttacaatgtagttgttggatttcctttttaaagttattagtttaatttatgcatctattttgtttattggaagatgtgtatgtatgtcaaatcgggttatgatatcatatacatgatgtgtggaatacatntgtaatttcataaatctctcgtgatttcatctgatatatntgggatggaacatactagacttttaatgatgatcatttttatatgataag

SEQ ID NO: 2476 - DNA, 396 bp, Glycine max
  unsure at all n locations
atgcatgctaagctataagctctacaactgaataacacttggactcttaccattcttcctcctcacaaaactgccattgggtggtcgtgggtatataaaatcaaataaataaatgatgggtctatagaaagatacaaggcacatttagtcacgaaaggatacacttaaacagaggggtttggattatctcgataccttctcgccagttgcaaacctcaccaccattcatctncttttctagctntggttgctttccatcaatggcatctgcgacaactcgatgtgaataacgccttccttcacggtgagcttaatgaagagggttacatgcatgtnctctctggacttctagtcacaagcccgaaccacggttggtcgcttcaacgatctctatat

SEQ ID NO: 2477 - DNA, 456 bp, Glycine max
  unsure at all n locations
tatntaaacaatatataattgatgttntgtagtctatgatcaatgtacacatgtaacatgttatacctttcatcattcttccttcactttattcttatattactcttataaaatttatacataatgcttattttttatcaactttagtcgagtgatcagcctctaattttaaaaaatttccttacaaatatgttgataaataaaaaatattttaagttatacgaaatctttttatcttctttaataaaaaatgatataaaatatctttttgacaattatatttttaaacttagtttatgaaagaaataatttatttaaatatttctttaatgatttataaattggcgcaacccgtgaatgtgtgtctagttagttttaacagtcaaatacacgttctgtagtattaccacttaccagtgtaaatggctagttcctaaaaattctacaatacacttt

SEQ ID NO: 2478 - DNA, 381 bp, Glycine max
  unsure at all n locations
agcttatccaganatcgaagcactatgatcttctgctgaatattaggttgagaaacattctctaggaccctgagaacaatcatagggaaaaaaactccaatttctgccttcaatccagctctaaatcttgacaccagactgatgaaaatggagcatgacagttgaaacacaatcaaaagagttgaagcactgttcttcaacaaggatagacataagtactgcttgatggcgcctaaaaacctgctcatccacaaccaaatttaaccatcaggactatttttgtcatctggaaaaattatgaagtanaaaaaaaatatagtgtcaagtggtgtatagaacaaagaaagaaaatgttaatttgcattaatgatgagggacaaa

SEQ ID NO: 2479 - DNA, 390 bp, Glycine max
  unsure at all n locations
ggagggagaactggatgccttggtcaacctagtaactcagcttgccatgaatcagaaatctgcatctgcacctgttgcaagagtttgtggtctatgttctatagcggatcaccctgtggagcgggagcatctttaatgaaataatctggagncaangagcaacctgaagcttatgctgcaaacatttataatagaccccctcagcagcaaaaccaacaacaacaaatacaatctaggttggaggaatcatccaaatttgagatgggcaagtcctctacaacaacaatagcctgtcccttatttccaaaatgttgctggtccaagcaagccatatgttcctccctcaatgcatcagtagtagtaacaacaacaacaaagacaacaagcaac

SEQ ID NO: 2480 - DNA, 419 bp, Glycine max
  unsure at all n locations
agctntagaagaccgtggaattagccattggtgtgtggcctgtgatcttctgtggactagttngacccctttgcttgacaccatgtggcccaagtactccacctgngtttgggcgaaggaacatttcgagagcttaatgaagaactggccctgcaacaaaaccttgaaagccaattccaaatgaagtaaatggtcattgaaggagctactataaattagtatgtcgtgatgtggacatcaaagcccaagcccatgacaaccaccagccccaggcccatgactagatggaagcccaagacccaatacaaggcataggaagacccatgacaagagcaagagctaaaaaggcacaagatgctttggacatatggtgatattctgagggtagtcaaatgcanggagaggccaacacttggagt

SEQ ID NO: 2481 - DNA, 371 bp, Glycine max
gtctgcgccgggttaaagtcctacaacgatactcttcaaatattaagagccttgtgcagctgaagaagcttaacctactggggttaaagactcatgattgtcacatgttgatgcaacaattgttagccgtggtcatacgagacatattgcctaacaaagtcaggttagccataactcgcctgtgctttttcttcaatgccatgtgtagcacagtccttgatcctgtcaagtttgatgacctggaaaacaaggctacaattatactgtgccagctggagatgtattttcctcctgctttctttgacatcatggtccacttaattgtttaactggtcagagaatcaaatgttgtggtcctcgttatctgtgct

SEQ ID NO: 2482 - DNA, 379 bp, Glycine max
tgcacaacggaagcactcgagaaattcgaatggtcataacttttcactcggatgtccgattcgcgggcataactcatctagatgctcgaaattgaacatcggaagctctcgagaaattcgaatggtcataacttttcacacggatgtccgaatttaggacataatatatcgagacactcgaaattgcacaacggaagcactcgagaaatttgaatggtcataacttttcacacggatgtccgaatttgggacataatatatcgagacgcttgaaattgcgctaccgaagcactcgagaaattcgaatgatcataacttttcacacggatgtctgatttgcggacataactcatctagacgctcgaaattgaacaacgga

SEQ ID NO: 2483 - DNA, 395 bp, Glycine max
  unsure at all n locations
agctngngctctngcctcactcaccagccttttggtttcatttctagctatcttatacttatcccaaggttcagaatttctacatctagaccactccttganacactccttttttactctaactttgctctgaacattttcattccaccaccacgattctttacccctaggtccaaaacctctagattcacccaacgtctctttagccactttaataatctcttatctaccaaattgtgacatccgcgtgaaaagttatgaccatgcgaatttctcgagtacttccattgtgcaatatcgagcctctcgatatattacgtcccacattctgacatccgtgtgaaaagatatgaccattcgaatttctctagagcttccgctgttcagtttcgagc

SEQ ID NO: 2484 - DNA, 388 bp, Glycine max
  unsure at all n locations
acgacaattactttntactcggatgtctgaatgaatcccgtaatatatcgagacgctcgaaattgaaaacagaagctcatagcaattgcagacgacaataactgtgagcggcggaagataataaatatttccgcnanacaccgagacgctcgaaattgaatacaaaagctctgagcaaattccaacgacaataacttttaactcggatgtccaaataaaacccgtaatatatcgagatgctcgaaattgaaaacagaacctcgtagcaattgcaaaccacaataacttttaactcggatgtacgattaagtcccgtaatatatcgagacgctcgaaattgaaaacaaaagctctgagcaaattcaaacgacaattactttttactcgg

SEQ ID NO: 2485 - DNA, 306 bp, Glycine max
agcttgagcaaattcaaacgacaataactgttaactcggatgtccaaatgaaacccgtaatatatcgagacgctcgaaattgataatagaagctcatagcatatgcaaaccacaataacttcttactccgatatccgactgagtcccgaattatatcgagacgcttgagattgaaaacagaagctctgagcaaattcaaacgacaataacttttaactcggatgtccgattgagtcccataatatatcgagacgctcgtaattgataacgaaagctcgttggaaagtcaaaagacaataaatttta

SEQ ID NO: 2486 - DNA, 421 bp, Glycine max
  unsure at all n locations
agctatgagccatactattccaaactaaaacttctgtaccaaatcgacgaaaggtgttggaacttggatacatactgatgcttttggtattgcaaaaaaatggaacatcttagaatgtggattttggtctaactcaaccccaaaagctatctcttatggtgagaggtgccctccacttatatactctatcttggtactatcgctagtcaatgaaggacttggattgttttcaatacaccccctcacgtccaagcacttttgagcttggcgtgtggataacatggtgggtgaccctttgaatggatctaggataggctctaataccatcttagaatgtgggtttaggcctaactcaaccgcaacagctaactcatanggtgagggtttcctccacttatatactctatcttccactatctct

SEQ ID NO: 2487 - DNA, 421 bp, Glycine max
  unsure at all n locations
agcttggcaacatagttgacacggaagggatatctnctctatatagaagcataatatcatctgcaaaagtcaaatgagatagctgaatacatgcacaattgggatgaaatttaaaattggcatcatccttaagactgctcatatctctggaaaagtactccaaacaaagcacaaacagataagggaagagaggatccccttgtctaagaccccgctaccccttgaagtggccataaatggatccattgactgtgacactaaaggaaaaagggtcaacaaaaatacaccaatgaaaacatatttttgtggtgtaagtatataatagaatcatgttttttgtttgttaaatgatagcgaaaaagttatcgacggaaacaaaatttatntcatatatatacaaacatgtacaacgagtgaaatg

SEQ ID NO: 2488 - DNA, 485 bp, Glycine max
  unsure at all n locations
gggactagctagtgatggaatgaatccatatgacaatttaagcactcaacatagttcatggccagttctactagtaatttacaatttgcttccttggttgtgcatgaagtgaaaatacatgatgttgtctatgatgatatcaggcccaacacagccaggaaatgacattgatgtttatctaagtccgttgattgaagacttgacaaagttgtgggacgaggggattttagtgtttgatgggtttcagaatgagattctcaaatgtgtgcaatgctcttttgtaccattaatatcattctagcatatangaatttaagcagttacagtgttaagggtcatcatgcatgccccatctgtgaagaagacacaagctacatacaactgatacatggtagaaaaacagtctacactatgcatcgacgttttctaaaacctcatcacccttacagggcgatgaaaaagcattaatggaagtcagacatgaa

SEQ ID NO: 2489 - DNA, 464 bp, Glycine max
  unsure at all n locations
agcttatccatgcctccttagtggatgttgcatcanaaatcttctcgaacgcaccatcatctaatccttgatagatgaggaagagagctttcttgtctctctttcttgaatccttanaagtctattnttgtgcttggggtagtgaagtcactactagaaaataaggttttaacattggttatttaggactttcaagatcggttattaacaaatgttgaaagtaccgacgttgaaagtattaacgttaacatcagtttttgaaaactgatgttaacgtaaaataacaacatcagttatttaaataaccaatgttatataataagaattacaaaaaanaggtatatatgttcataccaacgttgacagttaacatcgattnttcattcaaaaccgatgtaacttccanacgttaacacgtttaacatcggttttttaaaaaactgatgttagttacaaacgttaac

SEQ ID NO: 2490 - DNA, 502 bp, Glycine max
  unsure at all n locations
ctgagaattcacccaagaggtttagattaatgcgtgaacttaatttgatatcatatattagatcaaacactactcattactagactaaaagatgtagctgatggtaaaaataaaattctgttaatttcctcaaagaattttagagttacaactaacttaagagtatggaaattaaattcatcatggagtactgtgagatgttaaattcatcaaattcttgttggaatcgcgttaaccaaattaaataaaatcaacacatcttataaagttttaaagtcaatatatagttgaaagtaaaaattaactgttgatcatattaagaattgcaaagggagaaagcatagcccttaaaagtctttntttttacataaaataaatagtaagtttagcattactactttctatacgtacattntacggataatttcatttgaaaaataatgctactcanaataaatgcatatatattaccattngctataaactattacaataattatgg

SEQ ID NO: 2491 - DNA, 423 bp, Glycine max
  unsure at all n locations
agcttcttagtttcagatgatgcagatgggcttgtagctacctcatgcactcctctaatgactatggcgtcatttctggcgctaaactgttgggagttggaagccatcttctcaattaaatntttggcttcagcaggagtcatgtctccaagggctccaccactggcaacatctatcatacttctctccatatttctgagtccttcataaaaatattggagatgaagctgctccgaaatctgatggtgagggcaactggcacatagtttcttaaatcgctcccagtactcatacaggctctctccactaagttgtctaatacctgagatatctttcctgatggttgtggtcctcggaagcagggaaattttttctaagaatactctcttaaggtcatcccagctcgtgatggaccttggagca

SEQ ID NO: 2492 - DNA, 331 bp, Glycine max
  unsure at all n locations
agcttgtatggtctanaacanaccccaagacaatggtacaagaagtttgaaagctttatgcacaacgaaagtttctagaagtgcaacgccgatcanttgtgtttctttaagagatataaatctagttatattattttgctactttatgtcgatgttatattagtagttggatcagacatggatgaaattaanaacttaaagatgcggctataaaaaaaaattgacatgaagcacttagatctagcaaagaagatccttggtatgcaaatcacgaaagataagtaaatagggattttgcagttatctcaggtaaagtacatcaatcgtgttt

SEQ ID NO: 2493 - DNA, 228 bp, Glycine max
gcgtctcgagatctgatgcgcctgagtcgaacgtccgagtgagaagaggtgaccatccaaatttgtcgagagagtacggtgctcaatgtcaagcgtactgatatattatgtgcctgaatcggacatgcccgcgaagaggcatgaccatttgaagttctcgagagcctacgctgtccaatgaacaacgtccgcacctgtgattgacctgaatcggtcctcgagcgcgtg

SEQ ID NO: 2494 - DNA, 428 bp, Glycine max
  unsure at all n locations
agctnggcttcattcctgccccacttctaatacttttatcattntctaaaggtttaattgcattttaagaaaattatgtgacaatttaaaagtaggagacaaaaaattgcggataagaatagattagatcatccgttaggtatctatggtctcaccaataataagcttatgttatatcatacttctttagaaaataaataggttaagaccttttaaaagtctatttagttaaaaaaaattggactctatcacttaaaaaatcttttagacataatagatcaatcttagtgttattattatattaaatttgttatgatatattgaatacttgtttatcggaaacatttgtttcaagacatcttttanttgcgaaaatgtaagagtgagaattattattntcatatcttttagaaggttatgacaatata

SEQ ID NO: 2495 - DNA, 440 bp, Glycine max
  unsure at all n locations
ctcagcttcacattcaacttcgagcgtctcgctatattatacgactcaattagacatccgagtataaagatattgtcggttgaattntctcagagcttcaacattcaatttcgagcgtctcaatatatgacgggactcaatcagacatccgagtgaaaagatattgtcgtcttaattggctcagagcttctacattcaatttctagcgtntcgatatatgaccggactcaatcaggcatccgtgtaaaaagatattgtcgtttgagttggctcagagcttcaacattcaatttcaagcgtctcgatatattacgggactcaatcaggcatccgatgtaaaagttattgtcgtttgaattggctgagagcttcaacattcaatttcgagcgtctcgatatatgaccggactcaatcagacatccgagtanaaagatattgt

SEQ ID NO: 2496 - DNA, 406 bp, Glycine max
  unsure at all n locations
agctntgagcaaattcaaacaacaataacgttntactcggatgtctgattgagtcctgtaatatatggagacgctcgaaattgaatgttgaagctctgagcaaattcaaacgacaataactctttactcggatgtctaattgagtcctataatataacgagacgctcgaagttgaatgttgaagctttgagcaaattcaaacgacaataactttttactcggatgtctgattgagtcccgcaatatatcaacacgctcgaaattgaatgttgaagctctgagcaaatncaaacgaacatatatctntaatcggatgtctgattgagtcctataatatatcgagacgctagaggttgaatgttgaagctctgagcaaattcanacgacaataactttcactcggatg

SEQ ID NO: 2497 - DNA, 412 bp, Glycine max
  unsure at all n locations
cttaaaggatatgttgactaggaaacccaagtacattcaccaggaaaatattggtgtggaaggaaattatagtgctgtgattcaaaagatccttccacccaagcataaagaccttgggagtgtaaccattccttgcttaattggagaagtcactatgggaaaggctcttattgacctaggagccagtattaatttaatgccattcttcatgtgcagaanggtgggagaagtggagatcatgcccactacgatgactttacaacttgctgaccgctccattaccagaccatatggagtaattgaagatgtgctggtcagagtaaaacattttatcttgccgacagactttgtggtaatggatatatgtgaagataatgacattcctgtaatttgggaaggccatcatgtaact

SEQ ID NO: 2498 - DNA, 305 bp, Glycine max
  unsure at all n locations
agcttgtagcatttgtcctttatgtgtcccaacatgtcacagtgagcacanttgggtctttctttcttgatgtatttccctttattgatatcacattggttctttgatgcagaattaacagaaaatactatattttctaaagtattggtgggtgggtgagtaaacaacaatctcctttgagcttcttcttgaaggattagggagaaaacattaccaattgaaggcaaaggatcagagatcaggatctgacctcgtatttgagagaaagaatcattcaaacccatcaagaatgacattacatactc

SEQ ID NO: 2499 - DNA, 413 bp, Glycine max
ttatctaatcattccaatccactcaaatcatacaattgcttattcaaatcattctcaaacattcatttcatgcaaaacaatccactgcatatcattttcaatcaattcactattcaaacacgctttatgtacaagcaaacaactcaaagtgctgaaatttaaataactgaaattaaaataactgaaatatgacaacgaaatcagctggaaatataaggtgtttaaccttcaccaaaacatcttcaatgactccatatggccttgtgatggagcggtcaactaactggagggtcatgcgtgtgggcattatctctatctctccaagtcgctggcacatggaaagaggcattaaatcgatactagcttccaagtctatgagagctttgcctacaacaacctcaccaatataacac

SEQ ID NO: 2500 - DNA, 445 bp, Glycine max
  unsure at all n locations
ttgagcatantcaaacgacaataactctctactcggatgtctgattgagtcctgtaatatatcgagacgctcgacatggaataccgaagctctgagcaaatttaaacgacaataacctttttactcggatgtctgatcgagtcccgaaatatatcgagatgctagaaatcgaatgtcgaagctctgatcaaattcaaacgacaataactttttactcggatgtccgattgactctcgtaatatatccagacgctcgaaatgcaatatcgaacctccgaccgattccaacaataataactttttactcggatgtccgattgagtcccgcaataatccgaacgctcgatattgaatgttgaagctttgagcaaatccatacgacaataactttctactcggatgcctgatcgagtcccgaatatatcgagacgctcgaaatggaata

SEQ ID NO: 2501 - DNA, 288 bp, Glycine max
  unsure at all n locations
agcttctacattcaatttcgagctcttcgatatattactgtactcaatcggacatccgagtaaaaagttattgtagttcgaatctgctcanggcttcggtattccatttcgagcgtctcgatatattacgggactcaatcggacatcagagtataaaggtattgttgtttgaatctgctcagagcttcggtattccatttctagcatctcgatatattacggcactcaatcagacatccgagtaaaaagttattgcagtttcaatatgctcacggcttcggtattcca

SEQ ID NO: 2502 - DNA, 373 bp, Glycine max
  unsure at all n locations
acctttagaaatttgaatctaaatttcacagtctataatcgactacagagtgtatataattgattaccagagttaaaattcaaatctcaaatatgaagagtcacaactctttagaaaacaactgtgtaatcgattacaccattctggtaatcgattactagtgaggaattttcgaaaataactcccaacagtcacatattntcaaatgtttttgaatggccatcaaaggcctatatatatgtgacttgtgacacgaatttctagagagagtttttctgaactgagatgtcttatcctctcaaagagattcctaggtcaaacacttgcatattcaataaggaatcttgattgattttaattgaatatccttctc

SEQ ID NO: 2503 - DNA, 423 bp, Glycine max
  unsure at all n locations
aatctgtacctatcacgagagtctgtggtttatgctnctctaccgaccaccatatagacctttgcccttctatgcaacaatctggagcaattaagcagcctgaagcttatgctacaaacatttacaatagacctnctcaacctcagctgcaaaatcaaccacagcagaacaattatgacctctccagcaacagatacaatcccggatggaggaatcacccaaatttcagatggtctagccctcaacaacaacaacagcctgctctttcctttcaaaatggtgctggtccaagtaggccatacgttcctnctccaatgcaacaacaacaaccacagtagcaacaacaatagagacaacaatcaactgagacccttctcaaccttncttagaggaagtagtaaggcaaatgacaatacagaatat

SEQ ID NO: 2504 - DNA, 496 bp, Glycine max
  unsure at all n locations
ttatcaatatatgggtctaacacanataattaaagggtttaaattgattatttctagagaagtagatgatttccctgaacacaatttttatttgataggtaatatgataaaattactgcgaaagttacgaacttagaaatgaagagtaatttgaagaaataactttatatctttgtgtactgactccaactgaattgtttggatgaaagaaatcattttatctactaatcatagacaaattggagtattaccaaatgatgcacgtattgccaatgtcgtagatataggtactttgagaatgtcttcttaaacaccaatggctctgatgggcagttttactagagaattttgtaaagttcaaacctttgaaactgattgaagaaggtaagagttcccagaaggtggagaatgcaagatcttgaagacaattagaatcgttatttacgaacaaatgtgggagctttgaggtgtgtgactgtgaatgacttgcacacat

SEQ ID NO: 2505 - DNA, 438 bp, Glycine max
  unsure at all n locations
agcttctaaactntgtacaagaatgaagctctgataccacttgttagacaagtggcctcagatatcttaagaagggggggttgaattaagatattccaaactgtttcccctaattaaaaatctatttcactntntactcaagttatgaattcccttaatgacaatcttcttaaatattaattcaaatgaagcaacttgaatatgaatataaagcaataataaataaaggagattaagggaagagaaaatgcaaactcagttttatactggttcggccacacccttgtgcctacgtccagtccccaagcaacccgcttgagagttccactatcttgtaaattccttttacaagttctaaacacacaaggacattccttcctttgtgntagagatcctttacaacaagagactcacagtctcttaatcccttagagaatg

SEQ ID NO: 2506 - DNA, 382 bp, Glycine max
  unsure at all n locations
agctnntggctttntcccagtcattgattcataacttgtccctgatgtaagctccattggagcttgtaggcctatgatcttcttcatcaatggattcctttgcttctcggaagatgaatggaagcggatgagtctagaagatgctcaccaccataggtggccatggataagagcttggaggaagaatgagatgaatgaagggagaggaagagaagagcatgannatttgtgctctaaaagagctctgaaatctgaagtttaatattcaaatgatcatagtttaaaaaatgcacacacatgacctctatttatagcctaagtgtcacacaaaattggagggaaattcgaatatcaattcanatttcacttgaatttgaaattg

SEQ ID NO: 2507 - DNA, 472 bp, Glycine max
  unsure at all n locations
ntattcaagacanagcaattaaagatattcaagatggatgatcaagacagtctatagagtcttagaaagggtatattaaataggaagggaattccaattgaagtagcaaaaggtttggccaagaattttaagttaaaaagtcttttacaagaaatttactctctggtaatcgattaccagaggatgtaatcgattaccagtagccaaaactgatttacaaacagctattaaaatttgaattcaaaatttgccctgtgtaatcgattaccatatatggtaattcanattntaaagcttgtaatcgattacacatatactgtaatcgattaccagagcagattttcagaanatattctcaactgtcacatctttttatgtggttcttgaatggctatcanaggcctatatatatgtgacttgagacacgaatttgctaagagtttttcagaacaaaaaggtcttatcctcttat

SEQ ID NO: 2508 - DNA, 511 bp, Glycine max
  unsure at all n locations
ngctntangaataagcttaagagacatcattattntgatagaattcaaattcacatgtccaagcctagcatgccacacatcanaacattcaacatttgcaacaagagaagaaatgctagatattctattaatagaaagaggcataagacttaacttaaacaaaccatcacaaatgtagcctttaccaataaaaacaccatgtctagtaataacaactctattggactaaaaaacaaccttgtatccttgttagactaacaaagaagtacttattaaaantttcctaatatcagaaacatgatagacttcatctaaaacaagaaaattccctagagatagctctagcttcacttgaccttctcctaacacatgtgtcatactcttattccccatgttcacagtacgcgtgcttgattctngatataaagaaaaatattttttttatcaacacacatatgataattagccccgagatctataaaccaatcatttgagttaaaacacaattaac

SEQ ID NO: 2509 - DNA, 437 bp, Glycine max
  unsure at all n locations
tactcagcttccaaccacgacgacggcgcgaagctcggcgaggacttcaaggttgtgaccgtcgacgacccgccggaanattgccttcacttctcggtgctctcggaggcgaacgagagcgacgcgccggaggttgatatccaacccgacgacgcggtggcgatgccgttctcttncggcacgacgggtttacctaaaggagtggttctcacgcacaagagtttaacaaccagtgtggcgcaacaagttgacggagagaaccctaacctctacctcaccaccgaggacgtgctcctatgcgtgcttncgttgtttcacatattctccctcaacagtgtgctnttgtgcgcgcttanggccgggagtgcggttttgttgatgcagaagttcgagattgggacgctgttggagctcatacagcggcaccgcgtgtcggt

SEQ ID NO: 2510 - DNA, 349 bp, Glycine max
  unsure at all n locations
tatgttcacctgctgcatttagatcaaaattcanaatcttcaatgctcaataggctttgtgccccaactcaataggtaagtgacaagntttgccatagataaattggaagggagtcagtcctataggagtattgtatgcacacgtagctttatctaatttttgagactagtccttccttgactgagcaactattttctccagaatcttcttgacttccctattagaaactttagctcgcccaatggtctaaggatggtaaggtgaggctaccttgtgtctaacactatagtgttggagaactttcttgagttggaatgtatagatatgagatcctctatcacttataaa

SEQ ID NO: 2511 - DNA, 427 bp, Glycine max
  unsure at all n locations
agctnntgaagtagatattatttattattataatacatgcttatctattngttaagtatgtnttgtagttagttaattgagacttgngggtgtatatcagtgttttatacttactactttgatttggttagtgtgtgtatattacatagagtttatattttattaattaattgacactaaagatgttatagttttgctatgatatgaatttgaaaattattcgagtcgatgtatatgtatatgggttgggtcttgtaaacattgctacgaatgtataatatgatatatgagaataagtgaagtatgcgatgaattgtgagctatgaactgtgtagtcacacaactataatactctttaagggcgacgagttcatgcgcaatgagttttgtgatgggcttcactatgggaactcgacgagttaatcac

SEQ ID NO: 2512 - DNA, 395 bp, Glycine max
  unsure at all n locations
tgcaagcttctctgaccaatatgatagatcaagataacagcagtagcggctgcaacaggagctgaatatgcaacagcaatccaaggacgcatacccaaacgaaaactaagttcccactcacgcgccatgtagcaagctacaccaagtaagaagtgtagaacaattagttcataaggaccgccgttgtataaccattcatcaacagatgccgccttccaaataggataaaagtgcaaacctatagccgcagaagtaggaataatggcaccagagatgatattgtntccataaagtagagatccagagacacgctcacgaataccatcaatatctactggaggggcagcaataaaagcgataataaatacagaagttgcggccaataaagtatgaat

SEQ ID NO: 2513 - DNA, 289 bp, Glycine max
  unsure at all n locations
agcttggatttccttgtagtagggaatctattcttctaagatggagccaaacccagtcaccctcattaagaactagctcttttcttcctctattgcctttagttgaatacaccttttgttggctctctatttgggtcttaaccctctcatgcatcttctttacaaattctgacctaagattcccttctttatgtataaaaaaagtgtccagtgggaggggaatgaggtctaacggtgtgaggtgatngaacccatagaccaacctcaaaggggacttgttggtggtttc

SEQ ID NO: 2514 - DNA, 332 bp, Glycine max
  unsure at all n locations
agctntacgggtatacagaacaacatataaagccctcatatgacttatctctttnccagnnggcctatggaaaatcttgtcacctacctattgagttggaacataaagctctttgggctttaaaatttacgaacttcaactcagatacaactggtgaacataggaagctccaactctatgaattggaggaactgatggttcaagcttctgagaattccaagctttataagcaaaaattaaaaatctatcatgacaaaaagctatcaaaaagaaattttcagcctagtcaacaactattgttatttaattctcgattaagattgtttccaggt

SEQ ID NO: 2515 - DNA, 408 bp, Glycine max
  unsure at all n locations
caagcttgaatgctctattcaatggagttgactagataatcttcagactgatcaacacatgcacagtggccaaggatgcatgggagatcctganaaccactcatgaaggaacctccaaagtgaagatgtccagattgcaactattggccacaaaattcgaaaatctgaagatgaaggaggaagaatgtattcatgacttccacatgaacattcttgaaattgccaatgcttgcactgccttgngagagaggatgacagatgaaaagctggtgagaaagatcctcagatccttgcctaagagatttgacatgaaagtcactgcaatagaggaggcccaagacatttgcaacttgagagtggatgaactcattggttcccttcanacctttgagctaggactctcggata

SEQ ID NO: 2516 - DNA, 135 bp, Glycine max
  unsure at all n locations
agcttggagtttccaagtgccaatnncgcctcttcntattccagtcttcttctggcttcaattcatcagtgggctttccttctgtgtccagcatcttgggatgatcccagcctttgatgacaggtttccatgttc

SEQ ID NO: 2517 - DNA, 409 bp, Glycine max
  unsure at all n locations
agcttgagggtaaagtctcacgattgtcacgtttcatgcaataattgttagccgtggctatacgagacatcttgccaaacaaagtcaggttaacgataactcgcctgtgctttttcttccattctatatgtagcacagtcattaatccagtcatgtttgatgagttgggaaatgaggccgcaattatactgtgctagttggagatgtattttccccctgctttctttgacatcatgattcacttggttgtgcatctggtcagagaaatcaaatgttgtggtcctgtttatctacggtggatgtacccggttgagcgatacatgaagatcttaanagggtatacaaagaatctatatcgtccagaagcatctattgttgagaggtacattgcagaagaaccattgaattt

SEQ ID NO: 2518 - DNA, 430 bp, Glycine max
  unsure at all n locations
agcttgccgccacggangtttccgactatgctcttgtgtggttgatcaagctacaaaaggagagagcaagagatgaagagccaatggttgatacatggacagagatgaaaaagatcatgaggaagcggtatgtgccggctagttactcaagggacttgaaatttaagctccaaaaactaacccaaggcaacaagggggttgaggagtatttcaaggaaatggatgtgctcatgattcaagcaaatattgaagaagatgaggaggtaactatggctcgatttcttaatggtttgactaatgatatccgtgatattgttgagctgcaggagtttgttgaaatggatgatttgcttcacaaagcaatccaagtggagcaacaattaanaaggaagggagtggctaagaggagttttaccaactttgattcttt

SEQ ID NO: 2519 - DNA, 317 bp, Glycine max
  unsure at all n locations
gctggaatcatntatctatctccgacagccattgtgtgagtcccgtctaggcagtctcagagaagaccgtgctcacagcgataaaaaatgagaaggaggagctgattactactcgggtggagaacagttggagagtctgcattgactataggaggctgaaccaggttaccaaaaaggaccatntccccttgccattcattgaccagatgcttgaacgcctgggcaggcaaatctcactactgtttccttgatggtncttctggttatatgccaaatactattgctcttgaggatcaggaaaagaccacattcacctg

SEQ ID NO: 2520 - DNA, 388 bp, Glycine max
  unsure at all n locations
gtctcacaatngtcacgtgcttatgcttcaattgntagccgtggctatacgagacatcttgccaaacaaagtcaggttagcgataactcgcctatngcttttcttccatgctatatgtagcaaagtcattgatccagccaagtttgatgacgtggaaaatgagggcgtaattatattgtgcctgttggagatgtatttcccctcctgctttctttgacatcatgattcactcgattgtgcatctggtcagagaaatcaaatgttgtggtcttgttatctacggcggatgtacccagtagagcgatacataaagatcttcaaggggtctacaaagaatatatatcgtctagaagcatctattatagagaggtacattgcagaagaagcc

SEQ ID NO: 2521 - DNA, 382 bp, Glycine max
  unsure at all n locations
agcttcttgtcaattcctcagcaataattaaatagggtatccacttctaatagcatcctccagtatgttgataagatcccttgcattggttatctttgttgcaactaacagcaactgcataacataccatgtanagttataattaaatatgaaggatgttaaaaaataataacaagttacagggaaaacagacaaatgtcacaccttacagttctcatatccaacgcgcatcttctcactgtcagtaacaaagtatggagaaatataaccacggtcaaattgcatcccctcgacaacatatagactgttatcagcactcttaccntcctcaagggtcacaacaccctttctaccaactctgctcaatgcttcagctatcata

SEQ ID NO: 2522 - DNA, 388 bp, Glycine max
  unsure at all n locations
acaacacttctcatggcacgagtgtcaacatgcactntataaaataatcatattggggtcgtgcctatttatgacacatacgtatttgcacacataaaaattttgtgtgaagcattttacgacacctatccatgtacatattttttgacanaccttttcatgctacatcctatatatatacacacacatctttttggaaggcttcttttgttacctactcacaaatacacatnatttgaaaaacacttttacgctacccatccaacactttgtangcacttcatgcatatatattcacatatgcaaggcatntattcaactntctgcaaggcatttatttcaccatttgcacggcatttcatgctatatatatttacatatatacata

SEQ ID NO: 2523 - DNA, 398 bp, Glycine max
  unsure at all n locations
agctntaagagaagttgcaagagaaaagacttattctctcaatgtggttgaaactggactcattgtatatgacaaagtcccttgcaaatcggctatgcttgaagcaacaactgcaccttcaagatagcagagtcaagaacagccactgaacaattggctgatttcaacaagattcttaatganttggaaaatattgaagtaaagcttgaagaagaggataaagctctcttgcttctgaattccttaccaaaatcctttgaacatttcaaggatgcaattctttatggcaaagatcaagacattaccctagaagaagtccagacctcaataaggaccaaggagatgcaaaaacggcaagactccaaatctgaggataatggtgaaagcctgaatatttc

SEQ ID NO: 2524 - DNA, 387 bp, Glycine max
  unsure at all n locations
caataacttctgaatcggatgtccgattgtttccttttgatatcgagacgctcgtaattgaaaacggaagctctaaganaagtcaaacgacaataacttctaacttggatgtccgattgcgccctgtaatatatcgagacgcttgaaattgaaaactgaagctctaagaaaagtcaaacgacaataacttttaactcggatgtcctattgagccccgtcagatatcgagacgctcgaaattgaaaacggaagctctaagaaaagttcaactacaataactcttaactcggatgttcgattgagtcctcgtatatatcgagacgctcgtaattgaaaactgaagctctgagcaaatcaaacgacaataacttctgactccgatgtccg

SEQ ID NO: 2525 - DNA, 335 bp, Glycine max
  unsure at all n locations
attcctcacaaaaacactattcccaagaaaaagtcctattgatccatgatcacgtgtgtaatctttgattcgataggaaatgacttgcagaatccagtcatgacatatccatggttcggaattaggatgaaacacttacctgtgtgagagtgatacactttgagtgattctctcttattttgttggacccaatgtttcctctacatggtcggttagaaacgaaacgctaacatccaaaatctcatttatggttatgtgaaaatntcatcagcatactctcctttccaataacacattgttttcatcaacaatatatgttgtttgatcagtagagg

SEQ ID NO: 2526 - DNA, 298 bp, Glycine max
  unsure at all n locations
agctngaaggtttgtacatgacctaatctttagttaatcgncnnnacctaaagcagtctttgtattcgtttataatgcatgaagatagatcagtcggagaacaattggatttgtttaataaactgattctagatcttgaaaatatcgatgtcactattgatgatgaggatcaaactctgttattgttgtgctctttgcctaagagttactctcatttcaaagagactttattgtttggaagaaactctgtttctcttgatgaagagcacgctgctctgaattcaaaggaattgaatga

SEQ ID NO: 2527 - DNA, 461 bp, Glycine max
  unsure at all n locations
agcttgaaattgaacaaaggaagctctcgagaaattcaaatggtcataacttatcacacggaagtccgattcaagagcatactatgtgaagatgctcgaaattgaacaacgaaagctctcgagaaattcaaatggtcataacttgccacacggaagtccgattcagacgcataatataccgagacgctcgaaattgaacaatgaaagctctcaacaaattcaaatggtcaaaacttgtgacacagaagtccgattcaggcgcataatatatcgagaagcttgaaattgaacaacggaggctctcgagaaattcanatggtcataaagtgtcacacggaagtccgattccgggggatagtatatcgagaaggtcaaaattgaacaacggaagctctcgagaaattcanatggtcataacttttaaacggtagtccgattaaggtgcataataaatcgagaag

SEQ ID NO: 2528 - DNA, 450 bp, Glycine max
actaagcttcaagaaaagatggcctcagcaaattcctcgtttccttaatgttaatttataaatagacctccaatctctaatggagagggttaccactactggacaacccgaatgcaaatatttattgaggcaatagatctaaatatctgggaagccatctgaatatggccttatatacccaccacagtagaaagagttgcaatagatgagagcttatcaagtgaaagcataaccatagcaaaacctatagatagatggtctgaagaggatagaaaacatgtacaatacaaccgtaaagccagaaacatagtaacatctgccctaggaatggacgaatatttcagagtctcaaattgcacgagtgctcaagaaatgtgggacactcttcagatatcacatgaaggaactacagatggtccaagacctacgataaatgcactaactcatgag

SEQ ID NO: 2529 - DNA, 289 bp, Glycine max
tctatcatatctaataattggcacatttatgtctaattgcccttttacttcattgtagtaaatttctaaggcatccattgcctaagaaatctcgggcagtaagtagacataactgtaacgtgaataatcatcaataatggtgataaagtatcattgctttctgagagaactaacatcaaaaggtccacaaatatcagtatacacaatttcaagaagctgagtgcttctctgagctccttcctttgcatgtcttgtctgctttcctctaatacaacgcacacaaatattt

SEQ ID NO: 2530 - DNA, 431 bp, Glycine max
  unsure at all n locations
attgaagctgacaggatcaacaatggttggttgaattatctccttagctgggaagacaccccatgtcacagcattaacatcagtttgacccacattagatntccagctcccgtctttattcacagccatataagttaaagatgttcgatccttgcatttatcaacaagtgcatccagcttttccttagagcagaagaactctacatatgccttctggtaaacatacccgcctggtccaccccagcctaggccaaatttcaaacaaaaatgaattagtgtatctcatatccaccaaccaatatggacaagatatgaataccctcagtcacaaattgcacccttttgagtacctttcaatcttcattatttgttntacaagaaaatatnagtaatataaagtggtacagccacacatctcactcaatactagt

SEQ ID NO: 2531 - DNA, 385 bp, Glycine max
acgcatcttaagcacctgcagctgcagcttcacttcccctatatggatggttgatcgttatatagatttgtacgcgtccagtctagtctctctaagccctgaaaccgtaactatggctatgttctgagattcgtcttttctgttgttcaaagatctctccgattccttttctttcgaagtggcattgcccaaagtcgaatcaaaggcttgacagggtcttcttagcccatgctaactagaatagttagtagcttataggatcccaaagcaataaccacagatggaggagcattcgtctttttaaccagttttcaaaaaccaagatatcctgcctatcccgaaaaacggactccctcaaaacaaaaagtagcttcatagcaagagt

SEQ ID NO: 2532 - DNA, 201 bp, Glycine max
ctggaagatgacatgcctttccatagactacccaataaggagacattcctatgggtgctttgtatgcagtccgatgtgcccagagagcatcatcaagcctggtactccaatctttcctgcttggctgcacaatcttctctaaaattctcttgatttcccggttagaaatttctgcctgcccattggtctgggggtggtatg

SEQ ID NO: 2533 - DNA, 426 bp, Glycine max
gctgtagggttaagtctcacgattgtcatgtgctcatgcaacaattgttagccgttgctatacgagacatcttgccaaacaaagtcaggttagccataactcgtatgtgctttttcttccatgctatatgtagcaaagtcattgatcctgtcatgtttgatgagctggaaaatgaggccgcaattatactgtgtcagttggagatgtattttccccctgctttctttgacatcatgattcacttgattgtgcatctggtcaaaaaaatcaaatgttgtggtcctgtttatctacggtggatgtacccggttgagcgatacatgaagatcttaaaagggtatacaaagaatctatatcgttcacaagaatctattgttgagaggtacattgcagaagaagccattgaaatatgttcataatacattg

SEQ ID NO: 2534 - DNA, 364 bp, Glycine max
attatttgtatgggttgaatgttgaattctggttgttcctggtgcggagatgatggtacagccggtgaaccagaagctgcagtttcttttggtgaggtagccatggaaaaacagagcgtttggaacgatttcgtaaatctcggaaaactattgggaaatgctggtaaaaacacgaatgccaagcagatataaatttgaatgaagaatgtagagaggcgtgtgaagcaacggtcgaatttgctttgtggtgaacgtgctattaatgttaagtgattcgtttgggcacgttcagattgcagtagctgctataattcctctagcagacaaatgcccagcttgcccctcagtttttcaaactgatttg

SEQ ID NO: 2535 - DNA, 415 bp, Glycine max
  unsure at all n locations
agcttanggtttatggatacttcactaatattagggtttacgagtttacgatttatgggttattgagtatttaaggtttagggtttatggtatttgacaaattatgattttttgttacatcccaaattaccaaataagggtatttgactagtaagggtttacggatacttgacaaattacggttacttgactaagtaaggtttacgggtatttgaaaaaattaggggtttatggttaattgacaaatcggggcttatgtgtatttaactaattacggttacttgaccaattaaggcgttagggttactttacaaatactgngttaggggtatttgactaataacggttaatgggtagttgagtaattatggtttattgttacttgaccaattaacgcttaggattatttgactaa

SEQ ID NO: 2536 - DNA, 391 bp, Glycine max
  unsure at all n locations
cctatagaaggttcgttcctaatttctctacaattgcatcacctctcaatgagctggtgaagaagaatgtggcatttacctgtggtgaaaaacaagagcaagcctttgctttgctcaaagaaaagcttactaaggcacctattctagctcttcctgacttttctaaaacttttgagctagaatgtgatgcctctagagtgggagttggagttgtattgttacaaggtgggcaccctattgcttattttagtgaaaaacttcatagtgccacccttaacaggggggttcatagaactaccaagaagtccccttttgaggttgtctatgggttcaatcccttaacaccgttagacctcanttccctccactagacacttctttatacataaag

SEQ ID NO: 2537 - DNA, 297 bp, Glycine max
tttcgagcatctcgatatatgacaggactcaatcagacatccgagttaaaagttattggcgtctgaattggctcagagcttcaacattcaatttcgagcgtctcgatatatgacgggactcaatcagacatccgagtaaaaagctattgtcgcttgaatttgctcagagcttcaacattcaatttcgagcgtctccatatgtgaccggactcaatcagacatccgagtaaaaagatattgtcgtttgaatttgctcaaagcatcaacattcaatttcgagcgtctcgatatattacg

SEQ ID NO: 2538 - DNA, 366 bp, Glycine max
  unsure at all n locations
gcttgagcaaattcaaacgacaataaccttttactcggatgtcntgatgagtcccgtaatatatcgagacgctcgaaattgaatgttgaagctcttagtcaattcatacgacacataacttttactcggatgtctgattgagtcccgtcatatattgagacgcttgaaattgaatgttgaagctctgagccaattcaaacgacaataactttttacttggatgtctgattgagtgccgtacatatcgagacgctcgacattgaatgttgaagctctgagccaattcatacgacaataaccttttacttggatgtctgatcgagttccgtaacattttgagctcttcgaattgaatggtgaagcttt

SEQ ID NO: 2539 - DNA, 362 bp, Glycine max
  unsure at all n locations
cgcttctacatctttggcaaggcatgtcatcttcctgtatagagcacanagcctactgngctgtaaagacttgcaacttctctatggaccaagctagagaagaaaggaagttgcaactaagtgagctagatgagatccgtttagaagcctatgagaattccaaattctacaaggagaagacaaggaagttccatgacagattcatagctaagaaggactctgtggttggacaaaaagttntattgtataactctatgctcggactcatgagtggtaagttaaggtcaaagtggattggtccttttgtggtgactaatgtttttccttatggtacagctgagatcaaaagtgaatccacagat

SEQ ID NO: 2540 - DNA, 482 bp, Glycine max
  unsure at all n locations
agcttcaagaattatggcctcatcaaactacttgtttcccgagggaaattctataaatagacctcccatctttaatggagtgggttaccactactggaaaacccgcatgcaaatctttatagaggcaatagatttaaatatttgggaagccatagaacaaggaccttatgttccctctataatagctggaagtgcaacaatagaaaaacctagagcagattggactgaggaagaaagaagattagtacaatataatttaaaggccaaaaatattattacatctgccttaggaatagatgaatactttagggtttcaaattgtaaaagtgctaaggatatgtgggatacactacaagtaacacatgaaggcacaacagatgttaaaagatctaggataaacactntaactcgtgaatatgaactttntaggatgaatgtaaatgaaagtatacaagacatgcanaagaggttcacacacatag

SEQ ID NO: 2541 - DNA, 387 bp, Glycine max
  unsure at all n locations
tcaatcacaactatngcgggctcctctaccatctctntatcccaattccagtccttggattcatcaactaccacatgtgtactcacgagcacttctttggttactggattaaacaatttgtaaccaccagtggcatgataacccagcagtatcattatctgacttatgctatctaacttctttctcaactgatcaggcacatgtttataacaaatanagccaaaatttttaaaatgactaaccactggtttgtgtncaaaccatgcttcttcaagtgtgatgttattgagcctttattgtgggctctcatttatcacatacactgcactggagatagcctctgcccatagaaaatttggcagcttctttccattaagcatgcatctg

SEQ ID NO: 2542 - DNA, 467 bp, Glycine max
  unsure at all n locations
cttgtctcatcaatcgactcaaccctttgccaccatcaagaacaagaatggtgctatgagatcctcttgcctaagtcccctttgaatattaaattctttactcgaactaccattcacaaggatggatattgatgcgaattcaactcctcatataatccacccaatctatttctcacaaaaacccaacctcttcatcatataatataaaaactctcaattagtcgattcatatgctttttcacaatcaactttaaataacaaacaatcttttttcctcctccttacatcattcaccacttcatttgcaacgagaaccccatcaagcaaanttcttcttcccataaaagcacattgcctttcatcaataacctgtcctaacactatttttagccttgtagctaacaatnttgagattaccttatacaagcaacctatcaaggaaatatccaaaagccttgaggattcac

SEQ ID NO: 2543 - DNA, 314 bp, Glycine max
  unsure at all n locations
ntgagccaattaagacgacaatatctttntactcggatgactgattgagtcccgtcatatatcgagacgctcgaaattgaatgttgatgctctgagccaattcaaacgacaataatattttactcggatgtttgattgagtcccgtaatatatcgagacgctcgaaattgaatgttgatgctctgagcacattcaaacgacaataactctttactccgatgtctgattgagtcccgtcacatatcgagacgctcgaaattgaatgttgaagctctcagccaattcaaacgacaacaactttctactcggatgtc

SEQ ID NO: 2544 - DNA, 332 bp, Glycine max
  unsure at all n locations
agcttcaacattcaatttcgagcatctcgatatgttacgggactgaatcacacatccgagtaaaaagatattgtcgtttgaatttgctcagagcatcaacattcaatttcgagcatctcgatacgtgacgggactgaatcagacattcgagtaaaaagttattgtcgtttgaatttgctcagagcatgaacattcaatntcgagcgtctcgatatattacgggactcaatcaaacatccgagtaaaagatattgtcgtntgaatttgctcacagcatcaacattcaatttcgagcgtctagatatgtgacgggactgaatcagacatccgag

SEQ ID NO: 2545 - DNA, 476 bp, Glycine max
  unsure at all n locations
agccttgacacgggtattcatgtttcatctaggccctttgagtgtgtgcattcaaatntatggggactatctagagtgaaaactcatggtggaagctcatactttctcaccatcatagatgatttctcaagaaaagtatggttgtatggtttgaaaaataagtcagaagcttttcaaaaattcagagaatgacatactcttgttggaaatcaacttggtacaaaattaaaagctttaaagactgacaatggcctgtagtntgtttcacagcagttcaatgagttttgcacgaaaataggcatcaaaaggcacaaaacagttcctcacacaccacaacagaatggtttagtagaaagcatgaataggaccattttggaaagagttagatgcatgctactaagtgcacgactgccaaagaacctttggggagaagctgcanatacaacagcatatttgattaatagatgtccttcatc

SEQ ID NO: 2546 - DNA, 297 bp, Glycine max
  unsure at all n locations
ctatacgagacatcttgcctaacaaagtcaggttcacgataactcgcctgtgctttctcttccatgctatatgtagcaaagtgattgatccactaatgtttgatgagttggaaaatgaggccgcaattatactgtgccagttggagatgtattttcccccttacttttttgacatcatgattcacttgattgtgcatttggtcacagaaatcaaatggtgtggtcctgnttatctacagaggatgtacccggctgagcgatacatgaagatcttaatagggatacaaaaatctatat

SEQ ID NO: 2547 - DNA, 428 bp, Glycine max
  unsure at all n locations
agcttagcatcattagttctaatgggcatgacttccacccattntgaaacataatcaactgctaggagaatgttaacataaccaaaagagacaggaaaatggcccatgaaatctatgccccagacatcaaacacctcatagaatagcataggttgctgaggcatttgttgtcgccatgtaagtgcacttcctgctctctgacactgctcacaagtgctacaaatcttccacacatctttaaagatggtgggccaataaaagccacagtcaagcactttgcgagctgtcctttgaacttccagtgcggaagaatggcanaactgcaggactgagtcagtctcatgatctgggatgcatcgtctaatgacctgatcactgcacaatttccacaagtaggcgtcatcccaaataaaatgcttagcatcact

SEQ ID NO: 2548 - DNA, 337 bp, Glycine max
  unsure at all n locations
gtcacctgccgcatgcaagctatggaagctcctgtcttagctttacccgattttactcaaccatnttatgttgaatgtgatgctagtggagttggcatcgtggctgttttgatacaaaacaaaaggcctatagcttatttctcggagaaattgggaggagccagattgaactattgcacctatgacaatgagttctatgccattgtgagagctcttgatcattggaatcattatttgcgttctaatcactctatatggcattcagatcaatagtcatagaagataataatgggcaccaaagttattccaagcttgctaatgggtgaattcttcaatc

SEQ ID NO: 2549 - DNA, 434 bp, Glycine max
  unsure at all n locations
agcttgtataanatatcatcaacacgagaacccttgtaggagtttgtgagcatgtctgccaattgatctttggagccgacaaaatcaatggtgatttctcctgagagtaccttctattgaacaaagtgaccatcaatctctatgtgtttaacctgctcatgaaagactgtgtttgaagcaatgtggagagcaacttcattttcacataatagtgtggtattctaaatgtctccaaattttatctattggagaagttgtgtaagccatgtgatctcgcatgcagcagctgccatgacacaatactcgacttcggcattggatcttacaacggttttctgctccttgcttctccatgagatcaagttccctccaataacgacataatatctagaagtagaccttctatctaatggtgatccttgccaatcagcatc

SEQ ID NO: 2550 - DNA, 346 bp, Glycine max
ttactcggatgtctgattgagtcccgtaatatatcgagacgctcgaagttgaatgttgaatctctgagccaattcatacgacaataactttttactcggatgtctgattgagttccgtaatatatcgagacgctcgaaattgaatgttgaacctctgagccaattctaacgacaataacattttactcggatgtctgattgagtctcgtaatatatcgagacgctcgacattgaatgttgaacctctgagcctattcaaacgacaataactgtttactcggatgtccgattgagtcgcgtaatatatctagacgctcgaaattgaatgttgaacctctgagccaac

SEQ ID NO: 2551 - DNA, 343 bp, Glycine max
  unsure at all n locations
agcttaaacattatactntgagcgtctcgatatattacgggactcaatcagacatccgagtaaaaagttattggcgtntgaattggctcagaggttcaaaattcaatttcgagcgtctcgatatatttcgggactcaatcagacatccgagtaaagagttattgtcgtttgagttggctcagaggttcaacattcaatttcgagcgtcccgatatattacgtcactgaatcagacatccgagtaaaaagttatngctcgttgaattggctctgagctccaacattcaatttcgagcgtctcgatatattactggactcaatcagacatccgagataaaaagta

SEQ ID NO: 2552 - DNA, 397 bp, Glycine max
  unsure at all n locations
catacgacaataactnnttactcggatgtctgattgagtcccgtaatatatcgagacgctcgaagttgaatgttgaatctttgagccaattcatacgacaataactttttactcggatgtctgattgagtcccgtaatatatcgagacgctcgaaattgaatgttgaagctatgagccaattctaacgataataactttttactcggatgtccgattgagtctcgtaatatatcgagacgctcgaaattgaatgttgaagctctgagcctattcaaacgacaataactttttactcggatgtctgattgagtgccgtaatatattgagacgctcgacattgaatgttgaacctctgagccaattcatacgacaataactctttactcggatgtctga

SEQ ID NO: 2553 - DNA, 240 bp, Glycine max
  unsure at all n locations
agcttaaacattatactntgagcgtctcgatatattacgggactcaatcagacatccgagtaaaaagttattggcgtatgaattggctcaaaggttcaaaattcaatttcgagcgtctcgatatatttcgggactcaatcagacatccgagtaaagagttattgtcgtttgagttggctcacaggttcaacattcaatttccagcgtcccgatatattacgtcactgaatcggacattcg

SEQ ID NO: 2554 - DNA, 393 bp, Glycine max
atctatgaacatcacacaataaaccccaatttgatactctaaggatccctacacatgttcattttaacccaaattgcaataaactcatcccttatctctaagcgggctcacgggtgcagctggcagggatatcaacgtctctagtggttccctaagatttctgaaatttttcctctgtttgctttgttagggtttccaagtgttagagagaaggagaagaaattggagcctccaattcactgtatatgttcaatgagaatttctccctccatagacattactttacaaatcccaacactagacatgtgtagagattagttccaaaggtggtgtccaaatttcactatgattcaacagttaacaaagcccgggatcgtagttttcttgggattg

SEQ ID NO: 2555 - DNA, 403 bp, Glycine max
  unsure at all n locations
tgccttggttaacctggttacctaactgactatgaatcaaaaatctgcacctgttgttagactctgtggtttatgctcctttgctgaccactacacagacctttgcccttctgtgcagcaatctgaagcaattgaacaacctgaagcttatgctgcaaacatctataatagacctcctcaacctcagcagcaaaatcagccacaacaaaacaattatgacctctccagcaacaggtacaagcccaggtggaggaatcatcccaaccttaatggtcgaatccttcacaacagcagcaacaacaacaacaaccttattttcaaaatgctgctggcccaagcagaccttacgnttcttcaccaatccagcaacaacaacaacaacaacaacaaccctagaaacaac

SEQ ID NO: 2556 - DNA, 433 bp, Glycine max
  unsure at all n locations
agctattaatttaaatgaaataatatgaatattttgacttaaaaaaaaggaagtctaatacagtatgcaatattagtatttgaatgtgaaaaaatgaaatgtggagccatgcatgtttaatggaaaatttaaaatgtactatcaaaatatatttacaactntaatttttattgtaattataatgtttgaaaatatatcttgtccctatattttacctcaattttggttttagtttagactttaaaaaacttgatttatttccttaatattagtgatagacgaagaaattaatcttacattataaatataatactcatatacataaatttgtggagacaatatttatactaattatagattttnttatattacattttagacaatgaaaacatacgtacatgcacacgaagcttgaacaaaatgagatcacttg

SEQ ID NO: 2557 - DNA, 386 bp, Glycine max
  unsure at all n locations
ctgagcanattcaaacgacaatancctttgactcggatgtcggattgagtcacgtaatatctcgagacactcggaattgaataccgaagctatgagcaaattcaatcgacaataaatctttactcggatgtccgattgagtcacgtaatatatcgagacgctcgaaattgaataccgaagctctgagcaaattcaaacgacaataactttttactcggatgtccgattgagtcccgtaatatatcgagacgctcgaaatggaataccgaagctctgagcaaattgaaacgacaataaatctttactcggatgtcggattgagtcacgtaatatgtcgagacgctcgaaattgaataccggagctctgagcaaattcacacgacaat

SEQ ID NO: 2558 - DNA, 391 bp, Glycine max
ctcgacccgggatccttaagcacctgcggctgcagcttaacattcaatttctagcgtctctatatatttcaagactcaatcagacattcgtgtaaagagttattgtcgtttgaagttgctcaaatcttcagtattcaatttcgagcatctggatatattacatgactcaatccgacatccgagttaaaagttattgtcgtttgactttgctcagaactttaacattcaatttcgagcgtctgtatatattacgggactcaatcacacatccgagtaaaaagttattgtccgtttgaatttgctgagagctctaacattcaattctgagcgtctcgatatgttacatgactcaatctgacatctcgagaaaaagttattgtcgttttaattt

SEQ ID NO: 2559 - DNA, 475 bp, Glycine max
  unsure at all n locations
agctntngtaaattagatggccatacctcttgtgccatagccaagtttcaatntctgtggtggactacatacacttctgatcactaatctgaatttcaattctaaatgttctgttggccgagagtggagattttaggacactcttcttgtctttatcaaaaactttcagcatgttgtccttcatctccattgtataacccttttcaagcaattgtccaaggctgagtaaattgcttttcatcttgggagcatacaagacatttgagatgcaggctttctttccatcttttctttgaatcatcacgctccctatcccttctgctgtaattgagctgtgatctgcgaatttcactatgcttttggaagtctcatcaagtgttgtgaaccactctcttctccctgacatatggttngagcaaccagtgtctaggtaccagaaaatagcacactgaagaatcatttttgtggaaccatc

SEQ ID NO: 2560 - DNA, 476 bp, Glycine max
  unsure at all n locations
agctngcactgcccaaagtggacaaccttccagaatacgttgaagccaccattgatgtcccttatgatgtcgttcagtatctcaaaaaagcctacgatgatttggaagaacccttgacctgttttctcaaatcttccaaagttgattggcatttctatgacccatatatgttacagttaccaaaaaggttcaaagagaaaaccaaatggtgtggaatagtaagccccggttgggcaccatagttgaaggtattgagccacaacgcagttggtggggttttgactcactctggttggacctctgtggtggaggttgtttataatgaaaaacctctagttttgttaatgtttcttgcagaccacggattgaactcgagggtgttggaagtgaagaagatggtgtattcaattcctaaggatgaacaagatggatcattcacgagtgatgcggtcgctaacttaataccgttggtatgg

SEQ ID NO: 2561 - DNA, 459 bp, Glycine max
  unsure at all n locations
agctntattcaagacanagaaattaaagatattcaagatggatgatcaagacagtctccagagtcttaggtagggtatattaaataggaagggaatttctaattgaagtagcaaaaggtttggccaagaaatttaagttaaaaagtcttttcaagagatttactctctggtaatcgattaccagaggatgtaatcgattaccagtggccaaaaatgatttacaacagctattaaaatttgaattcaaaatgtgcactgtgtaatcgattacacatatatggtaatcgattaccagcagttattgaacgttttatttcaaattntaaagcttgtaatcgattacacacatactgtaatcgattaccagaggagatttntagaaaatattctcaacagtcacatcttttcatttggttcttgaatggccatcanacgcctatatatatgtgacttgagaca

SEQ ID NO: 2562 - DNA, 445 bp, Glycine max
agcttccagctttccacctatatggatggtctgagcgtgaatacactttgtacgcgtccagtctagtctctctaagccctgaaaccgtaactatagctatgttctgagattcgccttttctgctgatcagagagctctccgaatccttttctttcgaagcggcattgcccaaagtctaatcacaggcttgacagggtcttcttagcccatgctaactagaatacttagtagcttatatgatcccacagcgataaccactgattgaggagcattcttcgttttaaccagttttcataaaccaagatatcctgcctatcccgaaaaacggactccctcatataaaacagtagcttcatatcaagagtggttttgactaatcatatgacaaatgctcggccgaagctagagctaagtggctgttcacggtaagtatggaaagcatatg

SEQ ID NO: 2563 - DNA, 436 bp, Glycine max
  unsure at all n locations
tttctntgagcaaagcanaggcttgctcttatttttcatcccaggtaaatgccacattcttcttcaccatctcattgagaggtgatgcaattgtagagaaattaagaatgaaccttctatagaagcttgctaacccatggaagctcctaatatctcccacactttttggggtgggccattcttggatggccttgattttctcaaggtccacttggaccccatttctaccaactacaaaacctaagaagactatattatctactcaaaaggtacacttctctatatttgcatagagtgtgtttttcctaaggactgaaagaacttgcctgagatgtgctaagtgatcatctaggctcctactgtacactaaaatatcatcaaaataaacaactacaaatctacctatgaaactccttagacatgatgcataacctat

SEQ ID NO: 2564 - DNA, 449 bp, Glycine max
  unsure at all n locations
agctcgacacatattaaccatattcaaggtctgtctaatgagtttgtccaaatgtctccatactagtcattggagttaacaaacttaacactaatttctttaaacaacaaattntctcgaacaaaatggcactcaatctctacatgtttggttcttttatgaaatactggattaaaggcaatgtgaatggctacctgattatcacaatacaacttcatttgtcgatcacantaatttaagtcttgaagaaagttgttaatccatgttggccagatcacaagtaattagagccacagctctatattttacttcttcacttgactggacaacaatattatgtttcttgatcttccaagagataatatnttctccaatggatacacaatatacagtggtggatcgtctgttttagggcaacctgcctaatcgcattacaatacctacatatt

SEQ ID NO: 2565 - DNA, 310 bp, Glycine max
  unsure at all n locations
ntcgagaaattcanatggtcataactnttcactcggaggtcctattcatgcgtataatatattgagacgctcgaaattgaacaacggaagctctcgagaaattaaaatggtcataacttttcactcatagatccgattaacgcgtataatatatcgagacactcgaagttgaataatcgaagctactgagcaattcaaacggtcataactgttcactcggaggtccgattcaggcacataatatatcaagacgcccgaaattgaacaacggaagctcttgagaaattcatatggtcatttcttttcactc

SEQ ID NO: 2566 - DNA, 437 bp, Glycine max
  unsure at all n locations
acaagtggcctaatgcaatcctaccccgcaagggcattggatagaagactccaagtagattgggccaaagatgcaagaaaaggccctatggttctcatgagccttgaggtagatntcacgcccatgggctaagtatgagcccacttatctttgtacatattagattaaggtttcattatttttgggccttgtatttacggctccataatgtacgtaaggtaccctaaacatgtatgatttttcacccttctattttcggcacctacactaatttttgattacgggtagttttgaatttacatgcattgtggaatattcatgtgcgtgttgggaaaaaactaattgaatgcgagaagcctatccagttaaatatagagggcgggagcatttgttgctacaccctaatgcacatcataagtacactttgtgatgcttac

SEQ ID NO: 2567 - DNA, 447 bp, Glycine max
  unsure at all n locations
agcttctntgagaanactttcttgagaagctagagtctagctacacacacccctctcataactaagctcacctccttgagaagcttccttaagaagattcctaaagaagctagagcttagctacacacacatctctaatagctaagctcacctccttgagatgagaagctagagcttagctacacaccccctataatagctaagctcacccccatgacaaanaaagatgaaaatacaaaaaaaaaagtccttactacaaagactactcagaatgctccgaaatacaaggctaaaaccctatactactagaatggccaaaatacaaggcccaaacgaaggagaaacctattctaatatntacaaagataagtgggctcatacttagcccatgggctcaaaatatactctaaggctcatgagaacactagggccttcccttggatctct

SEQ ID NO: 2568 - DNA, 352 bp, Glycine max
  unsure at all n locations
gaactactaactgcagtaacagttgcagcccaactatccggtagtgatgacaatagaatcaatgccttcacctcatcctcaaatntaatctgcacagatttcaattgggcaagaatagtattaaactcattaatatgatcagctacagagataccttctctcatcttgaggttgaacaaccggcgcatcaagtatactttgttggctgctgacggcttctcgtacatatctgataatgccttcattaagcctgcagtagtcatctcgttcacgatggtgaacgcgacgttcttggctaatgtcgatctgatcacgcccagagcctatcgatctagcaagttccattcttctt

SEQ ID NO: 2569 - DNA, 413 bp, Glycine max
tcttagtctcaactgatgaaaatgaattcgtggctacttcatgcactcctctaatgacaatagcatcatttctggcactaaattgctgggagtttgaagccatcttctcaattaaatttctggcttcagcaggggtcatgtctccaagggctccaccactggtagcatctatcatacttctctccatgttactgagtccttcataaaaatattggagaagaagctgctcagaaatctggtggtgagggcaactggcacatagtttcttaaatctctcccagtattcatataagctctctccactgagttgtctaatgcctgagatatcctttctgatggtcgtggtcctggaagcagggtaaaaattttctaagaatactctctcgacgtcagcccagctcgtgatggaccat

SEQ ID NO: 2570 - DNA, 385 bp, Glycine max
agatgctgctctatgctaaatttctgaaagatatgctaacttggaagaacaagtacatccatagtgacaccatagttgtggagggaagctgcagtgccgtaattcaacgcatcctttcgccaaaacataaggacccaggcagcgtcactataccttgttctataagtgaagtatttgttggcaaggctcttattgatttgggagccaatattaatttgatgccacttttcatgtgccaaaggcttggagagttggagataatgtctactacgatgactttacagttagcagatcgctccattaccagaccctatggagtaatagaggatgttttggctcgggtcaaacaccttatctttcctgctgacttggtggtaatggacat

SEQ ID NO: 2571 - DNA, 462 bp, Glycine max
  unsure at all n locations
gtcacctgcggcatgccagcttgcacagctgggtaatactccacacctttgatgttgaaacttttgttattttaagtacttaattctaattgccgtatttcatggaaaaccctatatttggtctagaatctacaattatgctaggctaattgtgactntagtgttacattgattagtttatttaatgcgttttggggaaaattactatgtgttatttttttttgactggatatatacgtgttaataaatattaatatgacttcacacgctaaaccaatactaagcaaacgggagatacaaaatttggtagatccaatgcttggaggggcttatgacgtgacaccagttaatagagtagcctttgctgcctccctttgcattagggcatctgcaacttgcagacctatcatgagtgaggtagctcaattatatatgttgcacaactttggtgttactttccta

SEQ ID NO: 2572 - DNA, 447 bp, Glycine max
  unsure at all n locations
agcttatatagcttcatattattgatagagacaaaataaatcatataattctatgaaatatataaatttacgtgatgttatataagttttttttaataatggattgttctgttttagtttttaaaattgaaataaattaatatgtgttgatttcatttgtattattttaaattaaaatgtgttcttagtctacttttttagcacgttgattttaatgtgctgcatacgaattgataatatttagcccatttgtgtgttttgtcactgttcgcaggaatcttactggaatcctcaaagtgggagcctcctgttccctacttcattaaacacttctcattatttatttatttattttcgtgaacaataagaattaaataattaataaaaaaaatgatcgatacaattagtttattactntgagtctatatattaacaatatggagtcat

SEQ ID NO: 2573 - DNA, 347 bp, Glycine max
  unsure at all n locations
cctttcttttctcatgtgcactcaaacccaatctccgggttcgaagacaaccttctttctccctttgatggcttgtttagcatagctcatacttttcctctcaatttgatctttgactctataatgaagcttcttcacatagtccgcctttgcttgaccttctttatgcttaaaaacagaaacattaggcataggcaaaagatcaagaggagttagtggattaaaaccataaacaacttcaaggcttaagaaagaagaatcatcggatgacgccgatcgaacatttcctaatatacatcatncaaatattattcatggattgaatagaacatacaatagccgacatc

SEQ ID NO: 2574 - DNA, 482 bp, Glycine max
  unsure at all n locations
cctataaatctaagcttacaatgtagttctacatctttgcagataatgcaaacaattggatttctcgggccagctttcttcttaactcaattgagccacgctaattctcctgtgatggctgttttgtgtatgacatgcagtcangtttgcttcttgttttgtatttgagatatttttaattctgagaaggcagtctctttgtaatcctaacataaaatctgcttatatttgtgtctcttcttatatgtatctggagaaagttacttaatacttgtataaagtttctttaatttaagtatctcacttcaataattttattatgattattagttcatactgcataatctgaanatntgactggcaaatataaatattcttggcaatggtgtcttggaacttctcttgatgagcataactacacattctcattttgctaagtcttcatataaagttagaaagtgttggttcatccattcattcca

SEQ ID NO: 2575 - DNA, 438 bp, Glycine max
  unsure at all n locations
agcttgtgctntaacctgcctcagtaatataagacacatgtgttaaggcgcctgcgacaataaactagctgtgtgtgtgcaagtctgaaggtgaatgttctttgtttcaattctttattccttattgttattgtcttaataaggttagaatagaaaagttattggaagaaaattaaggattagctcacctttgctgatttgaatagttcatcaagaacctcggacaaagttggatgtgcatgaactgcaaattntatgtcctgcattgtaccacaaaacggtgaaatttaccaaacaagcaggataaataagagtgaagactttgtgactattattagtaactaaatgccaatacacataaatgtggtagaaaaatttacctgaatacgtgtccctaatgcaattgcattggatgcttcatggatgagatctgctgca

SEQ ID NO: 2576 - DNA, 433 bp, Glycine max
gcagctcttagtctcaactgatgaagataaattcgtggctacttcatgcactcctctaatgacaatagcatcatttctggcactaaattgctaggagtttgaagccatcttctcaattaaatttctggcttcaacaggggttatgtctccaagggctccaccactggcagcatctatcatacttctctctatgttactgagtccttcataaaaatattggagaagaagttgctcagaaatctggtggtgagggcaactggcacatagttttttaaatctctcccagtattcatataggctatctccactgagttgcctaatgcctgaaatatcctttctgatggccatggtcctggaagcagggaaaattttttctaagaatactctcttgaggtcatcccagctcgtgatggaccttggagcaagctaatat

SEQ ID NO: 2577 - DNA, 456 bp, Glycine max
  unsure at all n locations
gctttggagtntccaagtgccaattcgtcttcttctttagtccagtcttcttctggcttcaattcttcagtgggctttccttctgtgtccagcatcttgggatgttcccagcctttgatgacagctttccaggttctgctatccagtgatttgaggaaggccaccattcttgctttccaatattcatagttgcttccatcgagaattggtggtctgttcactggtccgccttctttctccatgttcatcagaatttatctccctagatctcactctgtgatttcgagtgttggctctgataccaattgaaattctgataccaggggacagatgtcgtacaggatgtcacgacatcacgcttcagaacatgcagattatatgtgtccgtatgaacagattanactagtaaataacacaagagaattgtttacccagtgctgtgctacctcacctaca

SEQ ID NO: 2578 - DNA, 415 bp, Glycine max
  unsure at all n locations
gaagaaattgtagctnttccctctgttgtcttggactcagganaatatttcttcaaaaacttttccacaactttatcccaagtccttaagctattacctttgaatgaatgcagccacctcttggcttctctagataatgaaaatgaaaataagctgagccgaatagcatcttctggcacaccgacaatcttgacaatgttgcatatctcaatatatgttgccaagtgtgcatatgggtcttcattgngtagaccatggaacaaattgcctcgtattaactgaatcaaagaatgtggatatgtgatattgtgggcctgcacctctggccttgcaatgcttgtaaagaactgtggcacagcgatgctagaataatcttcaagggtcaccctgcttggttgctcttcaaccataatgt

SEQ ID NO: 2579 - DNA, 480 bp, Glycine max
tgcaagaagctctatgtaaaaagttgaagcttagttcatcttatcaccctcaaacagatggtcaaactgagagaaccattcagtctttataagaccttatgagagcttgtgtaatatgacaaaagggtatttgggatgagtatttacctctagtggagtttacccacaacaatacttttcatgctagtatacatatggctccatttgaagccttatatgggaggaagtgtagaacaccattatgttggtatgagactggtgagtctcttttgatagtgttgagtctggttgcatccaagtcacattggactgtaccaaacaagttaaattcctgaggttttgatgttaacaaagtataaattttaagtactaacctttcatgcttaagttacaagctatcttatctctgagatacaagcagaaaagcatgaacataaaggttctggacaataggcaaagtatcagtcattggatgatact

SEQ ID NO: 2580 - DNA, 448 bp, Glycine max
  unsure at all n locations
agcttgaagatgtgtaacctgccatcttctcatattagaactgatgtagctccattgaagcttgtaggccttggatcttcttcatcaatggagtcttttgcttcttaaagtttgatagcagcgtaatggagaaggagaagggtgattggagatgccacttcaaggagaagatgagtctataagaagctcaccaccataggaagccatggataatagcttgaaagtaagagaagatgaatggacggagagggagaaagggagcatganatttagtgcctctaaagaagtttgaactttgaagtttaattctcagatgatcaaagttgaaaaaatgcacacacatagcctctatatatagcctaagagtcacacagaattggagggaaatctgaatgtctattcacattttactagaatttgacattgaatggtggagccaaatttcact

SEQ ID NO: 2581 - DNA, 441 bp, Glycine max
  unsure at all n locations
agctnntaatttaattgtcataataattagtaattacactatattacaacaaagtaaatatggtatcctaaagtatntttactttntctaatcattatagtcaatctcgatgtctaattgtcccaaaataatctttgaaagcatatactattaattatctaggggttcgggatacatagacggtagtgttggaaatcttaatctttaatgtttattgattaaaatatattttttccttataaatataaaaatgtttgaattttttttttttgtaaaattttagtacatattttgtcctgataaaattgaaatgtatcacttttttgcttgaacataagtttggataaatctaaatctacgatgatgacctnnttacattgtatacatataaatgatgtaaaatgtgacattntttatatcggttgtgcatataaccgatgt

SEQ ID NO: 2582 - DNA, 472 bp, Glycine max
  unsure at all n locations
tacgtgaaagtagtataaagaaatactttagaagttaagttattcgatagtagaatctttatgacataaatagaatgcatggtcgaacattaaaataatggcatgtggtaggtcatacatacataatctttgtataacctgatagaatcaaatgaaaagtaagggatatattacaacataaacaagtatatgaattcatgtcatcagaatagaaatcaaaatattctttacaacataagataaatagctaaactaagctatgaactcgtttgagtagtctacgttggggaaattcttaanaatgagagtcttgtttgtcgaatctatanatnggcaggggtcctcctaatacatggatagacaagtgaaaattttcccaagatttacatcaacacacaagcttcnatccaatctatctcttcacaattanaatataatataacatatattcatattcatattaatatcatct

SEQ ID NO: 2583 - DNA, 448 bp, Glycine max
  unsure at all n locations
tatcacagactcatctatgaaggagaactctagttttcaggaccaattactttatttcaagggtcgtctattcaatacctgatcatagcttcaagtctagaaacattaacaagggtttatgtgaaatctatgtcttcttgtgggttaaagccttgagctactaacatagctttgttccttactaccttatcttgttcatccaatttatttctaaatgcccatcttgttcccaagatgcttttgttctcaggcttgngaacaagcatcttgacatcatttccagtgaactagtggagttcttcttccattgcaataatccaattattatatgtgattatttcatttatcatcttacgttctatttcaaacatganagcataagacataagatctttaaaatgatgatctggttttgactccttcagtctgatcttcaataatctgatct

SEQ ID NO: 2584 - DNA, 484 bp, Glycine max
  unsure at all n locations
ngcatacaagattctncttgcttgacacttcataaccttctggttgggttatatagatgtcttnctctaaatccccatgcaagaatgcagttttaacatctaactgctccaagtgaagattctctgcagctattatgctcagaataactctgatggtagtcatctttacaactggagagaagatctctgtgaaatcaattccttgtttctgctgaaacccttttaccacaagtctcgccttgtatcttcttctaccgttagattcttcctttagcctatagacccacctattctgtaacgctttctttccttctggcaatntagttaaagaccacgtcttattcttctgaagggatgtcatctcatctttcatcgctagctcccactcaataatgtcattcccttgtgtagcctcactgaaacattttggctcaccagcatcagttaacaacaaataatgcaatgaacgtgaatacctatctgg

SEQ ID NO: 2585 - DNA, 484 bp, Glycine max
  unsure at all n locations
taagccaacccctnttctcatacaaaacatgttgatgttttactctatcaatcaccaacaagttgaaacctaactatatgcaatgattaagaaaaacaaagaaaaagagcagggttgcctcccagtaagcgcttctttaacgtcactagtttgacgcatattacctcaaaggtcttgtaactacagaatggtggttaatctctcaatgttcccaccttgatacaacttcaacctctgaccatttactatccatgttctgcttggagtttctgattgcggattaaataattccactgctccatatggcttgacttccttgatggtgaatggtccagaccatttagactctatcttgcttggaaacaacttcaatcttgagttgaacaacaacacttgttatcttggcctagagtccttctttagcagcttcttgtcatgataagccttcactttttctctgtacaatcttaaagactcgtatgca

SEQ ID NO: 2586 - DNA, 400 bp, Glycine max
acacatatactgcaatcgagtaccatatctatatttcagaaaatattctcaaccgtcacatctttatatgtggatcttgactggctatcaaaggcctatatatatgtgacttgagacacgaatgtgctaacagttctttggatcacatacgtcttatcctcttaaacagcaaaatcgttttatcctcttacaaataccttggccgaaatacttgtgattcaataaagaattatttgagtgctcaaattgttcaatctatctctttcaagagagatctcttcttttcttcttcttcattctgaaaagggattaagagaccgacggtctctcgttgtgaaagaattctaaacacaaacgaagggtcgtccttgtgtgtctagaacttgtaaaaggaatttac

SEQ ID NO: 2587 - DNA, 266 bp, Glycine max
gcttataatgtatcgctacgctcgaaattaaacatccgaaactctttatatattcaaatggtcataacgctcctcacggatgtccgatgccggcgcataatatgtcgagaggctcaaatattaacaacggaagctcttgagaatttaaaatggccctaaccttgtaaccccgatgtccaactcacgctaatagtatatcgagccacttaacattaaacatgtgcaactttcacgaacattaaatggttataacttttcacaccgat

SEQ ID NO: 2588 - DNA, 455 bp, Glycine max
tcaacatcagaccacttcacaggtgctggaactattttatatggatctgatggggcctatgcacgttgaaagccttggaggaaagaggtatgcctatgttgttgcggatgatttctccacatttacctgagtcaactttatcacagagaaatcagagacctttgaagtattccaagagttgagtctaagactacaaagagaaaacgactgtgtcatcaagagaatcatgagtgaccatggcagagagtctgaaaacagcacgttcactgaattctgcacatctgaaggcatcactcatgagttctctgcagccattacaccacaacagaatggcatagttgaaaggaaaaacacgactttgcaagacgctgctatggtcatgcttcatgccaaagaacttctctattatctcttggctgaagccatgaacacagcatgctacatccacaacagag

SEQ ID NO: 2589 - DNA, 438 bp, Glycine max
  unsure at all n locations
tactaagcttaagccaattatacgacaataactntttactcggatgtctgattgatgtccgtaatataacgaaacgctcgaaattgaatgtttaagctttgagcccattctaacgataataactntttactcggatgtccgattgagtctcgtaatatatcgacacgctcgaaatngaatgttgaagctcttagcctatttaaacgacaataacgttttactcggatgtccgattgagtgacgtaatatatcgagacgctcgacaatgaatgttgaacctctgagccaactcaaacgacaataactntntactcggatgtcctgatgagtcccgtaatatatcgagacgctcgaaattgaatgttgaacctctgagccaattcaaacgacaataactttttactcggatgtctgattgagtcccgtaatatatcgaga

SEQ ID NO: 2590 - DNA, 378 bp, Glycine max
  unsure at all n locations
agcttaaacattatactntgagcgtctcgatatattactggactcaatcagacatctgagtaaaaagttattgccgcttgaattggctcaaaggttcaaaattcaatttcgagcgtctcgatatatttcgggactcaatcagacatccgagtaaagagttattgtcctttgagttggctcagaggttgaacattcaatttcgagcgtcccgatatattacgtcactgaatcggacatccgagtaaaaagttattgttcgttgaatttgctctgagcttcaacattcaatttcgagcgtctcgatatattacgggactcaatcagatatccgagaaaaaagttattgtcgtttgaattagatcatatgttcaacattca

SEQ ID NO: 2591 - DNA, 387 bp, Glycine max
tcgacctctatatttcttatccaagtccttattactactaatagacaaaccttcaggtggttgcacgtatattatctcactcaaatcaccattcagaaaagctatcttcacattcatttggtgcaactgcaaatcaatatgagctactagggccataatgattctaaaggaatcattcgttgatacaagagacaaagtctctttaaagtcaacactctccttctgcataaaacccttttacaccagtctagccttgaatatctcaatgttaccatataagcacttctcttcttgaagacccatctccaattgattgccttcaaattctaggtaattcaactagcttccatatgccattaactgacatacattgcatctcttcattca

SEQ ID NO: 2592 - DNA, 473 bp, Glycine max
  unsure at all n locations
tcatgatgaatcaagaatgatttaatgatcacaaagatgtatgactttaagctcanaagtcaagaacacttcatgataacaaagataatgatctcaagaatcaaagaatgagttcaagattgaatcaagaacacttcaaggttcaaaaggaaatttgatttctagaatcaagaatcaagtttcaagattcaagttccaagaatcaaaatcaagattcaagaatcaagagaaggctcaatcaagataagtattaaaaagttcttttaaaaactgagtagcacatgaatttttctcataaccttttatcaaagagttcttactctctggtaatcgattaccagattattgtaatcaattaccagtagcaaaatggttctcaaaaagctttcaactgaatttacaacgttccaattgatctcaaaatgctgtaatcgattacaatgatttggtaatcgattaccagtgtgtttgaa

SEQ ID NO: 2593 - DNA, 469 bp, Glycine max
gtcacctgcggcatgcaagcttcataaattcaatatataacatattatctgaatcgatatgatggtgacagggcgagtaacccatataaacaaatattgtggttcaaaattctagcttgtgagattgatatggtctaagaaaaggataacaagcacaagaaaatacttttatgaatgtgtaatcaggcgttatctaaagcaaaaaatgatatggagtatcaaatttgattgtcagactcagtagatatctaaacctaaatatgacataagaaacagtcagcacagagataaattccaacaaaagtaacatacgagcatggatcaatatgattatgatttgtgaacaaatagggaaagttttgaattctaatatacattgcgacaaaaatgattctagtggccacaaaatacatgataatcaacttttattggatcaagacagaatataacattcaaaaccacatatcct

SEQ ID NO: 2594 - DNA, 453 bp, Glycine max
  unsure at all n locations
cgctagaatgctntccaaaatctaagatacctatctaacactatataggtaggtatgccatgaagcttaagtatctccttattgtaaatgtctgctaatttgtccaatttgtatgtctccttaattggtaagaagtgagcagacttggttagcctgtccacaaccacccatatgacctctagacccaaacgagtttttggaaaacttgttacaaaatccctagaaattcattcccatttgcactcaagaactcctagaggttttaaagttcttggttttgaagttgttccttcttaatcaactctntaatgtcactaccgatctccaatctattcaacttcatgatcaatgcattcaaattcaagtccctaaactcctctatcaagttcatcttttacaccatcaagctagacatgtgcaaagacttcctactgagaggatcagccactacat

SEQ ID NO: 2595 - DNA, 385 bp, Glycine max
  unsure at all n locations
tgcataacccncacacctactctattacaaatcaccacaacccccaacgccagcgccaccttcaaccgaatcctcatcctccctttcttcacatcaattatataagacttcccatccttctcacccctccttcccttcactgccgtcaacatatgattctcctgcaaatcaagcacatagctaaccatcccactcaacaatatgtctataaatccaaaccccaccaacacaaacaatatagagaaaagcttagtggctgtactattgggagtgatatcaccgtaccctattgtgcacattgtcactatacaaaaatacaatgcatcaactataggatgagtctcagtagctgtaaaattatgacgattgaaccaataaatgacaa

SEQ ID NO: 2596 - DNA, 482 bp, Glycine max
cgagacttcaagatatgaactccttgttcctttgagcatttcatgcaagcttcacttaaggtaagggggagttttccacttcttgaaccttaacctttttgtctagcaaaatttatgtataaaacaagtttaaggtcttttgtaggattaaagttactttggatatgttggatcaagtggcctctgaataattaagaaggggggttgaattaattattactgaacctttactaattaaaaatgtacccttcttaggcttttactataatgttaagaaagtaaataacagaaatggaaacttaaccaaaagtaaaagcaataattaaagtgcacaacggaaaataaagagtgtatggaagaagaagacaaacacaagagttttatactggttcggcaacaacccgtgcctacattcagtccccaagcgacttgcggtccttgagatttcttttaaccttgtaaaatcctttacaagcaagatc

SEQ ID NO: 2597 - DNA, 481 bp, Glycine max
cgcttctcctgaatatcaaatgcattctgagaataagaaatggacaaataaggattggttagaagagcactaactaaaattaaattgaatttgaatttacgaatgtaggcaacattatgcaagagtgaggtattggttaagcaaatcgaaccaatggcaatgataggtataacatcattgttaggaagagtgacggttttatcataaacaagttggtaagatcgaaaatgatgaacggaacaagaaatatgaatgttggcaccagaatctaaaagccaacaatcatgaagaaaattagaagtggatgtaaaaaggatcataccactggcagaagacacaccttgagggatgacaacattggaagcatgactctctaaaagattcatcaatcggctatatcgttgggcagtaagtcgaaactgggaacccgagtcaccagaggaagatggtgagtaagacatatcaacagatacttgagcaa

SEQ ID NO: 2598 - DNA, 438 bp, Glycine max
  unsure at all n locations
gctgcagctatgacaaaaataatgcccccagatctttttacataccagatccattgcaagcatggcagaacccatatattgncgttgcaaaaggtacacaacaaggattcatcttcttatatgagactctgaaaggcttcgatggcatcattgaacacctgtgtaatacacaaaagtacaacaaagcagtaaacaaatcaaggcaataagaaaacaaaatataatacgattcctgctcctttctgattgcattttacagcaagtttgatacacacaaccaacaggggagacaacttcttaaagaggtcatgacgcttctgcatataaaaccaaactactgaatgtcggcaaaggcatctttctaagtattgaatctcacctaaaagagagtcaaataagtaccttatgccacattgtgaccaacagacgcaactttct

SEQ ID NO: 2599 - DNA, 344 bp, Glycine max
agtctcacgattgtcacgtgctcatgcaacaattgttagccgtggctatacgagacatcttgccaaacaaagtcaggttaacgataactcgcctgtgctttttcttccatgctatatgtagcaaagtcattgatccagtcatgtttgatgagttggaaaatgaggccgcaattaaactgtgccagttggagatgtattttccctctgctttctttgacatcatgattcacttgattgtgcatctggtcagagaaatcaaatgttgtggtcctgtttatctacggtggatgtacccggttgagcgatacatgaagatcttaaaagggtatacaaagaatctatat

SEQ ID NO: 2600 - DNA, 406 bp, Glycine max
tgctaacccatggaagctcctaatatctcccacactatttgtggtgggccattcttggatggcctagatattcttagggcccacttggaccccatttctaccaactacaaaccctaataaaactatattatctacacaaaaggtacacttctctatatttgcatatacggtgtgtctcctaaggactgaaagaactttcctgagatgtcctaagtgatcatactacgctccaactgtacactaaaatatcatcacaataaaaaactgcatatctacctattaaataccttaagacattatccataagcctcataaaggagctcggtgcattactgatcccaaaaggcatcactaaccattcatacaaaccaaacttggtcttgaaagcgaatttccactcatcacc

SEQ ID NO: 2601 - DNA, 431 bp, Glycine max
  unsure at all n locations
gctgggtctgatatttttatatttttatagttcaagcatcggtttgttacctcctacaagcctatttttaggcttgtgcccgacctttataaaagtctgtcaggttcgtcagttcatttaaagacatatttcatattagaacgtgtaaaaaacaataattttttaaacaaaacccaagaatttcattaaaaaataataagataatggttaaccacaagatatgggcaaaattttcctacaaacattacatgtgacatactaccaaagtcttttaagtttcaccaaaaggaaagagtctatattcttactacccatttatactacattaactaaaataatttaaatcatcaaactactaaaataatgttgtaatttaaataanataattataatattatatgccatattaatataatanttttatataacat

SEQ ID NO: 2602 - DNA, 361 bp, Glycine max
  unsure at all n locations
agcttgaggataaagacttcccaagctatntatcttctctctcagagaggctttttctcactctaagaagtggattcactcttatcttggatggataagaatgaaggctcctacccttatttatactactccatctccacaataaatggtggagatttcttgtatcataaggtgaagattaattctctagaatgctccacacattctaggagtttctacactcttccatatccttccataaggttccagaaagtttcacacatctctagaatattccagaggtttccacattcttccacaagcttctagagagttctacactactctagagctctccagagcgttctagaanattctacac

SEQ ID NO: 2603 - DNA, 312 bp, Glycine max
gcttctcgatatgttatgcgtctgaatcggacatgcgagtgaaaaattatgaccattttaatttcccgagagcttccgttggtcaatttctagcatctcgatacgctatgtgcctgaatcggacatgcgagtgataacgtatgaccatttgaatttctcgagagcttccgacgttaatttctagcgtctcgatactctatgcgcctacatcggacatgcgagtgaaaagctattaccgttttagtttctcgagagatgccgatagtcaatttcgagcgtctagacatggtatgcgcctgaatcggacatgcg

SEQ ID NO: 2604 - DNA, 257 bp, Glycine max
  unsure at all n locations
cccatgaatnggcgtttcgttcatgtgtcctgcaccttcaagtttggagctatgcgtagtgattgcttagtgaaattctccattcttaatcttttcggagccccatgaattgcgttntcgttcatgtgtgctccaccttcgagtttggagctatgcgtagtgattgcttagtgaaattctccattctcaatcttttcggagccccgtgaattgcgttttcgttcatgtgtgctccaccttccagtttcgagctatgc

SEQ ID NO: 2605 - DNA, 370 bp, Glycine max
  unsure at all n locations
agctntggagtttccaagtgccaattcgtcttcttctttagaccagtcttcttctggcttcaattcatcaatgggctttccttctgtgtccagcatcttgggatgttcccagcctttgatgacagctttccaggttctgctatccagtgatttgaggaaggccaccattcttgctttccagtattcatagttgcttccatcaagaattggtggtctgttcactggtccgccttctttctccatgttcatcagaatttatctccctagatctcactcagtgatttcgagtgcccgctctgataccaattgaaattctgatactggggacagatgtcgtacaggatgtcacgacatcacgcttcagaacatg

SEQ ID NO: 2606 - DNA, 419 bp, Glycine max
  unsure at all n locations
gcttacacagtttgtctttcttaaactngagtnttggaagacaattactaagtctttcctaactagattatttaaatgatgcatattaatgtgtgcagtcctacaatgctacaaccatgaatcatctattgtactcaccaagcaacttagctcatgaaaagatgcttgctcaacattcagcatataaatgctacttattctcttaccaatatggagagctttactggatatggcttcacttataagacaacaatttctattgaattcaatcttgaaacctttatcacaaagttggctaatgcttagaagattatgctttagtttatccacatataacacattctttatctgagtttcgtcttgattccctatacttccttctcccattatctttccttttgtattggnctcaaacatga

SEQ ID NO: 2607 - DNA, 419 bp, Glycine max
  unsure at all n locations
ntgcacgtatcagtcaagtgtatggaccatatcgtagccaatgtgctcatagataatggttccagtttaaacgtgatgcctaagagcactttggagaaattaccattcaatgcttcccacctaaagccgagttcaatggtggttcgtgccttcgacggcacccgccgagaggttaggggagagatagacctcccagtacagataggccctcacacctgtcaagctaccttccaaataatggatattaaccccccctacaactgtctgttgggacgtccgtggatccactcagtgggagttgttccctctacactccaccaaaagttgaaattcgtagtggaagggcatctggtcatcgtatcaagcgaggaagacatcttggtgagctgcccatcctctatgccctatgtgggagtcat

SEQ ID NO: 2608 - DNA, 319 bp, Glycine max
agcttgagggaaaacttgatgccttggtcaacctagtaactcagcttgccatgaatcagaaatctgcacctgttgctagagtctatggtctatgttcttctgcatatcaccatatagatctttgtccttctttgcagcaatttggagtcaatgagcaacctgaagcttatgctgcaaacatttataatagaccccctcagcagcaaaaccaacaacagtagaataattatgatctttcaagcaacagatacaatccaggttggagaaatcatctaaatctgagatgggcaagtcccccacaacaacaacagcctgtccc

SEQ ID NO: 2609 - DNA, 393 bp, Glycine max
  unsure at all n locations
catgctactatgaataactccaccacattaagcaacacctgccacttgagcagaattggccctagtgtaaaacagctaatatttgaactttgggtctaccaatatttattattaattntttaaagtaaaaaatatcacacatgttaattaaaagaccttacatattattattttctttaaagtaaaaaaatatattttaattnttattctaggtctcattttctattggaccgacacttcagttgagattaaaaatctcactaagagaatagctccaagtatttgtattgtagcatcactaacaacatcgtgtccattggttgcagcacacaggtattcacaactattcttcatgtncggaattagtgattngatcaaaatactaatcaacat

SEQ ID NO: 2610 - DNA, 392 bp, Glycine max
  unsure at all n locations
tctaagaagcttctttgagaagctagatccttatctatccacaaccctctattaactatattaacctccttaaaattaattacggataaaaataacacaacaaataatcaaacatcaaacataattactaataatatatatatatatatatatatatatgtatcagggtgttacataatggcattggatagaagactccaagaagattgggtcagcgatgcaagagaaggccctagggttctcatgagccttatggtagatttcgggcccatgggcttagtacgagcccgcttatctttgtacatattagattaaggtttcattatttttgggccttgtatttagggctccataatatangtaaggtaccctagaaatgtaggatttttcag

SEQ ID NO: 2611 - DNA, 352 bp, Glycine max
  unsure at all n locations
tgtaagcctaagatcttcatcatcaatggatgtccttgctttatggaagatgaatggcaacggaatggagaatgaagagagagaggagacaccacttcaacgagaagataagtctagaagaagctcaccaccataggaggccatggataagagcttggaggaagaatgagatgaatgaagggagaggaagagaggagcacgaaattttgtgctctaaaagagctctgaaatctgaagtttaatattcaaatgatcaaagttgaaaaaagtgcacacacatgacctctattttatagcctaagtgtcacacanaattggagggaacattgaatttcaattcaaatttcacttg

SEQ ID NO: 2612 - DNA, 314 bp, Glycine max
agctttatgcttaactatgtatgggcaaaatttattactgttgctcaagacatacaagtgaacttgtaacaaatcttctacacttggagtgatcacatgtagtcctcttgaacccttaccaaccactctgtcatcatgccgagactcaggaaggccaacatgtttagccttctctaaaaattctgaacaaaattcaatggcttcttctgcaatgtacctctcaacaataaaagcttctggatgatatagattctttgtataccctcttaaaatcattatgtatcgctcaaccgggtacattcaccggtgataaa

SEQ ID NO: 2613 - DNA, 366 bp, Glycine max
  unsure at all n locations
agctntgagcatttccttttacttttatntcactccatcatcatcactcacacatcanacactcactagctcttctaagngttctctggctctctctttcttttgggggatggagttcaacaagttcagaatcagaagctatgaggggcaatctgatagggctcaagtggaagatcttgagagaagatgcgaggtanggccatcagaaagcgtgtttctcttcacagacactatgggtgaccccatttgtaggatccggaacagtcccatgtacatgatgctggtaagtgatacacacacacaacaattactatgccactataagtcactaacttcatgggttttttcccttctcattatgtatat

SEQ ID NO: 2614 - DNA, 349 bp, Glycine max
agcttgtaggtcttggatcttcttcatcaatggagtcttttgcttcttgaagatcaatgacaacataatggagaaggaagaaagatgattggagaagccacttcaaggagaagatgagtcaagaagaagctcaccaccatatgaaaccatggataagagcttgaaggtagaagaagatgagtggagggagagaaagagcacgaatttttgtacttaaatgaggtatgaaatttgaagtgtaattctcaaatgatcaaagttgaaaaaaatgcacacacatgacctctatttatagcctaagtgtcacacaaaattggagggaaatttgaatttctattcgtatttcact

SEQ ID NO: 2615 - DNA, 379 bp, Glycine max
ttaaaagtttcgaaagaccaagttctatccatcacactattcaaccccccttctagtgtgtttcaatcacttcatatacctactcaccacgatgatttcttgtgttaggtcttgtcttgtgcacacaattgcatacatgagactacctacaacagtctcataaggaacacgaggcatgtattctctttatgattctaattgagtggcattgagtccagtgagatgaatggatgtagtcaaaggagtacaaactagttttgtggatgccatcccaaaatgattcaacactttctgaatgtattccttttgacatcaaattttttttcaggacttgacccctcttgatctccatgcccaaaatcttttatgcatctctcat

SEQ ID NO: 2616 - DNA, 371 bp, Glycine max
ctcggagatctgattcaggcgcataatatatcgagattctcgagaatgtacaacgaaagctctcgagaaattccaatgctcattatctttaactcggaggtctgatttaagcgcataatatatcaagacgctcgaaattgaacaacggaagctctctagaaattgaaatggtcataacttttcactccgaggttcgattcaagtgcatgatatatccagacgctcgaaattgaacaatagaagctctcgagaaattcaaatggtcataacctttaactcggaggtccgatttaggcgcataatatatcgagacgctcgaaatataacaatggaagctctatgggcaattcaatggacataacttttatctc

SEQ ID NO: 2617 - DNA, 353 bp, Glycine max
  unsure at all n locations
agaaattgggtgcaaattntaattcctttggctcgaaaaagttgactctggtacccggggacatctctcgtgaagacttgggattggaggattccattctaagggaagagatttatgatcaaacagatgtcattattaacttagctgcaacaactaactntgatgaaaggcatattgtatatactaaaacatcataggcttttatgcctatttaatggttttggtgccctggccttagttattattctcttgtttcttcttttaattactatctcaccttaaatttcaggtatgatatatcgttgggtctaaatacctttggtggtaagtatgtcatcaacttcgccaaaaat

SEQ ID NO: 2618 - DNA, 288 bp, Glycine max
cccaattcccaaacgccaagcccaggcgccttctttcttcaaaggccccttgtccttttgcgacctcaatttacccgccgcttgggttcggggacatgagcgccgtctacttggcggtgcccaaagaaagcgctggagcccgcggcgcggtgttcgcggcgaacgtgatggagaaaggaggactggcgaggaggaacaaggaaggcagagcgaggacagagagggaaattctggaaatgttggatcatcctttcttgcccacgctctacgccttcatacacgcgccta

SEQ ID NO: 2619 - DNA, 403 bp, Glycine max
  unsure at all n locations
ttgagcanattcacacgacaatataattttactcggatgtcttattgagtcccgtaatatatcgagacgctcgaaatggattactgaagatctgagcaaattcaaacgacaataaattttttactcggatgtctgattgagtcccgtcatatatcgaaaagctcgaaattgaatgttgaagctctgagcaaattcaaacgacaataactttttactcggatgtctgattgagtcccgtaatatatcgaaaaccttgaaattgaatgtagaagctctgagcacattcaaacgacaataactttntactcggatgtctgattgagtccgcgaatatattgagatgctcgaaatggaataccgaagccctgagcacattcaaacgacaataactttttactcggat

SEQ ID NO: 2620 - DNA, 234 bp, Glycine max
ctttggtattccatttcgagcttctcgatatattacgagactcaatcggacatccgagtaaaaatttattggtcgttggaattgcttagagcttcaacattcaattacgagcgttcggatatattacggtactcaatcagacatccgagtaaaaagttattgtcgtttgaattggctcagagcttcggtagtccatttcgagcttctcgatatattacgggactcaatcagaca

SEQ ID NO: 2621 - DNA, 455 bp, Glycine max
  unsure at all n locations
ntacaacacatgccactctactccaatntcttgaaggatattatcaaggaaacataagtatattcaccaggaaaacatcgtagtggaaggaaattgtagtgttgtgattcaaaagatcctctcccacccaagcataaagaccctgggagtgtaactatttcttcttcaattggagaagtcattgtgggaaaggctcttattgacctcggagccaacattagtttaatgccactctgcatgtgcagaaggttgggagagttggagatcatgcccactaagatgactntaaacctggttgaccgctccattaccagaccatatggagtaattgaagatgtgttggtcagagtgaaacattntatcttccagacagactntaaggtaatggatatctgtgaagatactgacattcctataatatggggaaggccattcatgttaactacaagatgcat

SEQ ID NO: 2622 - DNA, 328 bp, Glycine max
  unsure at all n locations
tctaaactntatacaagaatgaagctctgataccacctggtggacaagtggcctcaaatatcttaagaagggggggttgaattaagatattacaaattatttnccccaattacaaattctactttgattccaatacaagttccaagttcccttaaagatggatttctaaacaatgattcaaattaaacaatctgaatataaatggtaagcaataattaataaaagagtttaagggaagagaaagtgcaaactcagatttatactggttcggccacacccttgtgcctacgtccagtccacaagcaacctgcttgagagttccactatc

SEQ ID NO: 2623 - DNA, 474 bp, Glycine max
  unsure at all n locations
tatagatgcacccttaggataccacaatcctactntaatgtaccctntatgtacttaagaattctcttaacaactaccaaatgagtttctttaggattagtttgaaatctagtacatacacaaacgctatgcctaatatcgagatgactagcagttagatatagaagagggtcaatcatatctctatatcttgattcatctacatatttacatttctcaaccgggtcaagatagcatgaggtagccatatgtgttgttgactcttgagatttctttacaccaaaccttttaagtaaatcaatgcaatacttggattggttgatgaagattccactctctaactatnttatttggagtcctaaaaattaggataactcccncatcatgaacatntcanactttccttgcatggtctcagcanattctttgtacaagatattggtagtagctncagatataatgtcatctacatat

SEQ ID NO: 2624 - DNA, 293 bp, Glycine max
  unsure at all n locations
cattgttacttccatgaatattgatattgtatcatgcttaantatatgcatttgcttattctgatcattgcgtgttgtgtgattatttcttccatgcaggaacatgattcctatttgctgtgagagtgaaatgatgggcagcagcaccaactgaggtgagcttatatctcctttgttatgtcattatccattgttagggcttagctctaccgagttttaaaagattggctaagattntgttaaaacatcaccacttatacaatgaaggaaagctggagttgctgcacatgatg

SEQ ID NO: 2625 - DNA, 180 bp, Glycine max
  unsure at all n locations
gtctanggtcatgcctcaagggctatccacacccttacccatcccctcttcaccttgggtagacattagtatggactttgtccttgggcttcctagaacccaaagaggtgtagactctatctttgtggtggtggataggtttagcaagatgacactctttgatgcaagctccattggagc

SEQ ID NO: 2626 - DNA, 221 bp, Glycine max
gaaaataacaatttagtgcccaacttgctccacaaagtcctcccaaaatggcttaagaacttagaagccctatcactaacaatgctccttggcaaaccatggagtctcacaatctccttgaaaaacaaatcagccacatgggaagcatcatcaacttttttacatggaataaaatgagccattttagaaaacctatcaacaaccacaaaaatggaatctct

SEQ ID NO: 2627 - DNA, 374 bp, Glycine max
  unsure at all n locations
tgccgccacggagttntccgactatgctcttgtgtggtggaacaagctacaaaaggagagagcaagatatgaagagccaatggttgatacatggacggagatgaaaaagatcatgaggaagcggtatgttgcggctagttactcaagggacttgaaattcaagctccaaaaactaacccaaggcaacaagggggttgaggagtatttcaaggaaatggatgtgctcatgattcaagcaaatattgaagaagatgaggaggtaactatggctcgatttcttaatggtttgactaatgatatccgtgaatattgtgagctgcangagtttgttgaaatggatgaattgcttcacaaagcaatccaagtggagcaaa

SEQ ID NO: 2628 - DNA, 303 bp, Glycine max
acaaagaatgaagaacgcattcgacaagattgtgtgtttgcgcaacttccatgaaagggaccttgtgctaaaaaaggtgtcccacgctgttaaagataatcacaggaagtgggccccaaactacgatggacctttcgtcatgaaaaaggctttttccggaggggccctgctgcttaccaacatggatggcgaggagctacctttacccataaattctgatgttgtcaagcgatactacgcttagaatctggggcaattcaaggatatcgctgcatgtttttttatttttatgtgttcttcttg

SEQ ID NO: 2629 - DNA, 372 bp, Glycine max
  unsure at all n locations
agcttatacggtctaggatgtggntntgtgactaaattcaatntagacacaagtcttgcacttgccacattggtacaactccctccatcaatgatcatcatgcaaactttgccattgatcaaacatctagtgtggaaaatgttttctccatgaatttcctccattgacttcaattgatggccaagtaaccgcctaatcatcaacaattctccctccggtgttttctccacttcctcctcatcatcctcactctcttctcccttttcaacttcggactcactaatgtactctccgtctataagaatcatgactttcttgttagggcactcatatgcataattgtccaagccttggcactgaaagcacttcaca

SEQ ID NO: 2630 - DNA, 479 bp, Glycine max
  unsure at all n locations
ntnntattttagtagatgaagatgaatntgtggccacctcatggactcctctaaggataataccataatttcttgcactgaattgttgggagttggaagccatcttctcaatcaaattcctagcctcagcaggggtcatatcaccaagagctccaccactggcagcattaatcatactcctctccatgttactaagttgcctgatgcctagtactcatgcaagctctctccactaagttgcctgatgcctgaaatgtcttttctgatggcagtggtcctagatgcagggaagaatttctccgagaacaccctcttaaggtcatcctagctgaaaatggacctgngagcaaggtagtacaaccaatcttttgccactccctctagagaatgaggaaaagcctttagaaatatatgatcttnctagacatcanggggcttcatggtggaacaaacaatatggaactccttaagaaatctat

SEQ ID NO: 2631 - DNA, 247 bp, Glycine max
  unsure at all n locations
tgtgatgcggctgggaggggaatatgagcagtcttaatgcaaaataagcaacccattgcttattttagcaaagccttatctgacaataatttagcaaaatctgtctatgagaaggaacttatggcattggtccttttcattcaacattggaggcactactcgttaggaaaggaatttgtggtgtatacagatcacanaagcttaaaacactttctgcagcagaggatctcctctccggatcaacaat

SEQ ID NO: 2632 - DNA, 379 bp, Glycine max
  unsure at all n locations
agcttaatggatctgtaganaatgatactgcgccaaaaccgtttgatggcaaagatttccatgatcgtgtcaaggatatcataactatctttgggaagacataaaaaaaagcaccagtgagacacacatttggaagaaaaggtccattttctntgagcttccttactggtctgatcttgacattagacattgtatagacgtgatgcatgtggagaaaaatgtttgtgatggtttaattggcacccttcttaacattaaaggcaagacaaaggatggtttgaagtgtcgtcaagacttagttgacatggatatacgagagcagttgcatccaataccaaaaggttcgcgaacataccctaccccagcatgtcacacaatg

SEQ ID NO: 2633 - DNA, 420 bp, Glycine max
agcttgagggtaaactagatgccttggttaacctggtaacccagctggccttgaatcagaaatttgtacccgtcgcaagaatctatggtttatgctcctctaccgaccaccatacagacctttgcccttctgtgctgcaatctggagcaattgaatagcctgaagcttatgctgcaaacatctacaatagacctcctcaacctcaacagcaaaatcaaccacaacagaacaattatgacctctccaacaataggtacaatcccgggtggaggaatcatcccaaccttagatggtcaagtccttcacaatagcagtaacaacaacaaccttattttcaaaatgctgctggcccaagcagaccataccttcctccaccaatccagcaacaacaacaatagcagcaacaaccctagaaacagc

SEQ ID NO: 2634 - DNA, 279 bp, Glycine max
  unsure at all n locations
accatantcccacagtgagccagcatgtcatttcattcacatcaaaacccatgttcaatcccttatcagcaacattcaaaatattctcttccacataatggttccacacccaattcaccaaaggcacatgattatgctccccatcctggtaagtcttccttccacatgctatcttcaacacaacaaccccaaaaccgtacatgtcagattccttgctaaccctttctttctttacatattccggggccaggtacccatatggtccctccagctttgtct

SEQ ID NO: 2635 - DNA, 297 bp, Glycine max
  unsure at all n locations
aatgcttcttttttcacttgtgaagatgttcaaaagttggctatgaagatggttcaaactgagaaacatttggtatttccattggtttataaacttattgagctagctttgatattgccggtgtcgacagcatcccgtgaaagagctttttcagcaatgaagattatcaagtctaaattgcgcaataagatcaacgatgtgtggttcaatgacttgatggtatgttacaccgagcgggagatattcaagtcacttgatgatattgatattattcgaacatttaccgcanagaagtct

SEQ ID NO: 2636 - DNA, 425 bp, Glycine max
agcttctggtgggacatcttgacttgctttccaatctgacattcaccacagattctgccttcttctattttcagattgggaatgcctctaacaacacctttgtcaatgattttcttcatgcctcttaagtgcagatgtccaaatctttgatgccatattctgacttcatcttctttggaggatagacatgtggaggagtaactggtttcttgaggtgtccatatggtagcagtgtcctttgatctgctgcccttcattagaacttcactcttctcatttgtcaccaagcattctgactttgtgaagtttacattgaatccttcatcacacagctgactgatgctgatcaagtttgcagtcagtcccttcaccagcagtactttgtccagactaggaagtccatcatgagctagctttcccattcc

SEQ ID NO: 2637 - DNA, 402 bp, Glycine max
  unsure at all n locations
actatctgatattagctcctatagaagatagatacgaagactcctttatcttaccactacaaggctagatataacttttgcactgaatcaacttagtcaattcctatctgctcagaatgtcatcaagcagctgctcacagagtacttcgctatatcaaaggctcacttgcatgtggccttttctacccagcatcaaacgctcacaagctcacagcctacaatgactctaacttggccagttgcattgattttagaaaatccattactggatattgnttatacattggtcttttatcttaccactacaaggctagatataacttgtgcactgaatcaacttagtcaattcctatctgctcagatngtcatcaagcagtttctcacagagtacttcgctatatc

SEQ ID NO: 2638 - DNA, 359 bp, Glycine max
  unsure at all n locations
tcatgatggtgccaaaagagtcatcaagaatgtaaagcttgtactagaattgaagagaaatttgatttctcttagtgagtttaacaaacatggctatgtgttcaaaggggagaatgaagttatgaaagttctaaaaggctcatgatattcatgaaaggggtgcaaaagaatggcatgtattcacttattggagaagtggtaatgggatcagctgctacaacttctatcaaaaggttttcaaagactgaactatggcacagaagattgagacatgtaagtaggaggggctgattaaactgggaaaacataacctgctntgtggagataaagtggagaaacttgacttttgtgaacattgt

SEQ ID NO: 2639 - DNA, 326 bp, Glycine max
agcttggatttccttttagtagggaatctattctacctaagatggagcataacccagtcaccctcattaagaattagctctttccttcctctatagcctttatttgaatacacctttgtttggttcttaaccctctcatgcaacttctttacaaactctgacctagattccccttctttatgtataaaagaagtgtctagtggaaggggaatgaggtctaatggtgttaggggattgaacccatagacaacctcaaaaggggattgcttggtggttctatgaacccccatgttgtatgcaaattctacataaggaagatactcatt

SEQ ID NO: 2640 - DNA, 480 bp, Glycine max
  unsure at all n locations
ctaagcttgagaaaattcaacgacaataactntntactcggatgtcttattgagtcccgtaatatatcgagtcgctcgaaattgaataccgaagcgctgagcaaattcaaacgacaataactntttactcggatgtctgattgagtcccgtaatatatcgaaaagctcgaaattgaatgttgaagctctgagcaaattcaaacgacaataactttttactcggatgtctgattgagtcccgtaatatatcgagacgctcgaatgtgaatgtcgaagctctgagcaaattcaaacaacaataactttttactcggatgtctgattgagtcccgtaatatatcgagatgctcgaaatggaatagcgaagctctgagcaaattcaaacgacaataacattttactcggatgtctgattgagtcccgtaatatatcganaagctcgaaaatgaatgttgaagctctgagcaaattcaaacgaca

SEQ ID NO: 2641 - DNA, 412 bp, Glycine max
agcttctacattcaatttcgagcttttcgatatattacgggactcaatcggacatcccgagtaaaagttattgtagtttgaatatgctcacggcttcggtattccatttcgagcgtctcgatatattacgggactcaatcggacatccgagtaaaaagttattgttggttgaatttgctcagagcttctgtattccatttcgagcatgtcgatatattacgggactcaatcagacatccgagtaaaaagttattgtcgttgcaatttgctcagggcttctgtattccatttcgagcgtctcgatgtattacgggactcaatcagacatccgagtaaaaagttattgtcgtgtgaatctgctcagagcttctacattcaatttcgagcttttcgatatattacgggactcaat

SEQ ID NO: 2642 - DNA, 384 bp, Glycine max
  unsure at all n locations
agctntggagtggaaatatttgaaaatagtgtctagcgtgtaaatagaatagaatagaatattttcatgtctagttctacttttctttattatatattttttgtgaaactaaaagatgctctcttttattttatgccctgttttgtttatacacaaaatataaaatatattttttgcgttatactctgtcttattttaacacgttaatcaaatgcaatcttaaaaccactaaccaaagattatctaaaagcaaatgaaatgggagagaaaatggaataaaaaattgaaggaatctacatatatattgttaagtcatcgaagtctcacatgatggaatcttgaagaanagagcggctaatatctatctatctctctctctctctc

SEQ ID NO: 2643 - DNA, 453 bp, Glycine max
  unsure at all n locations
agcttagtacttggaactcagacattcgatcgactagcctgtctatgctaggaaaaaggtatgcatccttagggcacgccctgtaaagatcagtgtagtcgatgcacattcgccatttttgttggcctttttgatcatgatgaagttagcgagccaagtggaatacctaacttctttgatgaagttggcttggaggagcatgtctacttcttctctgactgttttgtgtcattcttctctcatcttactcttcttctatgatatcggtttggcttgggaacaaatagtgagcttatggcagataatgctggggtagattcccgacatgtcaaatggctgtcaagcgaataggtccgtgttcttgtgtangacatcaatgattcgtctatgcttatggctggtgaagtccctgttgagctgcgtacactacccgggctggggttcgagctgtag

SEQ ID NO: 2644 - DNA, 435 bp, Glycine max
  unsure at all n locations
ntgtgaagctcctgtnttagctntacccgattntactcaaccatttgaagttgaatgtgatgctagtggagttggcattggggctgttttgatacaaaacaaaaggcctatagcttatttctcggagaaattgggaggagccagattgaactattgcacctatgacaaagagttctatgccattgtgagagctcttgatcattggaatcattatttgcgttctaatcactttatattgcattcagatcatgagtcattgaagtatatcaatgggcagcagaagttgagtccaaggcatgctaaatgggttgaatttcttcaatcttttaatttctcttcaaaatacaaggatggtaagagtaatgtggtggctgatgcactttcaaggaggtatgctntaatttcaattcttgaaactcgtttacttggttttga

SEQ ID NO: 2645 - DNA, 445 bp, Glycine max
  unsure at all n locations
tgtcanaaacaaacatactaaaaggataaaacttaacaattaaagcatgatccattatcatcacatatatgagataccatgtaaaaatcatagataaagcaagtcctagaattctcataatagaacagctaataataataatcaattcattaaccatttcataaaagctcaatcatcacacactatcatcttcatcagtccatcaatcatcaaataacacaatatttctatgactcaacaagtaacatatcattttcaagtcgcaattatcaatgtacatgtctatctatcacaattaacccaaacacatcccttaacatagcacaattaacccatcttcatcggtccattcctgttagtcaccaccgataacctttagcactaggttgagggcccaccaagcaccctcaacttatgtgtctactcacatgcaatgtcattcatc

SEQ ID NO: 2646 - DNA, 350 bp, Glycine max
tcgattaccagaacgaaagaatgacaaacagctgctgactagggtttagaattggaacgttgaacatgtaatcgattaccatatgcatgtaattgattatcagcgactgcactttggaaattcagattcccagtcctacatgaaattctgatatccagtggacagatgtcgtacacgatgtgacgacatcacgcttcagaacatgcagtttatatgtgtccgtatgagacagattacacaagtaaataacacatgagaatcgttacccagctctggcagcctcacctacatctggtggctaccaaccgggaggaaaccactctaatagtgtagacaacgtcaacagccct

SEQ ID NO: 2647 - DNA, 468 bp, Glycine max
  unsure at all n locations
agcttgcctcanaataaaggatttcaaagtcatgcaatgctctagtaatcgattaccaggaagtgtaatcgattaccagaaggaaagaatgaaaaagagctgttgaaaagggttttgaatttgaattttgaacatgtaatcgattaccatatgtttgtaatcgattaccagcaacggaactttggaaattcaaattcaaaagtcataactgaaattctgataccaggggacagatgtcgtacaggatgtcacgacatcacgcttcagaacatgcagtttatatgtgtccgtatgaacagattaaacaagtaaataacacaagagaattgttaacccagttcggtgcaacctcacctacatctgggggctaccaagccagggaggaaatccactctcaatagtgttagttcaaggtctaacagcccctgtttacaaccttctcacctaaccactacccgtgcgatctct

SEQ ID NO: 2648 - DNA, 454 bp, Glycine max
agctgttaaaagatattacactccaataaaatttggactaagctttttaaattatcgtttgaagctaaaaaaaaatatagtttgtactcttacgtctttttaattaaagcttacgtataagtgcaagcaaacactatattagtaaaagcttataaactttcaaatagtaaaagttcatataattcacgtgtgcatatatatactgataaaaaaatattaactatacataacagaacttaataaattataactctatcttgaaaaactattaaatatttttttcaatgtttcctatacaaaattggcaatttctatctttagtttcctatacaaaatccaaacgataatatactacctgcttctcatatatttcaatgtttaatgttattgcacaaagattaaacaacatttaataaaattaaaattggtatacttagattaaaataccctcatt

SEQ ID NO: 2649 - DNA, 458 bp, Glycine max
agcttcatgcttatgtatgtatttcaaaacttcattactattgttcaagacatacaagtgagctcgtaacaaatcttctacacttggagtgatcacatgcagtcctcttaaacccttaccacccactctgtcatcatgccgagactcaggaaggccaacaggtttagccttctcattatattctgaacaaaattcaatggcttcttctgcaatgtacctctcaacaatagatgctcctagacaataaagattctttgtatacccttttaagatcttcatgtatcgctcaaccgggtacatccaccgtagataaaccgaaccacaacatttgatttctctgactagatgcacaatcaagtgaatcatgatgtctaagaaagcaggggaaaatacatctgcaactggcacagtataattgcggccttattttccaactgatcaaacttgacaggatcaat

SEQ ID NO: 2650 - DNA, 459 bp, Glycine max
  unsure at all n locations
ctaagcttaacatcagactacttcaggtgctggaactacttcacatggacttgatggggcctatgcaagttgaaagccttggaggaaagaggtatgcctatgttgttgtggatgatttctccagatttacctgngtcaactttatcagagagaaatcagacacctttgaagtattcaaggagttgagtctaagacttcaaagagaaaaagactgtgtcatcaagagaatcangagtgaccataggagagagtttgaaaacagcaggtttactgaattctgcacatctgaaggcatcactcatgagttctctgcagccattacaccacaacagaatggcatagttgagaggaaaaacaggaccttgcaagaggctgctagggtcatgcttcatgccaaagaacttccctataatctctgggctgaagccatgaacacagcatgctacatccacaacagag

SEQ ID NO: 2651 - DNA, 431 bp, Glycine max
  unsure at all n locations
aaactaagcttttattttataaatgaaataatttgggccatccatggactcctctaagataataccataatttcttgcactgaattgttgggagttggaagccatcttctcaatcaaattcctagcctcagcaggggtcatatcaccaagagctccaccactggcagcattaatcatactcctctccatgttactaagttgcctgatgcctagtactcatgcaagctctctccactaagttgcctgatgcctgaaatgtcttttctgatggcagtggtcctagatgcagggaagaatttctccgagaacaccctcttaaggtcatcctagctgaaaatggacctgngagcaaggtagtacaaccaatcttttgccactccctctagagaatgaggaaaagcctttagaaatatatgatcttcctagacatc

SEQ ID NO: 2652 - DNA, 414 bp, Glycine max
agcttgtgtcatacttcactgtgacaatcaaagtgtcattcacttggcaaatcaccaaatttaccatgagaggacaaatcatgtagatgtgaaactacacttcatcagagatgtgattgaatctgagaaggtgaaggtggagaaggtttcaacagaagaaaacctggttgacatgttcacaaagtccctatctagtgtcaagttcaagcactgcctggacttgatcaattttgaagatgcctaaggaagtctaatagaagtgcagccctgaatacaaagatatacacttgctggtttggaatcaaggtggagatttatggtgtgtgactcacaattacaaaaggcacaagtgtgaaggtttcaagtggtgctgtcataactaacttcagttattgaatctagttgtcataactg

SEQ ID NO: 2653 - DNA, 324 bp, Glycine max
  unsure at all n locations
ctaagctctcagcanattcaaacgacaataactttntactcggatgtctgattaagttccgtaatacatcgagacgctcgaaattgaatgttgaagctctcagcaaattcaaacgacaataactttttactctgatgtctgattgagtcccgtaatatatcgagacgctcgaaattgaatgttgaagctctcagcaaattcaaacgacaataactttttactccgatgtctgattaagtcccgtaatacattgagacgctcgaaattgaatgttggagctcttagcctattcaaacgacaattactttttactccgatgtctga

SEQ ID NO: 2654 - DNA, 456 bp, Glycine max
  unsure at all n locations
agccttggagtntccaagtgccaattcgtcttcttctttattccagtcttcttctggcttcaatccatcagtgggctttccttctgtgtccagcatcttgggatgttcccagcctttgatgacagctttccaggttctgctatccagtgatttgaggaaggccaccatccttgctttccagtattcatagttggttccatccagaattggtggtctgttcactggtcctccttctttctccatgttcatcagaatttatctccctaggtctcactcagtgatttcgagtgcctgctctgataccaattgaaattctgataccaatgccagatgtcgtacaggatgtcacgacatcacgcttcagaacatgcagattatctctgagtgtatgaacagattaaacaagtaaataacacaagagaattgtaacccagttcggccaacctccctacatct

SEQ ID NO: 2655 - DNA, 455 bp, Glycine max
  unsure at all n locations
cactagagaggacgtaagcttgtatcaaattcaaacgacaataacgttntactcggatgtttgattgcgtctcgtaatatatcgagacgctcgaaattgaaaacggatgctcgtagcaaatgcaaaccgcaataacttttaactcggatgtatgattgagtaccataatagatcgagacgctcgaaattgaaaaaagaagttctgagcaaattcaaacgactataactttttactcggatgtctgattgagtcccgtaatatatcgaggagctcgaaattgagaacagaagctctgagcataatcaaaccaaaataactttatattcggatttgcgattgagtcccgtaatatatgaagacgctccaaattgaaaacagaagctctgaacacattcaaacgacaatgactctttactcggatgtccgattgagtcccgtaatatatcgagacgca

SEQ ID NO: 2656 - DNA, 438 bp, Glycine max
agctttgagccaattcaaacgacaataacgtttttctcttatgtctgattgagtcccgtcatatatcgagacgctcgaaattgaatattgaagctctgagccaattcaaacgacaataactttttactcggatgtctaattgagtcccgtaatataacgagacgctcgaaattgaatgttgaagctctgagctaatacaaacgacaataactgttttctcggatgtctggttgagtcccgtaacatatcgagaccctcgaaattgaatgttgaatctctgagccaattcaaacgacaataaatctttactcagatgtttgattgagtgtcgtaacatatcgagacgctcgaaattgaatgttgaagctctaagccaattcaaacgacaatcaacttctactcggatgtctgattgagtcccgtaatatatcgagacgc

SEQ ID NO: 2657 - DNA, 456 bp, Glycine max
cttgatggtgtcgagaagaaatcacatgtttgtcatcatcaaaaagggggagaatgtgaatgtatgtatacatgattttgatgatgccaaagaaaaatcaaacaaggttgcttcaaatgataagcatttgcttcaagaataattcaagagtgcttcaacaaacaaagccttgtttcaagattcactaaagaccaagccttgccttaaaacaaagtgctttcaagacatgcaaggctctggtaatcaattaccaggaagtgtaatcgattaccagaagacagggttgagaaatagctgttgaaaaaggttttgaatttgaattttcaacatgtaatcgattaccatatgtctgtaatcgattaccagcaacgaaactttggaaattcaaattcaaaagtcataacccttcaaattataactgtgtaatcgattacacaaacattgtaatcgattacc

SEQ ID NO: 2658 - DNA, 475 bp, Glycine max
  unsure at all n locations
agctntctccactaagttgcctgatgcctgatatgtcttttctaatggtagtggtcctagatgcaaggaagaatttctccaagaacaccctcttaaggtcatcccaactgaaaatggacctgcgagcactgtagtatatccaatcttttgccactccctccagagaataaggaaaagcctttataaagatatgatcttcttggacatcagggggctatatggtggaacaaacaatatggaactccttacgatgcttatgatgatcttcacctacaagaccatgaaacttgggcagcaaatgtattagtccagtcttgagagcatatggaacaccctcatcaagatattgaatgcacaagctttcgtaagtgaaatcacgtgcatacatctccctatgagtacttatatgaggtggaagttgagccgtgctcttagtataaaaattagtagtggaatgttcaacatcagaatattc

SEQ ID NO: 2659 - DNA, 437 bp, Glycine max
  unsure at all n locations
tnggattttgtttggggtgttccaaacttaatttanggactatacttaattttgtgatatgtttgattactgtagaaaaaaggttcatttgattatatttatccaagaattttggactgtttcaaactcaattttgtgacattttgattattctaaaaagtaccttcacttggtcatatttatccaaaaaattaattatagattagtgaattgtttttcatgtaaatttaatgtttaccacattaacggttgaatgattttaaaaattgatcattaagtgattattatcgagtattctcatctatanaaatgaattaggcttatgattaacattatcaagatagactttcttttattgatattaacaatatanacatatcaaataagttgattatccaacgagacttganttttttatcagtaaatattaattatta

SEQ ID NO: 2660 - DNA, 366 bp, Glycine max
  unsure at all n locations
agcttctngacttgaacttccacttcatttctattctcactcccattcaccaactcgaccgcaacagcttctgcattgacgacactaacgaagccttggctgttaacttcatgctccagttgtataacctcctcgacgagcctcccaccgatgttgacactgcgctcacgttggccaagtctttgaaccccaaaattgtcacccttggcgagtacgaagcaagcgtcacacgtttcggctttgtcaaccgcttcaagactgcgtttaagtacttctctgctgtgtttgagtctctggagcctaatttggccgcggactcgccggagaggtttcatgtggagagtcttcttctcgggcggcgaatcg

SEQ ID NO: 2661 - DNA, 410 bp, Glycine max
tgaaggaaaactgaatgcattggttaacttggtaacctagctgtccttgaatcagaaatctgtacctgttgcaagggtttgtggtttgtgctcctctgctgaccaccatacagacctttgcccttccatgcagcaacctagagcaatcgagcagcctgaagcttatgctgcaaatatttacaatagacctcctcaacctcagcacaaaaatcaaccacagcagaacaattatgacctctccagcaacaaatacaaccctggatggaggaatcaccctaacctcagatggtccagccctcagcaacaacaacagcagcctgctccttccttccaaaatgttgctggcccaagcagaccatacattcctccaccaatccaacaacagcaacaacctcagaaacaaccaacag

SEQ ID NO: 2662 - DNA, 369 bp, Glycine max
  unsure at all n locations
ttgngttcgatggccccaatgacatctatcccccacatggaaaaaggccaaggggcggacataacattcagaggatgtggcggaacattgacattgtccgcgtatgcttgacatttatgacatttccttacatgggcgcagcaatcgctttccatagtgagccagtaataaccggccctaaggatcttcctggccatagcatgcccattggcatgtgtcccaaatgaacccccgtggatttcctcaatcatgcagtttgcctctttggcatctacgcatcgtatgagggtcatgttgtggtttcgtttatacaggatggtaccacttacaaagaaaccaatagccaatctccttaacgttcttttgtca

SEQ ID NO: 2663 - DNA, 470 bp, Glycine max
agcttcagcctgaatccataaagactgtgagcctttgattattcgaaattggaacagtgacaacccgatacattgtgaggccattaaagaaaaatcaggtcaatacaacaggggaccctatatgaatttgaaacaaagtataaaatttaagcaaacatgtttgacatagacacaaaattggaagagacgctggttaagtacctaatcataccaccataaactacacccctctgtggatctttccagcatctgaaaaggtcttgaatgagttcttctcgatgaggctgagcacaaaccagtcctgcatactttgttacttcaggccagtcctgggaggctacaacctggattaccgtaatcagtatatatcaaacatagggcatcccttagttgtatatatgagtttggaaatgcttacagcagcaatggatggacaagaatcctctcctgattctggatgaagtacatcg

SEQ ID NO: 2664 - DNA, 438 bp, Glycine max
  unsure at all n locations
agctngcaccaacaattggtattgctgttgatcatcgctttaagaaccgttctttggaaagtctgcaagctaatgtgcagaggctgaaaacatacaaggccaaattggttgtgttcccaagacgggcacagaaggttaaggtaatacagatgttcaattatctgttttgattgtgtgggcattttcttaattctgatatcatcatttctggtgaaaggtaaaaaggaatgatgtttgtgtgaaatctgactgttgttttattgtaggctggtgattctactcccgaggagcttgcaaatgcaacgcaagtccagggttctttcttgcctattgtgagggagaagccaactgttgaacttgtaaaggttacagatgacatgaaggctnttaaagcttattacaagcttcgacttgaacgcacaaacaaacgccattatg

SEQ ID NO: 2665 - DNA, 434 bp, Glycine max
  unsure at all n locations
gagcaaattctaacgataatagcttgttactcggatgtcctaattaattccgtaatatatcgagacactcaaaattgaaaccaaaagctctgagcaaattcaaatgacaataactttttactcagatgtctgattgtggccagtggtatatcgagacgctggaaattcagaatagaagctctgagcaaaatcaaacgacaataaatttttactgggatgtccgactgtgtcccatagtatatcaagacgctcaaaattcaaaacaaaagctctgagcaaattcaaacaacaataactttttactcggatgttcgattgtgtcccgtagtatatcgagacgctcgtaattgacaatagaagctctgagcaaattcgtacgataatagctatntactcggatgtccgaattaatcccgtaatatatcgagacactc

SEQ ID NO: 2666 - DNA, 470 bp, Glycine max
  unsure at all n locations
agcttctntgagaaaacttccttgagaagctagatcttatctacgcacacccctctaataactaagcttacctccttgagaagcttccttgaaaagattcctaaagaagctagagcttagctacacacacctctctaatagctaagctcacctccttgagatgagaagctagaacttagctacactccccctataatagctaagctcacccctatgacaaaatacatgaaaatacaaaaaaagtccctactacaaagactactcaaaatgcctcgaaatacaagggtaaaaccctatactactagaatggccaaaatacaaggcctaaatgaaggaaaaaacctattctaatatttacaaagataagcgggctcatacttagcctatgggctcaaaatataccctaaggctcatgagaaccctagggccttcccttggatctctgggccaatctacttggagtcttctat

SEQ ID NO: 2667 - DNA, 318 bp, Glycine max
  unsure at all n locations
tctagtctncaatttgaacgtctcgatatattacccgattcaatcggacatccaagtaaaaagttattgtcgtttgaatttactatgagcttcgattttcaatttggagcgtctcgatatattacaggactcaaccggacatccgtgtataaagttattgtcaattcaattttctcagagcttcggatctaaattttgagcgtctcgatatgttacgggactcaatcggacatccgagtataaagttattgtcatttgaatttgctcagagcttctagtctcaattttgagcgtctcgatatattacacgactcaatc

SEQ ID NO: 2668 - DNA, 424 bp, Glycine max
  unsure at all n locations
agcttccatttntcaattggagcgtctcgatgtattactttactcaatcggacatcctttgataatgttattgtcgtttgaatttgctacgagcttccgttttcaatttggagcatctagatatatttcgggacacaaccagacatcctggtataaagacattgtcgtttcaatttgctcagagcttcgattctaaattttgagcgtgtcgatatattacgggactctatcggacatccgagtaaaaagttattgtcgtttgaatgttctgcgagcttccgttttcaatttggagcgtctcgatatatgacaggactcaaccggacattcgtgtataaagaaattgtcatttcaatttgctcagagcttctagtctcaatcttgggcgcctcgatatattacccgattcaatcagacatctgag

SEQ ID NO: 2669 - DNA, 459 bp, Glycine max
  unsure at all n locations
aactaaaactaaacttaagataaagatggcctcagcaaactccttatttctcaaaaggaattctatcaatagacctccaatctttaatggagagggttaccattactggaaaacccgaatgcaaatttttattgaggcaatagacctaaatatttgggaagccatagaaatagggccttatatacccaccacagtagaaagaattacaatagatggcagttcatcaagtgaaagtataactatagaaaaacctacagatagatggtctgaagaggatagaaaacgagtacaatacaatttaaaagccaaaaacataataacatctgccctgcgaatgaatgaatatttcanggtttcaaattgtaagagtgctaacgaaatgtgggacactcttcgattacacatgaaggaactacagatgttaaaagatctaggataaatgcactaactcatgagtat

SEQ ID NO: 2670 - DNA, 428 bp, Glycine max
  unsure at all n locations
agcttgtagggttaaagtctcacgattgtcacgtgctcatgcaacaattgttagtcgtggctatacgagacatcttgccaaacaaagtcaggttaacgataactcgcctgtgctttttcttccatgctatatgtagcaaagtcattgatccagtaatgtttgatgagttggaaaatgaggccgcaattatactgtgccaattggagatgtattttccccctgctttctttgacatcatgattcacttgattgtgcatctggtcagagaaatcaaatgttgtggtcctgtttatctacggtggatgtacccggttgagcgatacatgaagatcttaagagggtatacaaagaatctatatcatccagaagcatctattgttgagaggtacattgcagaagaagccattgaatntttgttcagaatactt

SEQ ID NO: 2671 - DNA, 455 bp, Glycine max
tctagacaaaggctatcctcttctgaaacttccagatgacatttaccctctgctaaagctgaaaatggcgacgaggaatgacgagaagcagatcccatacgagagtgtttgatgctgatgtttcaaaagaaaagaaaaagcctaaagaaggtgataatgttgttgaagaagctccctcagatataccatctctaatagagttgaagtggatctaatatgaactaatgattcggtaattgattccctacttgttgtctaattttgcttgttcaatccgctgcttgtgacatcctctaccccacacatatatgtactaataataaaagaaataggaatgaggaattaattaaatgttttaaaacacatttaaataaaaacatttcaaaagagtaaaagattcacattcacttttctaatatcataatagaacttgtccaaataaataacaaaattat

SEQ ID NO: 2672 - DNA, 462 bp, Glycine max
  unsure at all n locations
agcttcaagaattatggcctcatcaaactacttgtttctctagggagattctataaatagacctcccatctttaatggagtgggttaccactactggaaaacccgcatgcaaatctttatagaggcaatagatttaaatatttgggaagccatagaacaaggaccttatgttccctctataatggccggaagtgcaacaatagataaacctagagcagattggactgaggaagacagaagattagtacaatataatttacaggccaaaaatattattatatctgccctatgaatagatgaatactctacggtttcatattgtcaaagtgataaggatatgtgggatacactacaagtaacacatgaaggcacgacagatgttaaaagatctangataaacactttaactcgtgaatatgaactntctangatgaatgtanatgaaagtatacaagacatgca

SEQ ID NO: 2673 - DNA, 434 bp, Glycine max
  unsure at all n locations
ttgngtggagtgacaaaagcttcactgaattgcttgtcatgttgaagaagatgcttcttgaaaataatatgttgctgaaaaatcactacgaggcaaagaatatcgtatgtcctatgggcatggagtaccagaaaatacatgcatgccctaatgattgcatattgtacagaaatcagttttccgacatgcacaaatgccccaaatgtggtgtatcacggtacaaagtaaatgatgatcaaggtagtcaacatgcaaccacaaccaatgatcgtccaacaaaggtgtgctggtatctttcaataattccaaggtttaagtgattgtttgctaatgaacatgatgccaaaaatcttacatggcatgttgatggcaaagaaagtgatggattgctccgacatctggctgattcaccccaatggaagaccattgatcga

SEQ ID NO: 2674 - DNA, 445 bp, Glycine max
  unsure at all n locations
ttgagccaattcaaacgacaataactttntactcggatgtctgattgagtcccgtaatataacgagaccctcgaaattgaatgttgaatctctgaccaaattcaaacgacaatagctttttactgggatgtctgattgagtcccataacatatcgagacgctcgaaattgaatgttgaacctctgagccaattcaaacgacaataacgttttactcggatatctgattgagtcccgtaatatatcgagacgctcgaaattgaatgttgaacctctgagcaaattcaaacgacaataactntttactcggatgtctgattgagtcccgtaatatatcgagacgctcgaaagtgaatgttgaagctctgagccaattcaaacgacaataactttttactcggatgtctgattgagtcccgtaatatatcgagacgctcgaaattgaa

SEQ ID NO: 2675 - DNA, 459 bp, Glycine max
  unsure at all n locations
agctnggtatccatgaggattcatataacaaggtaaagattgttgaattgctcaagtactactccaccaagagtggtgataagatgaggaaggtcagagtgaaatctactacatcacaggtgaaagcaagaaggtcattaagaactctccattcttggagaagttgaagaagaatggtgtactgtccaagacccacaaaatttatgtgacatcctacttggcccttacaaacacatgtcaaccttccacgtcagccctgctacaggagcacagacgcctgactcttagtagtcgggctccccaacaaataggttatctcaaacctaactaatattcaaatatatttgaatatcttatctattggcaggtattaaattatctataacatcatattatctacaaggtataaatgtatgattatcttctacctttgtctataatccaaatgtntatctctaa

SEQ ID NO: 2676 - DNA, 429 bp, Glycine max
  unsure at all n locations
agctntaaggtagatattgggcttatggttctttttctagcccacttatctttgtacatattagattagggtttcattatttttggaccttgtatttaaggctccatagtgtagggagggtatcctagtaatgtaggatttttcatcccttgtatattagggcacctagactagtttttgtattaggggtagttttctaatttcacatgcattaagtgcactatttgatgtgtgtgtgttgggagagaaatttaattgaattgggagaagcccaatccaactaaatattggaacttcctaaggnggaggtgagtatttgcttgttacaccccattgccacatcatatagtcacactctgtgcatgtccttcatgttntacatgcctcatgacacctaagcaaaactagcagagaatcttggacttgatc

SEQ ID NO: 2677 - DNA, 466 bp, Glycine max
  unsure at all n locations
agctataaatntatggtataagccataacaccatatattattacaaaggtaagaaaaagtcaaataaaacaatcaaactttcccaaagatggcactctttctacagctactccaagatgctatagaataaagtcaaagagattagcacaaaataggacaaatgaataaaatgataagttaacataaactcattgtcataatcttttatttatttttataattattacataactcccttgcttctaattccacttccaaacatatcctagatatttttttatttataaaacatnttttcataataattaatggatttaatcaacaaataactaacaatagaatntaataatttagttatgaaaaaaatatcaggagtacataatatttgccgttcntatttgagaaggacacaatatttagccagaactttaagacacacaatgattaaccattgagtaaacacata

SEQ ID NO: 2678 - DNA, 452 bp, Glycine max
actaagcttatggaaactttccaaagtcatctatctataactattccatacaagtacgcttaaatatgaagtttgtaagtgatggatgactgaaaaatacatcttatttatattgataatactaattaattcttttaggtcatgcttagatgtacataccatgcccaaacaacatctaaatctctatcattttggtgtgattcgattgagtattacattgctgttgatatctacttaattcttattttcatttatctaaaattaaagattatgtttttgaagcaatgcaatatttgtgtttgatatttctttatattctaagatgatatattatcggtagcaaccatacacatattattgctcttacttcatcttagtttaaaagaatttgcacaataaataataaaaatatttgttcgttactctcttagtaaactctaaaatataaaaat

SEQ ID NO: 2679 - DNA, 467 bp, Glycine max
  unsure at all n locations
agaaactcgagcttatatgacaatggtggataactcccaccttggaagctctgattatgtgatagtgctaaaatgaaggcctggtattgagattcatcaattattcttaggagtttcatttctattcaccatcaatgtaaaattttttgtattatcaatcaataaaaaatcatattagataattatcagaaaaatcaataaacttattatatatgacataatagtttaagattgataacaatgtaaaagtcaataaatactatgagtttctcaatgtttttagtcacaacttggcacttcccatggcaggtcacaaagctcatggatagggtggaaaaaacattcactaagcacttctacaactcanatcgtaataaagccatgagcatcttaagaccaaaagcaaaaagagaaagacatagagttacattttccacgggtaagcaccaagatattcatgtatatat

SEQ ID NO: 2680 - DNA, 442 bp, Glycine max
tgtccaccgtagcctttgccaatattgcattataaattattgatgtgaaactttaattatgatggaacaacaatgctaaaaatacttaagtttaagtaactgcacataaggtttgtccttctaagaatagttggagagtctgatattcttattaaaattgaaattggttttgcaattgcatgcaggcctgtatcaggggcttccatgaaccctgcaagaagtattggtccggcacttatcaaacatgtttaccaagggttatggatatacgtagttggtccaattgttggatccatagctggagcacttgcctataattttcttagatccccatacaagccaccatcagaataaaccacatggctggctttcttgaagagcagtgaataaaccacatgctgtctaataatgtacccagtgccaaaaaactcctcgctatatg

SEQ ID NO: 2681 - DNA, 437 bp, Glycine max
  unsure at all n locations
tgtgaagctcctgttntagctttacccgattntactcaaccatttgaagttgaatgtgatgctagtggagttggcattggggctgttttgatacaaaacaaaaggcctatagcttatttctcggagaaattgggaggagccagattgaactattgcacctatgacaaagagttctatgccattgtgagagctcttgatcattggaatcattatttgcgttctaatcactttatattgcattcagatcatgagtcattgaagtatatcaatgggcagcagaagttgagtccaaggcatgctaaatgggttgaatttcttcaatcttttaatttctcttcaaaatacaaggatggtaagagtaatgtggtggctgatgcactttcaaggaggtatgctttaatttcaattcttgaaactcgtttacttggttttgagac

SEQ ID NO: 2682 - DNA, 456 bp, Glycine max
  unsure at all n locations
agcttatatatatgtnttattaatatacttattttaatctgaacgtctttataattctgattgtatttatgtgctctcaatatattgatatattataaagttgaaaattatattcatccaatatgattttatgacttaacatgttaagaaagctaactagtaatattttttaatcacatatcacattctaatttgcataaaagagagacataaaatataataacacactttaatttatttataagaataatatagaataatataaaaaatattatgaaatcataacttttttgtaaacgaaaattagactctctttagttgtaggtccaatatcattgcacctttaaacgacgtttaagacctgaataganacatataatacatcgacctgatcaacatatgtgaattgctctaacttaatgatcacagtgttatagcaagtatcatcttcattct

SEQ ID NO: 2683 - DNA, 455 bp, Glycine max
  unsure at all n locations
gaaactaagcttcatcactttggcaagaacatttggaggagatcaagtagtggtcaatacaaatagagtaatggggacatagtaagtacttaatgagtcacatattttcatattatgatgcaacccattttgacatccaaattttaattntgtgtgtctactgcagtggctatatgcctattgaatatgcattgatggatcttttttaatcaaatctaatgtgttcagctttggtgtacttgtattggagataattagtgggggaaagaataaaaaatttcacaactctcagcatcatcaaaattttcttagtcatgtaagattaaagtctatattaatttccttatcttgatgtattatttcaagttgcaatcatccaatactaactgttgtgtcctaattaaacatgcacgattctctgattcggatagctataaatggaaatgttaaaaatt

SEQ ID NO: 2684 - DNA, 419 bp, Glycine max
agcttgccttgccccttgatatatatgaaggactcatggtcactatgaatgacaaattccttgggataaagatagtgtagccatgttttcaaagctcgtactaaagcatacaactccttatcataagttgaatagttaagggtaggaccacttaacttttcactaaaataagcaattggatggccttattgcatcaacacagcctcaatcccaacatttgaagcatcacactcaatttcaaaagatttttgaaagtttggcaacgcaagtatgggggcattagctaacttttgcttaagaacattgaaagcttcttcttgtttctctccccatttgaaaccaacattcttcttgagcacttcattgagaggtgctgccaatgtgctaaaatccttcacaaatctgctataaaaacttgc

SEQ ID NO: 2685 - DNA, 392 bp, Glycine max
  unsure at all n locations
gggatccttaagtcacctgctgctgcagcttgtttccaanacaagttaaattatttttctagtcttcacaacctaactctagctttctctttcccatgtcaactatgcaacttgcaatcaaaatgaatggccttcccaagattacaacgatgtcagtatcttcatagatatccatgaccacaaagactgctgcgaagataaaatgctttaccctgaccaacacgtcttcaatcactccatagggcctgcggatggagcgatcaactaattgcatagtcattcgagtggacataatctctaactctcccagtcttctgcacatggaagaggcatcaaattaatgatggctcacagatcaatcagagtctttctcctctctattgaacaaggat

SEQ ID NO: 2686 - DNA, 433 bp, Glycine max
  unsure at all n locations
tgcttaactatgtatggcaaaatntcattactgttgttcaagacatacaagtgaacttgtaacanatcttctacacttggagtgatcacatgtagtcctcttgaacccttaccacccactctgtcatcatgccgagactcangaaggccaacaggtttagccttctctaagtattctgaacaaaattcaatggcttcttctgcaatgtacctctcaacaatagaagcttctggatgatatagattctttgtataccctcttaaaatctttatgtatcgctcaaccgggtacatccaccgtagataaacaggaccacaacatttgatttctctgaccagatgcacaatcaagtgaatcatgatgtcaaagaaagcacggggaagatacatatccaactggcacagtataattgcgggctcatttccaactcatc

SEQ ID NO: 2687 - DNA, 359 bp, Glycine max
  unsure at all n locations
aatagtgtctagcgtgtaaatagaatataatagaatattttcatgtctagttctacttttctttattatatattntttgtgaaattaaaagatgctctcttttattttatgccctgttttgtttatacacaaaatataaaatatattttttgcgttatactctgtcttattttaacacgttaatcaaatgcaatcttaaaaccactaaccaaagattatctaagagcaaatgaaatgggagagaaaatggaataaaaaatcgaaggaatctacatatatattgttaagtcattgaagttcacatgatggaatgttgaaaaaagagcggtaatatctatctatctctctctctctctctc

SEQ ID NO: 2688 - DNA, 432 bp, Glycine max
  unsure at all n locations
ttcgtgttaatggacgtgaataatacttccgattaccatnttctctctctctctctctctttctctcttctgtgggaggacccttgggcctcgaataccaagcataacactgttctacaactgtggttggtgatcaggtacgagatatgaagtatgaagtggcgtgggagcggcgagcgcaaagtaattgttgatgatggcgagaaagattatacacataaaacataaagactggatttagaattatgaagataggaattaaatacggatcataatattctcttatagaacatttaatcaaaattgaataatatcagattatgaaaaaccattgaactttaattaataagataagaattaaattatattatctgatgcgataatataagtcacgtgatatctcataattacataatataaatcatatcaata

SEQ ID NO: 2689 - DNA, 408 bp, Glycine max
  unsure at all n locations
agctntctgtttcaattggagcgtctcgatatattactgtactcaatttgacatccgaatataaagttttcttcgtttgaatntgctcagagcttctgttctcaattccgtgcgtctcgatatattacgggactcaatcggacatccgagtaaaaagttattgtcgtttgaatttgttcagagcttctgttttcaattgggagcgtcttcatatattacgggactcaatcgcaaatgcgaatataaagttattgtggtttgaatatggtcagagctttctgtctcaatttcgagcttctcaatatattacgggactcattcggacatccgagtaaaaagttatcgtcgtttgaatttgctcagaacttctgttttcaatttcgagcgtctcgatctattatgggactc

SEQ ID NO: 2690 - DNA, 510 bp, Glycine max
  unsure at all n locations
ccttgccccatgatatatttgagggacttatgatcactatgaatgacaaattccttgtgataaaggtagtgttgccatgttttcaaagcccgtactaaggcatacaactcctaatcataagttgaatagttaagggtaggaccacttagctcttcactaaaataagcaattggatggccttcttgcatcaacacagccccaatcccaacatttgaagcatcacactcaatttcaaaagatttttgaaagtttggcaacgcgagtatggnggcattaattagcttttgctacaaacattgannagctcttctcgtttctctccccatttgaaacgcaacattttcttgagcacttcattgagaggtgctgccaatgtgctaaaatccttcacaaatcgtctataaaaacttgctaagccatgtgtcgcaacctacccttcagcgggagggcgatgcgtgactcgtcggatgcgtgttccacgaaaggaatacgcgcggagtcgccactaat

SEQ ID NO: 2691 - DNA, 254 bp, Glycine max
tattctcaacagtcacatctttttatttgggtcttgaatggctatcaaagacctatatatatgtgacttgagacacaaatttgagaagagtttttcagaacaaaaaggtcttatcctcttaaaaagcataatcagttcatcctcttaaaaaattcttggccaaaacactcgtgattcaataaggaattatttgagtgctcaaattgttcaatctatctctttcaagagagaatacttcttctcttcttctttat

SEQ ID NO: 2692 - DNA, 312 bp, Glycine max
  unsure at all n locations
cgttaatccatggaagctcctaatatctcccacactnnttgnggtgggtcattcttggatggccttgattntctcaagttccacttggaacccatttctaccaactacaaaacctaagaaaactatattatctacacaaaaggtacacttctctatatttgcatagagggtgtttttcctaacgattgaaagaacttgcctgagatgtcctaagtgatcatctangctcctactgtacactaaaatatcatcaaaataaacaactacaaatctacctatgaaatcccttaagacataatgcataagcctcat

SEQ ID NO: 2693 - DNA, 388 bp, Glycine max
  unsure at all n locations
caagactactacagtcatttctagattaacacaattaatcaagcagtcaaaacgatatagacaagattaaaaaatgtgactttataaaccataacatcctagacatgtccactgtagcaaagattaaaatatgaaatacaaataaccaagcatttaacagcaaggcttcactgatatgtaaacctttaaaacaagctccttggttgtgtgtgttgctatggaaacactacgctgcacaatactagacactatctctttgatagctctgtccattgcaatgggtaccgctctgtaaaaaaataacaatacgaaatagtaactcagacatatagattcgaaaaacaagcagaacattaaagtgagcaccatacctctganaatgcatttg

SEQ ID NO: 2694 - DNA, 480 bp, Glycine max
  unsure at all n locations
agcttgtaggcctnggatcttcttcatcaatggagtcctttgcttcccgatgatcaatggaagcggaatggagatggaaaaaagatgattggagacgccacttcaaggagaagatgagtcaagaagaagctcaccatcataggaagccatggataagaacttgaaggtangagaagatgggtggagggagagggagagaaggagcacgaaattttgtgtcttanatgaggtctgaactctgaagtgtaattctcaaatgatcaaagttgaaaaaatgcacacacatggttgttatttatagtctaagtgtcacanaaattggaggaaaatttgaatttctattcaaatttcacttcaatttgaaattgaatnntgtggagtcaaatttgaagccaacaattcactaattatgattagtgaatnttagttgtggttcagcccactaatccaaaatcaagtccaagattctccactaagtgt

SEQ ID NO: 2695 - DNA, 266 bp, Glycine max
  unsure at all n locations
agaatcaatgacaatgcttacaaagntgagctgcccggtgagtataatgttaattccaccttcaatgtctctgatttatctctttttgatgcagatggagaatctgatttgaggacaaatccttctcaagagggagagaatgatgaggacatgaccaagagcaagggcaaggatccacttgaaagacttggagggcctatgacaagggctagagcaaggaaagccaaggaagctcttcaacaagtgctgtctatactatttgaata

SEQ ID NO: 2696 - DNA, 524 bp, Glycine max
  unsure at all n locations
agcttccttaagaagattcctaaagaagctagagcttagctacacatacctctctaattgctaagctcacctccttgagatgaanagctagatcttagctacacaccccctataatagctaagctcacccccatgacaaanaaacatgaaaatacaaaaaaaaagtccttactacaaagactactcaaaatgccccgaaatacaaggctaaaaccctatactactagaatggccaaaatacaaggcccaaacgaaggaaaaacctattctaatatttacaaagataagtgggcccatacttagcccatgggctcaaaatataccctaaggctcatgagaaaccctgggccttcccttagatctctagcccaatctacttggagtcttctacccaatgcccttgcgggataggattgcatcattccctccaccttggaaaggatntgacctcanatcccgaggttcttcatactctgggctccttccctcaacacctggtaaaagaacanaaacatatgtattag

SEQ ID NO: 2697 - DNA, 415 bp, Glycine max
  unsure at all n locations
gcttgtgggaatttgtgatagtgaatttgccggagatgttgatgatatgaaaagtactaccagatntgtattttttatgggtgattgtgtttttacatggagttctaagaagcaaggcattgtgacactttctacttgtgaagccgagtatgtagctgcaacttcttgcacatgtcantgccattggctaagaagattgttggaggaacttcagttgttgcaaaaggaaagcacacagatctatgttgataatagatctgcacaagagcttgccaagaatccggtgtttcatgaacgaagtaagcatatagatacaacgtatcatttcattagagagtgcattaccaagaaagacatagaattgactcatgtgaaaactcaagatcaagttgcggatattntcaccaagcctctc

SEQ ID NO: 2698 - DNA, 411 bp, Glycine max
  unsure at all n locations
agctanacattatactntgagcgtctcgatatattactgtactcaatcagacatccgagtaaaaagttattgccgtttgaattggctcagaggttcaaaattcaatttcgagcgtctcgatatattacgggactcaatcagacatccgagtaaaaagttattgtcgtctgaatttgctcatagcttcaacattcaatttcgagcgtctccatatattacgggactcagtcagacatccgagtcaaaagttattgtcgtttgagttggcctagaggttcaacattcaatttcgagcgtcccgatatattacgagaatgaatcggacatccgagtaaaatgttattgtcgtttgacttggctcagagcttcaacattcaatttcgagcgtgtcgatatattacgggactcaat

SEQ ID NO: 2699 - DNA, 494 bp, Glycine max
  unsure at all n locations
agcntggtatctccttcttcactacatcaagaatcaccatgttgagtcttctctgtggctgtcttactggtttagctccatcctctaaatntattcgatgcatacatgtggatgggctaataccaggaatgtccgccagggtccagcctatagccttcttattcttcttgagaacagacaacaacttctcctcttgctcatcagcaagggaggcagatataatcactggaaaacttttgctatcatccaagtaagcgtatttcatatttgatggcagaggcttcaattctggtgtggtcggctggatagtggtagaaagagatggtttcttcacctgtacctcataaagaaagtcagaggtatgtgtacttcctanaatatggttagtcctatctgactctataaaatcaatctcaagaggtaaaacaccaccaccagacatgcaatcaatatcacttctagattcactctcagcatcagattcagacctatga

SEQ ID NO: 2700 - DNA, 231 bp, Glycine max
  unsure at all n locations
ttctcaaggtccacttggaccccatttctatcaactacaaaacctaagaaaactatattatctacacaaaaggtacacttctctatatttgcataaagggcgcttttcctaaagactgaaagaacttgtctgagatgtcctaagngatcatctatgctcctactatacacttaaatatcctctaaattaacaactacgaatctacctatgaaatcccttaagacatgatgc

SEQ ID NO: 2701 - DNA, 459 bp, Glycine max
  unsure at all n locations
agcttctgctccaggatatactntgagctactatggttattcttgataacaaaatgattaggcagtaaataatgtctctatttttgaactacaaggaccactgccaaaagctctttttcataggtagatagagattgttgcttcttgtttagtgtcctgttgaagtangcaatggaatgagagtcctacattaaaatcgcccttataccaaaacctgaagcatctacttcaaccacaaaatccttggaaaaattangaagagataagacaggagtagaagacagaaactattttatatgttggaaggctaatatcatcaaagaaaactagcaaaaattttctaaagaattgtttgaaaacaacattcataaggccttgataggttgcagtagcattcatgaagccaaatggcatgaacaggtattcataatgaccaccatatgttctgaatgcagtctt

SEQ ID NO: 2702 - DNA, 322 bp, Glycine max
tcaacattcaatctcgtgcgtctcgatatgttacgggactcaatcatacatccgagaaaaaagtattatcgtttgaattggctcacagcttcaacattcaatttcgagcgtctcgatatgttacgggactcaatcagacatccgagtaaaaaattatggtcgcttgtattggctcagagcttcaactttcaatttccagcgtctcgatatgttacgggactcaatcaaacatccgagaaaaaagttattgtcctttgtattggctcagagcttcaacattcaatttcgagcgtctcgatatgttacgggactcaatcacaca

SEQ ID NO: 2703 - DNA, 482 bp, Glycine max
  unsure at all n locations
agctngtaagccttggatcttcttcatcaatggagtcctttgcttcttgaagatgaatggcaatagaatggagaaagaagatgattggagatgccacttcaaggagaagatgagtcaagaagaagctcaccaccataggaatccatggataagagcttgaaggtaggagaagatgagtagagggagagggagagaaggagcacaaaattttgtgcctcaaatgaagtctgaactttgaagtggtaatttaaaatgatcaaagttgaanaaatgcacacacatgacctctatttatagcctaagtgtcacacaatattggagggaaatttgaatttctattcaaatntcactagaattcgtagagccaaaatttcactaattatgattaatgagatttagctatggtttagcccactaatccaagatcaagtccaatattctccactaagtgtgcttaggtgtcatgaggcatgtaaaacatg

SEQ ID NO: 2704 - DNA, 492 bp, Glycine max
  unsure at all n locations
agcttaataaatcaatctatggctngaagcaagcctcctgccaatggtatttgaagtttcatgatgtcgtcacttcatttggctntgaaaagaacatcatggatcaatgtatataccacaaggtcagtgggagtaagatttttttcttgtgttatacgtggatgacattntgcttgcaactaatgataagggtttgctatatgaggtgaaataatttctctcaaagaactttgatatgaaggatatgggaaatgcattttatgtcattggcattaagatccatanggaaagatctcgaggaattntgggtttgtctcaagagacttatattaacagcattttagagagatttaacatgaaagatngtcaccaagtgtagctcccattgtgaagggtgacanactcactctgagtcagtgcccgaaaatgatttgagcggaacacatganaatactccatatgctcagctgttggaagcctattatgctcata

SEQ ID NO: 2705 - DNA, 274 bp, Glycine max
  unsure at all n locations
tcgccgagtggagcggnctcttctncagcttcgactgcaccatggtctacctncgccagaaagatgacccctggaactccatcttcggcggcgccggcaccggcggattnctctccatgcgccagggcctncccgccagcgcccgcttcgctgagttcagcggcgtccttctcgctctcatcgaaggcgccggcatcatgctcaacaagttcctcatcgcgcagcaaccgatgccgatgattgtcgatgagcctcttccgnctaacgggctacc

SEQ ID NO: 2706 - DNA, 477 bp, Glycine max
  unsure at all n locations
agctngattaanatattntatntagttntggttcctctttcttgtatacttcttacacttctaatgtaccttggttatgtctcctttagcattttattctgataaacttattatccatcatgaaaaaagaaacctactcttttttagcagatttttgtttgctttgtatgatattaatgttggaacaggttggtcgaatgacattgggtggattattggctcttgggtacattgttgttgttagttacaagcgtgcctccacaactgtcaataatggcaanggttcaatgtctttagaaactattgatgttcttggtgagacgttcatggtgatgagaggaactaatagaaaggtatgtacttttttcctatcacactaaatttatgtccatntaaaatccaatcttcttgattgcatttactctntactttcaagttactcatcagtcatcatgttcactttatgcaaataatctt

SEQ ID NO: 2707 - DNA, 494 bp, Glycine max
  unsure at all n locations
agcttaataaatcaatctatggctngaagcaagcctcctgccaataggtattgaagtttcatgatgtcgtcacttcatttggctttgaaaagaacatcatggatcaatgtatataccaaaaggtcagtgggagtaagatttttttcttgtgttatacgtggatgacattttgcttgcaactaatgataagggtttgctatatgaggtgaaataatttctctcaaagaactttgatatgaaggatatgggaaatgcattntatgtcattggcattaagatccatanggaaagatctcgaggaattttgggtttgtctcaagagacttatattaacanattnttagagagatttaacatgaaagattgttaccaagtgtagctcccattgtgaagggtgacaaactcactttgagtcagtgcccgaaaaatgaatttgagcgggaacacatganaaatactccatatgcttcacgctgtggaagccttatttatgc

SEQ ID NO: 2708 - DNA, 235 bp, Glycine max
atacaatgcagcttggtatcaaatttgccgcacaaaggaatgagttacgtgatcttaccctactacaaagaagctgtggccattaacgtgccatgactccacagtgtcttcagtgttctcaaacacaacctctattaagcctccgaaatcggcttccatgacagaagtttgaatggagccaccactaccaatggggtagtcaaggatactttccaaggagaacaccccttggatc

SEQ ID NO: 2709 - DNA, 192 bp, Glycine max
catgagctttcccttaccaacttcaccaatagcattaccaccattctcttcatcatcttcctccttatcattcaactcattctcaatcttcccacttcccttctttttcttggtctggatataccctattagctaataagccaaaaccacagctcctgtcatctgactaataacaatgccagcaacagcacc

SEQ ID NO: 2710 - DNA, 253 bp, Glycine max
  unsure at all n locations
atgtctgatttagtcccgaaatatatcgaggcgctcgaaattgaatgttgaagctctgagcaaattcaaacgacaatatctttttactcggatgtctgattgagtcccgcaatatattgagacgctcgatattgaatgttgaaactctgagcttattcaaacgacaataactttttactcggatgtctgattgagtcccgtnatatatcgagacactcgaaatggaatgttgaagctctgaggatattcaaac

SEQ ID NO: 2711 - DNA, 327 bp, Glycine max
  unsure at all n locations
agcttcaacattgaatntagagcgtctcgatatattacctgactcaatcagacatacaagtgaaaagttattatcgtttgaaaatcctcagagcttcggtattcaatttcgagcgtctcgatatattacgggactcaatcacacatccgtgtaaaaagttattgtcggttgaattagctctgaggttcagaattcaatttcgagcgtctcaatagattaccggactcaatcagacatccgagcaaaaagttattgtcggttgaattagctcagagcttcacaatttaattttgatcgtctcaatatattaccggactcaatcagaca

SEQ ID NO: 2712 - DNA, 282 bp, Glycine max
tatgaccatttgaatttcatgagagcattcattattcaatttctataatctcgatacatcatgggcctcaatcatactcccatgtcaaaagttatggccgcttgaattggaccagagcttcaatgttcaatttcgaacgtctcgatatattatgtgcctgaatctaacatccgagtgaaaatattctaccatttaaatgtctagagagcattcgctattcaatttcgagggtctctgtatattattttcctaaatctgacattcgagtgaaaagctatgacc

SEQ ID NO: 2713 - DNA, 400 bp, Glycine max
  unsure at all n locations
gaggaaattcaaacgacaataccttttgactcttatgtcggattgagtcacggaatatctcgagacgcttgaaatngaataccgaagctctgagcaaattcaaacgacaataactctttactcggatgtccgatcgagtcacgtaatatgtcgagacgctcgaaatagaataccgaagctctgagcaaattcaaacgacaatacctattgactcggatgtcggattgagtcacgtaatatctcgagaccgctcgaaatgaataccgaagctctgagcgaattcaaacgacaataactttttactcggatgtgcgattgagtcccgtaatatgtcgagacgctcggaattgaataccgaagctatgagcaaattcaaacgacaataacttcttactcggat

SEQ ID NO: 2714 - DNA, 427 bp, Glycine max
  unsure at all n locations
agctataacattcaatttctagcgtctcgatatatttcgggactcaatcagacatccgagtaaaaagtaattgtcgtttgaatttgctaagagctgcggtattcaatttcgagcgtctcgatatattacgggactctatcagacatccgagtaaaaatttattgtcgtttgaatttgctctgagcttcaacattcaatttcgagcatcccgatatattacgggactctatcagacatccgagtaaaaagttagtgtcatttgaatttgctctgagcgtcaacattcaatttcgagcgtcttgatatattacgggactcaatcagacatccgagtaaaaagttatgggtcgcttgaattgttcagagattcaacattcaatntcgagcgtctcgatatattacgggactcaatccgacatccgagtaa

SEQ ID NO: 2715 - DNA, 420 bp, Glycine max
  unsure at all n locations
atcaatgactatgcttacaaagttgagctgctcggtgagtataatgttagttccaccttcaatgtctctgacttatctcttntttatgcagatggagaatccgatttgaagacaaatccttctcaaaagggagacaatgatgaggacatgaccaagagtaagggcaaggatccacttgaaggacttggaggacctatgacaaggggctagagcaggaaagccangaagctcttcaacaagtgtttntcatactatntgaatacaagcccaagtttcaaggagaaaagtccaaggttgtgagttgtatcatggcccanatggaggaggactaaatggcaccactttgtctcaatttagagtgttagttngctaaataatggccaatcccttgtaagtggtgacaaaatatgtttgggtaat

SEQ ID NO: 2716 - DNA, 161 bp, Glycine max
catagccttcttccttaattctctttgagagttctgctaagaattcatgcatatcacttgttattgggtggcatgtatctcctactaagaacacatgcacttgtcttttaatttcaatccatctcttacctggcttcttcactatccccctattgtgcata

SEQ ID NO: 2717 - DNA, 428 bp, Glycine max
  unsure at all n locations
catgcaagctngtgctattccaagttcattaatcatacctttattctcagatgcttccttcactccttcagttagggccatgtattctgcttcagttgttgaaagagcaacaactgattgttgatttgctttccaactgattgttgtaccaaacaaagtaaacacatatcctgttaaggacttccttgtgtctacatttcctgcaaaatctgcatctacatagcctgtgactactgcctcgtgtgcttgcttcttgtaccttanaccagctttcaaagaatccattagataccttaatgtccacttcacagcttcccaatgtgcgctttcaggatctcccatgaatctgcttataatacttacaacatgagctaagtcangtctgctgcaaaccatttcatacattatgcttncaacaccactggcat

SEQ ID NO: 2718 - DNA, 457 bp, Glycine max
  unsure at all n locations
tattccatgcaactaatataatatgatagatntgttatatcaatatgataccaataaatatgcagaataacaatatgatagcaatacatgatagatttgacataataatatgagtttgttagcacaaacacaggaataaagagaattctctcaaacaaaaagtaattggtacaaaaattcttatacatgtaacttccaaactaataaaggcttctctaatataatatgatagatttgacataacaaaatgataccaataaatctgcaaaacaacaatacgatacaaatacatgatagatttgacataataatatgagtttgttagcacagacacaggaataaagagaattctctcaaacaaaaagtaattggcactgaaattcttatacatgtatacttcaaactaatagaggcttctctaatgcaagctatttgtagctntcttaactaactacta

SEQ ID NO: 2719 - DNA, 237 bp, Glycine max
acctatggatgctaactcaagatcgtgtgtgggataattctctttcatgaatttgagttgtcaagaagcataagccactacctgtccccgctgcataagcactccacccaaacccatcttgaatgcatcacagtaccccacaaagggttcactcgggtcgggtaacactaaaactggtgcagtggtctacctttccttaaaggtacggaaactactctcacactggggcatccacac

SEQ ID NO: 2720 - DNA, 428 bp, Glycine max
  unsure at all n locations
ctaagctaagctccttaactgcacaaggctcnttaatattgaagagtattcttgtgggaccttgacccgacgaagacactaacaaaaacttatcttctcctttttggacaaagtatgacaagttggaggcaagtatatnntttttccaataaaccttggatgcaactgcgatcgtatacactgtcacatacatttttctctacatgcataacatcgatacaatgtctaacatctagatcagaccaatacagaagatcaaagaaaatggacctcttcttccatatgcaagtcttactttcatccttctttagggtattntcagatacagtattcaggtgttcaatccgctagaagacctcgtgaccagtcaatggtatcgacgcagtttcgtgctcttaacttncattaaaaagctttttcaatcgtct

SEQ ID NO: 2721 - DNA, 411 bp, Glycine max
  unsure at all n locations
ctgacttgctttccaatctgacattcaccacagattctgccttcttctattttcagattgggaatgcctctaacagcacttttgtcaaggattntcttcatgcctcttaagtgcagatgtccaaacctttgatgccatattctgacttcatcttctttggtggatagacatgtggaggaatagctcggttcttggggtggtcatangtaacaattggtctttgatctgcttgccttcattagaacttcactcttctcatttgtcaccaagcattctgactttgtgaagtttacattgaattcttcatcacacagctgactgatgctcatcaagtttgcaagcagtcccttcaccagcagtactttgtcagactaggaagtcatcatgaactagctttccattccaatgatc

SEQ ID NO: 2722 - DNA, 353 bp, Glycine max
  unsure at all n locations
ctcttttacaanttgataaaaacaaaaattatgcaaaaaaatgaattaggttatataattnttttttaaaaagaataattcagtaaataattataaaattatatggtttaaagaatttgtaacagtaatgaatgatataatgatgatcattactatcgtgtatatgtaataacataaaaatagatataagggttttctagacaactaacanaaaaagataaaagaacttttagattgaataaaaggataaaataaaatttcaaataaaatagtatggataatntaaaaaacaacttataaaataatttattttccataagttacttcaattagttaatggaaaataaactact

SEQ ID NO: 2723 - DNA, 203 bp, Glycine max
  unsure at all n locations
agcttaagaaacagntataggagttgtgggagaagttgtttgtgatatccagtgtgtctccatggggagcaccagtgttgntagcgaagaagaaagatgggaccatgaggttatgtgtagactatcaccaattgaataaggtgacgattaagaataagtaccctttgccttacctggtaggagcttatgtgtttagcaagata

SEQ ID NO: 2724 - DNA, 416 bp, Glycine max
  unsure at all n locations
aaataccttcatctgacttagcatcaaattttcctaagttatcttttccattattcaatacanaacatttacaaccaaagatatgaagatgtgagatgtttggttttctgccattgaacaattcatatggagttttctttaaaatgggtcttattaaagccctatttaaaatgtagcatgcagtgttaacggcttcagcccanaagtattttggaagaggagtatcatttaatanagttctagccatctcttccaaagatctattnttcctttcaacaacaccattttgtcgaggggttcttggtnngtgaaaagtatgctcaattccatgcttttcacaaaataattcaaattctttattttcaaactcacccncatgatcactcctaatagatataatcttgagaattttctta

SEQ ID NO: 2725 - DNA, 238 bp, Glycine max
tattccttagtcatatgccatgacaataaacaaatctcatggccagtcactagaatgtgtcggactttacttgccctaataatgtaagatttttcagcccttgtattttagggcacctagactagttttgtattaggggtatgtttgtaatctcacatgcattaagtgcactatttgatgtgtgtgtgtgttgggagataaatttaattgaattgggagaagcctaatccaattaaat

SEQ ID NO: 2726 - DNA, 419 bp, Glycine max
  unsure at all n locations
actaagctgctaccatggaactctaattctccacactnnttggtgtgggccattcttggatggccgtgattttctcacggtccatttggaccccatttctaccaactacaaaacctaagaaaactatattatctacacaaaaggtacacttctctatatttgcatagagggtgtttttcctaaggactgaaagaacttttctgagatgtcctaagtgatcatctaggctcctactatacactaaaatatcatcaaaataatcaactacaaatctacctatgaaatcccttaagacatgatgcataagcctcataaaggtgcttggtgcattagtgagcccaaaaggcatcactagccattcatacaaaccaaacttggtcttgaaagcagttttccactcatcaccctttttcatcctg

SEQ ID NO: 2727 - DNA, 314 bp, Glycine max
  unsure at all n locations
ccacgctcttgtggcgcccataccgttgcatcaacattcatcatgataagtgtgacacattntttttctcataatcgtgctactcactcgttaatcccacagattggaattgttcgcgctcagagaaaccaagcccaaaaccttaacaacttcacgcatgatgaacaagaagaatagattgggctgttagacaagtggcctcagatatctctaagaaggaggggttgaattaagatatcaaagactatntctcaattaagattttaactctcttcttgattaataattacccttatatgaatactcaaagatat

SEQ ID NO: 2728 - DNA, 251 bp, Glycine max
tgtactcatagatagattcaataatggttgcatacttatgatgcacatcaccattccctttaatcacatgaagatcatggagggagtatgaatgttttcttatgctcggccaacacattaaaaatattatatgatatatcttgtgtggaagtaggtcaacatttctattatcaaataaggagtttcaaattacatgcccaagtacttattacttcttgggttgtaattgtatttgaaaggcaaatatcaca

SEQ ID NO: 2729 - DNA, 257 bp, Glycine max
tcgcgttatatatcgagatccccggaattggtaacggaggctctgagaaatttctaacgacattaactttttactcggatgttcgattgtgtcccgtaatatatcgagacgctcgaaattcaaaatagaagctttgagccaaatcaaacgacaattacttttgactcggatgtccgatggagtcctgtaatatatcgagacactaaaaattgaaaacagaggcactgagaaaattcaaacgacaataactttttaca

SEQ ID NO: 2730 - DNA, 309 bp, Glycine max
  unsure at all n locations
agctngcacttatatatgaagcatcagatactaattattaagaatctatagaacctcgagatatgtacaactgcaaacaacaaggcatatgttattcattcaattattcaagtcttctaactagcaaacagaatcaacaacttaagaacaaaacctgaatcaaaatggaaatctttccatgtttattggaaggaccacccttaatttctaatggacatgatgtgcgtgccaacatctctagctcattctgttcttctttccgaacagcaatattctcanattcagatgaatggtgcaatcatgtaatca

SEQ ID NO: 2731 - DNA, 346 bp, Glycine max
  unsure at all n locations
tctcgatgtgtattaaattgcttatatatggattttcactccttagtctttaaagctacaataactaggatgtttggatattctctggatataacattgaattttctgattgaatttgtcctatggtgttgcacgtgcacctctacaacagaatagatgctctaaaggatcaacatggggcaacttacagtcttgagaagtgcatgatatcaatctgcattaatggaatctacataagagtagaacttggaggacaantgggttactatattgatgtccttgcatgctccacgaanaacttgtctganaccttaagagtcattatataacttataatccctgcaat

SEQ ID NO: 2732 - DNA, 318 bp, Glycine max
actccctactttgtcttacatggcacacaccctaactattcatcggtatgtatctttggttctaaatggtttccctacacttgggatgcacgacataacaaattcgaccctaaaacccttccttgtgtggttggtggatatagtgatatacataaaggatataaatactttcatccttctagtaagaaattttttatctcatgacatggttgttttgacgagtcattctttcaatataaaactaattggtatcatacaatttcctcttctacacagcatgtagttagcatatttgattcttggctacctcatactaac

SEQ ID NO: 2733 - DNA, 430 bp, Glycine max
  unsure at all n locations
agatactaagcttatgttggtcaagacagacttgagcatatataatactcctaactattgatgcatactaaattgcttncattcgttttcgttccatatcatttctaggacattgtgcgagactaaatttgtctcccttctgaattggaacgggtgatgctgagcacttttncatcctaaacctctctagtattttattgatatatgctttctaagacaagcctaacaatccttgtgatctatttcagaatatttctatccctatcacatagcttgcctcacccatatccttcatttcaaagttactagagagaaacttcttagtgtcatgaagaagactaaaatcattagttgcangcaatatatcatcaacatacaagattagaaaaataaccttacttccactggcctttagatatatacgccgatc

SEQ ID NO: 2734 - DNA, 405 bp, Glycine max
  unsure at all n locations
agctnggaacaggaagaatccatcagcaaagcacctatagggcttggatctatatgctacattcatattctagacatgaagaggcacaagcttgaagacaagactatacgaggtatcttccttgggtatagcaatatctctaagggctaccgtgtctacaacttgcaaactaagaaactcgtcatcagtcgagatgttgaagttgatgaatatgcttcttggaattgggatgaagaanaagtggagaagaacgttcttatacctgctcaactacctcaagaagaagatgaggaagaagacccaggtgaaccaccttcaccttcaccacaacaacaagatcaagaactatcatcaccagagtctactccaagacgagtaagatctttggtnacatatatgaaacct

SEQ ID NO: 2735 - DNA, 271 bp, Glycine max
  unsure at all n locations
agctataagaaattanatggtttaggtatctttttggngccgattcacgaacatcaactatttacccgatcaaaattaaacgacggaagctctcgagaaattgaaattatcataacttttcacacggaggtccgagtcatgcacatcacatatggagacgcccganattgaaccacggaagatctggagaaattcaaatggtcataactttgcacacggaggtccgattcaggcgcatcatatatggagacgctcgatattgaacaacgga

SEQ ID NO: 2736 - DNA, 427 bp, Glycine max
  unsure at all n locations
tgttggttttcgaaactcganttgttgcaaggatatcaccaaattcgtatgcattcctcaaacattgctacaacggcctttcgcactcaccacgaccactgagtttaaggttatgcccttcgggctatgcaatgctcattccacctttcaggcaacgatgaacatgcttttccagccattcctctgacgatttctaattgtcatctttgatgacattttaatttatagcatcacctttaatgatcatgttcttcatctgcaacaagcttttcacgttttgttggacaatcaatgcatcttgaagttgtccaaatgtacttttgctcagccacaggtggaataccttggccatgtggtctcccaacgaggggtggagccagtcacttccaaggtggatgctgtgcgccagtggcccactccgcactct

SEQ ID NO: 2737 - DNA, 455 bp, Glycine max
  unsure at all n locations
ggccgccacggagttttctgactatgctcttgtgtggtggaacaagctacaaaaggagagagcaagaaatgaagagccaatggttgatacatggacggagatgtaaaagatcatgaagaagcggtatgtgccggctagttactcaagggacttgaaattcaagctccaaaaactaacccaaggcaacaagggggttgaggagtatttcaaggaaatggatgtgctcatgattcaagcaaatattgaagaagatgaggaggtaactatggctcaatttcttaatggtttgactaatgatatccgtgatattgttgagctgtacgagtttgttgaaatggatgatttgcttcacaaagcaatccaagtagagcaacaattaaaaaggaaaggagtggctaagaggagttntaccaactttggttcttctagttggaaagacaaacgtaagaaagatg

SEQ ID NO: 2738 - DNA, 430 bp, Glycine max
  unsure at all n locations
agcttcagccaccataatctgatcatccgcaaagaataagtgtgagacattaacccaccgagaatggatgcgagttaccattctgaactgaatcttggatgagatgtgccaatctctgaatacacaacacaaatatatagggagagaacgggtccccctatcttctcccacacatgggggtgaaagaatcaaagggaataccattccaattaatcgccataaatgtggaagacatatgaacatgaatggcattagccatccaaggcggaataccaaccttgctgagggtatcaagagtaaaatcccattccaccttatcatacgccttttgaaggtccaaattcaacaccatgtaaccctccttaccacgcaaattctcaaaattaatgaagcatgacaaanaggttaatggagtatttttttttcaact

SEQ ID NO: 2739 - DNA, 249 bp, Glycine max
  unsure at all n locations
atgttgttgtggatgatttctccaagattacctggcgtaactttatcagagagaaatcagaaacctttgaagtattcaaagagttgagtctaagacttcacaggagagaaagactgtgtcatcaagagattcaggagtgaccatggcagagaatntgaaaacagcagggtcactgaattctgcacatctgaaggcatcactcatgagttctctgcagccattacaccacaacagaatgggatagttgag

SEQ ID NO: 2740 - DNA, 479 bp, Glycine max
  unsure at all n locations
agctttgcaagctggaatcatttatcctatctccgacagccaatgggtgagtcccgtctaggtagtcccgaagaagaccggccttacagtgatcaaaaatgagaaggaggagttgattcctactcgagtacagaacagttggagagtctgcattgactataggaggctgaaccaagtgaccaaaaaggaccattttcccctgccattcattgactagatgcttgagcgcctggcaggtaaatctcactactgtttccttgatggtttttctggttatatgcaaattactattgctcctgaggatcaggaaaagaccacattcacctgccccttcgccactttntcctataggaggatgcctttcggcctgtgcaatgcccctggtaccttccagcggtgcatgattagtattttcagtgatttaattagaaaatgcatagaggtggttatggatgatttcactgtatatggatcctctt

SEQ ID NO: 2741 - DNA, 456 bp, Glycine max
  unsure at all n locations
tgttggaatatatncgatcatgaaactacctttactttctcttaattcagagatcacagtagaatacgcccagttacctacgagtcaaaagacatctttacttggaagaatgaacatagttaaggtaaaaatgaactcatttcacctgaagcaagcaagtccttccatctattagaaggcgagttccagctgctgcttcctttgcatatatttatagcaagaaagtgaagtataaaaactcacgcagaattcagcatcttataccttctgtcgcgttccgccattgattacttaccattgcaacacatatgcctcgtcaaaattgtaaagcataacattcacgagaataaagtgaagtgcagtaacaacaaccattgatttaatatgcagcacacacatacaaaatctgaagctatgactacatttattgagctaactanacctaaacagaaattc

SEQ ID NO: 2742 - DNA, 478 bp, Glycine max
  unsure at all n locations
agcttgtcatcgattacacacatactataatcgattaccagaggagattntcaganaatattctcaattgtcacatcttttcatttggttcttgaatggctatcaaaggcctatatatatgtgacttgagacacgaatttgctaagagtttttcagaacaaaaaaaggtcttatcctcttaaaaagaaaaatcgttttatcctcttacaaattccttggccaaaacacttgtgattcaataaggaattatttgagtgctcaaattgttcaatctatctctttcaagagagattatttcttttcttcttctttattctgaaaaagaattaagagatcgagggtctcttgttgtaaagaaatctgaacacaaaggaaggattgtccttgtgtggttcagatcttgtaataggctcttacaagatagtggaactctcaagtgggttgcttgtggactgaacgtangcacaagggtgtgacc

SEQ ID NO: 2743 - DNA, 463 bp, Glycine max
  unsure at all n locations
gttcgattcctttctttntcttatcgttctcctcatgctgattcagtttcattagttccatttcgtgttcctgtaactttccaaataaagttgcaagagacatgttagaaagatctcttgattatgtaatagttgttacctttggttgccattccctgcttaaacatcttagaactttattaataagatcctcattgggaaatatctttcctaatgatgcaagatgatttactatgtgtgtgaatctcttttgcatgtcctgtatagtttcattaggattcattctaaacaattcatattcatgagttaaggtattcattctagacctctttatatttgttgttccttcatgggttacttgtaaggtatcccacatatcttttgcactcttgcaatttgacaccctaaagtattcatccattcctaatgtagatgtaattgtatttntggctttttaaatata

SEQ ID NO: 2744 - DNA, 448 bp, Glycine max
  unsure at all n locations
tacaatattgcttattacacatgagagatgaatatatatcaaattgcactcgtataactttgataagtcttacatcattnttataacttgatatagaatgtgattcttattaatcaacccgccgaattatatctatgcattattaaaatcatctatgtcaaagtttgtcaaaattgaataacaataataaggtaatcaaatgatttatattctaatatattttaaaatatttatattacgtcgactttaatatataagaacaagataacaagtgattttggattaatatcaaattttacatatgtgacctatgtgaaaaaaaaaaacttttaatccaacgatgagtcttaagaaaacatatccagttgaaagctataatatgatataaaaattatcacagctatatacatcgaattcgatctctcctctctatttctctctctatata

SEQ ID NO: 2745 - DNA, 428 bp, Glycine max
  unsure at all n locations
tcttagttntcgatgatgcagatgagtttgtggctacctcatgcactcctctaatgactatagcatcattcctagcgctaaactgttgggagttggaagccatcttcttaattaaattcctggcttcagcaggggtcatgtctccaagggctccaccactggcagcatctatcattcttctctccatgttactgagtccttcataaaaatattggagaagaagctgctcagaaatctggtggtgagggcaactagcgcatagttttttaaatctctcccagtattcatataggctctctccactgagttgtctaatgcctgaaatatcctttctgatggtcgtggtcctggaagtagggacatttttttctaagaatactctcttgaggtcatcccagctcgtgatggaccttggcagcaggtaatat

SEQ ID NO: 2746 - DNA, 464 bp, Glycine max
  unsure at all n locations
agcttggtagtttcatagggcttgagtcttaacttatccagctcattcaattgttgctacctgttgctacctacaagcctaagatcaaagtttataaactatagagcccacatggctttgtgaacaagttcaacaagcaaatggaaattcttgccataaactagactaaagggagacatcaaagtgggagtcttaaaggtttttttgtatgcccagagtgtggtcatccaattcaatgaccaattctttctagatgctctcacagttttctctaaaaccttctttagttacctattagatacctcaacttaaccaattgcttgagggtgataaaaagtaataaccttatgggtaacaccatatttagccaaaaggctatcaaacaatttaatgcanaagtgtgttcccccatcaccaatgattgctcaaggtataccacagagtgtaaaaatgttctatttcag

SEQ ID NO: 2747 - DNA, 447 bp, Glycine max
  unsure at all n locations
ctgcagcttactgaattgctggtcttattgaagaacatgtcttctgaacaaaacactttgccgaanaatcactacgaggccaaaaagaatttgtgtccagtgggaatggagtacaagaagatccatgcatgccctaatgattgcatattgtatagaaatgagtatgcagaactacagcaatgccccacgtgtggggtatcacgatacaaagtgcaacatgatgaattaactgatgatgcangaaccaaaaattgtcatcctgccaaggtgtgctggtatcttccaataataccaaggtttaagcaattgtttgctaatgcacatgatgcaaaaaacctttcatggcattcggatgaccgaaaatctgatggattactgcgacatcctgccgattcgccgcagtggaagacaattgatcgtttgtatccagagtttggggatgagcca

SEQ ID NO: 2748 - DNA, 346 bp, Glycine max
  unsure at all n locations
atgtgctcggatcgctcatgatgagcatggtttgaagcaagacttatagcataattattatcataaaagtacatcacagagggctcatcaaccccaaagtgaagaatctacttggtgaaccgatcgatttcactactaacagaagacaagacaccatatttctccttcgtggatgacttcgaaaccgtggataattccttaaaacncccaaaaagaaagttattttccaaatagacacacaagtcagaagtggatcttatggtatcaacacaacgggcccaatcagcatctgccaatgcagcgatggcgagagagtactgagcagggaacaacactccttgtccat

SEQ ID NO: 2749 - DNA, 428 bp, Glycine max
  unsure at all n locations
tactcagcttaacattcaatttcgtgcgtctcgatatgttacgggactcaatcacacatccgagtaaaaagttatggacgattgtatcggctcatagcttcaactttcaatgataagcgtctggatatgttacgggactcaatcacacatccgagtataaagttatggtcgtctgaattggcttagagcttcaacattcaatttcgagcgtctcgatatgttacgggactcaatcagacatccgagaaaaaagttatcgtcgtttgaattggctcagagcttcaacattcaatttcaagcgtctcgatatgttacgggactcaatcagacatccgagtaaaaagttatggtcgtttgtatcggctcagagcttcaacattcaatttcnagcgtctnnatatgttacgggactcaatcagacatccgag

SEQ ID NO: 2750 - DNA, 367 bp, Glycine max
acttaattagactgaagggacacttgacacactcaaactaagtaccccgtttgacaacatattcacatattttatacagcacgtcttgaccctcaacatatatggacaatgagaatcactcagccgtgattatcaccaataaactcacttaaggataattacttgattagaagtggctcaacatgattaaaaggtgtattacacaactggtaatcagccattgcagcagcacttcacttctcttttgacgtatgcaactatccaacactattagaaaatatgctttctacatcggttatttatgactttcaacatcggttcttgaccgatgttgaaagaccgaccgtgatagtattatcgataacat

SEQ ID NO: 2751 - DNA, 437 bp, Glycine max
  unsure at all n locations
agctngccattaattgtacatctggtgtggaaaatattttctctttgtgtgtcgtccagtggctgcatctgacttcacaagagccttctcaccattagcatatcaccctgcatagctttctcctcaagctcttcttccacctcttcttcttcactgatttcagattcactggtgatttctccatctgccttcatgatcatggttctcctggttggacaggcaaaagcaatatgtcctctgcctaagcatttgaagcattttatgtttctggtaccggtgttggatcatggggtagaattatgcttagttctagctactgacattccatgtgaagactgtgttgatgggctggatgagttgcctccctccttcttggatctgctggtccacgtctagttgaaggtgctggatgagttccttcttggctgcgcttttct

SEQ ID NO: 2752 - DNA, 472 bp, Glycine max
  unsure at all n locations
agcttcctaatgtgactatgactcataacatattttttgagagccaatcatgtaattgtgtacatatattagtattgtacattcaagaataattgaaacacattatagatagagaaaaagtgcattaagagagtgtgcattaagagagttgcattgtcttatatttttcttatatcataaaagtcttttcaattgtatgcctatttttttatgtctagataaattcgtgatgtaactaactacgaatattatgcaaaatatcatttaaaactttttcaatcaagaagaatcattaaactctgcatacaattataagtttgtaacaataaacagacaatattaaagaagaaaaataagtttatttgttgaacaagtttattttaatgtggtttttgatcttcatcgagaattcatacagtggataaaanacgtgacaattagaagtaatatagtggatttggtccatgtcttc

SEQ ID NO: 2753 - DNA, 433 bp, Glycine max
  unsure at all n locations
agcttgtagcatattcaaacgaccataacgtttaactcggatgtctgattgaggcccgtaatatatcgagacactcgaaattgaaaacagaagctctgaggaaattcaaacgactataactttttactcggatgtccgattgtgtcccgtaatatatcgtgacgctcgaaattgacaacataaggtctgagcaaattcaaaccgacaataacttntactcagatgtccgantgaggtccgtaatatatcgagatgcttcaaattgaaaatagtagctcctagcaaattcaaaacataataaatctttactcggatgtccgattgagtcccgtactgtatcgagacgttcgaaattgagaacagacgctctgagcaaattcaaacgacactaactgttntctcggatgtacgattgtgtgctttagtatatcta

SEQ ID NO: 2754 - DNA, 471 bp, Glycine max
  unsure at all n locations
tagtgaaaatgagttgtgtataagtgagactcgttgttgtttgtgaatgatctaatgttgttntatttctttgttttacatgtcttttcaaataaaagaaagaaatntttttgatttaattacacttttagcctctcaacttagcataattgaaatttgaagatcaaaatcacgaaattgtaaatctagatttgaatgtagaattagacctatttttgtttaaaatattcaaatgaacgctaagttctaacaaaaagaaaaatattactcctccctaagatttcatttcatctgtattgcatattaattattttttgactaaaatattttaaactattttctctcttctctaatggagattggaaaaagatgaatagattctcaataaacttaagaatatatttgaaaaaatattaacagtatagtcaaaattaatggtaataaataattaacttttctaataagcataaa

SEQ ID NO: 2755 - DNA, 437 bp, Glycine max
  unsure at all n locations
aaccgccgagccagatggaaaaccaaacaattggagagagattatggtgtcctcaaagccaattatgatgctcttaagcttaactttggcaccctcaatcaggacaacgaagccttacgaaagcaggtagaataataatacaacatagtataatatctagaagagttgattttgagtctaattaatttaaaataaaaagtataggtgaattttgagtgagaaaacaaacttcatgcctgaatttcctattannattttttctgggtcgtgcctttcaatctagaaactatgctcgatggatctaacctcatgcttgaaatgatcagtagttttctaattaagagctntcttctcttaatctaaccttcttttaataataaagaanaactcttgttgagaaaacgattatctaacaagaaatatttatatttgattat

SEQ ID NO: 2756 - DNA, 374 bp, Glycine max
tcgcatggagctacatcaaataaaacaccaaatagacttagtcccaggaacaagccttcctaataggctaacttataggactaatccacaagagaccaaggagattgaatcccaagttaaggaattgttggagaagggttgtgtccaatagagccttagtccttgtgttgtgcctgtgttgttggtgcccaagaaggatggttagtggagaatgtgtacagattgtacggccatcaacaacataactgtgaagtataggcaccccattcctaggctcgatgatatgcttgacgagttgcatggtgcacacatattttccacaattgatcttaaaagtggttatcaccaaataacgatgagagaaggtgatgagt

SEQ ID NO: 2757 - DNA, 403 bp, Glycine max
agcttatctccttgagaagctttcttaagaagattcctaaagaagctagagcttagctacacatacctctttaatagctaagctcacctccttgagatgagaagctagagcttagctacacaccccctataatagctaagctcacccccatgacaaaatacatgaaaatacaaaaaaaaatccctactacaaagactactcaaaatgcctcgaaatacaagctaaaaccctatactactagaatggcaaaatacaaggcccaaacaaaggaaaaaactattttaatatttacaaagataagcgggctcatacttagcccatgggctcaaaatctatcctaaggctcatgagaaccctagggccttcccttggatctctggtccaatctacttggagtcttata

SEQ ID NO: 2758 - DNA, 461 bp, Glycine max
ctcattacatggagactgaaaaagagagaataagctttattagtatttggtttcttttcagctcctactactttgatagctacgcctgtgacactgaaaaggattgagaaaacacgcttcttatttttatttatttatatctataagatatgagatagagagagctgcgattactattactattgagacatccaatacttgctcatctcaaagccattcctgccatagggatagtcttcaattgtgttctcaatctcagactgcgtgttcatcacaaaagggccatgctgaacaactggctcattaagtggttggcctccaatcagaacaaatctcaaaggctgtgaagagttattccatacgctgaggccatcaccttgagtcaaaacaaggacatggtgtggcacagttggggatgatgttggagacccgaacacttcttcaccttcaattatataaac

SEQ ID NO: 2759 - DNA, 473 bp, Glycine max
  unsure at all n locations
agctntatatttgtacccaacttcccatttagagtggtgtcttgtgagatctattggtgctngtccttggccatttaattgtcagaatatgaatatggctttagtttcatccttcttgtactcaaatgctagaaagagagttgtgaactatttgctgagatgtgaatcattcgggcttctaactttatatttttatgctatgatctctcagtggaagcaatgctaaagctgaagaccaatctctggaagcatggtaaatttgtcaataggaatacaccttttctctctcctgtaagcatattgctgctaggcatttttaaggttgataatgtacgatacaaatgggcaggcttgagcggaaactctctgagcaaaatatgggcgctcctcctagctatgaagaagctgtcagtgaatctcgcagccctcgtcacagtgaaaggtatgaacttttatactacagaaagcactta

SEQ ID NO: 2760 - DNA, 458 bp, Glycine max
cgcttctacagaaatatctttagtgctatataactcactggtttaattgactaccgcatttgtgtaatcgattacataagtcttcgagaagttatagatagatctaatgtagctccatgtagagcttgtagtccttggatcttcttcatcaatggagacctttgcttcttgaagatcaatggcagcgaaatggaggaggaggaggaaaggtgattggagacgccacttcaaggagaagatgagttaagaacaagctcaccaccataggaaaccatggataatagcttgaaggtaggagatgatgactagaggaagagggagagagggagaatgaggtctgaactttgaagtctaatttctcaaatgatcaaagttgaaaaatgcacatacaaggcctttatttatagccacacaaaattggagggaagattgaatttctattcaaatttcacttgaat

SEQ ID NO: 2761 - DNA, 462 bp, Glycine max
  unsure at all n locations
ntctatctcttctntaaataaagatttggtggtagagaccccaactagtggttctgtgttaacttctaatgtgtgtttggattgtcctgtggaagtttctggtaaaataattatgattgatctgatttgtttgcctttgagccaaattgatgttattctaggaatggactggttatcttccaaccatgtcttgttaaactattttgataaaactatggtgtttgatggttttggagtgagtaaggatatgatgttcatctctaccaaccaagttgtgtgatgaggacatgaccaagagcaagggcaaggatccacttgaaggacttggaggacctatgacaagggctagagcaaggaaatccaagaaagctcttcaacaagtgttgtccatactatttgaatacaagcccaagtttcaaggagaaaagtccaacgttgtgagttgatgagaatcctgaaact

SEQ ID NO: 2762 - DNA, 415 bp, Glycine max
  unsure at all n locations
tcaacattcaatatcgagcgtttcgatatattacgggactgaatcagacatccgagtaaaaagttattgtcgttttaatttgcttagagcttcggtattgcatttcgagcgtctcgatatattacgggattcaatcagacatcagagtaaatagttattatcgttttaacttgcttagagcttcgataatcaatttcgagcgtctcgatatattacgggactcantcagacaaccgagtaaaaagttattgtcgtttgaatatgctcaaagcttcggtattcaatttcgagcgtctcgacatattacgggactcaatttgacatccgagtaaaacgttattgtcgtttgagttttctcagagcttcggtatgcaatttcgagcgtctcgatatatttcgggactcaatcagacat

SEQ ID NO: 2763 - DNA, 449 bp, Glycine max
  unsure at all n locations
agctntgagcanattcaaacgacaatataattttactcggatgtctgattgagtcccgtaatatatcaagacgctcgaaattgaataccgaagctctgagcaaattcaaacgacaataactttttgctcggatgtctgattgagtcctgtaatatatcgagacgctcgaaattgaataccgaagctctgagcaaattcaaacgacaatcactttttactaggatggctgattgagttcactaatatatcgaaacgctcgaaattgaatgttgacgctctgagcaaattcaaacgacgataactttttactcggatgtctgattgagtccatgaatatattgagacgctcgaaattgaataccgaatctctgagcaaattcaaacgacaataactttttactcggatgtccgattgggcctcgtaatatatcgcgacgctccaaattgaa

SEQ ID NO: 2764 - DNA, 454 bp, Glycine max
  unsure at all n locations
ctcgagaaattcannatgtcataactnttcactcggaggtccgattcaggcgcataatatatcgacacccccgaaattgaacaatggaagctctcgagaaattcaaattgtcataacttttcactcagaggacccattcaggcgcataatatatcaagacgctcgaaattgaacaacggaagctctcgagaaattcaaatggtcattacttttcactcggaggtccgattcaagcgcatcacatatagagacgctcggaattgaacaacggaagctctcgagaaattcaaatggtcatagcttttcactcggaggtccgattcacgcgcataatatatcgagacgctcgaaattgagcaacggaagctgtcgagaaattcaaatggtcataactnttcactcggagatccgattcaggcgcataatatatncagacgctcgaaattgacaacgg

SEQ ID NO: 2765 - DNA, 395 bp, Glycine max
agcttccattgttcaatttcgagcgtctcgatatattatgcgcctgaatcggtccttcgagttaagacgtatgaccatttgaatttgtcgagagctctcgttgttcaatttcgagcgtctcgatatattatgcgcctgaatcggacctccgagtgaatagatatgaccatttgaatttgtcgagagcttccgttcgttaattttgagcgtctggatatatcatgcgccagaatccgactccgagggaatagctatgatcaattgaattgtcaagagcttcattggtcatgtcgagcgtctgatatattaagccctgaatctgcctccgaggaatagtaccaccatttgaatttctcagagcttccgttgttaatctcgagatcttgatatttatg

SEQ ID NO: 2766 - DNA, 462 bp, Glycine max
  unsure at all n locations
tcgtaagacgcctgaacataacatcactaaagctccttttcccttcttttattggagggcacaaccggttaaaaagagccttatctgactgtgttgactcatggaaaattcgggtatcaattgcagcagctagaagattgtttgctgcagttattgcatgaatatctcctgttagatgaagattgaattcatccatgggaataacttggctatagccaccaccagctgcacctnctttaattccaaaagtaggtccttgcgatggttgacgaaggcaggtgactacctaacaaaaagagataagatgggattatgtatccagcataactttgacatacgattaaagattgtagtttttcaataatatcttgaacccaaataaccagtgaaggcctaaatgatgaatgagcaattcctacatcctgtcatctcatcatcacataagcaaaaaaaanaaacaca

SEQ ID NO: 2767 - DNA, 232 bp, Glycine max
  unsure at all n locations
tcggttntaaatttcgagcgtctcgatatattacgggactcaatctgactttccagtgaaaagttattgtcgttagaatttgctgcgagcttccgttctaaatnttgagcgtctcgatatattacgggactcaatcggacatccgagtaaaacgctattgtcgttcgaatttgcaacgagcctctgttttcaattttgagcatctccatatgttattggactcaatcagact

SEQ ID NO: 2768 - DNA, 446 bp, Glycine max
agcttgcagcatatgctaacgacaatatcatttcactcggaagtccgattgagtcccgtaatatatcgagacactcaaaatttagaaccgaagctcgtagaaaattcgaacgacaataacatttcactcggaagtccgattgagtcccgtaatatatcgagacgctcgaaatttaaaaccgaagctcgtagcaaattcgaacgacaataacttttcactcggaagccgattgagtcccgtaatatatcgagacgctcgatatttaaaaccaaagctcgcagcaaatgctaacgacaataacatttcactcggaagtccggttgagtcccgtaatatatcgagacgctcgaaatttaaaaccgaagctctctgcaaattataacgacaataacatttcactcggaagtcgagtgagtcccgtaaatatcagacgctcgaaattaaac

SEQ ID NO: 2769 - DNA, 446 bp, Glycine max
  unsure at all n locations
tgctttaagactgtatattgatatctttagtatgcacaccatgtgttcatttccttcaactgagaaccccattgggtggtccatacaaacattctcctctaaatctccattcagaaaagcggatttcacatctatttgatgtagctccaagtcataatgggctactattgtcatgataatcctgaaagaatcctttcgtgagaccagtaaaatgtctctctataatcaatgtcatctttctgagtaaattccttagcaacaagtctagccttgtaacgttcaaagttgccatgagagtcacgtntagtcttgaagacccacttacaaccaactctcttacaaccccttgttaattctacaaggtcccaaacaccattatgttccctgaaatctatctcttctttcatggcatttaaccacttctcagaattatcacaacttatagc

SEQ ID NO: 2770 - DNA, 438 bp, Glycine max
  unsure at all n locations
ntatgctctagctctatgggtaggtgacaattntatcaaacacaagtctatattgagacataccaatgagagttttaaatgttgtcctataagcccaaagtgcatcatctagtttaattgcccaatctttcctagatgcactaactgttttttcaagaattatttttaactcgctattggacaattctatttggccactagtttgtgggtgatatggngttgcaagcttttgagtcacccatatttagccaagaggccatcaaacaacttattacagaagtcagtgcctttgtcactaatgatngctcgaggtgtgctaaatctggtgaaaatatttntctttgaaattntnttaccaccagagaatcattaatggggagtgctactgctttttccctcttagacatgtaatccaccacaacangtatatattcatta

SEQ ID NO: 2771 - DNA, 465 bp, Glycine max
  unsure at all n locations
acggatgcttgagcaattactgaaactccttccagcagcaatcataccttntaccccanaccaagcaccgtaagtgaagcatactccccaagaaccatacctgtttagcagtttaagtgattagaggtctactgaacagagaaagttcaatttcatgcagaaatagaagctggcagaaagaaagaaaaataacatagagtagaacatacttgagattcatgaatacccncaaaaaaacacttcaacgttataaacaatatcaatagaaaaggttatganaaaagactcccagatgggaggagcataccatgatccatctgaagcttgtattgtttcaatgaaggtagtggctttatcgatacaatgttgtatctcttctcggcgatgcccaggatataatttcctaaatgatgccaaagctcgaatcgctgctgatgtacattccacataactatacgccataca

SEQ ID NO: 2772 - DNA, 396 bp, Glycine max
  unsure at all n locations
ttgttcctgatagaatcattattgataatgcggctatatgaattgcaaggcaagtgaaagaaagggattcatgactntaaagctagatatgtcaaaggtatatgacaaggtggaatggaagtttatagaaagggccattttccatataggcttttcttanaaatggtagaacttaattttgaagtatttcacaatagtctcctttgttgctatatcaatggngagcattataggaaatntaagcctcacaaggcttgagcaaaaggatcctatatccncatactttntcattctttgtgttgaaacattgtcaacaataatctctcaggcaattcaagcaacagcaaattgtggtattatggtatgtcatagagctccaatggtctctcatgtact

SEQ ID NO: 2773 - DNA, 446 bp, Glycine max
agcaagagattaggtgcatatagagctccagatgtctcggaattgatacatacagacatttgtgggtcattacatacaccttcatggaatgatcaacaatattttatatcattcatagacgattactccggatatgcatacttgtttcttatacatgaacagtcacaatctctggatgtgttcaaaacatctaaagttgaaattgatgatcaactaaacaaaagaataaagtgtgtcatatctgaccgtggtggtgaatactatggtagatatgacgatttaggtgaacaacgtccggtgcctattgcctgtacctagaggaatgtggaatcgttccacagtacaccatgccagggtcacctagcatgaatggcgtggctgaaagatgaaacataactttaaggatatgtgaagaacatgatttgcattctaactaacatagtcac

SEQ ID NO: 2774 - DNA, 201 bp, Glycine max
  unsure at all n locations
agcttctcgatatattacgtcccatattcggacatctgtgtganaagttatgaccattcgaatttctctagagcttccattggtcaatttcgagagtctagatgagttatgtacgcgaatcggacatccgtgtgaaaagttatgaccattcaaatatcttgagtgcttccgttgtgcaatatcgagcgtgtcgatatatta

SEQ ID NO: 2775 - DNA, 278 bp, Glycine max
  unsure at all n locations
ctaagctaaacattcactttcgagcctcacttcaacattcaatttcgagcgtctcgatatatgacgggactcaatcagacatccgagtaaaaagttattgtcgnttgaaatggctcagagcttcaacattcaatttcgagcgtctcgatatatgacgggactcaatcagacatccgagttaaaagttattgtcatttgaattggctcagagcttcaacattcaatttcgagggtctcgatatattacgggactcaatcagacatccgagataaacgtt

SEQ ID NO: 2776 - DNA, 481 bp, Glycine max
  unsure at all n locations
gacactatgatactaagctaagaaatcttatatggtttanaacaagtgccctgtcaatggtactcttaagtttcatgggataatttcttcatttggttntgataaaaccccatggatcaatgcatataccacaaggttaacgagagtaaaatatgttttcttgttttatatgtaaatgatattttacttgcagccaatgatcggngtttgctacatgaggtgaaacaatttctctctaagaattntgacatgatgggtatgggtgatgcattgtatgtcattggtatttagattcatagagatagacctcaaggtattttaggttcatcataggaaacctatattaacaaaattttagagagattgcagatgaaagattgttcactaagtgtcgctcccattgtgaagggtgataggtttaatcagaaccaatacccaaagaatgactttaagagggaacaaatgaaaaacattccttatg

SEQ ID NO: 2777 - DNA, 264 bp, Glycine max
tttgatctggaggacatgttaatagcttcagctgaagttcttgggaagggaagttgtggaacaacatacaaagccatcttggaggatggaacatcagtggttgtgaagaggttaagagatgtggcaatggggaaaaaagagttttaacagcaaatggagattgtccacagactcgatcatcatcaaaatgtgattccccttcgtgcttactactattccatagatgaaaaactattggtttatgactactcaacagtcggcagt

SEQ ID NO: 2778 - DNA, 437 bp, Glycine max
  unsure at all n locations
gtgcaagcttgaagttatgatatatttattattataatactatgcttatctatttgntaagtatgttttgtagttagttaattgagacttgtgggtgtatatcagtgtnttatacttactatnttgatttggttagtgtgtgtatattacatagagtttatattttattaattaattgacactaaagatgttatagttttgctatgatatgattctgaaaattattcgagtcgatgtatatgtatatgggttgggtcttgtaaacattgctacgaatgtataatatgatatatgagaataagtgaagtatgcgatgaattgtgagctatgaactgtgtagtcacacaactataataccctntaagggcgacgagttcatgcgcaatgagttttgtgatgggctccactatgggaactcgacgaagttaatcactgga

SEQ ID NO: 2779 - DNA, 422 bp, Glycine max
  unsure at all n locations
tcgagtcctactagntctagtcctcttcatattatntattctgatgtatggggtccaacttcaataaattcaataaatggatattcctattatgtcatttttattgatttattttcacattatgtttgctggttgtatccaatgaaattcaaatccgaaatttccattatttttccagttnttaaatcctttgttgaaaaccaataaaatgtcaaaattaaaattttttatactaacaatgatgatgaatacattaagttacggtcgttccttctaacttatggaatttctcatttaacaactccccatacccgtgaatattacnggaattttgaatcgtaaaaattggtggacaagtggccttaataacttaaggagggtgaattaagttaaaaaatttctcgtttaattgacttctaaat

SEQ ID NO: 2780 - DNA, 363 bp, Glycine max
  unsure at all n locations
ctcaagcgcttccattgttcaatatcgagcgtctctatctattatgcgcttgaatcggacctccgagtgaaaagttaagaccatttgaattgctcaagagcttccattaaccaatttcgagggtctcgatattttatgttcctaaatcagacctccgagttaaaagttatgtccatttgaatatctcgagagcttccgntgtttaatttcgagcgtctctatatgtgatgctcctgaatcggacctccgagtgaaaagttatgaccatttgaatatctcgagagcatncgtggttcaatttcgaagcgttctatatgtgatgcgcttgaatcggacctccgagtataagtaatgaccatttga

SEQ ID NO: 2781 - DNA, 342 bp, Glycine max
  unsure at all n locations
ctcagcttcacatcagaccacttccagagtgctggagctacttcacatggtcttgatggngcctatgcaagttgaaagccttggaggaaagaggtatgcctatgttgttgtggatgatttctccagatttacctgcgtcaactatatcagagagaaatcagaaacctttgaagtattcaaagagttgagtctaagacttcaaagagaaaaggactgtgtcatcaagagaatcatgagtgaccatggcagagagtttgataacagcacgttcactgaattctgcacatctgaaggcatcactcatgagttctctgcagccgatacaccacaacagaatggcat

SEQ ID NO: 2782 - DNA, 305 bp, Glycine max
tgagcaacaaacccaggatgttgctccatataaatatcctcctcaagatcaccatggagaaaggcattcttaatatcaagctgatggaggggctagtgacggatagcagccatagcaagaaacagacgaacagtggtgagtttggcgacaggagagaaagtgtcacagtaatcaatgtcatatacctgtgtgtagcccttagccaccaagcgagtcttaagccaatcaaccttaccattgtgcccaactttaacagtgtagacccatctacaacccacagtggtcttatcaggaggaagagaaac

SEQ ID NO: 2783 - DNA, 389 bp, Glycine max
  unsure at all n locations
tctactcaaatgtgtatggaccatccaaattggatctcttggtgcaaatatgcattgtgtttccttcattgatgatttaactagaaaagtgtggatttatttgattaaaatgaagagtgatgtgtttgatgtgttcaaaaagttcaaaaggttgatttagaaacaaaataacaaacagataaaagtgttaagaacaaacgaaggtggtgagtatgtattagatgtgtttcgaaacttctatgaggtagaagtgatagtgcatgaaataacattatcctatactccacaacacanaggaactattgagagaaagtgtaacgacccgcctcgtcgctacgatatcacttactataaaatatgacattntcaattagaagtaaaagcttcat

SEQ ID NO: 2784 - DNA, 427 bp, Glycine max
  unsure at all n locations
gtatcttccaccaaagaaggattccaaagcttccacctccacctcctcttatagcccanaataagtcttcccccatggcttctctatcaagaattcttccattggcatcaacaattttagcatctaagacattatcaactccaaggccatattttctcatcatggctccatatgctcctcctgtgatatgccctccaatgcctaagcttgtgcaaaggcctgcagggaaaccatgaactgaactcttctcatatattctgtagtaaacttcaccagttgtggcaccagcttgaacccaagcagtgttgctttttacatcaacgtcgatgccgcggagcttgaccaaatccacaactatgaaggggctctcaatttcggagacgtacgaaattccctcatagtcatggcccgcacttcgcactctaat

SEQ ID NO: 2785 - DNA, 380 bp, Glycine max
agcttaacatcgaaatctggtaaagcttcttggctggtgcattagaggacatgatataatactagtatatgaatacatggttaatggcagccttgactcctttgtttttggtatgtaattgaagaatgctttgattagatgcactagcgttatttttttttttttaacttcagtcacatttaatttaccagcttatgaatcttgattaacttatctgctttgcaaataaaaaacagaccaaataaaaggtaaatttctggactggcctcaacggctcgacataatatttggaatagctagggggctgttgtaccttcatcaagattcccgattaatgattattcatagagatctcaaggcaagtaatcatttactcgatg

SEQ ID NO: 2786 - DNA, 494 bp, Glycine max
tgtacacatcttaaggctcaaggtcaaatattatataccctttctttatatttaccatgaaaatgacgtatcaatgagaaataaagcacaattaataagatggatcaattaagaaactgatttaaagtaaataaaataaaatttagttcttaaaaattaaattaatttatatatatatatatatatatatatatatatatatatatatgtgtatagataacttaacgtttgtaaatttcactccttaaaatattaaatattatttttaattaattataatattattttgatgatttgcaacactttttaatatatgctttttatattataattaatgagttatatgctttaattttatgcgttaaatagtttctatttaaatattctaaaaattcaaaattattaacatgaatattcatgaatatataaatactaccactaaatgagagtcatattcattattataagtctttaaagttccatattaaaaaata

SEQ ID NO: 2787 - DNA, 343 bp, Glycine max
  unsure at all n locations
cactcggagctctgattcangcacatcacatatatagacgctcgaaattgaacaacggaagctctccagatattcaaatggtcataacttttaacttggaggtccgattctggcacataatatatcgagacgcccgaaaatgaacaacggaagcacttgagaaaatcaaatggtcattacttgtaactcggaggtcccaatcaagcacatacatatagagacgctcgaacatgaacaacggaagttcttgagatattcaaatgattataacttttaactcggaggttcgattcaggcgcataacatatcgaaactcttctaattggacaatggaagctcttga

SEQ ID NO: 2788 - DNA, 516 bp, Glycine max
  unsure at all n locations
atactaagcttaacatcagaccacttccagagtgctggaactacttcacatggacttgatggggcctatgcaagttgaaagccttggaggaaagaggtatgcctatgttgttgtggatgatttctccagatttacctgngtcaactttatcagagagaaatcagaaacctttgaagtattcaaagagttgagtctaagacttcaaagagaagaggactgtgtcatcaagagaatcacgagtgaccatggcagagagtttgaaaacagcaggttcactgaattctgcacatctgaaggcatcactcatgagttctctgcagccattacaccacaacagaatggcatagttgaaaggaaaaacaggactttgcaagaggctgctanggtcatgcttcatgccaaagaacttccctataatctctgggcttgagccatgaacacagcatgctacatccacaacagagtcacacttagaagaggcactccaaccacactgtatgaaatctggaaagggag

SEQ ID NO: 2789 - DNA, 401 bp, Glycine max
  unsure at all n locations
aacacccgccttcctaatgctcgaccacttcctccactgtttaattttaaacctcagggtgagtttaagtactttctcatagatcagcacaatttattagtgaagtttatttggaatagctntatataaagccaacaatggatttatttcactacacacgtgatttgttggtgtgagtgttagtcctatgacgtgggccttgtgaggtcagggttatatagcaaattctgtaaccaaaacacaatgatagtggccattttagcacatacaagagtgaatgacaccagatttatctctntaatttcctgtntgttgttcattcatgcagaactttctggtgtaccccctgatgtcatcaatcggcttataccagagcatgcgcgtaaacagaactttattat

SEQ ID NO: 2790 - DNA, 359 bp, Glycine max
  unsure at all n locations
actattccttgcacaaagcttcattagtagcaccaaaaactatgtcatgaacataaatttgcacaagcaacaactcattgtttgatctcttgataaacagtgttttgtcttaacctcttacaaaagattgctcaattaagaaattgctcaacctttcataccaagatataagtgcttgtttgaaaccatacagtgccttttctagcttgtaaacatgattaggatgtttgaagtctacaaaacctagaggtttctcaacatatantctcttttcaatgtatccattgagaataacacttttcccatccatttgatataacttgaaacccataatacaagcnatagcaagaataacctaa

SEQ ID NO: 2791 - DNA, 388 bp, Glycine max
  unsure at all n locations
attccttcatctgacttagcatataattttcctaagttttcttttccattgtttaatacagaacatntgcaaccaaagacatgaagatgtgagatgtttggtttcctaccattgaacagttcatatggagttttctttaagatgagtcttattaaagccctattcatgatataacatacaatatttacggcttaagcccaaaaatattgtggaagtgaagtatcattcaataaggttctagaaatttcttctaaagatctatttttcctatcaacaacttcatttttgtgaggagtcctatgtgcagtaaaattatgtcaatgccatgcttttcacaaaatagatcaaattccttattttcaaactcaccccatgatcactcctaata

SEQ ID NO: 2792 - DNA, 373 bp, Glycine max
  unsure at all n locations
agcttacccaccagttgtgatttgtaattagtttatgcaaaaatgtaactgatgatgcggcaactaacatcaatatccaacgtataatataaaatgaatatatatatatagatagatagatatatacaactaattcctagaagtggaatgttgtacacacctgtggtttaacctctacattgttctggtcactcttgactgttactggttcatttgcaagcacactctcaagatgagcaaggagttccttagcttggcacgatccanagtctggatctgcatcctcatagcaccaaacaagtgcagtctgcttggcttcaatggtggatccatcagttgtttcagtgtatagattcattacaggttctgcaat

SEQ ID NO: 2793 - DNA, 493 bp, Glycine max
  unsure at all n locations
ttagagccacctgcggcatgcaagctngaagacaagactatacgaggtatcttccttgtgtatagcaatatctctaagggctaccgtgtctacaacttgcaaactaagaaactcgtcatcagtcgagatgttgaagttgatgaatatgcttcatggaattgggatgaagaaaaagtggagaagaacgttcttatactcgttcaactacctcaagaagaagatgaggaagaaaacccaggtgaaccaccttcacctccatcacaacaacaagaagagatggagtatccatacagaaaaatttgcaccagtagctcgtcttaataagacaaagctcaactctgatggcaccatacagaaacacaaggcgaggctagtagctaagggttacttacagcaacccggaattgactacaatgagacatttgcaccagtagctcgtcttgataccataagagctctaatagctcttgtgtcacacaaaggatggagtatc

SEQ ID NO: 2794 - DNA, 356 bp, Glycine max
acactataaaactcagctattatctcttctgtaataaagacttggtggtagagaccccaactagtggttctgtgttaacttctaatgtgtgtttggattgtcctgtggaagtatctggtaaaataattatgattgatctgatctgattgcctctgagccaaattgatgttattctatgaatggactggttatcttacaaccatgtcttgttaaactattttgataaaactatggtgtttgatggttatggagtgagtaaggatatgatgttcatctctaccaaccaagttgtgtgatgaggacatgaccaagagcaagggcaaggatccacttgaaggacttggatgacctatgac

SEQ ID NO: 2795 - DNA, 230 bp, Glycine max
  unsure at all n locations
acctgcctggcaccgacctgatatgtgattatcctgaagaacacctctgtgttccaaaccctgaatgagtctcctcacaatggcatcaatttccgcaacggctcgagtgattngagaatcatcatggccaacctggtgaccctgatgatcagggtcttcaaaatagagcgtaataaaggaaggaacttgatgagagggtaaatcgaaatagctgagaacagtgtctactc

SEQ ID NO: 2796 - DNA, 465 bp, Glycine max
  unsure at all n locations
taagctccttcaactgcataaggctctntaatattgaagagtatccttgtggaaccttcacccgacgaagacattgacaaaaacttatcttctccttcttggacaaagtatggcaggctgggggcaagtaaattttcttcccatcagacattggatgcaactgtgatcgtatacccatatcagctagatcttgacgggtattcaagccatccttcatcttgccttgaatgttaaagagcgtcccaataacactgtcacaaacatttttctccacattcataacatcaatacaatgtctaacgtcaagatcacaccagtacggaagatcaaagaanatggacctcttcttccatatgcaactctgactnttatccttcttttgggtcttcccaaatatagtattcaggtgtngaacccgctgatatacctgctcaccagtcaacgctatcagcgcaatatcatgct

SEQ ID NO: 2797 - DNA, 419 bp, Glycine max
  unsure at all n locations
agcttcgataatatttttttatatcctatcgtctatataatagtcttacgttactttattntagataagatatagaaataaatttataagcataatgtctttatcattaatttcccaatcagttaaagcatgtgtatttattcttccactcatgtaaaataaaataaaatattttttcttattctaaagtgagatgatgtctataattatatttgttcattagagacaaaaaatttctgtcaaaatatagattctaaataataagagtgaaaaaaagattatactactttctaagatgacatgttatctattatactaattattctaaaatttatatctaaagtatttntaatctacttaatagtgctaaacatatnntatgtaacaatgtataaaaagtaaccttttttaatttcata

SEQ ID NO: 2798 - DNA, 311 bp, Glycine max
  unsure at all n locations
ttacttgtgaaagagagccatgagggtgagctcatgggccactctgggatagacaagacccttgtcgtactcaaagaaaagntttgttggccccatatgaagaaagatgtccataagcattgcactaggtgtgtggcttgtttacaagccaagtctagggtgatgcctcatgggctatacacacccttacccatcccatcttcaccttgngtagacattagtatggactatgtccttgggcttcctagaccccaaacaggtgtagaatctatctttgtggtggtggacagggttagcaagatggcacactt

SEQ ID NO: 2799 - DNA, 343 bp, Glycine max
  unsure at all n locations
cacatggatttgatggggcctatgcgagttgaaagccttggaggaaagaggtatgcctatgttgctgtggatgatttctccagatatacctgggtgaactttatcagagagaaatcagaaacctttgaagtattcaaagagttgagtctaagacttcaaagagagaaagactgtgtcatcaagagaatcatgagtgaccatggcagagaatttgaaaacagcaggttcactgaattctgcacatctgaaggcatcactcatgagttctctgcagccattacaccacaacagaatgggatagttgagaggaanaacaggaccttgcaagaggctgctcgggtca

SEQ ID NO: 2800 - DNA, 412 bp, Glycine max
  unsure at all n locations
ntcgtttacaattacgagcgtctcgatatatttcgggactcaatcttacatccgagtaaaaagttattgtcatttgaatttgctcagagcttctgttttcaatttcgagcgtctcgacataatatgggactcaatcatacatcctgtaaaaagtaatcatcgtttgatttttctaatagcttctgttttgaattttgagcgtctcgatatactatgggacacaatcggacatacgagtcaaaagttattgtcgcttgaattctctcagagcttctgttttgaattacgagcgtctcgatatattacgggactcaatcggacatccgagtcaaaagttattgtcgttgatttatctcagagattcagttttcaatttcgagcgtctcgatatactactggacacaatcggaca

SEQ ID NO: 2801 - DNA, 243 bp, Glycine max
gtgctctaaacgaactctgaaatctgaagcttaatattcaaatgatctaagtgtgaaaatatgcacacacatgacctctatttatagcctaagtgtcacacaaaattggagggaaattcgaatttcacttcaatttcacttgaatctgaaattgaatttgcggagccatactttggagccaaaatttcactaattatgattagtgaagtttagttatgggtcagcccactaatccaagatcaa

SEQ ID NO: 2802 - DNA, 430 bp, Glycine max
agcttatgaccattcgaatttctcaagagtttccgttgttcaatttcgagcgtgtagatgagttatgtccccgaatcggacatctgtgtgaaaagttatgaccattcgattttctcgagagcttccgttgttcaatttcgagcgtctcgatatattatgaccccgaatcggacatctgtgtgaaaacgtatgaccattccattttctcgagagcttccgttgttcaatttcgagcgtctagatgagttatgtccccgaatcgaacattcgagtgaaaacttatgaccattcgaatttctcgagagcttccgttgttcaatttcgagcgtctggatatataatgttcccgaatcgggcattcgagtgaaatgttgtgaccattcgattttttcgagagcttccgctgttcaattacgagcgtctcgatata

SEQ ID NO: 2803 - DNA, 370 bp, Glycine max
  unsure at all n locations
ccttggttacatttgatagtctntacttgaatcttngaaaagcatatcaaaaccatttcctttcaggccctgatcaattcttgcaaatgccaccattgtaagctntgcttcttttgatgcttgaacttcattccattgttccttgcagcattcttgaacggcatgcacaatctcgtgacgagaagtataggctacgcaaatcaaaagaactctctggttgttgtgagcagtaactctcattgctttttccacagaagccctgacaggctcagtcaatagttgcaagtctccaatgaaatgtaatcgaacaccgtattcattgataagactnttcttgtgaagtaactcttcaatcttttcccgcatcaat

SEQ ID NO: 2804 - DNA, 321 bp, Glycine max
tcatttcagcgctcgcatatacgggactcgatctacatacgagagagaagatgttgtcgctagaatttgctctgagctctcaacattcagtctctagcgtctcgatatattacaggactcgctctgacatccgtgtagcaagttattgcacgatgaattggctctgaggttcaaaattcaatttcgagcgtctcgttatattacgggactcaatcagacatccgagtaaaaagttattgtcgtttgaattggctcagagcttcaacattcaatttcgagcgtcccgatatattacgtgactgaatccgacatccgagtaaa

SEQ ID NO: 2805 - DNA, 419 bp, Glycine max
  unsure at all n locations
gctttaagccaattcatacgacaatatctttntactctgatgtctgattgagtcccgtaatataacgaaacgctcgaaattgaatgtctaagctttgagccaattctaacgacaataacttcttactcggatgtccgattgagtctagtaatatatcgactcgctcgaaattgaatgtagaagctctaagcctattcaaacaacaataacgttttactcggatgtccgatttagtgacgtaatatatcgggacgctcgaaattgaatgttgaacctctgagccaactcaaacgacaataactttttactcagatgtctgattgagtcccgaaatatatcgagacgctcgaaattgaatgttaaacctctgagccaattcacactacaataatcttctactcagatgtctgattgagtcc

SEQ ID NO: 2806 - DNA, 378 bp, Glycine max
  unsure at all n locations
taccctgatgaggatgtcccatatgttcttaatactagactgatacacttgntgtccaagtatcatggttntgcangtgaagaccctcataagcatctaaaagaattccatattgtctgctccaccatgaaacctncagacgtncaaaaggtcacatctttctgaaagcctttcctcattctttagagggagtggcaaaggactggctatattaccttgctctaaggtccatcacgagctgggatgacctcaaaagagtattcttagaataaattttccctgcctccaggaccacgaccatcagaaaggatatttcaggcattangcaacttagtggagagagcttatatgaatactgggagagattaaaaaactatg

SEQ ID NO: 2807 - DNA, 454 bp, Glycine max
  unsure at all n locations
agctntntattntcagtagatgaagatgaatctgtggccacctcatggacacctctaagagcaatagcatcatttcttgcactgagttgttgggaattggaagccatcttctcaatcaaattcctagcttcagcaggggtcatatcaccaagagctccaccattggcagcatcaatcatactcctctccatgttgctaagtccctcatagaaatattgaagaaggagttgctcagaagtttggtggtgaggatagcttgcacacaatttcttgaatctttcccagtactcatacaagctttctccactaagtttcctgatgcctgaaatgtcttttctgatggcagtggtcctagatgtagggaagaatttctccaagaacaccctcttaaggttatcccagctgaaaatggacctgngagcaaggtagtatagccaatcttttgccactccct

SEQ ID NO: 2808 - DNA, 394 bp, Glycine max
  unsure at all n locations
tgctgtgtaactatgtataaaatttaatggaaaacctttcatttaaaaacaatcaagaaaataaactntcaataaatagacataaataatgggaacactaaaatgaggtaaagacggaaaaactaaaacaacacttacgacaagcttctaacagtgctttacaacaagatgcggngactggagaagatggcaattcgcgaattacatgctgaaaatgtatagaaataagaaataataataatgtatgaccaacataaaggaatcaatacttcagttttccatgagaataccttaacacagtcaccaacaacatgtgcatcctcgtctggagaaaactcaactnttnctgcaaccatatggcanacccaagagcataagaattgatgagtaattt

SEQ ID NO: 2809 - DNA, 462 bp, Glycine max
  unsure at all n locations
agctntanacctgagattggatagtttgcaatctctcattctaatctagaagtcgtagacaatcaacttcagaaaaaagaagaggagtattcagatgcaagaagtcatgaaagaagacgaagaggcgaaccaaggagagataatcatttggggagcattaagatgacaatccctaagttgaaggtaaaaatgatcctcaaatgtatttggagtgggagagaaaggttgaacatgtgtttgattgccataattattttgaggagaaaaaggttaaaccagttggtgttgaattcaccgataatgctagtatatggtgggatcaacttgtgactagtaggcacaggaatggtgaaaggcctattagtatatgggaggagatgaagaatgtcatgaggagatttgcacctagccactatcatagggatttgcacagattacaaactntaattcaaggttccatga

SEQ ID NO: 2810 - DNA, 398 bp, Glycine max
  unsure at all n locations
tctatatattagtaatattntntaaagaaaataactactacatatgtgttaaatatataataacttctaaaattntgtttttttttataagattttttttaaattatcatttgtattaatttttttattaaaatatccttaattatttgactataaatgctatagattaaaaagataaacacatttctctttcttataatgactggataagaagactaaggcacattaattattagatagaaagtaataaagttgaaaaggagaaatgatgagtccaataaatntaatattattaattaaattaattattntaaaaaaaaatacttaaaaaatcttatatttagatacagagataagatataagataaataaccaatttcatccttatagttttcact

SEQ ID NO: 2811 - DNA, 405 bp, Glycine max
  unsure at all n locations
agcttctttntccgtcattaattctcctcctctgattcctaatatgtttcatgcgttttatctttatattactcctctccctatctagataaagcaatgttaactataaaaactttggcaacttttagtaatatgagttgctttgctaactaccagggaagaactagagaaaatgtttgaaggtatgccagcagtattcactggaatgttaggaggagaagaactgtcccaagcatatgccagtggagatgtatttgtcatgccttcagagtcagagacgcttggttntgtagttttggaggcgatgtcttcagggatacctgtggtggcggcacgtgctggaggtattcctgatataatccctgcagatcaagatggtaaaactagctatctgtatgatccacg

SEQ ID NO: 2812 - DNA, 371 bp, Glycine max
  unsure at all n locations
gcttatcgtgaattgttgtcctggatgtgagaatggaatcgactgcttcattggtggaagagcccatgatgtagtgtggaagagctggtgggggctcgccgtaaatcacttcgaacggcatgagccccgcgcttgaatggaatgaggtgttgtacgaccattctgctaatggcaagatctagaaccagtccgtagggcgatggtgcacaaacgaacggaggtactgctcanagacacgattgatgacctctatctgaccatcagcttgtggatggtaggcggtgctcattcacaatgaggtgtcgctcatgcgtgataattcacgtcagaaatggctaagagagatggtgtctcggtcggagaccatactc

SEQ ID NO: 2813 - DNA, 393 bp, Glycine max
  unsure at all n locations
tcaagaaaaagatggcctcagcaaattccttatttccagaagggaattctatcaatagacctncaatctttaatggagagggttaccactactggaaaacccgaatgcaaatttttattgaggcaatagatctaaatatctgggaagccatagaaatagggccttatatacccaccacagtagaaagagtttcaatagatggtagttcatcaagtgaaagcataactatagaaaaacctagagatagatggtctgaagaggatnnaaaacgagtacaatacaacttaaaagccaaaaacataataacatctgccctgggaatggatgaatatttcacggtttcaaattgtaagagtgctaagaanatgtgggacactcttcgattaacacatg

SEQ ID NO: 2814 - DNA, 459 bp, Glycine max
  unsure at all n locations
agcttgtaggaagttcaaacgacaataacattnttctaagatgtccgattgaatcgggtaatatatcgagacgctcaaaattgagacttgaagctctaagataattgaaacgacaataactttatacacgggtgtccggttgagttccgtaatatatcaagacgctacaaattgaaaacggaagctcttagaaaattcaaacgacaataaatatttacacggatgtccgatagagtggcgtaatatatcgagacgcttcaaattgaaaaaagaagctcgtaggaaattcgaacgacaatatgtttttactcggatgtccgattgagtcccgtaatattaaaagacgctcgaaattgagagcagaagctctgagcaatttcaaacggcaataactttatactcgtatgtcctcttgagtcccgcaatatatcgagatgctccatattgataacagaagct

SEQ ID NO: 2815 - DNA, 460 bp, Glycine max
  unsure at all n locations
agcttgcattcatccattttttgatgaattgagggacccaaacacccgtcttcctaatgctcgaccacttcctccactgtttaattttaaacctcagggtgagtttaagtactttctcatagatcagcacaatttattagtgaagtttatttggaatagctttatataaagccaacaatggatttatttcactacacacgtgatttgttggtgtgagtgttagtcctatgacgtgggccttgtgaggtcagggttatatagcaaattctgtaaccaaaacacaatgatagtggccattttagcacatacaagagtgaatgacaccagatttatctctttaatttcctgtttgttgttcattcatgcagaactttctggtgtaccccctgatgtcatcaatcggcttataccagagcatgcgcgtaaacagaacttatntatggctntgcacacctagcaa

SEQ ID NO: 2816 - DNA, 444 bp, Glycine max
  unsure at all n locations
agcttgatgcacactgaactgatacagtgcattttttgaggaggaaaaaagatacaatcatgtaattagcagacaatatttaccatttattcatttcagcatcattgggataatgctgatacaccatttaaatttgcagtgcaataagtattcattcttacaggtcacataccatcaaactagagtaatgcacaacttattaaaaacataccagataacattgcctctgagtgtgttgatttctccattgtggcccaatacacgcataagttgagcacgatcccagctagggaaagtatttgtagaaaaccgtgaatgtatctgcacatatgcataccaaattgtcagtaatcatgattatattcttataacaaaataaaatagtgtagaaaatcaaatgcacaaatgttntttctctcaggtacaatacacagcatatattaa

SEQ ID NO: 2817 - DNA, 402 bp, Glycine max
gtggcctcagatatcttaagaaggggggttgaattaagatattacatactattttcccaattaaaattctatcaagttataaattcccttaataatgaacttcttaaatattgattcaaatagaacaatttgaatatgaatataaaacaataataaataaaggagtctaagggaagagatagtgcaaaaatagatttatactggttcggccacaccattgtgcctacgtccagtccccaagcaacccgcttgagagatccactatcttgtaaattccttttacaagttctaaacacacaaggacaatcctttctttgtgtttagaatatctttacaacaagataccctcggtctcttaatcccttagtgaattagaaaaagaagaagaatgaatctctcttg

SEQ ID NO: 2818 - DNA, 411 bp, Glycine max
agcttcggtattcaatttcgagcatttcggtatattacgggactcagtcgaacatacgagtaaaaacttattgtcgtttgaatttgctcagagcttcaacattcaatttcgagcgttttgatatattacggcactctatcggacatccgagtaaatagttattgtcgtttgaatttgctcagagcttcggcattcaagtccgagcgtctcgatatactacgggacacaatcagaccttcgagttaaaagttattgtcgtttgaatttgctcagagcttcggcattcaagtccgagcgtacggatatattacgggtctcaatcagatatccgagtaaaaagttattgtagcttgaagttgctcagagcttcaacattcaatatcgagcgtttcgatatattacgagactgaa

SEQ ID NO: 2819 - DNA, 457 bp, Glycine max
agcttccattcaataaatcgagtcctactagttctagtcctcttatattatttattctgatgtatggggtccaacttcaataaattcaataaatggatattcctattatgtcatttttattgatttattttcacattatgtttgctggttgtatccaatgaaattcaaatccgaaatttccattatttttccagtttttaaatcctttgttgaaaaccaataaaatgtcaaaattaaaattttttatactaacaatgatgatgaatacattaagttacggtcgttccttctaacttatggaatttctcatttaacaactccccatacccgtgaatattacggaatttttgaatcgtaaaaattggtggacaagtggccttaataacttaaggagggtgaattaagttaaaaaatttctcgtttaattgacttctaaatccccttttaaatctataag

SEQ ID NO: 2820 - DNA, 441 bp, Glycine max
agcttcactgaattgctggtcttattgaagaacatgcttcctgaacaaaacactttgccgaagaatcactacgaggccaaaaagattttgtgtccagtgggaatggagtacaagaagatccgtgcatgctctaatgattgcatattgtatagaaatgagtgtgcagaactacagcaatgccccacgtgtggggtatcacgatacaaagtgcaacatgatgaattaactgatgatgcaggaaccaaaaattgtcatcctgccaaggtgtgctggtatcttccaataataccaaggtttaagcaattgtttgctaatgcacatgatgcaaaaaacctttcatggcattcggatgaccgaaaatctgatggagtactgcgacatcctgccgattcgccagagtggaagacaattgatcgtttgtatccagagttcggcgatgag

SEQ ID NO: 2821 - DNA, 451 bp, Glycine max
  unsure at all n locations
tgcatatgatgcagacattcataatagtatccctcttcatcaaaaccaacaacagcagagtaagtatgatatttcaagcaacagatacaatccaggttggagaaatcatccaaatctgagatgggcaagtcctccacaacaacatcagtctgtccctcctttccagaatgttgttggtccaagcaagccatatgttcctcctccgatgcaacagcagcagcagcagtcacaacaaagacaacaagcaactgaggctcctcctcaaccttccttagaagagttagtgaggtaaataaccatccagaatatgcaatctcagccagagacaagagcctccattcagagtttgacaaattagatagggcagatggctactcagttgaaccaagctcagtcccaaaattntgacaaattgccttcacaaactatgcaaaatccgaaaaatgtgagt

SEQ ID NO: 2822 - DNA, 449 bp, Glycine max
  unsure at all n locations
agcttatcccatgtctccttaacggatgttgcatcataaatattctcaaatgcatcatcatctaatgcttgatagatgaggaagagagctttcttgtctctttttcttgaatcctttaaagtctcctttttgtgcttgggatagtgaagtcttatcttgcatctccttatagcctttttcaaccattttccaaacatcatgtgctccaagaagggacttcattttgatgctccaattatcataggtgctcccctttagaagtggaacttggaaggatgtcgctccattgcttgtcataactatagaggaatttcttatcagaacctaagctcagataccactttgttggaaaagagaatgttatatgaagtatntgaaagagatggaggaggagagaatatttgaaagaaggctagttcttatttcttgagaaatggtttggttttgac

SEQ ID NO: 2823 - DNA, 296 bp, Glycine max
  unsure at all n locations
tactaagcttagttacaattacgagcgtctccatatattacggggtactcaatcgtgacatccgagttaataagttattggtcttttgactcttcttagagcttccgttttcaattatgagcgtctcgatatattaataggctcaatangacatccgagttaaaacttattgtcgtttgatttttctctgaggttccgtnttcaattacgagcgtctcgatatccctccggacgcaattggacatccgagtgaaaagttattgtcaattacgagcatctcgatatattatgggact

SEQ ID NO: 2824 - DNA, 452 bp, Glycine max
  unsure at all n locations
agctntgagataattcaaacaacaataatatttgactcgaatgtccaattgtgtcccgtaggatatcgagacactcgtaattgaaaatggaagctctgagaaaaatcaagcgacaataacttttaactccgatgtccgattgagtcctgtaatatatcgagacgctcgtaattgaaaactaaagctctgagcaaattcaaacaacaattaattttgactcgaatgtccgattgtgtcccgtaggatatcgagacgctcataattgaaaacgaaagctatgagaaaattcttacgacaataacgtttaactggggtgtccgattgacgtctgtcatatatcgagacgctcataattgaacactaaagctctgagcatattcaaacgacaataacttttgactcggatgttccactgtgtcctgtatgatatcgagacgctcgtagatcaaaac

SEQ ID NO: 2825 - DNA, 376 bp, Glycine max
  unsure at all n locations
ntganaaccaacaggctccctctaattcatcgagtaactcatcaatggttggaattgggaatctgtccttgacggtaatgtcgtttaaagctctgtagtcaacgtaaaaatgccatgatccatcacgttttttgaccaataatacaggggatgagaatgggctaatgcttggaattatgccactccggagcatggtttctacctaagtttcgatttcttatttttgaaaataaggatatcgatagggtcaaacattgatgggttcagagttgggtatcaagtgtatggcgggattggtggtgtgggatggtgggagggtcattggtgtgtggaatacggtcacgaattgagtgagtaaacttggtatttctgggta

SEQ ID NO: 2826 - DNA, 453 bp, Glycine max
  unsure at all n locations
agctngccttgctccttgatatatatgagggactcatggacattatgaatgacaaattccttgggataaaggtagtgtcgccatgttttcaaagcccgcactaacgcatacaactctttatcataagtagaatagttaagggtaggaccacttaacttttcactaaaataagcaataggatgaccttctggcatcaacacagncccaatcccaacatttgaagcatcacactcaatctcagaagattcttgaatagttggcaacacaagtatgggggcattaattagcttttgcttaagaacatagaaagctgtttcttgtgtctctccccatgtgaaaccagcattattcttgagcacttcattgagaggtgctgccaatgtgctaaaattcttcacaaatcgtctatataaacttgctaacccatgaaaactcctcacctccggcactgac

SEQ ID NO: 2827 - DNA, 432 bp, Glycine max
  unsure at all n locations
agctttcgttntcaattacgagcgactcgatattctacgggactcaatcggacatccgagtgaaaagttattgtcgtttgaatttactcagagcttccgttttaaattacgagcgtctcgatatcctacgggacacaatcggacattcgagtcaaaagttattgtcgtttgaatttgcttagagctttagttttcattttcgagcgtcttgatatattacagggctcgatcagacattcgagttaaaagttattgtcgttagatttttctcagagcttctgttttgaattacgagcgtctcgatatcctacgggacacaatcggacatccgagtcaaaagttattgtcgtttgaatntgcttagagcttcagttttcaattacgagcgtctcgatatattacgagactcaatcggacatccgagttaaaagt

SEQ ID NO: 2828 - DNA, 440 bp, Glycine max
gagcttgtgcctcttctcgtgtggaatatgaatgttgcatatttatccaaagacccttaagtgctttgctgatggcttcttcccgttccaagcttcaaatggagtgttgtattttacagacttaactggacatacagatgagtatgtaaacagcatagtacaccgcttcagcccagaaagtgctaaggagtacctgtttcttgagcatcgatctaaccatctccataactgagcgaagctttgtatcggacactccatgttgttgaggagaagatgcgactgtcaaatggatcttaatgcacttcatcctcacaaaatctgtcaaactcacgagaggagtactctctgccgcgatcactcattagtacttggagtccgtttgcacttttgagtacaagaagggcctcgaacttattgaatactccaaagacttttgattt

SEQ ID NO: 2829 - DNA, 421 bp, Glycine max
  unsure at all n locations
agctngatcttttagttnttatctttaatctctaatccctgaacgaactcttctagtttgtaattcgaactttaattatcttttaattcgttcctaaagatagatcatcttatctgctgctaactgcacaataatccgttaaagatataacagatttatgtgtccagtattttcgggccagatgtcctggacatcgtatccgacatcgtggatcctgcagcttcacttcttttatcttgccttgtgcattgtgcagcaactccagtattttcgggcaagatgtcctggacattgtatccgacatcgtggatcctgcattgtgcattgtacagcaactccagtgttntcgggcaggatgtcctggacattgtatccgacatcgtgaatcctgcagcttcaattcttcatttgacatttcatc

SEQ ID NO: 2830 - DNA, 427 bp, Glycine max
agcttgtccatccacgatgtctccaatagaaaggttcactcctaaccatttgctcacacgaacatgaaattggacatcaccataatcaaatccatgtgtcccacactcaaagataagcttacaaaataattataattaaaacaatttaagaaacatcaattaactatgacataaactctatcatctttagatcatggtatttgaaagtaaataaaaccaataacatccagctcacataagccaaacatctcatattcaactatcatgaaacaattcaagaatcaacatcatgcatcaactatcaagcattatcaacatgagttcatcaatcatcatcaacatgaacaccaaacatcaacaccaacgacagactctactccatggatatttacaccacatgatgaattaaccaaagtacatcccttaa

SEQ ID NO: 2831 - DNA, 479 bp, Glycine max
  unsure at all n locations
tccttaagtcacctgcggcatgcaagcttctcatagtagccctccatgtcgttcccgaacactaatgcgagccccatcccgtgataatcacgcgcttctttgggtccttctgccgctgcgcggggacacctttggcgccaccgtggcggacacgaagaacacgcgcttcgcagaggtggtgcgtcgcttggcggcggcattgttggggccctaaagagggtccaagggagaaccgtggagggtgatgatcacgggaggacaggaggcgcggtagagagagaatgttctcgcggtggcattgttcgtcggagtctcgatggcatcggcattgttcgtcggagtctcgatggcgccgccacctacacatgaggttctcgcggtggtttgggggttggagatggggaggacangangcgcggtaaaaagagaatggaagggattttgtaattngtgattttagagagagaaataatctagct

SEQ ID NO: 2832 - DNA, 431 bp, Glycine max
  unsure at all n locations
gacacttgaaactaagctataagcntttgatngattactaactccaagaaagatgcanttttctcccttatcatctagctntgtcctcctttgaattggaatgtgggcataggcgacacacccaanaattctgaaatgacctactactggtctttgtccactccatgcttcctctggtgtcatattttgaacagcaagtgtgagtcttttattcaaaatatgaacgctccaatttacagcttcaggccagaaagttttggaaacactactccttgtcaaaaggcaacacaccatgttcataattgtgcaactcttcctctcacaaacaccattttgttgaggtgtataggcagctgtaagtttcctcttgattccatgggcctcacaaaaatttacaaattcatgtgagttgtattctccaccacgatctt

SEQ ID NO: 2833 - DNA, 454 bp, Glycine max
agcttatgtttggtcgagtacaaaattgcttccatttgttttcgttccagatcatttctaggacattgtgtgagactatatttgtctcctttctaaattggaacgattgatgttgagcacttttccatcctaaatatctctagtactttattgatatatactttctgagataagcctaacaatccttgtgatctattttagaatatttctatccctatcacatagcttgcctcacccatatcctttatttctatgttactagaaagaaacttattagtctcatgaagaagaccaagatcattagttgcaagcaatatatcatcaacatacaggattagaaagataaccttactcctactgaccttaagatatatacaccgatcaacagtatgttccttatatccaaaggaaacaatggtatcattaaacttcacataccattggcgggaagctt

SEQ ID NO: 2834 - DNA, 378 bp, Glycine max
  unsure at all n locations
tgtgcattcaatatcctaatgagggtgttccatatgttctcaatactggactaatacatttgcttcccaagtttcatggtcttgcaggtgaagatcctcacaagcatcttaaggagttccatattgtttgatccaccttgaagccccctaatgtccaagaagatcatatctttctaaaggcttttcctcattctctggagggagtggcaaaagattggttgtactaccttgctcccaggtccatctgcagctcggatgaacttaagagagtgttcttggagaaattcttccctgcatctaggaccactgccatcagataagacatttcangcatcaggaaacttactggagagagcttgtatgtgtacttggaaagat

SEQ ID NO: 2835 - DNA, 428 bp, Glycine max
  unsure at all n locations
cttggttatattntatttatactcttgtagaaggtataaataaaaagtaaccaatggctgctggttggttgcaggtatctgtttgtatatctctntataaatggatttgaggtaactcttgtatttttttttattagaaattaattctacttgtcatacataattatttaattaaataaattatttttataatgtgaacataacataatcttatatcagntgtatttattataaatataatttctttgttgataaaaaatgaaaactagaatttaatatcaagttatttttgttagcatttgacttatagtgagttaggttctccttttgtgatttaagatggaattcaataatagaaaaggtgaagaaaataaaataaaaacagaactaagttgaactcaatctcctcatgatagtctgctctaact

SEQ ID NO: 2836 - DNA, 451 bp, Glycine max
  unsure at all n locations
agcttatctatccagtcaagttcagctccctttctagaatattatgtgataggttgagatgcacgagcttgtggcagcgcctcaagtcctcaggaatctcatcagagagcgtgttctgagagagatcaagatgtgtgagttcagtgagctgcgagaaattcttaaatatctcaccagtgatgtcactattagaaaggtctatgcccaccaccctcttcgtagcactgcatgaaattcctttccattcacaaggattggagctattggtgttccaatatatgtaccctcctctgtctgcaagaattttgctggccaggtacaatttcagcttcagcagaacctctttgtctttgtccaaagattcccctacaacagctttacctgccaaaaccaaacacaaaagcaaaaaanaaaaaatcctcggtaaacacaaagacacaagtttataact

SEQ ID NO: 2837 - DNA, 353 bp, Glycine max
tccgttgttcaatttcgaggatctcgatatattatgtacccgaatcgtacatccatgtgaaaagttatgaatatttgaatttctcgagagttgtcgttgttcaattctgagagtctcgatatattatgtgcctgaatcggacatccgagtgaaaagttatgaccattggaatttctcgagagcgtcagttgttcaatttcgagcgtctcaatatgttgtgcgcctgaatcggacatccgagtgaaaagttatgaccatttgaatttctcaaagagcttccattgttcaatttcgagcgtctctatatattatatcaccgaatccgacagccgagttataaattatgacccatt

SEQ ID NO: 2838 - DNA, 452 bp, Glycine max
agctcgaaattgaataatggaagctctcgagaaatacaaatggtcataacttttcactcggattgccgattcaggtgcataacatatcgagacgctcaaaattgaacaacagaagctctcgagaaattcaaatggtcataagttttcacatggatatccgattctgtgttataatatatcgagacggtcgaaattgaacaacgactcgagaaattcaaatggtcataacttttcactccgatgttcgattcaggcgcataacatatcgagacactcggaattgaacaatggaagctctcgagaaatacaaatggtcataacttttcactcggatggccgattcaggcgcatcacatatcgagacgctcaaaattgaacaaccggagctctcgagaaattcaaatggtcataacttttaactcagatgtccgactcggggatgaaacatatcg

SEQ ID NO: 2839 - DNA, 465 bp, Glycine max
agcttgcaaatctgttttaaatcctgttggaccttgtggcctcaataatcttacgagggataggcttagaatacagaagaagcaacaacaatcaatttaacaatgttctttaaacatgcaagacacaattgattgcaacaaaataaataagataagggaagagaaaatgcaaacacaattttatactggttcggccacttcccgtgcctacatccagtactcaagcaacccacttgagatttccactatctttgtaaaatcctttacgaagtctgaaccacacagggacaacccatcccttgtgttcagatgctttacaacaagagactcacagtctcttaaccaatctcattgaataagaagaatggaagaagaattctctcttcaagagaagaatattacaatgaagatcatgtaagaatccttatagattttgcaagtgtttggtcaaggatttcttttgag

SEQ ID NO: 2840 - DNA, 456 bp, Glycine max
agcttggagtttccaagtgccaattcgtcttcttctttagtccagtcttcttctggcttcaattcttcagtgggctttccttctgtgtccagcatcttgggatgttcccagcctttgatgacagctttccaggttctgctatccagtgatttgaggaaggccaccattcttgctttccaatattcatagctgcttccatcgagaattggtggtatgttcactggtccgccttctttctccatgttcatcagaatttatctccctagatctcactctgtgatttcgagtgttggctctgataccaattgaaattctgataccaggggacagatgtcgtacaggatgtcacgacatcacgcttcagaacatgcagattatatgtgtccgtatgaacagattaaacaagtaaataacacaagagaattgtttacccagttcggtgctacctcacctaca

SEQ ID NO: 2841 - DNA, 379 bp, Glycine max
  unsure at all n locations
nggtggtggtctcttcatgagcagaatctggaggctgtagaaggaagccaaaaacagctgaatgctgttgtgagtcaattccacactgtatttcaggatcacatcatacttcctccccagaggtctcaagtgcatcagattaagttgttctcagatcagaacccagtccatgtaaggccatatagatatccacatcaccaaaaagaagagattgaaagacaagtacaggagttactggaggcaggggtaattcgtcctagcatgagtgctttttcaagcccagttatcttggttaagaagaaggatgggagttggaggatgtgtgtggactatagagctcttaacaaggccaccataccagataagtaccctataccta

SEQ ID NO: 2842 - DNA, 453 bp, Glycine max
  unsure at all n locations
tggcctccataagagaantttgtcttctccgcatcatanaagtttgattctctagttacatgctctacctccttaatttgtcaagttttagcagtggcctcaatgtacttgaagtgaatattaggatcctcactttacaagacagaacaaaaaaattactataattgaaaaacaaagtgaagcagaccaactagtgaactgaggtcatgttcactctacaataagaaagaattggagctcaagtatgcacccaagaaaaggtatagtccttcataagatttgaattgctcaaagagtttgatgcatgcatcaacacccacttgctcaaaatattccttagtggtatgtaaatcatgtactagtaagattcccttatagatgaattgtgaaattcaaaaaattaaatagaacatgaatcttatggcaacattatccaaaaacagtacctgcaca

SEQ ID NO: 2843 - DNA, 444 bp, Glycine max
tgtagacaaactatactagaagaaaaaaaaagtttaatagccatgttgaagtgtaaacctacacactttttttttttagttgccacataatattaaatcttaattatctcttcaacaaaaaggtaattagaattaaacacatgctaagcataaaataagaaaaatatgtttaagaaatcactatttgaaaagagttgttgtgtttaagaatttataacaattttttctcataaattactgactatttgaaaatcactaaaatgttgcgatatttctattttgattgaaaagattagctaaatgaagtaaagtagagattatttgaccatgaaagcgaaaaataattcttatattacttttttttttataaaaatacatttatcattcattattctttttaatttatttaaacaataaaaaatatatttcatccacacacaattc

SEQ ID NO: 2844 - DNA, 343 bp, Glycine max
  unsure at all n locations
agctnggatntccttntagtagggaatctatctttcctaagatggagccaaacccagtcaccctcattaagaactagctatnttcttcctctattgcctttagttgaatacacctttgtttggttctctatttggttcttaaccctctcatgcaacttctttacaaactctgacctagattccccttctttatatataaaagaagtgtccagtgggagaggaatgaggtcaaatgatgttatgggattgaacccaaagacaacctcaaaaggggactgcttggtggttctatgaacccccctgtagtaggcaaattctacatgaggaagatactcatcccaag

SEQ ID NO: 2845 - DNA, 417 bp, Glycine max
ctttgtgatgttgactatgttggagacaaagttgaaaggagaagcacaactggaagatgtcacttcattggtggaaaattggttgcattgatatgcaagaagcaaggttcaactacgttgtccattgttgaagcataacacatgctagctaccagctgttgtgctcaactactttggattaagtaccaacttgaggactacaacatctatgaaagtaaaattcccattttttgttataacaaagttgtcagtagtctttcaaagaatccaacattgcattcaagggcaaaaacatatagaaagtaagcatcattttataagagaccatgttcagaatgggacaatggatctacagattgtacccattgatgatctacttgctaatattttcacaaaacccctcgttgaggaaaaact

SEQ ID NO: 2846 - DNA, 301 bp, Glycine max
  unsure at all n locations
ttcgtcttcttctttagtccagtcttcttctggcttcaattcttcagtgggctntccttctgtgtccagcatcttgggatgttcccagcctttgatgacagctttacaggttctgctatccagtgatctgaggaaagccaccattctggctttccaatattcatagttgcttccatcaagaataggtggtctgttcactggtccgccttctttcttcatgttcatcaaaatatatctccctagatctcactcagtgatttcgagtgcctgctctgataccaatgaattctgatactgggac

SEQ ID NO: 2847 - DNA, 437 bp, Glycine max
  unsure at all n locations
agcttgtaactgtcagggaaaatgtcatctctattatcttgtaagcatagtgattagaattttatgattcctgattcgaatcctacattccgataaaattcagctacttattgattcatattattaatattagacgaatctcaatttttgtatcttacggtacatgaatgaatctgcacaatttcatatcatcaatacaaatcacatgattcaatagtttgattttcttttatttttctttcaccaattctcatgaaaagaattgaaaagtcatttaagtgaaattgataaatgaaaaggaattagaggaatatatttntaaaattgtcctatntgattatttcacaacattanttgtcattcatttattcagtgcatgcactgtatttgtctatttcagctgcttcatttttttctaaaataaaagcttcacaaat

SEQ ID NO: 2848 - DNA, 410 bp, Glycine max
gtacatgcctcatgacacctaagcacacttagtggagaatgttgtacttgatcttgaattagtgggctgaaccatggctaaaattcactaatcataattagtgaaattttggctccacaaatcaatttcaaattcaagtgaaatttgaatggaaatttaaatttccctccagttttttgtgacacttaggctataaaaagaagtcatgtgtgtgcattttatcaactttgatcatttgagaattacacttcaaagttcagacctcatttgaggcacaaaatttagtgttccttctctccctctccctccactcatcttctcctttcttcaagctcttatccatggcttcctatggtggtgagcttcttcttgactcatcttcttcttgaagtggcatctccaatcatctt

SEQ ID NO: 2849 - DNA, 433 bp, Glycine max
tagattgtaagcaatggcaagaaactatggaatctgaaattgaatcaatgaagatcaacaaagtatggactttagttgaagcttcaaaggatataaaaacaattggttggaaatgggtttacaagaaaaaggatattggagcatattggaaggttgaaacctacaaagtttgtcttgttgccaagggatattgtcaaaggaaggtatagattatgatgaaacttttcaacttttctcccgcggcaatgctcaaataaattcaaattcgtttttctataatagcatactatgatcatgaaatatgaaatggatgtggaaaatggttttccttaacgatgaactaaaagaagatgtgtatatgacacaacctaagggaatcacatccttgtctgatcataataaaagctacaagtttcaatgattcatttatgga

SEQ ID NO: 2850 - DNA, 380 bp, Glycine max
  unsure at all n locations
gcagctgaatatgcaccacttgctttcattcactgcttanatatccaaaatacacctgccacttctgacttatacttgagaaagtaatccaacacattctagtgaaatcatctataaagatgatgtaatatttactttttttaagcgaagtagtcctttgaggttcggccaaatctgcgtgaatcaattgcagcttctctgttgctctccacgttgattgtttgaagggtaatcttgcttgcttgccatattggcatgcttgacagcatggtaatttagaatctaagtgaggtaagccatgaaccaactcctttcgtttcatgttcaacacagttgcatgatgaaaatggtctaatcttttgtgccaagcttctgtacta

SEQ ID NO: 2851 - DNA, 392 bp, Glycine max
tgtgcatccaataccctgatgaggatgtcccatatgttcttaatactggactgattcatttgcttccaaagtttcatggccttgcaggtgaagacccgcacaaacatttgaaagaatttcacattgtctgctccaccatgaaacccctagatgtccaagaggatcacatatttctgaaggcttttcctcattcattagagggagtggcaaaggactggctgtattaccttgctccaaggtccatcacgagctgggatgaccttaagagagtattcttagaaaaagttttccctgcttccaggaccacaaccatcaggaaggatatctcaggtattagacaactcagtggagagagcctgtatgagtactgggagagattaagaaactatgtg

SEQ ID NO: 2852 - DNA, 458 bp, Glycine max
  unsure at all n locations
gcttgttgaagatcacagaaacttctttgctgttatcaatagttgacaatatttgctttaaagtactttcggtacatgaatctttgatttctaactatgttattcttttgggatgagattctctagaatagggattttttgcttggttattatttcactttttcaaaaataatgagttagttaggaatgtactaatgatgtaaaatagctctacactgtcattaaatttaaattattgtctataaagttaacaaatttattataaataataatttttgattggacaatgtaaaatgtctttattgtatcaatgcatagtcattcttctcataaatgaaattatgatgagaaactctagtaatcattcactcaattatcgtgagaattattaattctcacttcataaatattctaagaatctctttaggaaatatttntattctattgtagccatatgg

SEQ ID NO: 2853 - DNA, 409 bp, Glycine max
  unsure at all n locations
agcttcttcttgactcatcttctccttgaagtgatgtctctgatcatctntcttccttcttcattccgctaccattaaacttcaagaagcaaaggactctattgattaagaagatccaagtcctacaagctccacatggagctacatcagggcctgaatgactattgtttgtgaacaaactccttcagaaggctgagcttgataagctcttctatcttatccttcagagcactgcattgttttgttgagtggccatgcttgcaatgtgtcgcaacctacccttttgcgggcaagcgaggcgaggctcatgggtgcgtcttacacaggaggaaaatgcgcggagtcgccaccaacgtttattgaaaggaaaatgttagaaaaatccacaggaaacagtcatgaagaatac

SEQ ID NO: 2854 - DNA, 447 bp, Glycine max
  unsure at all n locations
agcttataananagtcaaagttatataaatatttatcttatgtcataatctgtgacgcatatgacgcatccactgaattaaatcacttttaatagcattttttctcccacttgctctgagtatttacattagagtacataagccttttaatatatgaaactctataatattctcatatgaatgactaaaacaaaagaaaatcaatctttttactattttattcacaatctaaatgtaatcacttactatgagtttaatccttaaatatatattcatatgattattctaagatttaaactaatatgattggaaaactgcatgcatnttgaatgaattatcttaaaaattggtagtttgaaggaattaatggtnttttagattaacaaaataatttaatcatttacgctccttgaaattcacactggaaatgacatgcttatgtaatac

SEQ ID NO: 2855 - DNA, 115 bp, Glycine max
tgatggggcctatgcacgatggaagccttggagggaagagtatgcctatgatgttagagatgatttcttcaaatttgcctgggtctactttattacaagaaaatccaaaaccttt

SEQ ID NO: 2856 - DNA, 348 bp, Glycine max
agcttagtaaagctaggcactaacatatctctttgctcggatgtctgatagagtcccataatctattgagacgctcgatattgaattctgaacctcacagctaatgtaaacgacaataacctgttactcggatgtctgattgagtcccgtaatatattgagacgatcgaaattgaattctgaagctctgagctaattcaaacgacaataacttttttactcagatgtctaattgtgtcccgtaatatatcgagatgatcgaaatctaattctgaagctctgacctaattcaaatgacaataacttcttgctcggatgtctgatagagtcccataatctattgagacgc

SEQ ID NO: 2857 - DNA, 390 bp, Glycine max
  unsure at all n locations
agcttaagctccttcaactgcacaaggctcttaatatttgaatagtatccttatggaaccttcacctgacgaagacgctgagaaaaacttatcttctcctttttggacaaagtatgacaagctaggggcaagtaaattttcttcccatcaaaccttggatgcaactgtgatcgtatccctatctcagctagatcttgacgggtattcaagccatccttcgtcttgccctgaatgttagggagcatcccaatcacactgtcacatacattnttctcgacatgcataacatcaatacaatgtctaacgtctagatcagaccaatacggaagatcaaagaanatggacctcttcttccatatagaagtcttacttttatccttcttttgggtc

SEQ ID NO: 2858 - DNA, 414 bp, Glycine max
agcttgatgcacaatttcattgaagagacaaatattactatatgaatataacatgtatataaaatgttgagataaattataaagactaagagaagaattatgacaaaaaaaatgagatgaatagtattggagttatgattatgatcatgtcgagctttgcacaagttaacaatgtacctattaaatttgggtgtgattccaaatgttgagaaaaatgtctagattcaatttccatttttccatatcaagtgtggttctgcatgtgtatgaaaaaatgtcataaaaagtcgaataagaatggtattcattctcttaccactttttaagggtgtgtaattattattttataatcgaattaattataatcttacatgttcttatcattgacttatttcttagatgctgatcatacat

SEQ ID NO: 2859 - DNA, 410 bp, Glycine max
  unsure at all n locations
tcagaattcaatntcgatcgtctcgatatattacaggtctcaatctgacatctgaggaaaaaagttattgtcgtttgaatttgctgagagcttcaacattcaattttgagcgtctcgatgtattacgggacttaatcagacatccgagttaaaagttattgttgtttgaatttgctgagagcttcaacattcaatttcgagcgtctcgatattttacgggactcaatcagacatccgagttaaaagttattgtcgtttgaatttgctgagagcttcaacattcaatttcgagcgtctcgatatattacgggactcaatcagacatccgagtaaaaagttattgtcgtttgaatttgctgagagcttcaacattcaatttcgagcgtctcgatgtattacgggactcaatc

SEQ ID NO: 2860 - DNA, 336 bp, Glycine max
  unsure at all n locations
catcacatgttttactatgtggcgatcgggcgatggtgcacaacaagttntttcacatccacaatgcgcgcataaacccaccatcccctgttgcccacctccaactgagcacacgtactcccacgtagcccatatcctcgtttctctcaacaccgggtcccgtaatatatcgagacgctcgaaattgaattctgaagctctgagctaattcaaacgacaataactttttgctcggatgtctgattgagtcccgtaatctattgagacgctcgaaattgaattctgaaccttagagctaactcaaacgacaataacttattactcgaatgtctgatt

SEQ ID NO: 2861 - DNA, 443 bp, Glycine max
  unsure at all n locations
tgccgccacggagttntccgactatgctcttgtgtggtgtttgttattatgcaagttgaagtggacgtttccattgggaaatacaatgataaggtactttgtgatgttgttcctatggaggccagtcacttacttttggggagaccatggcaatttgataaaagagccaatcatgacggttacaccaacaagatctctttcattacttttggtgttgcataaaaaatgtacaatgtaggtcggctaggtttttttgtgcgagctcaaccgacattttgtttcggccgaaactggcatgttcccatttattttggccaggaaaacattagcccacctcggcaaaaaaatatttgctatccgacttcatgcatatttcattcacggaatgaacttgaaactcattaaccgacatctggtcggaaatagcccgactgaacattccc

SEQ ID NO: 2862 - DNA, 372 bp, Glycine max
taacactaagaaagcagaagccatgattccagcaactgcctctggactcatttgtggagaaggcctgtgggctcttcccgcttccattcttgctcttgccaaagttaacccgcctatctgcatgaattttcttgcttcctagaacttgatcaactacatcaaaccaatgaatgccataattagttagttaattaatactactatatatgttagcaggtacacttcatacataaccaaaatgctataaatattccaagtgtctggccattgggcttaagaacattgtattattgcttactacaactctgtaggaaaagtcagttcctgttaattgatctctcggaagggaatttcttcttcacaggagtcata

SEQ ID NO: 2863 - DNA, 416 bp, Glycine max
  unsure at all n locations
gcttaaggacgacgaatntccagtagcaaagtacatcctagcacctccccaaacgtactcatcccagtaactggtagaattgtaaaatattgaagcctctgaactcccagcactgtacctgcctctctgatccctggaaaacttgaacagcgtggtcgcaccatgcaccagtttcttggaataggccttgttgtccttgaaaacaatggaagcagaagccaaggcagcagccatctcagccgcgagatcggaacaactgtggcattcagtcacagggcggtcatagtccatgtccttcggacgcatccagcaatagtgatcattcngactgtcaccaccagaagtatctccaagcccaacctgtcaaacaagcccaaaaaacataattgagaaacatctacccacagtcacaccac

SEQ ID NO: 2864 - DNA, 407 bp, Glycine max
  unsure at all n locations
tanacattcaacttcgagcatctcgatatattacgagtctcattcagacatccgagtaaaaagttattgtcgtttgaattggctcagagcttcaacattcaatttcgagcgtctcgatatattacgggactcaatcagacatccgactaaaaagttgttgtcgtttgaattcactcagaggttcaacattcaatttcgagcgtctcgatatatgacgggactcaatcagacatccgagtaaaaagttattgccgtttgaatttgctcagagcatcaacattgaatttcgagcgtctcgatatgtgacgggactgaatcagacatccgagtaaaaagttattgtcgtttgaatttgctcagagcatcaacattcaatttcgagcgtctcgatatattacgggactcaa

SEQ ID NO: 2865 - DNA, 350 bp, Glycine max
  unsure at all n locations
agctntgagcaaattcaaacgacaataatcctttactcggatgtctgattgagtcctgtnatttatcgacacgctcgaaatagaatgttgaagctctgagcaaattcaaacgacaataactttttactcggatgtctgatattgtcccgtaatataacgagacgctcgaaattgaatgctgaagctctgagcaaattcaaacgacaataacattntactcggatgtctgattgagtcccgtcatatatcgacatgctcgaaattgaatgttgaagctctgagcaaattcaaacgacaataactntttactcggatgtctgattgagtcccgtcacatatcgagacgctcg

SEQ ID NO: 2866 - DNA, 405 bp, Glycine max
  unsure at all n locations
tgtagggaattcaaacgacaataactctctactcggatgtcctattgaatcgggtaatatatcgagacgctcaaaattgagactagaagctctgagcaaatttaaatgacaataactctatacacggatgtccggttgagtcccgtaatatatcgagacgctcgaaattgaagacggaaactcttagaaaattcacacgacgataactttntactcggatgctcgacagagtgtcgtaatatatcgagggatgctccaaattgaaaacggacgctcgtatcatattcaagcgacaataactatgtactcggatatctgatagagtcccgtaatatgtcgagacgctcaaatattagatgcttagctctgacaaaattggattgacaataactttatacacggatg

SEQ ID NO: 2867 - DNA, 411 bp, Glycine max
  unsure at all n locations
ggctgcagctttagtctcaatttgagcgtctcgatatattactcgattcaatcggacatccgagtaaaaagttattgtcgtttgaattccctacgagcttcccttnntcaattggagcgtcttgatctattacaggactcaaccggacatccgtgtaaaagttattgtcaattcaattttctcagagcttcggatctaaattntgagcgtctcgatatattacgggactctatcagacatccgagtaaaaagttaatgtcgttggaatttgatacgagcttccgtattcaatttggagcatctctcgataaattacgacactctgtcgggcatccaagtaaagacttagtggccgttgaattttctaagagtttgcgtttcaattgggagcgtctcgatatattacgggac

SEQ ID NO: 2868 - DNA, 369 bp, Glycine max
  unsure at all n locations
tgaatcggacctcagtgtgaaaagttatgaccatttaaatntttgagagcttccgttgttcaattccgagcctctcgacatattatgcgtccgaatcggacatccgtgtgaaaagttatgaccatttaaatttcgcgagagcttccgatgttttatttcgagcgtatcgatatattataagcctgaatcggacatccgtgtgtcactatatgttataagcatttgaatttctcatgagcttgcgttgttcaattttgagcgtctcgatatgtgatttgcctgaataggacatccgtgtgaaaagttatgaccatttgaatctctccagagctttcgttgtttcatttcgagcatcttgacatattatgc

SEQ ID NO: 2869 - DNA, 338 bp, Glycine max
  unsure at all n locations
atggaatcaagcattatggatgcatggntgaccttattgggcagagcanggagattaaaagaggcttatgacttgatagtgagaatggcaatgaaacctaacgacacagtttttgggggaatgcttggagcatgccggattcattctgatatgaagatggcagaacaagtaatgaagttgatctgtgaagacnctgttactggtgctagttctcacaatgtgcttttgtcaaatatctatgcagcttctgaaaaatgggagaaagcttgaaggatgaagagcatagatggagggtctcagaggatacccggatgtagttcaataatcttcagtgactt

SEQ ID NO: 2870 - DNA, 477 bp, Glycine max
tatcaggcgatactatataatactgctgcttctagcgtacccgctattggtgctcatacaataccaaacttttatacctgttattactagctatattgaattctttagatcctgaatgtacaaccttcaaattgttgctcgttcccgtatatgttatttgcaaaaaataaaattaatctgaaacaattctagctgaattgctatcgatattattactcataccataacgaataacagctaaacaagtaatttaaaatgtaactgtcaaataatgtggtatctttttaattacaatcttacttcaatatctaattttgttaatctacttatgacgatctttaaatataaatatgaatttaaaggtgatctactgataatataaagtacttgctcatcacaaattatgatacctatcaatttaaatcttaacttaattctataagtattaattaacatataatacgacaaatttttaac

SEQ ID NO: 2871 - DNA, 370 bp, Glycine max
taaagtcttcctctattataacatggtcttcagggagaatttcgtgctggacccccagctaacaaaaccaacaagaacccatcaaaagaagccttcatcacctcagtaattacatgcgttatgactctatcatgcaccgtagacaatataatcttcaagcattggttaagctcctcaagaaaaggctcaattctcgtggatgaaacttcaccaacatacaggccatcccaaagaacataacgcagatcctggaaaatcactttgtatgccatggcctcggagagttgacggataccttccacagatgcagctttagaaagcttgaacttcaaccccttctctataccatcctcttttgttgatttagaat

SEQ ID NO: 2872 - DNA, 437 bp, Glycine max
  unsure at all n locations
ccgcagagtggatatctagncatgacattctttttttatgggaaaaaaaattatgtgaccatacttagtcatgacatcatcatagctgcactacactgcgagtacatatgtattttataattctaagagattcacaagcatctatgataatcacaatcataagcatgatgtaggttaagttttgataaatcttctcagttagttnttaattntttattaattgacaaaattatttctcagtctgataaataaattctttaatagattttatcattgtttaaaatgttacttacaaattaattcttttagaatactgactatntaagttcggatctttntatatgtttttttatcttcaatatatctattcaagtttgtagttattctttctaaataaatcaaccatgattttatcgaatctttcagatatttaatag

SEQ ID NO: 2873 - DNA, 360 bp, Glycine max
tggatttcctttgctccggagacctctcctctctcatgtttacccaaaaccaatctttgggttggaaaacaacctttttgcgccccttgtttgcatgtttagcataactctcattcctcttttcaatttgggcctagactctttcatggagctttttcacatagtacactttggcttgtccttccttatgctttaaaactgaaatattatgccttggcaacatatcacgaggagttagtggattgaaaccataaacaagctcttaaggagaacaagtagtggtgctatgctcactcctattataagcacattcaatgtgaggttagcgaactctcccattcttaagattctttttcaaaa

SEQ ID NO: 2874 - DNA, 378 bp, Glycine max
tgtgacggactataccaagctctatgaaccagggacggtgttatatctatatataggcttgctaagggtagagagaggaagactagagatttggatcaagtgaagtgtgttaaggatgaagaaggcaaagtcttagtgcatgaaaaagatatcaaggaaaggtggaaggcgtatttccacaacttatttaatgatggatatggatatgactctagcagtctagacacaagagaagaggaccggaactataagtactatcgtcggattcagaaacaggaagtaaaggaagcgttgaaaagaatgagtaatggtaaggcggtggggccagacaacatacctattgaagtgtggaaaactcttggagatagaggtcttgag

SEQ ID NO: 2875 - DNA, 327 bp, Glycine max
  unsure at all n locations
gatatattatgtccccgtatctgacatccgtgtcanaagttatgaccattcaaatatgtcgagagtttccgttgtgcaatttcgagggtctcgatatattatgccccatattctaacatccgagtgaaatgttatgaccatttgaaattctagagagcttccgttgttcaatatcgagcgtctcgatatattatgtaccacattccgacatccgtgtgaaaagggatcaccattcgaatttctcgagagcttccgttgttcaattttgagagtctagatgagttatattcgccaatcggacatccgtgtgaaaagttattaccattc

SEQ ID NO: 2876 - DNA, 428 bp, Glycine max
  unsure at all n locations
ntaatgtgttctcccttgtagaactactaactgcagtaacagttacaacccaactattcgatagtgataacaatagaatcaatgtcttcacctcatccttaaatttaatctgcactgactctaactggacaagaatagtattaaattcattaatatgatcagttatagagataccttctcccatcttgaggttgaacaaccgacgcatcaagtatactttgttggctgctgaaggcttctcgtacatatctgataacgccttcattaagcctgcagtagtcttctcatttacgatgttgaatgtgacgttcttggctaatgtcaatctgatcacgcaaatagcctatcgatctagcaagtttcattcttcttgcttcatgtcgtctggcttatcccctaataacggttgatacaacttcttctaatat

SEQ ID NO: 2877 - DNA, 275 bp, Glycine max
  unsure at all n locations
agctatcgagaaattcntaatggtcataactttaacattgaggtccgattcaggcgcataatatatcgagacgctcgaacataaacaacgaaagctctcgagaaattcaaatggtcataacttttcactcggatgtccgattcacgcgcataatatatcgggacgctcgaaattgaccaacataagctctcgagatattcaaatggtcataacttttcacatggatgacagattccagtccatgaatgatcgagacgctcgaaattgaacaacga

SEQ ID NO: 2878 - DNA, 413 bp, Glycine max
  unsure at all n locations
actctgtctgttacaataagtatgtggtcaagaaacaccacttgagccatgaaaccccgttccagtggagacaataattgaggttccaagggtgttagacatcatggttgcatggtaggcaaacatctcacacatgtggttcttcaacacttgaccaatgttaggtggcattttaccaccaagtatantggcttctgtccgcaatgctactgtgtgcattacttgcacagcttttagtgggaacttttcatgagctcgttctccacacaacattattccatcataaccttctcaaacagcaattgctatatttgatacctctgttctggttggagttgggtgaacaatcatgctgtctatcatatttgttgtcacaataacagacttttccatgctacaacacaagttgatta

SEQ ID NO: 2879 - DNA, 357 bp, Glycine max
gacaatggtagtgcaatcttgttgtagtcctggatgaatcccctatagaaacttgcatgtccaagtaaagaatgcacttcctgcacagaagcagggtgaggcgaagaagccataacatcaatcttggccttattgacctcaatacctctactagagaccaaattccgtaagactattccttcatgtaccataaaatggcatttctcaaagttaagaacaaagttattctcaatgcatcggtcaagaactctagagaagctatccaaacatacataaaaaaaggaaccataaatagtgaagtcatccataaacacctccatgcaactctccaataaaatagaaaagatacttaccatg

SEQ ID NO: 2880 - DNA, 462 bp, Glycine max
  unsure at all n locations
agcttaccatgagtattaaaaaacttcaaaactgcctaatactaaccttatcatgttatatcaaatagtcacgacaacactataatgtgtagagaggcacaatgtcctaacataaatcaatatgaccttctatcactataaaataaatgctcggtcatttatatttaattaaataaataaagagataatcatttcataacatacagtatactacaacacttccaaaatgcttagcaaagcanaatgctctacataaatcagtatagtattctattaacacaaaatatatattcttttatttatatttaaatattntaatcttacaaagatcatttaacaatagcacacagtgtacaccagttttcgatctggttgctactggtctgatttggttgagatggtatatntcagctcaattcatctaaataacagcagaaagtatgctatcagacaatgaaaata

SEQ ID NO: 2881 - DNA, 461 bp, Glycine max
  unsure at all n locations
agctngctntaagactgtatattgatttctttagtatgcacaccatgtgttcatttccttcaactgagaaccccattggttggtccatacaaacattctcctctaaatctccattcagaaaggcggttttcacatctatttgatgtagctccaagtcataatgggctactattgtcatgataatcctgaaagaatcctttcgtgagaccaagaaaatgtctctttataatcaatgtcatctttctgagtaaattccttagcaacaagtctagccttgtaacgttcaaggttgccatgagagtcacgtttagtcttgaagacccacttacaaccaactctcttacaaccccttgttaattctacaaggtcccaaacaccattantgtccctgaaatctatctcttctttcatggcagttaaccacttctcagaattatcacaacttatagcttgtgaaaatg

SEQ ID NO: 2882 - DNA, 382 bp, Glycine max
  unsure at all n locations
agctngatgatataagtgagaagtgcgtgtatgtggttcacgactcaagatccacggggtactagctctatcttccctataggagagggatcgtcataagtcgcgacgtctacttcgacgaagaagattgttgggattggactgctcgcgaagactagtatgactatcttccttattttgaagaagatgctgatatcgtacaactcatcatggaggaacatattgcaccacctgcctcaccgacacctacgctggatgaaacttgttcatgtgagaggactccgcgactaaggagcattgaagagattcttgagggaacccataacctaaacgacattaacctcttttgtctttcctgtggttgtgagcctctaatctctca

SEQ ID NO: 2883 - DNA, 452 bp, Glycine max
  unsure at all n locations
aagttcttcctcaacactgtcctaagcaaagttcccaaagtcctattaacaacttccgtttgcccatcggtttgtgggtgacaagtggttgaaaataacaatttagtgcccaacttgctccacaaagtcctncaaaaatggcttatgaacttagagtccctatcactaacaatgctccttggcaaaccatggagtctcacaatctccttgaaaaacaaatcaaccacatgggaagcatcatcaactnntttacatggaataaaatgagccattntagaaaacctatcaacaaccacaaaaatggaatctctaccattgcttggttttggcagccccaaaacaaaatccatggataaatcaatccaaggatactccgggaatggcaatggagtatacaatccatgaggctntaccttagactntgccctcttacatacaatgcaatgntcaca

SEQ ID NO: 2884 - DNA, 411 bp, Glycine max
agcttctagaccagcaattcttgtgcctccgtagtataaatgagttgcatcaacatcaggaaagatgccctctccaaagatatttttgcaaaggtccatatggtatctgcaatgcatgagaaaagaatcaacaaccgcacatattaaagaatagagtcctaatgaaatattaaataagaggaaagaatcctgtcaatagaggagtatataaagtgaacagtgaggatgacgaacttgctttgcatcaatttctgaggagcgtatactatcatttgatggagccacctgaaagaatgcaacttcagtgcaaacttgaaaccaccataatcgagtagaactgtcttcatcgatagcagatttcttcaagtactcctggtcataagtctgcacattaacacccaaggttccaat

SEQ ID NO: 2885 - DNA, 476 bp, Glycine max
  unsure at all n locations
ctgcttaattgctccaggttgctgcatggaagggcaaaggtctgtatggtggtcagtagaggagcacacaccacaaacccttgcgacaggtacagatttctgattcaaggccagctgggttaccaagttaaccaatgcatccagtttgccttcaagcttcttagtttcaaatgatgcagatgggtttgtagctacctcatgcactcctctaatgactatggcatcatttctggcgctaaactgctgagagttggaggccatcttctcaattaaatttctggcttcagcaggagtcatgtctccaagggctccaccactggcagcatctatcatacttctctccatattactgagtccttcataaaaatattggagaagaagctattctgaaatctgatggtgagggcaattggcacatagtttcttatatcgcttccagtactcatacangctctcttcactaagctgtctaatac

SEQ ID NO: 2886 - DNA, 390 bp, Glycine max
tgtagggttaaagtgtcatgaatgtcacgtgctcatgcaacaattgttagccgtggctatacgagacatcttgccaaacaaagtcaggttagccataactcgcttgtgctttttctttcatgccatatgtagcaaagtcattaatcctgtcaaatttgatgagatggaaaatgaggccgcaattatattgtgtcagttggagatgtattttccccctgctttctttgacatcatgattcacttgattgtgcatctggtcagagaaatcaaatgttgtggtcctgtttatttgcggtggatgtacccggttgagcgatacatgaagatcttcaaagggtatacaaagaatctatatcgtccaaaagcatctattattgagagggacattgc

SEQ ID NO: 2887 - DNA, 452 bp, Glycine max
  unsure at all n locations
agctntattcaagacaaagaaattaaagatattctagatggatgatcaagacaagtctctagtcttagaaatggtatattaaataggagggaattccaattgaagtagcaaaaggtttggccaagaaatttaagttaaaaagtcttttacaagaaatttactctctggtaatcgattaccagaggatgtaatcgattaccaatggccaaaactgatttacaatagctattaaaatttgaattcaaaatttgcactgtgtaatcgattacacatatgtggtaatcgattaccagcaatttctgaacattttaattcaaattttatagtttgtaatcgattacacatatactgtaatcgattaccagagcagattttcagaatatattctcaacagtcacatctttttgtgtggttcttgaatggctatcacagggcctatatatatgtgactt

SEQ ID NO: 2888 - DNA, 410 bp, Glycine max
  unsure at all n locations
tcttagttntagatgatgcacgatgagttgtagccacctcatgtactcctctaatgactatagcatcatttctggcgctaaactgctgggagttggaagccatcttctcaattaaatttatggcttcagcaggagtcatgtctccaagggctccaccactggcagcatctatcatacttctctccatattactgagtccttcataaaaatattggagaagaagctgctccgaaatctgatggtgagggcaactggcacatagtttttaaatatctcccactattcgtatgggctctctccactaagttgtctaatacttgagatatccttcctgatgcgtgtggtcctggaagcacggaaaattntttctaagaatactctcttaaggtcatcccagctcgtgatggacc

SEQ ID NO: 2889 - DNA, 388 bp, Glycine max
  unsure at all n locations
acacaccattcttggaaaagtcctattaatccatgattgcgcatgttatctttgatttgataggaaatgatttgcaaagtcaagtcatgacatatctatggttcagaattaggatgaaacatttgcctgtgtgagatttatacactttgagcgatttccctctatttcaactggacccaatgtttcttctaagcgctcatttagaaacgaaatgctaatatcctaaatctcatttgtggttatgagaaaattctatcagcatgctttccttcccaatagacacattgttttcttcaaaaatacatgttgtntgatcagttgaaagttgtttcttgctagcgtgttgcatttagtgaaaaacaccgagatacttagtctcgcctttcat

SEQ ID NO: 2890 - DNA, 493 bp, Glycine max
atgcgtgtaagtgaacaaatataacacatccaataacatgaggtggtaaataaaccatggaaggaaggatacaatgatcaaacaacacatctagaggccttctcaagttaagcacctctagaaagggttcgattaatcaaataaactgtagagctcacagcctcaccccataaatgagatgggacattaccatctatcaaaagtaatcttgtcacctctaatatatgtctatctttccttttagccacttcattttgttgtggtgaataagggcatgtagttcgatgcaagataccattaaagttcatgaactctattaattcagtcttaaaatatatccctcaattgtctaatctaatgaccttaatatatgtgttaaattgtgagctatcatctgatgaaaggaacacacaatatcacacacatcacttttatgtttaagcagatacacccaggttacccgagtacaatcatcaacaaaactgataaacca

SEQ ID NO: 2891 - DNA, 448 bp, Glycine max
  unsure at all n locations
agctngtatttccatgtcacgatattaccagagcccncttccatccaagatgatcctactccttctccccacattcaaactatccttgaccgttaccaccctttgtttcaaacacccaacacccttcctccgcaacgtgagacagaccaccgtatccatcttctaccacaagccacacctgtgaatgtccgcccctaccggtacccccatttccagaagcaggaaattgagaaacaagttgaaattatgctacaaaagggccttatacaacctagtaatagccccttttcatcgccggtcttgcccgtcaagaaacaagatggatcatggagattctgcgtggattatagggcgctcaatgctctcaccattaaagacaggttcccgatacctaccgttgacgaaatgttggacgaaatanggggtgctcattacttctcgaagctcg

SEQ ID NO: 2892 - DNA, 445 bp, Glycine max
  unsure at all n locations
ntccncaccacctttcttctagatattgttttagatagcggtttggtgtcacgaggaggcatagacaaatcactactttcggattcaggttgatcaatcttaacaggagaatggtctcgttgtcgctgctctctgaagaccatcaagagcttctgagccttctctcttcctctcgaggtcccattcactgatattgacaccaatgcaggtataaccccttcttgcaggaccatctgacaacattcctcactcctgttacacaaaattaggagacaagaagcagcttgttcctgctctatgggctcaccggtatctagtgtggaagccaacgcacttataagtccaggagccaacatcattttctctcttcctgcttgataaaccgccaacattatcaaaacagctatgcagttttctgtccacatgcaatcaccctggtctacaa

SEQ ID NO: 2893 - DNA, 438 bp, Glycine max
  unsure at all n locations
agcttcttcatcagtgcatcccttgaagaaaggaggctcataatcagctggctgcaggataaaacaattatattgtcaaatcaccctgtatataagtcagccctttgcttgggcataacagaatgctaaaatagtcaccagttgcatagcaaagtatgcatttcaagtctgggcaatgcagaaattcatagaaaggataaaaggagccgagatttgctattcatgttaaagaacataccgtcacatcatcatagtagaggagcttcatcagaatagtgcgctagggaaagaatgcagaaatcagagtttgtaatgattacttaaacttgaagagagaatattatgaaattatcattcagagcatttgaatttctttacctcttctggcattntctccagaagtctcatcaactgaaccagagttcggatcatcttaca

SEQ ID NO: 2894 - DNA, 413 bp, Glycine max
  unsure at all n locations
tactaagctggattcctttagtagggaatctatcctacctaagatggagcataacccagtcacnctcattaagaattagctctttccttcctctatagcctttatttgaatacacctttgtttggttcttaaccctctcatgccacttctttaccaactctgacctagattccccttctttatgtataaaagaagtgtctagtggaaggggaatgaggtctaatggtgttaggggattgaacccatagacaacctcaaaaggggatggcttggtggttctatgaacccccatgttgtaggcaaattctacataaggaagatactcattccaaggttgcctttcagaaaaccccttaanaagatggataaagacctattcactacctctcgttgacaatcagtttgtggatgac

SEQ ID NO: 2895 - DNA, 475 bp, Glycine max
  unsure at all n locations
tttaccacaattgacgacttgagctaatttagaacatctgaagcatagggcaatgacataccaataggctgcttcttctgctacacaacctgaaagtgaaagatgttgcctcaatttcaagagtgacattccaagtgtaaccacggaatggccattagcatttgtcaaggtgtatattatatttcattcacaatattttctttcgtagcaaaatggatttaattaaaaaagttaacattataattttaataacctcatgaatctgattataattaaatcattaagttttaattaatgattataattgtatattttcttttaaaatatactttctaaacaaaaagctaatttcagataagatattcttcaagataattaanaaatgactacaggcttttggttctaaatagggttcttctagtacgttaaagacatactactttagagtatnaaagtggtatttgctctaattatt

SEQ ID NO: 2896 - DNA, 418 bp, Glycine max
agctaggatttcctcttattagggaatctatccttcctacgatggagccaaatccagtcccccacattaagaactagctcctttcttcctctattgtctttagttgcatacacctttgtttggttctctatttggttaaccctctcatccagctcctttacaaactttgacctagattccccttctttatgtataaaagaagtgtcaagtgggaggggaattaggtctaaggatgttagaggattgaacctatagacaacctcaaaaggggattgcttggtagttctatgaacccccttgttgtaggcaaattctacatgaggaagatactcatctcaagacatatggttgcctttcagaagagcccttataatggtggataaagacctattcactacctttgtttgcccatcatttg

SEQ ID NO: 2897 - DNA, 416 bp, Glycine max
accctgcttcttggacaaaatcttcttttaaggtaaacacaaaatgtgatttgcaagtgaataacatgtgtgaggcattcaacaatgtaataatggagtatagagataagccaattattacactattggagggaatccgattttacataagctctataattgtcaagttaaggactatcctcatcacgtatgatggttcaatctatccaaaagctcagcaaatcattgataaatataaaaaagcatgtgaagcatggcgggcacattggcgtggtgatgttgatttgtctttatttgaggtgtcaaagggcatggaaaaatttgttgtcaatcttaaacaatagacatattatagaaagtgggagttaactagaaattcatgcactcattccataccatgcatgtggatcaatagt

SEQ ID NO: 2898 - DNA, 466 bp, Glycine max
  unsure at all n locations
agcttcaaccaaggagagatggaccatttcaagtgcttgaaagaatcaatgacaatgcttacaaagttgagctgcccggtgagtataatgttagttccaccttcaatgtctcagacttatctctttttgatgcagatggagaatccgatttgaggacaaatccttctcaagagggagagaatgatgaggacatgaccaagaacaagggcaaggatccacttgaaggacttggaggacctatgacaagggctagaacaaggaaagccaaggaagctcttcaacaagtgttgtccatactatntgaatacaaacccaagtttcaaggagaaaagtccaaggttgtgagttgtatcatggcccacatggaggaggactaaatggcaccactctgtctcaattttagagtggttaattngtctaaataatggcccaatccttgtaaagttggcagaccaaaaatatgttt

SEQ ID NO: 2899 - DNA, 367 bp, Glycine max
  unsure at all n locations
agcttcgaaatgaatgttgaagctctgagtaaattcaaacgacaatatacttttactcagatgtccgattgagtcctgtaatatatcgaaaagctcgaaattgaatgtagaagctctgagcaaattcaaacaacaataactttttactcggatgtctgattgagtcccgtaatgtatcgaaatgctcgaaatggaataccgaagccctgagcaaattcaaatgacaataactttttactcggatgtctgattgagtcccgtaatatatcgagatgctcgaaatggaataccgaagccctgagcaaattcaaacgacagtaactntttactcggatgtctgattgagtcccgtaatatatcgaaaagc

SEQ ID NO: 2900 - DNA, 454 bp, Glycine max
  unsure at all n locations
tatgagaattccaagctntataagcaaanagtaaaaatttatcatgacaaanagctatcaaaaaggaattntccacctggtcaataggtattgttatttaattctcgattaagattgtttccaggtaagatgaaatccaagtggtttggaccattcatcatcaaagaatttatgccacatgaagcagtgatactagaggatccaaccaccaaaaggacatggactatgaatggtagtaggatcaaacactacctatgtggagattttgagaggataatcattgttgtccatctacaagagacttgaaccacaacaaagatgttcagctagaaagacgttaaagaagcgctcctaggaggcaacctagtatttctaaaccttactctttaattntctttttgttaaatttcatatntgtgttatttaaatattttttggttaaaatatgtctaaa

SEQ ID NO: 2901 - DNA, 194 bp, Glycine max
  unsure at all n locations
cgttcatgtgtcctccatcttcgagtttgttgccatgcgtagtgattgcttaaggcaattctccattctcaaccctttntcggagccccatgaatagcgttctcgttcatgtgtcttccaccttctagtttggagccatgcgcagagattgcttagtgcaattcttcattctgaacccttttttctgaacccca

SEQ ID NO: 2902 - DNA, 407 bp, Glycine max
  unsure at all n locations
ctcaagcttgagtaaataaaacgacaataactntttactcggatgtccgattgagtcccgtaatatatcgagacgctcgtaattganaacagaaactctgagcatattcgaacgacaataacttttgactcagatgtccgcttgtgtcccttagtatatcgagacgctcgtaatagaaaacggaagctctaagaaaaatcaaacgacaataactnttaactcggatgttggatagagccccgtaatatatcgagacgctcgaaattgaaaacagaagctctgagcaaattcaaacgacaataacttttgattcggatgtctgattgagtcccataatatgtcgagacgctcgaaattgaaaacagaagctctgagcaaaattaaacgacaataactttttactcgga

SEQ ID NO: 2903 - DNA, 451 bp, Glycine max
agcttccatcaagaagatagagattagctacacatacctctctaatagctaagctcacctccttgagatgaaaagctagatcttagctacacaccccctataatagctaagctcacccccatgacaaaaaaacatgaaaatacaaaaaaaaagtctttactacaaagactactcaaaatgccccgaaatacaaggctaaaaccctatactactagaatggccaaaatacatggcccaaacgaaggaaaaacctattctaatatatacaaaggtaagcgggctcatacttagcccatgggctcaaaatataccctaaggctcatgagaaccctagggccttcccttggatctttagcccaatctacttggagtcttctacccaatgcccttgcgggataggattacatcatacttgccccaagaaccatctaaagatgtattgtcggaagat

SEQ ID NO: 2904 - DNA, 482 bp, Glycine max
  unsure at all n locations
agaaattcatgaaggtgctctaatgtctgaaatctatgggattaagatggtcattgaccaatccctattntatgatttaacaaaatttcctagtgaaggtgtaccttttgagggtgcactgattgatgaatggaaattcgatttctctgtgcatgatgcccgccggttggtttgcaccaaccaagcggatatgaccggaaggcttcttgccggttcattggcttttgaaagtcgcatcctccattaccttatagtttgcattntgcttcctagatcttcaaaccttgcctaggtttctaaagaagatctcattgtcatgtgggcctttcataaaggtttacaaatcgattgggcacatcttggtagatattgcatgcataaggcatngcgattgaatgccacattgccttatnctcatctnagtactctntttcttcaacacttcaacatccctcttgattctgaaccctatgttcaaatca

SEQ ID NO: 2905 - DNA, 443 bp, Glycine max
  unsure at all n locations
agcttggttagatatttaaatgaagtagaaaaaagtgagaaaaatataaatattataggtgataagaagaaaaacacagaaagaaatgatcagtattaataaagtattttaaaaaaataaaatatctaaaaatcattactcattaggtattgccctttaactatatattgaaattcaacactttnttggtgcttacggtgcacttgttgtgcttattaaacagaagaattaagaaagtatttctttttctaggctcatacttgctaaaaaaatcaagaaattaaaaaatatttaataagaagtatacatatttaataaattaatttaatttaaaacataaaattagttgttttttattttctatttgaattattgacaagtaaactaacacgtagtagacgatagtcaatgctgtgaggaagaagacgtgtgtggacaacctt

SEQ ID NO: 2906 - DNA, 452 bp, Glycine max
  unsure at all n locations
agctntcgcaaggcggngatgttcatgagcagatcagttcgttgccgtgtagtcatgatctacataatgtcagatcatattactttgtatgtatgacaaaaatgaaaccaagatttttggacctctcatttatagttatacaaggttgcatacctccatgcttgttccatccttagctatctgttgtgatggagcaaattcaacaatataatcagttacagatagaagccactcaatttcttttctccacctggcctttctttctgaggacattggctccagctttgattgttctccgaaaacagatgctgcattgaatcaggaaacaaattattgaatggaaatttcattgagacttgagagatcacatctcagttagtcacagttataatatgcatgtgctttgaattgaattgagatgactacactatctattaattntatagaaatca

SEQ ID NO: 2907 - DNA, 464 bp, Glycine max
  unsure at all n locations
agcttcttagtttcagatgatgctgatgagtttgtagctacctcatgtactcctctaatgactatagcatcatttctggcgctaaactgctgggagttggaaaccatcttctcaattaaatttctggctttagcaagagtcatgtctccaagggctccaccactggcagcatctatcatacttctctccatattactgagtccttcataaaaatattggagaagaagctgctccgaaatctgatggtgagggcaactggcacataattttataaatctctcccagtattcatataggctctctccactgagttgtctaatacctgagatatccttcctgatggtcgtggtcctggaagcaggaaattntttttctaagaatactcccttaaggtcatcccaactgatgatggaccttggagcaaggtaatacaaccagtcttttgccactccctctaaagaatg

SEQ ID NO: 2908 - DNA, 468 bp, Glycine max
  unsure at all n locations
tatgctgcanacatctacaacagacctcctcaacctcagcagcanaatcagccacaacagaataattatgacctctccagcaactagtacaatcccgggtggaggaatcatcccaaccttagatggtcgaatccttcataacagcagcaacaacaacaacaaccttattttcagaatgctgctgacccaagcagaccatacgttcctccaccaatccagcaacaacaacagcaacagcccagaaacaacaaacagttgaggctcctccgcgaccttcccttgaagaacttgtgaggcaaatgactatgcaaaacatgcagtttcaacaagagaccaaagctntcattcagagcttaactaattagatgagacaattggctacataattaaatcaacaacagtcctagaattctgatagattaccttctcaatctgtccagaatcccacaaatgtgagtgtcattacat

SEQ ID NO: 2909 - DNA, 486 bp, Glycine max
  unsure at all n locations
cgtattntatttattntaatcccaggaacatactccattgtcagaatctgcattggaaaaatagttaaattgtagataaatatgaaagatatcagaagtaacaatgggaaagatgcataactgctatattattatctatatgaaaactgaaggctaaacctgtggtgtggtataatcccagatgattgtagggactttcacataatccaagttttcaaagttacttgcaaatagttctgcattagcagcttccttggtgtaatcaatctcctgaaaattgcaatacatgttacattaacaggattagataaagttgaggatgtgaagaaaacacatganaacatcattctgaaacatgaacaagatccacaaattaacccctccaaacctgcaaatttgcttaagagntcctttatacattggctaacctataatacttgaaaagcaataatgttgttcaacgcttagacaacgactgatgacata

SEQ ID NO: 2910 - DNA, 386 bp, Glycine max
  unsure at all n locations
tccttaagaagattcctaaagaagctagagcttagctacacatacctctctaatagctaagctcacctccttaagatgagaagctagagcttagctacacaccccgtataatagctaagctcactcccatgacaaaaaacatgaaaataacaaaaaaagtccttattacaaagacaactcanaatgccccgaaatacaaggctaaaaccctatactactagaatggccaaaatacaaggcccaaatgaaggaaaaacctattctaatatttacaaagatatgcgggctcatacttagcccatgggctcgaaatctaccctaaggctcatgagaaccctagggccttttcttggatctctagcccaatctacttggagacttctagc

SEQ ID NO: 2911 - DNA, 390 bp, Glycine max
  unsure at all n locations
tgagaaaataacttttactatcaaagttgcttagtctatcantttggtagtatttcacgctgacatatactaactttcttcccaccctaacaacactatcttgttcacatcaatgatatcatcacctgggtctaatctgagaaagcctattcttccatattgcgtgaagaatcatatgaaacaagtcatacttaacaggaactttgtgccacangaagtgctgctgaaccttctttactcccaaatgcagtgccaggtacttctcttctgggatngagagaagtatgtctctgagacttgggacatccctttcacgaacaaacagggaaaatgcctnccacttcaatacctcanataaaggaggcacantaatatctgatatgataactg

SEQ ID NO: 2912 - DNA, 487 bp, Glycine max
  unsure at all n locations
taagataccacctaaggcaaagattttacctggagactcatcaaagactgcttaccaacgaagctgaacctaagagggagacaagtggagataactgacccaatgtgtccgctttgtaataattccgaggaggatgcagcacacctcttcttcagctgcagcaaggtcctccccttgtggtgggagtcactttcatgggttaagtcagtgagtgctttccccaaagaacccaaataccattttatgcagcatactatatcgaacgctacacgatcaaaggatatgagatggagctgctggtggatagccctcacaaggaccatatggcaacacagaaacaagctgttatttgataatcaaactnttaacgcaaccaagctgatggatgaagcacttcttcttttatggtcttggcttacagcaatggaaaaagaatttgatacacatttcaatcagtggtcctctaatctggcagatgcctttatgt

SEQ ID NO: 2913 - DNA, 364 bp, Glycine max
acctttgaagccactggttctacacccctgtgcgagacgaggtttccaaggtactccacctgagactgagcaaagaagcacttacacaacttcaaaacaaattgattttcgagcaatacctgaaatgtggtctctaaatgacgtagatgttcctcgattgacccactataaatgagaatgtcatcgaagaaaatgatgatgaatcgttggaggtaaggtctgaagagcatgttcatggtggcctggaatgatgatgatgcattacacaacccaaatgacattactttgaacttataatggccatggtgtgttcaaaagtctgttttgggaacatctgctgagtggatgcggatttgatggtatc

SEQ ID NO: 2914 - DNA, 455 bp, Glycine max
  unsure at all n locations
agctagcagcctagttgtagctntcacgctnntttctctaatcagtcaaatgctacacaattcatatactaaaagctaccaaatactcctacgtggcattgctagaaatcgatagccgtcaaccttctacgtgagatgtgcttaccttaccacattaaagctagtactttacagtttctaccatttgttgtctgactcttctctatatcctttatatttacttttaatatgggtaatttagtaattctagttaagataacaaatgatgataaagaaaaaaattaattaataaataattcagaatgggaataaatttacaaaacataaaatatgatgagacaaatattttttaaagcataatttgtctttggaaacttcaatgaatctcanattaattggaatgtaattatatttcgatagtagctgttagaaactctaatttatataatcgaaat

SEQ ID NO: 2915 - DNA, 439 bp, Glycine max
  unsure at all n locations
tatgctgcanacatttataatagacctcctcagcaacaaaaccaacaacaacagaataattatgacctttcaagcaatagatacaatccaggttggaggagtcatccaaatctgagatggacaagtcctccaacacaacaacaacaggctgtccctccttttcagaatgttgctggtctaagcaagccatatgttcctcctccaatacagcagcagtcaccacaaagacaacaagcgactganggcccctctcaaccttccttagaagagttagtgaggcaaatgaccatccagaatatgcaatttcagcaagagacaagagctttcattcatagtctgacaaatcaaatggggcagatggctactcagatgaatcaagctcagtcccaaaattctgacaaatggccttcacaaactgtgcataatccgaaaaatgtaa

SEQ ID NO: 2916 - DNA, 472 bp, Glycine max
  unsure at all n locations
tagcttgtcgaaaatactaaaactgtttaaggtccaacgcctttaatggtcctctntgcttttatcggntaacatggaccgttcaaaagcataaaatcaacatgtaactctaccacttttgcaagaactacgtaggtctgatttcctcatcgcaattgaggatacgtaggagcaaaagccccgcttttgtcgaccacccctagagatcgttaatggtccagtgccttaacgtttctcttctttcacaaccaagagatcgttaatggtctaacgccttaacgtttctctcctttcaaaaaccaaaagatcgttaatggtccaaaggccttaacgtttctctcctttccaaaaatcaaagatcgtttaatggtccaacgccttatacaactntagttcggtcaaaatatatcttacaaaanaggataaaaataacttaaccaacgtttagttctcaaagaactacgtaagtctg

SEQ ID NO: 2917 - DNA, 474 bp, Glycine max
  unsure at all n locations
ntntgactcctgattctntggaacttgcttaactctggattctntagcatcatcaaaataatcttggaagacattgcttccacaatagaaagttggactagctcatctaggtccctatatggaaggagttcaaccttgtccctcacttccatattaagcccactaagaaacctagctatgcttgttctttccccctccctaagtcctgctcttaaaaggagtagttccatttgttgtctatattcttcaacacttatactcccttgtctaagcctttggaacttgtccataagctccctttcatagtaggagggaatgtgcctcttcctaagggcactcttaagatcattccaatactctactggaggatccncatgaatccttcgttccctaacaagggaagtccaccaatagagggcatacccttgaaagctaagggtagctaataggaactttatctcttcactaatatga

SEQ ID NO: 2918 - DNA, 382 bp, Glycine max
tcacatgtttgtcatcatcaaaaatggggagaatgtgaatgtatgtatacatgatgttgatgatgtcaaaagaagaatcaaacaaggctcattctgcttcaagattaatacaagattgtttcaacaaacaaagctttgattcaagatttcttcaagatcaagccttgcctcacaatgaaaggcttcaggtcattcaaggcacatgtaatcgattaccaatacatgtaatcgattaccaatggttggaaagtgtgtaatcgattacacatcatatgtaatcgattaccagagagggatctcaaggaatatcgccaacagtcacatcttatcattcgaatactgaatgggcatcaaaggcctatatatatgtgtgacttgggac

SEQ ID NO: 2919 - DNA, 380 bp, Glycine max
agcttgtgccagaatccgcaatctacgccaagttgctgggactcgagactcaaatagactctgctttggctaggaagaaaatcgatgtgcaggagaatgttatgaaccctcgctgtgttaggaaaacgcttagagtttatgtttacaacactttttcgaatcacgtgaaagtggagcctgtgaagaatggtgtggaggagccttcttgggcgcttatgataaccggaagggtgttggaagatggtaaggattctgtggcggaagggatttcgacgaaggaatatccaaaattctcggctggtttcaagaagattaccatatacttggatcagggcttgtaccaggataaccatgttgttgtgtgggatagtgcccgttct

SEQ ID NO: 2920 - DNA, 404 bp, Glycine max
  unsure at all n locations
ctgagacaattcanacgacaacaactntntactcggatatctgattgattcccgttatataacgagacgctcgaaattgaatgtttaagctctgatccaattcaaatgacaataaattttttctcagatgtctgattgagtccaataatataacgagacgctcgaaattgaatgttgaagctctaagccaattcaaacgacaataactntttactacgatgtctgattgagtcccgtaacatatcgagacgctcgaaattgaatgttgaagctctgagacaattgaaacgacaacaactctttactcggatctctgatngagtcccgtcacatatcaagacgctcgaaattgaatgtggaatctctgagccaatttacacgacaatacacttttacttcgatgt

SEQ ID NO: 2921 - DNA, 413 bp, Glycine max
  unsure at all n locations
agcttcaacattcaatgtcaagcgtctcgatatattacgggactcaatcagacatccgagtaanaaggtattgtcgtttgaattggctcacagcttcaacattcaattccgagggtctcgatatattacgggactcaatccgacatccgagaaaaaaattattgtcgtttgaattggctcagaggttcaacattcaattttgagcgtctcgatatgttacgggactcaatcagacatccgagtaaaaagctattgtcgtttgaatttgctcacagattcaacattcaatttcgaggcgctcgatatattacgggactcaatcagacatccgagtaaaaagttattgtcgtttgaattggctcagaggttcaacattcaatctcgagcgtctcgttatattacgggactcaatc

SEQ ID NO: 2922 - DNA, 324 bp, Glycine max
  unsure at all n locations
tcanattatcatccanaagtatgttgctggatttaatatctcgatgcacgatatgtggttcacactccttgtgcaaataagctaatccatgagctgcaccctgngcaatcttgagtcttacatcccattttagagctgaatttccatcctcactctcatgcagccaatagtcaaggcttccattctccaagtaggagtaaattaacaatctgtcattgaaatgctgacaataacctttaagtgaaacaaggttcttatgttgagctcttgagagtgcctccacttcagcttggaattcacgttccacctgaccacagtaccctg

SEQ ID NO: 2923 - DNA, 362 bp, Glycine max
  unsure at all n locations
tacacccgcgctgtttgtattaatgatcatcgcttgtcttccttattatatattnngatatcatcattcattttggtgtctttcctctgtgggcatggcgattctgtcctaatttcttgtagaatgcatatagattcataattctacttgaggaaagttatttattagataatttaaatgtctttaatctaatattgattgctcgaatgttctcttataaagaagttaaatttttataatgcttaacacttaaaaatatagaatgttaattcccttctaaaaagtgagaaattgaaattttcttcttgataaaagagcctgataaaatatctgcgtatcttctttataacctccgctctctc

SEQ ID NO: 2924 - DNA, 342 bp, Glycine max
  unsure at all n locations
acctgtgccactctttacatattatggaattcgactttntgaataaatatgcattgtcttaaacgtttcataatttgttgatatagattattatgctaactcatttaaaagatattaaaaaattatataaactaacacatcaattattgaatttagtttatataacgattaggatgataataataatggtcggaaccaacaaaaagataaaataactattaataagaaataaaaatgaatatattttactgtttgggtattgtgtatctagaatgagcatgatccaataataaaaaaaaaaaaagtgagcatgacttcgatccgatgaacttgatttgtctt

SEQ ID NO: 2925 - DNA, 381 bp, Glycine max
  unsure at all n locations
ngcttcttgcaattccaagacactagagagcttcttaataggtggcatgtcgcacttgtactnttttttatctaatttgcatcctgcaaaatcagaatctgaaaaacctgttatgcttaaggagatacctttgggatacaacaaacctacattggttgtgcccttaagatacttaatgatccttttaacaacaactaagtgagattccttaggattggactggtatcttgcacataagtaaacgcttagcatgatatccagtctacttgtagttaagtagagaagtgatccaatcatacctctatatcttgattcatccactgatttacctttctcatctaaatcaaggtaggttgatgtagccattggagtatatgcttc

SEQ ID NO: 2926 - DNA, 354 bp, Glycine max
gagcttatatatatcgaggcgctcgatattgaacaatggaagctcttgagatattcaaatggtcataactattaactcggatgttcaattcatgcgcatcacatatagagacgcttaataatgaacaacggatgctctccagaagttaaaacgcgattaagtattcacactgacgtccgattcaggcttataatataacgcggcgctcgaaattgaacagcggaagctcttgagaaattctaaagtcataacgttaactcggatgtccgatatatgcgcatacatatagagacgctaagacacgaacaactgatgctctcaagatattaaaatggccacaagtgctgacactga

SEQ ID NO: 2927 - DNA, 388 bp, Glycine max
  unsure at all n locations
ttcatcattaatatacacgtcattcaatattctacactcatttatccaacataattgctatattttaatcaattactgtcaaacacactttttgacagcaacactaaagtgccatggataagacttgaggaagaagagataatgaaggagaggagagaaaagcacggaatttgtgctctaagagagctctgaaatctgaagtttaatttttaaatgatcaaagttgaaaaaatgcacacacatggcttctatgtatagcctaagtgtcacacaaaattggagggaaacttgaatctctattcacaattttcttgaatttgaaatcgaatttgtggagccaaattgtggaggcanaatttcactaattatgattagtgaatctaactat

SEQ ID NO: 2928 - DNA, 448 bp, Glycine max
  unsure at all n locations
agctaaaggaagtgaaagaattagtatgggcagatatgtctccgcattgattggtaaatctgttccccaaatccctgaaaaatgtaaagatccaggtacattcgacataccttgtattatagggaacaataagtttgataatgccatgctagatttaggagcttctgttagtgttatgcctttgtctattnttaattntctatctctaggtccttngcagtcaactaatgtggtaattcatttagctaatagaagagttgcctaccctgctggtttcatagaggatgtcttagttagagttggtgaactgattttccttgttgnattnntatatttgaatatggaggagggattntctanaggatcagttcccatcattctangcagaccttttatganaactgctataactaagatagatgtatatgcaggcacactatctatggag

SEQ ID NO: 2929 - DNA, 493 bp, Glycine max
  unsure at all n locations
gatccaagaaggcgtatattgcttgggatgactatgactcatccgatcgttcggagaaggagatcaatcttctatccaaagactatgaaagcgatgaanatatctctcaagaagattaagcaaaaagcaaaagtctgacttctaccttcaaagatctagtcacttgaattatgaaaaaggtaacatcaaaaccattctcttttaaatntagctgattggaatttntctttcaattaacttggttatatgatgactaacaaaatcttaattggttggcttggatgattgctatgtgcttatatgaatgattgagttattntctttcttaaagcatgaagtttaatattaaaacaaaccagtgatagtacatatgattcttgcatgaattttggataatatgtgatcattcatanaagttnttttaaaaaaatctattatggtatatatatttggattatataagagttttaaatataaatactttgactctttc

SEQ ID NO: 2930 - DNA, 464 bp, Glycine max
  unsure at all n locations
ctacatctntatctgggttacccaaatcattatagacatcataattatagatcctttcatgttccttgcgctctccggttccatttcctcttaaaatctccaactcttcttccctgtacttaactaatggacctggtgttgcacttggaagatatgtctacaatatatagatttcatgaattaatnttctcattcacaaaatgaaaataattaaaaaaatgttgtgacaatatacaattggaaataaatgagctaagtaaatcttgtaaacattaggaaaatagtacttagattcaaaactactagacttaccttattggcaaagaaaatgcgatcctttntgtcgtagtctttaaagttgtaaacccatgagttacaaacaaagtgaatggttccttgatttggaatgtcctcaagagtgacactgacaaggaagaactcatcactacgtatagttctgatgt

SEQ ID NO: 2931 - DNA, 413 bp, Glycine max
tccattgttcaatttcgagcgtctcgatatatcatgcgcctgaagtctacctcttagtgaaaaataatgaccatttgaatttctcgagagctttcactgttcaatttcgagcgtctcgatatattatgcgcctgaatcggacctccgagtgaaaagtaatgaccatttgaattgctccatagctttcattgttcaatgtcgagcatcttgatatattatgcgcctgaatcggacctccgagtggaaagttatgaccatttgaatttctcgagagctttcgttgctcaatttcgagcgtctcgatatattatgcgcgtgaatcggacctccgagtgaaaagtaatgaccatttgaattgctcaagagcttccgatgttcaatttcgagcgtctcgatatattatgcgcctgatc

SEQ ID NO: 2932 - DNA, 312 bp, Glycine max
  unsure at all n locations
agccttctctagatggattatgccagagacatatgtgtagatctgaagtccagatactctcgaggagatntattgagaatctttgatctgcaattcgtcaaggtgattgctcaattactgattatttcacacacctttgaagatttcgggagttgagtctaagacttcacagagaaaaagactgtgtgatcaagagaatcacgagtgaccatggcagagagtttgaaaacagcaagtttactgaatactgcacatctgaaggcatcactcatgagttctctgcagccattacaccacagcanaatggcatag

SEQ ID NO: 2933 - DNA, 369 bp, Glycine max
  unsure at all n locations
ntagagctngtttgtgggatgagggaagttggtattgtacaaagattttcttcaatcagttatgctctgcgggcttgtgggaacctttttatgcttaaagaaggaagatcatttcattcttacatgattaaaaatcctttggaagatgactgtagattgggcgtagaaaatgctcttcttgaaatgtatgttagatgtagagctattgatgatgcaaaattaattntagaaaggatgccgatacaaaatgagttttcctggactactatcatatctggatatggtgaatcanggcacttcgtagaagcactggggatcttccgtgatatgcttcgatattcaaaacccagtcagttcacattaattagt

SEQ ID NO: 2934 - DNA, 476 bp, Glycine max
  unsure at all n locations
tcatgcttaactatgtatggcaaaaattcattactgttgttcaagacatacttgtgagcttgtaacaaatcttctacacttggagtgatcacatgcagtcctcttgaacccttaccacccactctgtcatcatgccgagactcangaaggccaacaggtttagccttctctaagtattatgaacaaaattcaatggctttttctgcaatgtacctctcaacaatagatgcttctggacgatatagattctttgtatacccttttaagatcttcatgtatcgctcaaccgggtacatccaccgtagataaacaggaccacaacatttgatttctctgaccagatgcacaatcaagtgaatcatgatgccaaagaaagtagggggaaaatacatctccaactggcacagtataattgcggcctcantttccaactcatcatacatgactggatcaatgactttgctacatatagcatg

SEQ ID NO: 2935 - DNA, 383 bp, Glycine max
  unsure at all n locations
tggcctcaacagactacttatttccagaaggaaattcaatcaatcgacctccaatatgtaatggaaagggttaccactactggaaaacccgtatgcaaatatctattgaggcaattgacttaaacatatgggaatccataaaaatagggccttatatacccaccacagttgaaagaaccacacttgatgaaagcacaactagtggaagcacaacaatataaaaacctagagatagatggtctaaaaaggatggaagacgagtacgatataatttaaaagccaaatacataattacatctaccctaggaatggatgaatatttcanggtttcaaattgtatgagtgctaaagaaatgtgggacactctacaagtcacacatgat

SEQ ID NO: 2936 - DNA, 332 bp, Glycine max
  unsure at all n locations
cacctgagctgcagcttccttgttaattctgagcgtctcaatatattatgcgctctgaatcagacatctgagttgaatgttatgtccatttgaatttctcgagagctctcgatgatcaatttccagcgtctcgatatattatgcgccagaatcggacctacaagggaaacgttatgaccatttgaattgctcaagagctttcattgttcaatatccagcgtcttgatataatatgcgcctgaattggactctcggtgaaaagctatgaccatttgaatggtcaagagcttncattgtcaattttgagacgttcgatatatcatgcgcctgat

SEQ ID NO: 2937 - DNA, 415 bp, Glycine max
  unsure at all n locations
tcatatgattcangaagctcacanagcacctganagaagtttctttagactaaaattgcaatctaaattgtacatgtcaacagtttttcaccccaaaatttagtgtagcatgcctttcaattactgcaaataattacttcaccaattcaagttcgtcctacctttccaaatcaataaatactaaaagtgttattgttagttataggcaaatagaaattgatacatactgagtccattaactttgattaataccaaaaggcaaaacataacatgtctttaatagtaataaaagggttaccttcacatcgttgagaaagataaatttacatccattcagatgggctcagactgctatatccatgtcttctacaattatcctctcaagccaatcaccagattcttcaagtgcttttat

SEQ ID NO: 2938 - DNA, 413 bp, Glycine max
  unsure at all n locations
ctagccttaggttgtaccatgttgctcatgttgttcctcctatctctaatagtgaatccactatataggaagagcacatggctttggaagaggcaacaaatgaagggatttgactgaagggtccgattagaaatctttgattttcacaagaaaaggttgtcattttctacaacagtctaagtgcaatctatttagccaaggatcaattccatcatgaaaggactaaacacattaacatcaaatacaacttattcgtactaagaataaggtcaaagtccagaaagttaatacgagggagaatacaactgatatgttcatgaagcatgttccaagaagtaagtttatgcactgcctggatgtacttaatgtagatcgctagagatgaacaaagttacttgtaattcanaaatgta

SEQ ID NO: 2939 - DNA, 457 bp, Glycine max
  unsure at all n locations
gctaagcttcaagagaaatggcctcagcaaattccttatttccatattgaaattctatcaatagacctccaatctttaatggagagggttaccactactggaaaacccgaatgcaaattnttattgaagcaatagacttaagtatttgggaagccacataaatagggccatatatacctaccatagtagaaagaattacaatagatggtagcacatcaagtgaaagcataacaatagaaaaatctagacatagatggtctgaagaggatagaagatgagttcaatacaatctaaaagccaaaaacataataacatctgccctgggaatggatgaatatttcagggtttcaaattgtaagagtgctaaggaaatgtgggacactctacaattaacacatgaagggaactacagatgtaaaagatctanggataacacactaacccatgagtatgaact

SEQ ID NO: 2940 - DNA, 323 bp, Glycine max
tctggtctcaatttcgagcatctcgatatattacgggacttaatcttacatcctatttaaaagttattgcggtatgcatttgctacgagcgtccattttcaatttcgagcgtctcgatatattactggactcaatcggacattcaagcaaaaagttattgtcatttgaatttgataggagcttccgttttcaatttggagcgtctcattatattacgggactctgttggacattcgagtaaaaagttattgtcctttgaattggctacttgcttatgttttcaatttggagcgtctcgatatgttacgggactcattcggaca

SEQ ID NO: 2941 - DNA, 219 bp, Glycine max
  unsure at all n locations
agcttganatgaataatggaagctctcgagaaatatatatggtcattacttttcactcggattggcgattcaggtgcataacatatcgagacgctcaaaattgaaccaccgaagctcttgagaaattcaaatggtcataagttttcacatggatatccgattctgtgttataatatatcgagaccgtcgaaattggaccacgacttcggaaatccaatg

SEQ ID NO: 2942 - DNA, 500 bp, Glycine max
  unsure at all n locations
atctctaagcacctgcggctgcagctaatggatttctgaaaaaggacatcttttaatgtaagaatcgtgagttcaataatgagatttcaagaactttcaggtagaagaaaagatgaaggttataaagaatatacgcaaacattctgaaagtgttttctatccataagaaaatttcaatttttcacattttagaaggaaattaaaattccacgtttttagttctttaaaaatttaatttaaaattccaacatttaaatctttcataaaaaacatctaaataatgaattttagattaaaaaaatctaaattctctgataaattacttttttcatttaaaattttctatccaaacgcactctaatttcttngaataagtttctnttcattgtagaaaggacagccttaatttgtttgtccaccaatcttaatcaacttgataaaggagttatgatatattagtgcatgtaatattaagagataatgctcattatctgtacaag

SEQ ID NO: 2943 - DNA, 496 bp, Glycine max
  unsure at all n locations
agcttactcaagggattgtctgganactggcggatagaagagatggctgcctttccttctgcagtcttagactcggngaaatacttcttcataaaattttctaccaccccgtcccaagtcttaagactgttgtctttaaatgaatgtaaccatctttttgcttctccggacagtgaaaatgagaacaaactcagccacacaacatcttctggcacacctgcaagcttgattgtattgcaaatttcaatgtaagtcgctaggtgtgcgtacggatcttcattcggtaggccatgaaataaattgccttgtattaaatgaattanagaatggngataagtaatattatgtgcttgaacctctggccgcgctatactagtgaaaaattgtggcacaacagaactagagtagtcttcaaaggtcactcttctaggttgatcttcagccattatgtnggcctcaagtgccctggtgtagattcccttatctatggaaagat

SEQ ID NO: 2944 - DNA, 362 bp, Glycine max
  unsure at all n locations
tgtaatcgattacacacatactgtaatcgattaccagaggagaatttcatgaaatattctcaacagtcacatcttttcgtttggttcttgaatgaccatcaaaggcctatatatatgtgacttgagacancgaattgttaagagtttttcagaacaacaagtgtttattctctcaaaaagcaaaatcgttntatcctcttaagaattccttggccaattcaattgcaattcattaaggaatcatttgagtgctcagatggtaaaatctatctctttcaagagagattcattcttcttctctttctgattcactaagggattaagagaccgagggtctcttgttgtaaaagaattctaaacac

SEQ ID NO: 2945 - DNA, 512 bp, Glycine max
  unsure at all n locations
agcttgcatctattcttaattatataaaaagactcttataatggatcataagttgaatacttactatttccatgcatgtggaagcttctntgtcttgttatagtagcaggcaaggcaatgatacaaatcttctagaatttcatatttttattattaattaagacttgatcaatcttacattaattgaatttaccgtggtgatcatgtgcgtgtatttggtagatctagctagtgaatgtttataccaaactgaatgatcaaagtgtttaagtaatatccaatagattagttttatctttaatatagtcatccctagactntattctatcatttgtcttaaattgatatattaatgatcagtggaatatcgattaacacanaagcatctatttattgacccagatcaaatgctttaggtgactntgggaattgctaattaacctanggttggaatttcataggaataaggttgnngaaaaatcggtactatggagtcataatcctcgatctct

SEQ ID NO: 2946 - DNA, 405 bp, Glycine max
  unsure at all n locations
tcttagtttcagatgatgcagatgggtttgtagctacctcatgctctcctctaatgactatggcatcatttctggcactaaactgctgggagttggaggccatcttctcaattaaatttctggcttcagcaggagtcatgtctccaagggctccaccactggcagcatctatcatacttctctccatattactgagtccttcataaaaatattggagaagaagctgttctgaaatctgatggtgggggcaactggcacatagtttcttaaatctctcccagtactcatacaggctctctccactgagttgtctaatacctgagatatccttcctgatggctgtggtcctggatgcagggaaaatnttttctaagaatactctcttaaggtcatcccagctcgtga

SEQ ID NO: 2947 - DNA, 487 bp, Glycine max
  unsure at all n locations
actaagcttacacatttagcttcagcaatcaatcattntctactgcactntatctaaatttcccacacttcacaatccacatacaccattcatgacgaaagtccaatgtcaaccaactgagctgaactaaaccccttcattaaaaaattgaaagaaaatttatatcttgtctcaaaaattaaggaaatgtttggtttggttgttttctatagaaaatgataatgaaatgtgtttggttggatttttaaaaacataggaaataaccagaaaataaaaacaataaaatattatttacagtgttttcagttgaaaaaacagaaatctcattctggataaaatgaaattgtgatgacaatcaatataatttcaagcaaatctaaaaatataaaaagacaagaagtcaatatatcatacacnttttaatattttatttcataaanacagaaaacgagaagtcaaatcanacatattttcagaattataatct

SEQ ID NO: 2948 - DNA, 485 bp, Glycine max
  unsure at all n locations
caatgccaaanatcattaatatatatgatatatattntatagaattgtgagatntatcaattttcaatacaaagtaatgtaatatacattttacataaatgacatctttagctctccacttaatgtttttccaaaagcgtagttcatttattattataggtaattctttataaacactgtctacactagttaaatataaatatctatttgtagaagaaaaaaaatataaatctcaaagagagagacaagaagataagaaagaatataaaataagatgattgatgtgtgatggaaaaaaataatgaatttttttatgaataatataattcaataacatatacatgtgtttcccctgtgaaaatagatatattcccgtaaatccttaggtgttagcatgatgtatttnntatgaacactaattgtttttgngatgattacagatatgncaaactgatctggaatttaagcttaacatgatgagtgat

SEQ ID NO: 2949 - DNA, 348 bp, Glycine max
  unsure at all n locations
acttcaatctaagcttaacattcaatgtcgagggtctcgatatattacgggactcaatctgacatcctttanaaaagttatngncatttgtatttgctgagagcatcaacattcaatttcgagcgtgtcgatatattacgggactcaatcggacatccgagtaaaaagttattgtcgtttgaatatgctcagagcattgggattcaattttgagcgtctcaatatattacaggagtcaatcagacatccgagtaaaaagttattgtcgtttgaatttgctcagagcttccggattcaatctcaagcgtgtcgatatattacaggactcaatcagacatccgagttaaa

SEQ ID NO: 2950 - DNA, 418 bp, Glycine max
  unsure at all n locations
agctngagatatcctggctttgccacaatccatatgagttgatcacttcttgatgtagctccatgtggagcttgtaggccttggatcttcttcatcaatggattcctttgattcttgaatatcaatgttagcggaatggagaaggaagaaagatgattggagatgccacatcaaggataagatgagtcagtcaagaagaagctcaccaccatatgaagccatagattagagcttggaggtaggagaagatgagtggagggagagaaggagaagaagcacgaaattttgtgcctcanatgaggtctgaactttgaagtgtaattctcaaatgatcaaagttgaaaaaatgcacacacatggcctctatttatagcctaactatcacacaaaattggaggggaaattgaatttctattca

SEQ ID NO: 2951 - DNA, 484 bp, Glycine max
  unsure at all n locations
gctcgagatgaggaagtgtcaaagccttctctagatggattatgccagagacatatttgtagatctgaagtccagatactctcgaggagatttattgagaatctttgatctgcaattcgtcaaggtgattgctcaattactgattatttcacaaagttaagaataatttgggatgaacttgaaaattatagacctaatgctacttccacatgtgtaaataaatgtacatgtgatgctctcctatgtgttatagaaagaaaaacacaagatcatattatgcaatntttgagaggattaaatgatcaattcattaatgttaggtctcacaatttaatgatggatccactgcgtataatttacacaaacttttcctacatcgtgcaacaagaaagacatnatatggggatgaatcatattggaacattagaatcctaggatatcatgnataatgcagcaagttctacatctaatcatagatgttctt

SEQ ID NO: 2952 - DNA, 404 bp, Glycine max
  unsure at all n locations
tctgttgtcaatttcgagcgtctcgatattntacggtgttctatctgatatccaagttaaaagttattgtcgtgtgattgttctaagagcttcccttttcaattacgagcgtctcgatatattacgggacacaatcggacacccgagttaaaagctattgtcgtttgaatttgctcagagcttctattttcaattacgagcgtctcgatatattacgggactcaatcggacatccgagtaaaaagttattgtcgtttgaatttgctcagagcttctgttttcaatttcgagcgtctcgatatactacgggacacaatcggacatccgagctaaaagttattggccgttgaatttgctcagagcttctattttcaattacgagcgtttcgattactacgggactc

SEQ ID NO: 2953 - DNA, 221 bp, Glycine max
tctctaagtgacctgaggctgcagcttaacatagaccacttcaggttatgaacttcttacatggacttgatggggcctatgcaagttgaaagccgtggaggaaagaggtatgcctatggtggtgtggatgatttcttcagatttacctgggtcaactttatcagagagaaatcagaaacctttgaagtattcaaagagttgagtctaagacttcaaagaga

SEQ ID NO: 2954 - DNA, 246 bp, Glycine max
ctcggatgtccgattcaggcgcataatatatctttacacttgtatttgaataacagaagctctcgagaaattcgaatggtcataacttttcacacggatgtccgattcgggcgcataatatgtcgagacgctcgcagattaacaacggaagctctcgagaaattccaatggtcctaacttttcactcggaggaccgattcaggcgcataatatattgagacgctcgaaattgaacaacggaagctc

SEQ ID NO: 2955 - DNA, 197 bp, Glycine max
gcttctcgatacattatgcgcctaaattggacattctatgttaaggttatgacaatctgaattgctctagagattccattgttcaatatcgagcgtctcgatatattatgaatgtgaatcggacctccgcgttaaaagctatgaccatttgaatttctcgagagctgtcgatgttcaatgtacagcgtttctatata

SEQ ID NO: 2956 - DNA, 416 bp, Glycine max
  unsure at all n locations
tcaattntcaattcggagcgtctcgatatattacaagactcaattggacatcctttgataatgttatagccgntggaatttgctacgagcttccgntttcaatcttgagcatctagatatattttgggacacaaccggacatccgagtattaagacattgtcgtttgaatttgctcagagcttcgattctaaattttgagcgtctcgatatattacgggactctatcggacatccgagataaagttattgtcgtttgaattttctgcaagcttccgttttcaatttggagcgtctcgatatatnacaggactcaaccggacatctgtgtatatagtaattgtcgtctcaatttgctcagagcttctagtctcaagtttgagcgtctcgatatattaccagacttatatatacatcc

SEQ ID NO: 2957 - DNA, 279 bp, Glycine max
  unsure at all n locations
agcttctagtctncaatttgagcgtctcgatatattacgggactcaaccggacatccgngtataaagttattgtcatttcaatttgctcagagcttctagtctcaattttgagcgtctcgatatattacccgattcaatcggacatccgtgtataaagttattgtcaattcaattccattagaggttcaggacctaattttgagcggctagatatacctaccgacttaacctgacttacgtgtatcatagttggcgtattcgaatttgctccgagcttc

SEQ ID NO: 2958 - DNA, 274 bp, Glycine max
  unsure at all n locations
agcttgaacccatgtgcaatgtcggtcatcctantccccaagaaagatggcacgtggaggatgtacatagattgtagacccatcaacaacatcattatgaggtatagacatcctatccctagactaatgatatgttggatgaacttcatggttcttgtgtcttctccaacatagatttgaaaagtgattaccatcaaattacaatgagagaaggtgatgaatggaaatttgtttctaaactaaagttggacttatgaatggttggtcatgcctt

SEQ ID NO: 2959 - DNA, 491 bp, Glycine max
  unsure at all n locations
gaccatagaaactaagcttcaaaatatggcctcatcaatatactagtntcccgaaggatattctataaatagacctcccatctttaatggagtgagttaccactactggaaaacccgcatgcaaatctttatagaggcaatagatctaaatatctgggaagccatagaacaaggaccttatgttgcctctataatagccggaagtgcaacaatagaaaaacctaaagcaaattggactgaagaagaaagaagattagtacaatataatttataggccaaaaatattatgacatctgccttatgtatagatgaatactttatggtttcaaattgtaaaagtgctaaagatatgtgggatacactacaagtaacacatgaaggcacaacagatgtgtaaagatctacgatatacactctaacgcgtgagtatgaactctctatgatgaatgtanatgaaagtatacaagacatgcataagaagttcacacaca

SEQ ID NO: 2960 - DNA, 421 bp, Glycine max
  unsure at all n locations
ggatcttaagtcacctgcggctgcagcttcatagaaagttcgctcctaatttctctacaattgcatcacctctcaatgagctagtaaagaagaatgtggcatttacctgtggtgaaaaacaagagcaagcctttgctgtgctcaaagaaaagcttactaaggcacctgttctagctcttcctgacttttctaaaacttttgagcttgaatgtgatgcctctggagtgggagatggagctgttttgttacaacgtgggcacccaattgcttattttagtgaaaaaattcatggtgccacccttaactaccccacctatgataaagagatgtatgccttaataagagcactccgaactttggaacattaccttgtttccaaggaatngtcattcatagtgatcatcaatcacttaagttcatt

SEQ ID NO: 2961 - DNA, 446 bp, Glycine max
  unsure at all n locations
ctgctctattcaagctctcccaanatctagaggtaatcctatgatctctatcagacactatgctagatgacacaccatgtaacctaacaatctgactaatatacagggaggtcaacttttccaaagatggataggcaaatggtacttattcttaaccgtcaccttattcaactagcggtagtctacacacaacctcatggtcccatctttcttcttcactaacaacactggtgctccccatggagacacactgggtctcacaaactgcttctctaactggttcttaagctcggctaactctataagatacatcctataaggggctatggatacaggtccaaccncaggtactaagtctttggaaaactctatctctctctcgggtggcagaccagatatatcctcaggaaactctntgacaacagggagagcacccatggaaacct

SEQ ID NO: 2962 - DNA, 352 bp, Glycine max
  unsure at all n locations
tgtctattttgggcattccggcctccaccattctggtctttcttgggtcgtgaacaatctctcttagggtgtcccttttttncacaattaaaacatgttatgcctatatcgggacaattcgaggagatgtgccctggcttaccacacttgtaacaaatgatatgagtggagaacgtattggggttgctaccggtaccacctgcaaatcccctatcaacagtcctctgattgtcatggcggntaccatattgcttaagaggaatcaaatatgggtttcctcgatgttgaagcccattctttttgttcctcattggacctgtactcttatagtaagccgccctgtctcgggagt

SEQ ID NO: 2963 - DNA, 399 bp, Glycine max
  unsure at all n locations
tgcatgatgcatngaaattcttatggtgattgtgtatgatctggataagctaatgatgaaatggcgttactattaatcttattggtagatattttatgtaccaattctgttcaaatggaaaggagatgtagtttttttgtttgtaatagttaatatgttggtttgatagacttggatgatgctacctcaagtatgaggttctttnttgttntagattagtttatatcatctggtgatttcagnttatattattaatatatttgtaggactaccaactatattaacgttagattaaaaattaagccaaattatatattaaggccttgtttagcctattatagaaggtgtgttatttattttctggtaaaaacaactatcanaggaatattaaaggtttat

SEQ ID NO: 2964 - DNA, 428 bp, Glycine max
agcttctcaaagatgtacttaaccaggtccatcttggatatcaaccaggtggtatggctcagcatgtattgtcttagacggtgggacgcccagactaaagcacaacacgttctttcgagcagggagtagttcatttcataggccgtgaactttttactcaagtagtagacagcgcgttctctcttcccggactcgtcatgttgccccaacatacatccaatcgactcatccaaaatcatcatatacaagatgagaggccttcctggtaccaacgacataagcacgagagggttcatgagacactgtttgatccttccaaacgcctcttgacaatcctcattccaacggacggattggttttgcgtaagaagtggaataacggctcacaattagcggtgagttgtgatatgaatctggcaatataattc

SEQ ID NO: 2965 - DNA, 431 bp, Glycine max
agcttctaaactttatacaagaatgaagctctgatatcacttgttggacaagtggcctcaattatcttaatagggggggttgaattaagatacacaaactattcccaattaaaatttaaccctttttttggattaacactgcacccttaatatgaattactgaaaagacaactcaaaatgaacttcttttatgaaaaagataaattgaaataaataatagaagtttaagggaagagagaatgcatactcagattctatactagttcggccacgttctgtgctaacgttcagtccccaagcaacccgcttgagatttccactatcttggtaaagaacttttacaaactgtgaaccacacagggaccccttctcttgtgttcagatatgcttacaacttaagagacccttggtcttctaaacagatctctttg

SEQ ID NO: 2966 - DNA, 431 bp, Glycine max
tcttagtttcagatgatgcagatgggtttgtagctacctcatgcactcctctaatgactatggcatcatttctggcgctaaactgctgtgagttggaagccatcttctcaattaatattctggcttcagcaagagtcatgtctccaaaggctccaccactggcagcatctatcatacttctctccatattactgagtccttcataaaaatattggagaagaagctactccgaaatctgatggtggaggcaactggcatatagtcttttaaatctctcccagtactcatacaggctctctccactgagttgtctaatacctgagatatccttcctgatggctgtggtcctggaagcacggacaatttctttctaagaatactctcttaaagtcatctcagcttgtgatggaccttggagcaaggtaatacag

SEQ ID NO: 2967 - DNA, 402 bp, Glycine max
agcttcttattatcaacagatgaagatgaatccgtggccacatcatagactcctctaaggacaatagcatcatttcttgcactgaattgttaggagttggaagccatcttctcattcagattcctagcctcaacaagagtcatatcaccaagagctccaccactggcagcatcaatcatgctcctctccatgttgctaagtccctcatagaaatattgcaaaaggagttgctcagaaatctggtggtgaggacagcttgcacacaatttcttgaatctttcccagtactcatacaagctctctccactaagttgcctgatgcctgaaatgtcttttctgatggcagtggtcctagatgtaggaagatattctccaagaacaccctcttaagtcatcccaact

SEQ ID NO: 2968 - DNA, 389 bp, Glycine max
  unsure at all n locations
cactgctcagtctgattggctcacaccctttcattggaatggatcatcaagattcatacacgcatttgtctaccttcttggagttgtgtagtaccatgggagcttttggcaaaaatgctaaagttgtctacctcaaagctttcccattctccttggcaggtaaagcaaagacatggctccaatcacatctaaacaaatgcctcaacgcttgggaagaggtggtagaaaacatcattgcaaagttctttcctctatccagattcatcaagatccattgctactttntcccaaagatctgatgaacctctctgtgaaacatgggagagattcaagtctttgttgcagaggtgcctataccatagtnttgatgatgttgcacaactacatat

SEQ ID NO: 2969 - DNA, 482 bp, Glycine max
  unsure at all n locations
agcttagccttggttgtaattatgttgcttatgtagctccccttatctctaacattagagacttaagaaataagtttaatggagatatatgtgtcgatagcataaaattatttagaattgtcaatcaattacaaatcagttttgtatgattttaaagataattattataaaatgataaacgtatcacatataatgagttggaattggataacgatgtaagaacgttttactattgtcaatacatgacctatttttttagatgaaatttgaataaacttcttcaaaaacacttatagaaaaagaaaataagatgatgaaatatataagtttctatataagatatttttttgtctagacaacaagtatcttcaattagagacaatcttgttcgagtaagatagaactactatgaacaacacaactcttctctcaagtatttagtgtatttgcanacggaagatttaaactcgagatctcttaat

SEQ ID NO: 2970 - DNA, 366 bp, Glycine max
  unsure at all n locations
ntgaagcaggagttagagcatatgttattaattcatgatcttcttggctctcatgaatatcaaatattccattgtgtgccaaacagcgcatgatccgctgcacaaaacaagccttatccgctgcaatctgtagagttgagaccaactcacgaagagtaatgggtttgacatggttgtgtatcatgtctggaatacctagttgcacaacccatttaagacacatagatgttaggctaccatatagctgcatgtacaaaaggttntggccctcaaagagctcaattgcttcttggttattcattgaagccattattgcaagcgatatttaatntgcttaaactcgttcgcttttttccatgactagca

SEQ ID NO: 2971 - DNA, 433 bp, Glycine max
  unsure at all n locations
agctntagatgcctttaaaggttttaaggctgaagttgagaaacaatgtggaaaacaaattaagatcgtgagatcagatagaggtggggagtactatggtagatacacagaggatggacaagcaccaggttcatttgcaaaatttcttcaagaacatgggattgttgcccaatacactatgcctggttctccggatcagaatggtgtggcagaacgaagaaatngaaccttattagacatggtgagatgcatgaggagtaatgtaaagcttcctcaattttttgtggattgatgctcttaagacggttgcgtatatattaaaccgagttccaaccaaggctgtctcaaagacacctttnagttattgaagggttggaaaccaagtttgcgatatatancgcgttggggatgcccgtctgaagtaagaatttat

SEQ ID NO: 2972 - DNA, 456 bp, Glycine max
ggatcctctaagcaccgcggctgcagcttaagacaaccttctctactgttggctacttcaacttcaacttcagacaactatttgtctaatgtagctcctgttgtcaataaaaatgttagtgtagcttcgaattctgtaatctcatctcctaacaatgctagtctttggcatgctaggttaggtcatcctaatagtcatgtcatgaagctagtattcaatcattgtaatatttcttcatctaataaattctttcagacttttgctccttatgctgtatgggaaagtctcagattgtctcatagattgctatctaacacctctacttctgtttaatctcctttggaacttgtctacacaggtttgtggagaccttctcatttgacatctatgttggttttaaatactatgtgccctttattgatgcattttctagatacacttggatatttcctatta

SEQ ID NO: 2973 - DNA, 458 bp, Glycine max
  unsure at all n locations
tctggtgggacatcttgacttgctttccaatctaacattcaccacagattctgccttcttctattntcagattgggaatgcctctaacagcacctttgtcaatgattntcttcatgcctcttaagtgcagatgtccaaatctttgatgccatattttgacttcatcttctttggagaatagacatgtggaggagtaactggtttcttgaggtgtccatatgtaacagttgtcctttgatctgctgcccttcattaagacttcactcttctcatttgtcaccaagcattctgactttgtgaagttacattgaatccttcatcacacaactgactgatgctgatcaagttcgcagtcagtcccttcaccagcagtactttgttcagactaagaagtccatcatggactatctntcccattccagtgatctntcctttagagccatctccaaatgtcacat

SEQ ID NO: 2974 - DNA, 448 bp, Glycine max
  unsure at all n locations
tccagaagcatttcattatcaagataatactattaaacaaaccccacactttccttcacaaagaaaggcgaaagaaaggaagaaaaccaaaaactttccacaagtaaaacaggcatacaacactgatcaataggataatcagataaaaacttactgaaattgtgattactccctctttgccaactttctccatagcttttgcaatcaactcaccaatttctctctctccattagcagatatcatcccaacctatcaattcaaattcaaaattcaaaaacagaaattaaagttaaaacccagaatccttattatcatctcctgcaatatacaagaagaggctctagcaaagtatgatcgacaaacctgcgctatttcttcagatgtgctaatcatcctagctcttgctttcaaatntgtgaccacagcatcgacagccatacttatacc

SEQ ID NO: 2975 - DNA, 427 bp, Glycine max
  unsure at all n locations
agctntagcacttctgtagggtttcacggctttccatcagctcagataaatctgccatatactcagtcggtattaggcctcatgagctttctcatatttagcatcttactggatttagcttgggtggcttcccttttagatacttgggtgttccctttttatcatttagattaaatgtatgccactatgctccattgattccaagattactggcctgattcacggatggagcacgaagctctatcttatgcaagtaagctagagttgatcagagcagttattcaaggaattgtgaatttttggatggagaattttcctttgcctcaatctgttctggaccgaatcaatgcttctgcccgtaatttctgtggagcaaagcggatattaggcaaaacaagcccttggttgcttgatcagtagtttgttc

SEQ ID NO: 2976 - DNA, 256 bp, Glycine max
  unsure at all n locations
tcacagcacctttgtcaatgattntcttcatgcctcttaagtgcagatgtccaaatctttgatgccatattttgacttcatcttctttggaggacagacatgtggaggagtaactggtttcttgaggtgtccataggtaacagttgtcctttgatctgctgcccttcattagaacttcactcttctcatttgtcaccaagcattctgactttgtgaagttacattgaatcttcatcacacaactgactgatgctga

SEQ ID NO: 2977 - DNA, 410 bp, Glycine max
  unsure at all n locations
tcatacttcacaaaatatatatatgtatggttaggtagaatgataccttggatatgcatgtatgtaacaaaaaaatacttcacaaaatatatatatgtatgtttaggtagaaagataccttggatatgcatgtatgtaacaaaaaaatacttcacaaaatatacatgtatgtttaggtagcaagataccttggatatgcatgtatatagcaaatatatctcacaaaatatatatatgtatgtttaggtagcaagataccttggacacgcatgtatatagcaaaatacctcacaaaaatatacatatgtttaggtagcanaatacctcatggaaaaagaaggaatgaaaaaagaaaataataagaataaaaagttgtctagctaanaaataacatgctcgtgagaatagat

SEQ ID NO: 2978 - DNA, 404 bp, Glycine max
agcttcaacattcaatatcgagcgttttgatatattacgggactgaatcagacatccgagtgaaaagttactgtagtttgaagttgctcagagctaatgcattcaagtccgagcgtctcgatatactacgagactcaatcagacatcctagtaaaaagttattgtcgtttgaattagctcaaagcttctgtattcagcttcgagcctctcgatatattacaggactccatcagacacccgagtaaaaaagttattgtcgtttgaattttctcagagcttcaacattcaatttcaagcgttccgatattttacaggactcaatcggatagccgagcaaaagatattggtgttgaattgctcagagcttcggtattcaattccgagtgtctcgatatatgacggga

SEQ ID NO: 2979 - DNA, 482 bp, Glycine max
  unsure at all n locations
taggacctatgatactcagcttaacatcagaccacgaccagggtgctggaactacttcacatggtcttgatggggcctatgcaagttgaaagccttggaggaaagaggtatgcttatgttgttgaggatgatttctccagatttacctgagtcaactttatcagagaaaaatcagacacctttgaagtattcaaggagttgagcctaagacttcaaagagaaaaagactgtgccatcaagagaatcaggagtgaccatggcagagagtttgaaaacagcaggttcactgaattctgcacttctgaaggcatcactcatgagttctctgcagccattacaccacaacaaaatggcatagttgaaaggaaaaacaggactntacaagaggctgctagggtcatgcttcatagccaaagaacttcctataatctctgggctgaagccatgaacacagcatgctacattcacaacagagtcacact

SEQ ID NO: 2980 - DNA, 445 bp, Glycine max
agctttgaattctcatagtagtttcgtttcaaacttcagaggttctaaaatctagtcgtatcatatatttctcgtcaagacaaataaattatctatgattctgaaatgtatgcagcataaggttgtgatctaggtgtccatgaatgaccacaaattaatgatctagattgcggttggactttcacgttagaaaagtcactttaaattcaaagaaaatatcagcttattatccttaggactgatttaccaatctttaggactaatttattataacagaatagaaaataagatatttacctaattttataatattatctaattatagttgcatgataaatttattaatttcgtataattagctcacaaatcgtcttacagttgttttaaattgataataagatattgtattttaccataacaatatataatcattaaactcaattaa

SEQ ID NO: 2981 - DNA, 335 bp, Glycine max
  unsure at all n locations
agcttctaaactntatacaagaatgaagctctgataccacttgttggacaagtggcctcagatatcttaagaagggggggggggtgaattaagatatcacaacttatttcgccaattacaaattctatttatctttctatttcagctataaattcccttaataatgagtttcttagatattgattccaatagaacagattgaatatgaatataaaacactaataaataacagagtttaagggaagagaaaatgaacactcagatttatactggttcggccacacccttgtgcctacgtccaggccccaagctacccgctagagaggtccactatc

SEQ ID NO: 2982 - DNA, 329 bp, Glycine max
  unsure at all n locations
tgcaagcttttgcaagctggaatcattcatcctatctctgagcgtcaatgggtgagtcccgactaagtagtcccgaacaagactcgcctcacagtgatcagaaatgatatggaggagctgattcctactctggtgcagaatagttggacagtctgcattgactataggaggctgcacctggttaccaaaaaggaccattgtcccctgcctttctttgaccagatcgcttgaacgcttggcaggtaaatcctactactgttaccttgatggtctctctggatatatgcaaattactatcgctcctgaggatcagganaagaccacattca

SEQ ID NO: 2983 - DNA, 456 bp, Glycine max
  unsure at all n locations
agcttggaaagggaggctttggttatggctcctattnntcactgtcaatgatggacagacactaccatagtggaatgtcagttgaagaagcagttgatctcgttgataagtgcattatggagatcagatccaggctcgttgttgcaccaccgaactttgttattaaaattgtggacaaggatggtgcaagagagtacgcatggcgtgaatctgtccaggatgttcctgttccttcagcttgagtaactctgttcctaattttcattggacttatttcttttcgatttgccctgcttttatcttgctacaatttttttactggtcttgtaatgtctctgaaaatcatggtctatagatgctctaaaggaagacagtttatcatttgaattaaatatgcacgatggctagttctattcataaatgaatgtatgacattgtgtgaagtacgcttgactt

SEQ ID NO: 2984 - DNA, 212 bp, Glycine max
  unsure at all n locations
gagtcttctctgtggctatcttactggtttagccccatcctctaaatntatccgatgcatacatgtggatgggctaataccangaatgtctgctagggtccagcctatagccttcttatgcttcttgagaactgataacaacttctcctcttgctcatcagcaagggaggcaaatataattactggaaaacttttgctatcatccaagtaag

SEQ ID NO: 2985 - DNA, 445 bp, Glycine max
  unsure at all n locations
agcttatgctgcanacatttataatagacctccacagcagcaaaaccaacaacagcaaaatacttatgacctttcaagcaacagatacaatccaggttggaggaatcatccaaatctgagatggacaagccctccacaacaataacagcatgtccctccttttcagaatgttgctggtccaagcaagccatatgttcctcctccaatgcagcaacaacaacaacaacaacaacaacagtcacaacaaagacaacaagcaactgaggctcctcctcaaccttccttagaagagttagtgaggcaaatgaccatccagaatatgcaatttcagcaagagacaagagcctccattcagagtttgacaaatcagatggggctgatggctactcagatgaaccaagctcagtcctaaaattctaacaaatttccttcacaaactgtgcgg

SEQ ID NO: 2986 - DNA, 455 bp, Glycine max
agcttgtttgctacatccaagtataaatgatttgatattataagtataaacctattcaaaacttctgttcaaaatattaaaataactttacttgaaattttgaacctctgcacttgtttttaattagctaattccaatcttctggagatatgtattttggtttgtttatatttttctttaagatgagcttcatgtaaatgataaaccttattcttgtattgagattcaatttgctctattacacattgtttgacctaatcagataaactaaaaccatccttatgtcatacgttttcatggaaaagtaaaaatttattactatgaacatacattgtaaaaaaaaattggcaaacataagtaatattcaaatatataaataaatgagatataattcacctaattatatagtaaccttcatatgtcgccacatttgatgtacatcatgctgactaatt

SEQ ID NO: 2987 - DNA, 432 bp, Glycine max
  unsure at all n locations
agctntaaacattcaatttgagcgtctcgatatattacgggactcaatcagacatccgagtaaaaagttattgtcgtttgaattggctcagagcttcaacattcaatttcgagggtctcgatatatgacgggactcaatcagacatccgagtaaaaagttattgtcgtttgaattggctcagagcttcaacattcaatttcgagggtctcgatatattgcgggactcaatcagacatccgagtaaaaagttattgtcgtttgaattggctcagagcttcaacattcaatttcgagcgtctcggtatatgacgggactcaatcagacatccgagtaaaacgttattgtcgtttgaattggctcagagcttcaacattcatattcgagcgtctcgatatattacgggactcaatcagacatccgagtaaaaagt

SEQ ID NO: 2988 - DNA, 266 bp, Glycine max
  unsure at all n locations
ccttcacccgacgaagacactgacaaaaacttatcttctccttcttggacaaagtatggcagggctggggcaagtaaattttcttcccatcagaccttggatgcaactgtgatcgtatacccatatcagctagatcttgaagggtattcaagccatccttcgtcttgccttgaatgttaanggagcgtccaatgacactatcacnagacattttntccacatgcataacatcaatacaatgtctaacgtcaagatcacaccagtac

SEQ ID NO: 2989 - DNA, 434 bp, Glycine max
agcttatgctgcacacatttattatagttcttcacagcaactaaaccaacaacagcgaaatacttatgacctttctagcaacagatacaatccaggttggaggaatcatccaaatctgagatggacaagccctccacaacaataacagcatgtccctccttttcagaatgttgctggtccaagcaagccatatgttcctcctccaatgcagcatcaacaacaacgacaacgacgacagtcacaacaaagacaacaagcaactgaggctcctcctcaaccttccttagaagagttagtgaggcaaatgaccatccagaatatgcaatttcatcaagagacaagagcctccattcagagtttgacaaatcagatggggctgatggctactcagatgaaccaagctcagtcctagaattctaacaaatttccttcac

SEQ ID NO: 2990 - DNA, 454 bp, Glycine max
  unsure at all n locations
agcttgtttcccaactcanagctcttctcaagggtcttcacttgttccatgttaagcctccttttcttctctccagcctgtgatccatcatcagacaaatcttcctcagcattagcttcttctccaagctcaatccctgaaaatgacatagatctcttgcctagaaaggatgctcctcctgcatcaacatttgaaacattggtattaggccacataacataatattgcactattggttggtgtttttgtgtctaaaagagagtaccatggtactcttgaggtgcacatgaagttataattgagttgagtgaaggtggaggttgatggtcatcttggtgaggtgtttgtagcatgaaatntgctgggaagaaagccatatcattgctagtctatgcttgcctctgatcttcaattgctgaatgatattctgatcaccatgtgnatgctgatgctc

SEQ ID NO: 2991 - DNA, 449 bp, Glycine max
  unsure at all n locations
agcttgacaganatctgcagccgaaccacctgtttctnttcctgcattccacccaccttgatcattaccttttccctgtttatcatgtgatgaagagactggagcattccaattgttttttgttccccagccagatgacccactcccatccttagttggttggcttttccacccaacatcctgattagcatcaatatctgaagtaccatcagggtttccaacttctttgactccacttttaaaaccattgccaccaccccatccaattgatgacgtttgatttgactttntgacactgttccaaccagaagactcctcttcagaagccttggttgtattccaattgcttttgctgtcccttgctgaggattgatttccattcaaattgttaggtttgtcattccaattgctattctgattgccatcacccatgcttccagttntatgct

SEQ ID NO: 2992 - DNA, 316 bp, Glycine max
agcttcagaattcaatttcgagcgtctcaatatattacgggactcaatcagacatccgagcaaaacgttattgtcgtttggattagttcagagcttcagaattcaatttcgatcgtctcgatatattacgggtctcaatcagacatctgaggataaaagttattggcgtttgaatttgctgagagcttcaacattcaattttgagcgtgtcgatgtattacgggacttaatcagacattcgagatataagctattgctgcttgaatttgctgagagcttcaacattcatttcgagtcgtcctttattttacgggac

SEQ ID NO: 2993 - DNA, 396 bp, Glycine max
agcttgaaattgaacaaccgaagctctccagatattcaaatggttatgacctatcacacgaaagactgattcatgcgcataatatatcgagacgctcgaaattgaacaacggaagctctccagaaattcaaatggtcataacttttcaaatggaagtccgattcatgcgcataatatatcgcgaagcttgaaattgagcaacagaagctctcgagaaattcgaacggtcataacttatcacactgaagtccgattgaagcgcataatatatcgagaggctcgaaattgaacaacggaagctctcgagaaattcaaatggtcataacttgtcaaacggaagtccgattctggcgcatactatatcgagaagcttgaaatggaacaacagaagctctc

SEQ ID NO: 2994 - DNA, 449 bp, Glycine max
agcttgtagtggtccttgaagttgttttatcgtcatggtttctaaatctttggtttcctcgattgtcacaacaatgtgttcaaatttgggatctaacaagcgtagtatattctccataatttttacatcttctaacttctcaccatttctttttagttgatttgaaacaacgagaattcttgagaaataattgaaaatggactctaactctttcatatgtaaggattcaaactcacctagtaaagtttggagacacaccttctttactctgtcttctcctttgtgggaggattgaagcttatcccatgcctccttagcagatgttgcattagaaatcttctcgaacacatcatcatctaatgcttgatagataggaagagagctttcttgtctctctttcttgaatcctttaaagactccttttgtgcctcggatagtgaagtctcatc

SEQ ID NO: 2995 - DNA, 341 bp, Glycine max
gcttcaatctgatcactaagatgatgcaatcttattccgcaagggcattgggtataagactccaacttgatggggcttcagatccaagggaaagccctagggatctcatgagccttaaggtagatatccagcccatgggctaatgatgagcccgcttatctttgtaaatattacaatacgtgctttcttcagctgggccttgtattgctgagcactctagaactatatggctttagccttgtatttcggcgcattcttagtagtcattggagtaaagacttttttctgtattttcatgtcttttgccatgggggtgagcttagctaatattgtgggtgtgt

SEQ ID NO: 2996 - DNA, 313 bp, Glycine max
  unsure at all n locations
ctcggatgtctgattgagtcccgcaatatatcgagacgctcgaaatggaataccgaagctctgagcaaattcaaacgacaataactctntactcggatgtcagattgagtcccgtaatatatcgagacgctcgaaatggaataccgaagctctgaacaaattcaaacgacaataacattttactcggatgtctgattgagtcccgaatatatcgagacgctcgaaattgaataccgaagctctgagcaaattcaaacgacgaatcacttttactcggatgtctgattgagtcccgtaatatatcgagacgctc

SEQ ID NO: 2997 - DNA, 426 bp, Glycine max
  unsure at all n locations
agcttctacattcaatttcgagcttttcgatatattacgggactcaatcggacatccgagtaaaaagttattgtagattgaatttgctcatggcttcggtattccatttcgagcgtctcgatatattacgggactcaatcggacatccgagtaaaaagttattgttgtttgaatttgctcagagcttcggtattccatttcgagcatctcgatatattacgggactcaatcagacatccgagtaaaaagttattgtcgtttgaatttgctcanggcttcggtattccatttcgagcgtctcgatgtattacgggactcaatcagacatccgagtaaaaagttattggtcgttgaatttgctcagagcttctacattcaatttcgagcgtttcgatatattacgggactcaatcagacatccgagta

SEQ ID NO: 2998 - DNA, 451 bp, Glycine max
agctgtgtatggtagagatccacctactctggtgagatatcaaccagacatcactgatgttccaactgtgtaggagcaattgactgctagagatgaatttttgagacaattgcaggataatttgatgaaggcttatacatatatgaagaatcaggctgataagaaaagtcaagatgtcaatctacaggtgggagacttggttctagttaaactactaccatacaaacaacattcagctgctcttagaaagaatcataagttgggaatgcacttctttggcccctttaaaattctggccagagtaagagcagtggcctacaagttagagttacctgcagaagctagaatacataatgtcttccatgtctctcagctgaagttgtttaaaggaacaccaggagaacagtacttgcctttacctttaactacaacagaaagtggaccaattatt

SEQ ID NO: 2999 - DNA, 452 bp, Glycine max
  unsure at all n locations
caagcttcggaaatgatttctatacaaaagttagtcgtatgaagcgactaacaacattcatatccatatattataagaacaactaatcaacctttgggtgatccataaatgtcttataataatgaacttcaattaacccataaaccaataatctataatttagcatccattctatgggtaattgaaataaaattgtcactaatttggaattaaacaaaacatacagatttgaccactgtggtgatcacaaatctatcatatatttaatccaaattactttatccaattttaaattgaaattgacgtaagggagagatattgaatttcaattcaagacattcaaaaattggattcaaggcattccaaactcgaaaacaattataatatgcacaacggaaaatcaaatggtttgaataattntccaattggaatcagattcatacaatgtatgg

SEQ ID NO: 3000 - DNA, 369 bp, Glycine max
  unsure at all n locations
tttgatggtgactctaatgtaagcaacaattatgttcccattaaggctagaggaaatgaaactntaacccggtattcaaatgctggattntccagcattcttactttctcatggatgagtcctttagtaactctaaggaatgagaagactttagagcgtgaggatctcccacatcttgctactaatgacagtgtggatgggattttgcaactcttcaaacaaacttgagtcagagtgtggtagtgtgataacaaccctacganaatatganggtactgcacagatgaacaacactatgctagtgtgataacaacccttcttacnactatcaatcaaccctgcttctagtgtatggttgtgataacacta

SEQ ID NO: 3001 - DNA, 440 bp, Glycine max
  unsure at all n locations
agctntntcctcatgaaacaagtcgaacctgatctgctggtcttctatggccatttatagtttcctcttccccatgtctaccacacggcttactgtagacataaaaggtcttccaagaattatgggaatgccaacatcttcttcaatgtctatcactacaaaaccagctggaaatatcaaatgtttgaccctaaccaaaatgtctataatcactccatagggtcttgtgatggagcgatcagccaactgtaaggtcatacgagtgggcattatctctaactctccaagtcaccgacacatggagagtggcattaaattgatactggctcccaagtcaatgagagtcttgcctactgtaacctcaccaatagaacatggtattgtgacactacctggatctttatgcttcaatggaaggatacattgtatgaatgcactgc

SEQ ID NO: 3002 - DNA, 127 bp, Glycine max
  unsure at all n locations
tctatcaactggagcatatgtttnctcataatntatactctcttcttgattatatcacttggctactaatcttgccttatttctaataactatgccattntcatctaatctgtttctaaacacccat

SEQ ID NO: 3003 - DNA, 443 bp, Glycine max
  unsure at all n locations
agcttccgttntcaatttggagcatctatcgattaattgcgacactctgtcgggcatccgagtaaaaagttattgttgtttgaattttctaagagtttccgttttgtatttgaagcgtctcgatatattacgggactcaaccggacatccgtgtataaagttattgtcattacaatttgttcagagcttgtagtctcaattttgagcgtctcgatatattacccgatttaatcggacatccgagtaaaaagatactgtcgtttgaatttgatacctgcttctgttttcaatttggagcatctcgatatattacgagactctctcgaacatccgagtaaaaagttatcatcgattgaatntgctacgaccttccgttttcaattcggagcgtctcgatatattacgggactcaaccggacattcgtgtataaagttattgtcat

SEQ ID NO: 3004 - DNA, 410 bp, Glycine max
  unsure at all n locations
agctttaaagaatgatttcatctattatgaggctttgtccactcttttgggatcctcctagggttgaaacaaagtagcacctatctatagaagtaggcccaagatttaattactggagaaccaaaatccaataaatatataaacattaaaagtcatataaattagttatgcgtttttaaaatgatctaagaacatataatagaaaatccatatacatagaagatattaaacatttttttaaaaacccaaagttataaatgacaatcctcaatttcatgtcaccaagaatgttcatgaatttataaaaaaattgctatatatgttttcttttttacgagaaatcctattagttatatttgaaaaatcaacttatatattntgaacagattatgttactaaataatgtttat

SEQ ID NO: 3005 - DNA, 457 bp, Glycine max
  unsure at all n locations
agcttgttgcactagcataaacaaggagttgagcaactgcttctggtcttgggtgtcatggcaatcctttggcatgaaaaattctaaaacaaaatcagcggaggcactccggagtggaatgcccagagcagcatgcaagccaaacatgttagcatgatgtgccagaggatactccgccttgctgaaggaagtaatgtcatttgcaaaacaaggtttggtggttgtgaaagctgtcccaactactccttgcccccccaaaaggtggcactcagagcacgcttccaggaaacccattagctctacatccgccacaaaactagcagcatacacagtcgacacataattcatctcatcgtttgaatgcccacatccactctntcctgcttgttggatgcagggagcccatgtcagagctaaaggcaagttatgcgccttgcatacacacgtcaaaacttgt

SEQ ID NO: 3006 - DNA, 449 bp, Glycine max
  unsure at all n locations
agcttcttacatagtccgcctttgcttgaccttctttatgcttaanaacagaaacattaggcataggcaaaagatcaagaggagttagtggattaaaaccataaacaacttcaaaaggagaacaattagtggtgctatgaacagctctattgtaagcaaattcaacatggggtaaacaagcttcccaagtttttaagttcttcctcaaaactgtcctaagcaaagttcccaaagtcctattaacaacttccgtttgcccatcggtttgtgggtgacaagtggttgaaaataacaatttagtgcccaacttgctccacanagtcctccaaaatttttttaggaacttagagtccctatcactaacaatgctccttggcagaccatggagtctcacaatctccttgaaaaacaaatcagccacatgggaagcatcatcaactntnttacat

SEQ ID NO: 3007 - DNA, 427 bp, Glycine max
atacttaagtcacctgctgcatcaagcttctacatgctgaatgaccttttatactgatatggcaaatctcaaggccacatgagttattcttgagggactcacttgccatcagaagaagaaatcctttaaggatgctaatcattatgtgtgggatgatcctcactggttcaagattggagcaaataacttgatcagatggtgtgtcattgaagtggaagccaagagcattctttggcattgtgacaattcaccttatgggggccattttaatggagaaagaactactgccattgtctctaacaagtatttttctggcccataatactcatagatgcacatttgtgtgtgaaacaacatgagtaataccaaagaacaagaggaatctcatgaacgaatgagatgcccctgaacaacattattgaagttg

SEQ ID NO: 3008 - DNA, 351 bp, Glycine max
  unsure at all n locations
gccttcgctgaccttctntatgcttaattacagaaacattaggcataggcaaaagatcaagaggagttagtgggttaaaaccataaacaacttcaaaaggagaacaattagtggtgctatgaacagctctattgtaagcaaattcaacatggggtaaacaagcttcccaagtttttaagttcttcctcaaaactgtcctaagcaaagttcccaaagtcctattaacaacttccgtttgcccatcggtttgtgggtgacaagtggttgaaaataacaatntagtgcccaactngctccacaaagtcctccaaaaatggcttaggaacctagagtccctatcactaacaatgc

SEQ ID NO: 3009 - DNA, 371 bp, Glycine max
gatctctaagtcatctgaggcatgcaagcttctgttatgaatttcgagtgtctcgatatactacaggacttaatcggacattcgagtaaaaagttattgacattcgaatccgctcataacattcgttgtcaattacgagcgtctagatatattaaagggattcattcggacatccgagtaaaaagttattatctttttattttgctcagagcttctggtttcaatttcgagcatctcgatatattacaggactcaatcggatatccgagtcaaaagttattggtcgttggatttgctacgagctctcggtttcaattacgagcgtcttaatatgctacgggacacaatcggacatccgagaaaaagttatt

SEQ ID NO: 3010 - DNA, 266 bp, Glycine max
tgcatatatagctacagacgtcttgtaattgatacatacgaacatttgtgggccatttcatacactttcatggaatggtcaacaatattttatatcattcatagacgattactccaaatatacatacttgtttcttatatatgaaaagtcacaatatctggatgtgtttaaaacatttaaacttgaagttgaaaatcaactcacacaaaaataaagagtgtcagatttgaccgtggcggtaaatactatgacagatatgacaattc

SEQ ID NO: 3011 - DNA, 395 bp, Glycine max
  unsure at all n locations
aagcttattgtatgcgatttaccaccacacatgatcacaaaattcatgtttatctagtttatcaccacctaacagattttgtttctcaagttcatgtaatcctctttcactaacatgacctaatctcaaatgccagagttttgttttatcaatcaatgtattactagctaccgatgcatgtccaataatagtggaaccttcaagaataaacaagccattacttntattcttgttacccttagctatgattaaagatccatttgaaatcttaagaacaccatttggaattctagttgcatatcctagatcatcaaacatgtttatggaaataagattccttttgagcttttgaatgtaccttacatctttcagtagatactctctggtatcaaaca

SEQ ID NO: 3012 - DNA, 305 bp, Glycine max
  unsure at all n locations
tcacagttcaatttgagcgtctctgtaatattacgggactcaatcagacatccgagtaaaaattcattgtcgtttggattggctcagagattcaacattcaatttcgagcgtctcaatatattacgggactcattcagacatccgagtaaaaagttattgccgtctgaattctctcagagcttcaacaatcaatttcgagcgtgtcgatatattacgggactcaatcagacatccgagctaaaagttaatagtcgttgaattggattaaacttncacattcaatttcgagcgtcttgatatatta

SEQ ID NO: 3013 - DNA, 321 bp, Glycine max
  unsure at all n locations
agctttctgttttctacaagcaacttaaccttttttntattcttattgcgcatatgctattccttcgtggattctcaacatctccgttaccattgtggacgtcgctgtttgggtattcctcacctactatgtcattggatttgatccacacgttgggacgcaaacaaactactttaaacatttaggagcatgcgaatgttgttgcttctactaatatgcctgctacttatgatgtgacttcttgaattatgcgcaggctcttcaccccgtacctcgtgctattaattgctagccagacggcttcgggactattcctaagta

SEQ ID NO: 3014 - DNA, 361 bp, Glycine max
ctctctcaattgcacaaggccttaatatttgaagagtattcttgtggaaccttcacccgacgaagacactgacaaaaacttatcttctccttcttggacaaagtatggcacgctgggggcaagtgaattatcttcccatcagaccttggatgcaactgtgatcttatacccatatcagctagatcttgacgggtattcaagccatccttcgtcttgccttgaatgttaaggagcgtcccaatcacactgtcacaaacatatttctccacatgcataacatcaatacaatgtctaacgtctagatcacaccagtccggaagatcaaagaaaatggacctcttcttccatatgcaactctgac

SEQ ID NO: 3015 - DNA, 459 bp, Glycine max
agcttgacccttacgagtcagtttagtcaaaggtatagccatcttggagaaaccttctatgaatcttcggtaatatcttgctaaacctagaaaactcttaatctcaaaaacagacttaggactctcccacttaagaacaacttctatcttagagggatccacagctatacccccttgagatatcacatgccctaggaaactaactttctctaaccagaactcacacttggactacttagcatagagttgtcggtccttaagggtatgcaacacaatcctcaaatgttcttcatgttcctctctagtcttggagtataccaaaatattcgttatcaatactaccacaaaactatcaaggtaaggatgaaaaactctattcatgtagtccatacagactcctggagcattagtcacaccaaagggcatgactagatactcatagtgactgtaacgcggtct

SEQ ID NO: 3016 - DNA, 406 bp, Glycine max
  unsure at all n locations
agcttcaagaaaaagatggcctcagtaaattccttatttgcggaagggaattctatcaatagacctccaatctttaatggagagggttaccactactggaaaacccgaatgcaaatttttatcgaggcaatagatctaaatatctgggaagccataaaaatagggccttatatacccaccacagtagaaagagtttcaatagatggtagttcatcaagtgaaagcataaccatagaaaaacctagagatagatggtctgaagaggatagaaaacgagtacaatacaacttanaagccaaaaacataataacatctgccctaggaatggatgaatatttcagggtttcaaatcgtaagaatgctaaggaaatgtgggacacttcttgattaacacatgaacgaacta

SEQ ID NO: 3017 - DNA, 413 bp, Glycine max
  unsure at all n locations
agctttgctgcnacatttatatagacccctcatcagcaaaacctacaacagcagaataattatgacctttcaagcaacatatacaatccaggttcgaggaatcatccaaatctaagatgggcaagtcctccataacaacaacagcctgtccctccttttcagaatgctgctggtccaagcaagccgtatgttcctcctccaatacagcagcagtcacaacaaagacaacaagcaattaaggctcctcctcaaccttccttagaagagttagtgaggcaaatgaccatccagaacatgcaatttcagcaagagacaagagcctccattcagagtctaacaaatcagtggggcagatggctactcagttgaaccaagctcagtcccaagattctgacaaatggccttcacaaact

SEQ ID NO: 3018 - DNA, 333 bp, Glycine max
  unsure at all n locations
tacatgacatctgaattcatgtacagcanatctccatgcattcttagttggaacatgggcgctagagtggcaagggcatcgaccatctgattttcctctctaggaatgcgatgaaatgatatgtcatcaaagagctccatcaatttcctaatgtaagcctggtaaggcaccaatttggggcgtctggtctcccatttacccttcaactgatgaattaccaatgtcgagtccctgtataccttgagtaacttgaccctaaagtcgactactactcggatcccaagggcacatgcctcgtactccgctatgttgtttgtgcatttgaagcccaac

SEQ ID NO: 3019 - DNA, 406 bp, Glycine max
agcttaacattcaatttcgagcgttccgatatattacaggaatcaatcagacatctgaataaaaagttgttgtcgtttgaatccgctcagagctttcgtattccatttcgagcgtctcggtatattacacgactcaatcagacatccgagtaaaaagtgatcgtcgcttgaatctgctcacagcttcaacattaaatttcgagcgttccgatatattacgggactcaattacacatccgagtaaaaagttattgtcatttgaatttgctcagagctctcatattccatttctagcgtctcgatatattacgagactcaatcagacatccgagtaaaaagttattgccgcttgaatatgctcacggcttcggataccatttcgagcgtctcgatatatacgggactc

SEQ ID NO: 3020 - DNA, 421 bp, Glycine max
agcttcttagtttcagatgatgcagatgggtttgtagctacctcatgtactcctctaatgactatggcatcatttctggcgctaaactgctgggagttggaggccatcttctcaattaaatttctggcttcagtacgagtcatgtctccaagggctccaccactggcagcatctatcatacttctctccatattactgagtccttcataaaaatattggagaagaagctgttctgaaatctgatggtgggggcaactggcacatagtttcttaaatctctcccagtactcatacaggctctctccactgagttgtctaatacctgagatatccttcctaatgctgtggtcctggaagcagggaaaattgtttctaagaatactctcttaaggtcatcccacctcgtgatggaccttggagc

SEQ ID NO: 3021 - DNA, 336 bp, Glycine max
  unsure at all n locations
aaattgagaatggaatgctgttgatggtagataacaagtctgctataagccttgcatataatcctgttgctcatggaaggagcaagcacattgagactagatttcactacttaagagatcaagtgtacaatggaagatggaggttggatttttgcagatttgcagatcaacttgcagacattntgacaaaacctttgaagaaggagaggtttgaagatttgaggagaaagatgggacttagaagctcaaatgacatctgaattaaggaggagtgttagataaaaagataactcagatgattagttagttagttctatcacttggtgtgtagttagt

SEQ ID NO: 3022 - DNA, 357 bp, Glycine max
  unsure at all n locations
ntgacanattcgaacgacaattacttntaactnggatgtcttattgagtcccgtaatatatcgagacgctcgaaattgaatgttgatggtcgctgcaaattgaaacgacaataactttctactctgatgtctgattgagtcccgtaatatatcgagacgctcgaaattgaatcttgatgctttgagcaaattcaaacgacaataactttttactcggatgtctgattgagtcctgttatatatcgagacgctcgaaattaatacgaaagctatgagcatattaaacgacaaaattttttactcggatgtctgagtgagtctcgaatataacgacacgctcgaaactgaatgtgatgc

SEQ ID NO: 3023 - DNA, 374 bp, Glycine max
  unsure at all n locations
taataataataatttctattattattattaaatgaaaaaatttcaaaaagaaggagactcaagctaaaaagataatgcaaccaattaatatttccaaggaaaaaaatgttttgtaaagatattttcagacaatttaaatatttttgtttgactatattagtataaatcatctttaattcatacattttttaatattatgttctctttttttcattttcttttgatatactntgtgttttaacgacttggattcaatatgattntgtttatcaattatttttggatttgtacattacttacgaaattgtataagtttctttattttagttagtatttcactagaatgtaaaatatataattgatcaaaacatctt

SEQ ID NO: 3024 - DNA, 353 bp, Glycine max
acatgatcacaaaatccttgtttatgtagtgtatcacttcctaacagatattgtttatcaagttcatgtaatcctctttcactaacatgaccgaatctcaaatgccagagttttgttatatcaatcaatgtattactagctaccgatgcatgtgcaataatagtggaaccttcaagaataaacaagccattacttttattcttgttacccttagctatgattaaagagccatttgaaatcttaagaacaccatttggaattctagttgcatatcctagatcatcaaacatgtttatggaaataagattcctattgagctttggaatgtaccttacatttttcagtagatactc

SEQ ID NO: 3025 - DNA, 367 bp, Glycine max
attgacctgaaatgttgtttagtgagagatcaaggtgtttctaaaaatttcttttttcccatgtcatttggtatccctccagacagatgatttctagacaagttcaaaaaccgcaaagcagatagcttggaaatttcagatggaattgctccagacagcttattacttgaaaggtcaatcattctcaccaatatcagattgtctctgtactctaactcatctcctttgggaactaagacaagagtttccttgtagtggttataactgaagtcagagccatatgaataacttaaagggttggcaaagaagtcatcttcaccagccattgtcttcatgtcatccaaacaatttggaatggatcctgaca

SEQ ID NO: 3026 - DNA, 385 bp, Glycine max
ctcatggggtatctgtctcaacttgagtctttgctgctaacacgaccaccgcttttcacgatatattccttcaacactgcaaaaatgctctacaatgaaattcatagacatgggaaataaccaactttctgacacaataccacaatggatgtgggaaatgcaatatctaatggttctttgtctaagatcccacaatttcaatggcagtattactcacaagatgtgtcaactttcttcccttacagtgctggatcttggcaataacagcctgtcacgatccattccaaattgtttggatgacatgaaaacaatggctggtgaagatgacttctttgcacacccttcaagttattcatatggctctgactttagttataaccactac

SEQ ID NO: 3027 - DNA, 389 bp, Glycine max
  unsure at all n locations
gctaatatatcgagacgatcaanattgaacaacggaagctctcgtgatattaaaatggtcataagttttaactcggatgtccgattcaggagcttcacatatcgagatgcacgaaattgaacaatggaagctctagagaaattctaatggtcataaattttcacacggaggtcctattcaggcgcttaatatatccagacgctcgaaattgaacaatggaagctctcgagatattcaaatggtcataacttttcactcggatgtccgattcaggtgtatcacatatccagacgcttggaattgattagcggaagctctagagaaattcaaatggtcataacttttcacacggaggtcctattcaagcgcttaatatatcgagacgctcg

SEQ ID NO: 3028 - DNA, 305 bp, Glycine max
  unsure at all n locations
ngagaatggagaattgcactaagcaattattactcatagctctttactcgaaagtggaggacacatgaacgatnacacaattcatggagctcctgaaaaagggtagataatggagaattacactaagctatcactacgcatagcttcaaactcgaaggtggaggacacatgaacgataacgcaattcatggtgctccgaaaagattgaaaatggagaattgcactacgcaatcactacgcatagctccaaacgcgaaggtggaggacacatgaacgaaaacgctattcatggngctccgaaaaga

SEQ ID NO: 3029 - DNA, 281 bp, Glycine max
caatggcaaacactccatccacctaccttgttgctctatacaacacgctcgaagtagatcctctatagtctgaatacttcgttcagtctgaccatctgtttgaagatgatcacttgaactaaccttcaacttctgtcccaaggcttcatgtacactcgtccaaaatcgccaagtgaaccttggattcctgtcagatacaatactcgaaggaattccctgctaccttactacttccttgatatacaacttcactagcttttccattctatacctcatattca

SEQ ID NO: 3030 - DNA, 444 bp, Glycine max
  unsure at all n locations
tgngattctcataaacactgagtctanactcatncaactgttgcaacctgttactacatacttaggatcaaaaattaccaacattaaaacccacatgggtttgcacttaattgagtaagctcattgggacctgtaggcctaagatcttctttatcgatgggatcctttgcttctttggaagatgaatggcagcggaatagagaaggaagagagagaggagacgccacttccaggagaagatgagtctagaanaagctcaccaccatangaggccaaggataagaagctggaggaagaangagatgaatgaanggagagggagagaagagcacgaaattntgtgctctaaaagagctctgaaatctgaatttaatattcanatgatcaannagtttcaaaaatgcacacacatgacctttatttatagcctaagtgtcacacaaa

SEQ ID NO: 3031 - DNA, 393 bp, Glycine max
  unsure at all n locations
tatatagaaggtttgttcctaatttctctacaatttcctcacctttcaatgagctggtgaagaagaatgcggcatttacctgnggtgaanaacaagagcaaagctttgctttgctcaaagaaaagcttactaaggaacctattctagctctttctgacttttctaaaacttttgagctagaatgtgatgcctctggagtgggagttggagctgtattgttacaaggtgggcaccccattgcttattttagtgaaaaacttcatggtgccaccctcaactacctcacatatgataaagagctttatgccttaataagagccctccanacttangaacattaccttgtntccaaggaatttgtcattcatagtgattatcaattacttaagtaca

SEQ ID NO: 3032 - DNA, 434 bp, Glycine max
  unsure at all n locations
tcttagtttcagatgatgcagctgagtttgtagctacctcatgcactcctctaatgactataacatcatttctggcgctaaactgctgggagttggaagccatcttctcaattaaatntctggcttcagcaggagtcatgtctccaagggctccaccactggcagcatctatcatacttctctccatattactgagtccttcataaaaatattggagaagcaactgctctgaaatctgatggtgagggaaactgacacatagttttttaaatctctcccagtattcatacaagatctctccactgagttgtctaatacctgagatatccttcctgatggctatggtcttggaagccagggaaattttttctaagaatactctcttcaagtcatcccagctcgtgatggaccttggagcaaggtaatacaattag

SEQ ID NO: 3033 - DNA, 406 bp, Glycine max
agctatgaatgctctatttattggagtcgaccataatatcttcagactgatcaacacatgcacagtggccaacgatgcatgggacatcctgaaaaccactcatgaaggaacctccacagtgaagatgtccatattgcaactattggccacaaaattctaaaatctaaagatgaacgacgaagaatgtatttatgacttccacatgaacattcttgaaattgccaatgcttgcactgtcttgggagagacgatgacagatgaaaagctggtgagaaagatcctcatatccttgcctaagagatttgacatgaaagtcactgcaatagacgaggcccaacacatttgccacttgagagtggatgaactcattggttctcttctacctttgagctacgactctcggata

SEQ ID NO: 3034 - DNA, 425 bp, Glycine max
  unsure at all n locations
atacacgaatgaagctctgataccacttgttagacaagtggcctcagatatcttaagaaggggggttgaattaagatattgcaaactatttccccaattaaaattctatttcaatttcaatgcaagttgcacgttcccttaaaaaatgaacttttaaataatgattcaaaaagaacaatctgaatataaatataaagcaataataaataaatgagtttaagggaagagaaactgcaaactcagatttatactggttcagccacacccttgtgcctacgtccagtccccaagcaacccgcttgagagttccactatcttgtgaaattcttttacaagttctgaacacacaacgacaatcattcctttgagtttagatntctttacaacaagagaccatcggtctctcaatcccctttgagaattta

SEQ ID NO: 3035 - DNA, 434 bp, Glycine max
caactcattgttgatagaacatcgaccctcattgttgatattgttcgaagaatgtcagatttttctataagacatatggcctccacattgtctgctgccttgaacattgcaaagaggaaagaaaaagttagatctttggaagcatttacaaattctagaataataggaggactttatatttataaattattctaccttattatctgacataactctaatgaaatctttaaaatcccacaacctgctccacttccatggcttcctaggtgatttttctctaacaatatacttgcccaaatcgcacaacaactcatgcatttgaatccacctcgaatccatggttatgagtgatttatcaacgagaacttgtacgccatattcgggaattaatccacgaaaatctataacttccttcacatatttcacaggataat

SEQ ID NO: 3036 - DNA, 376 bp, Glycine max
  unsure at all n locations
agcttcaacaccggaatcttgtacagctccttgtttgttgcattacaggaaaacaaaaattactattatatgaatacatggttaatggaagcctggactccttcatatctggtacgtaatatatgaatcatgcctaaattacgttcacttgtgttctattctttaagctaatactcagcaccttattaatcttgaatatctaatactgaacaataattcttaactctttcagataaaataaaaagtaaattactggattgccctcaacgcttacacataatacttggaattcctagggggctttcgtatnttcatcaagattctcgattaatgattattcatacagatctcaacgcacgtaacattttactcgatg

SEQ ID NO: 3037 - DNA, 429 bp, Glycine max
  unsure at all n locations
agcttgcttctacaatctcccctttntgatgatgacaactctaacatcaagacacacatacacacacttttgtctagtcgattactcacttaattntccattctncccctttgtttttgagtttatgcttcacttgaaattaagttaattacttatgtgagttcttgatttaatccctatttctcttcgcctttggcatcaacaaacagccatagtgcataacaagtataaaacatttatatactattaatcattcacaagacattcattgaagaatataaaccaatcatgaagcaagaaacatgaatagatcaaatatataaaaaccacatagtcatataacataattcataattgttcaatcataccatgcaaataaagaaatactaaattgttcaaatgtcaaaatatagccaaatacacggctag

SEQ ID NO: 3038 - DNA, 389 bp, Glycine max
  unsure at all n locations
tatctaaatgcaccctatagtgtattacttttcacatgtatttgtgtatctatgtttgatcatgattttttgccaccccctgcacgtggttatcaaggtggcagagttatgttgggccttgtgttggtatgctttcaatcgacaaacaatcttctgataaccatttgataacccacccaaagattgcagatagacctgtgcctattgataattctgacattatttcaaagggaaataactgtgacagcaataatttagatattcatcgaatgttggaagagggtacagactatgttttagttcctgaaaaagtgtgggaaaggctgttggaatggtaaatttattatataaatatgttgctttttaatttggaaaanatgaatgatctt

SEQ ID NO: 3039 - DNA, 413 bp, Glycine max
taaagatccaacctctatgatgcaatcctaccccgcaagggcattgggtagaagactcaaagtagattgggctagagatccaagggaaggccctagggttctcatgagccttagggtagatttcgagcccatgggctaagtatgagcctgcttatctttgtaaatattagaataggttttcccttcgtctgggccttgtactttggccattctaatactatagggttttagccttgtatttcgaggcattttgagtagtttttgtagtaaggaattttttttttattttcatgtttttgtcatggggtgcgcttagctattatagagggtgtgtagctaagctctagcttctcatctcaaggaggtgagcttagctattagagaggtatgtgtatctaagctctagcttcttt

SEQ ID NO: 3040 - DNA, 417 bp, Glycine max
  unsure at all n locations
agcttcaaatatcttacttgattcgttaagcaaatctcatttatctaatattntactagtcatattggctcttctaacattcctttttggtgatgacagaattaccatgcaaaactttctgcttttggcttggcaaaagatggaccacctggtgataagagccatgtctctacaagggtaatgggcacatatggctatgttgctcctgaatatatggccacaggtacctaagtttgtggagtacttagcttatgaacactttagttggtcatacaaacttctatacatatcctgccttctaaattattgcgcaccaaccatataatacattaccgaaaataagacacccttatcaattctttntcaagccatcggggagctttntagcttcttttttttcccttcattaacaagcac

SEQ ID NO: 3041 - DNA, 419 bp, Glycine max
  unsure at all n locations
ctgagagttcactcataatttaattcatcggtctgtctacgatgtttattaaaagggggagaaacatgtgcgagggattctaattgctgtcctatttgaacatgtctcagtaaagagattagatccttcgggtagcgatattttgatgatgagtaatatcattttcaatgtattacaaaagagctctttttgtattttttatttatctaacgaaatgtcgatatcagagtagcaactcttangagatagttctatattgacttaaataagattggagaattaataagcgtagatccgggaattcccgatatatgtcaacctttcgaactatcgctgaatccatgagtaggcactagacagtctggtgaactgaaacatcttattatctatggagtatggtgcttaaattgattaatatt

SEQ ID NO: 3042 - DNA, 449 bp, Glycine max
  unsure at all n locations
ntgagccaattctaacgacaataaccttttactcggatgtccgattgagtcccgtaatatatcgacacgctcgaaattgaatgttgaagctctaagccaattcaaacaacaataactttttactcggatgtccgattcaatgacgtaatatatcgggacgctcgaaattgaatgttgaacctctaggccaactcaaacgacaataactttttactcggatgtctgattgagtcccgtaatacatggagacgctcgaaattgaatgtttaagctntgagcaaattcaaacgacaataactttttactcggatgtctgattgagtcccgtaatatatggagacgctcgatattgaatgttgaagctttgagccaattcaaacgaccataaccttttactcggatgtctgattgagtcccgtaatatatcgagacgctcgaattgaatgttg

SEQ ID NO: 3043 - DNA, 448 bp, Glycine max
actttagatcgctacaaagaaggacaaatatcagtatggaccaccttatggactcctctaagaacaatagcatcatttcttgcactgaattattgggaatcggaagccatcttctcaatcaaattcctagcctcagtaggggtcatatcaccaagagctccaccactggaagcatcaatcatactcctctccatgttgctaagtccctcatagaaatattgaagaagaagttgctcaaaaatctggtggtgagggcagcttgcacacaatttcttgaatctttcccaatactcatacaatctttctccaccaagttgcctgatgcctgaaatgtctttactgatggcagtggtcctatatgcaaggaagaaattctccaagaacaccctcttaaagtcatcgcaactgaaaatagacctgtgagcaaggtagtatagccacatctttc

SEQ ID NO: 3044 - DNA, 399 bp, Glycine max
ttgcccattgactttagatagctacaaagaaggacatatatcagtatggaccaccttatggactcctctaagaacaatagcatcattgcttgcactgaattattgggaattggaagccatcttctcaatcaaattcctagcctcagtaggggtcatatcaccaagagctccaccactggaagcatcaatcatactcctctccatgttgctaagtccctcatagaaatattgaagaagaagttgctcaaaaatctggtggtgagggcagcttgcacacaatttcttgaatctttcccaatactcatacaatctttctccaccaagttgcctgatgcctgaaatgacttttctgatggcagtggttctatatgcacggaagaatttctccaagaacaccct

SEQ ID NO: 3045 - DNA, 432 bp, Glycine max
  unsure at all n locations
tgagatggaacaggtcaaatgcgtgggataccaacttgtgtgttttcaccaacaacatgatggcaatcaatttccaagtgtttggcgtgtttgtgaaaaactggatttgcagctatgtgaagagcactttagttgttacaatattaatttaactgaggtacatgtgcattgaactttgagattagagaacaaatacataagtcattatagttcacaaacaacagagacaaatgctntatattatgggttgggataagtgttttgttttgtttgttgagaatgacaagtgggtgggaattacactttactacaacaatggaattggatccctgagtgcagagcagattcagaggatctctgcaagggtgaggcagtacggtaagattgaaggcaagaatgtcttgtattggttctagaaccacaaagctcgag

SEQ ID NO: 3046 - DNA, 441 bp, Glycine max
  unsure at all n locations
agcttctgatccacccaaggaggaatacatacatgttagagctcgccggcgtcaagcaacaaacagccatagccttgcagagagagtaagattntgtgagaacttatctgtaatgaaaatgaagtttttgtatgaagaattttaaattacattttcactgccggtgaggagggaaaagataagtgagagaatgaagtttcttcaagatcttgtacctggatgcagcaaggtggcttctaagtttgaacccacaaaattcactatgtcatattgttatttgcgtttatgtatcacatccttttaacattgctatttttactttctatgcttttacgtcactggcaacgcagtaatgctagatgaaatcatcaactatgtacagtcacttcaacgaccggttgaggtatggatgaacagcttatctccctattgcccacatgt

SEQ ID NO: 3047 - DNA, 264 bp, Glycine max
tatggtactcaatatcgagcgtgtgggtatttatgcgcctgattcggacatgcgtgtgaaatgttatgatcatttgaatttctcgagggcttctattgttcaatttcacgcgttttgatatattatacgcctgaatcgcacatgcgcgtgaaaagttatgacctttacgatttctcgagagcttccgttgttcaatttcgagcgcctagatatattatgcgccataatctgacatccgagtgaaaagttatgaccatgtggatt

SEQ ID NO: 3048 - DNA, 393 bp, Glycine max
tatcttatgacaattccaatctttataagcacaatgtacaaatctatcatgacaaacagctatcaaaaaggaattttcaccctgccccacaactattgttatttaattctcgattaacattatttctacgtaagctaaaatccaagtggtatggaccattcatcatcaaagaagttatgccacatggagcactgatattggacgacccaacccaccaaacgacatggatcgtgaatggaagcaaaatcacacactacctacgtggagatttcgagacgataatcattgttgtcccgctacaccacgcttgaaccacaacaaagacctccaactattaagacgttaaagaagtgctcctgcgacgccacctactatttctaaaccctacttttt

SEQ ID NO: 3049 - DNA, 332 bp, Glycine max
agcttgagaaaatcttttataaaaccatcggaagagttacatctcttgattttttattcataacttttcactggtcatccattactataaccatgtaatcgattacacaaaacattctatgaaaagatgtgactcttcacaattgaatttgaatttcaacgttcagatacactggtcatcgattaccaatatattgtaattgattacaccgtttaaaaaaacatttggaacgttgcaaattcacttaaaagcttttgaaatcaaactttaccactggtaattgattacacgtaattggtaatcgattaccagagagtaaatactctggtaac

SEQ ID NO: 3050 - DNA, 449 bp, Glycine max
  unsure at all n locations
tatgctgcanatatttacaatagacctcctcaacctcagcagcttaatcaaccacagcagaacaattatgacctctccagcaacagatacaaccctggatggaggaatcaccctaatctcagatggtctagccctcagcaacaacaatagcagcctgctcctttcttccaaaatgttgttggcccaagcagaccgtacattcctccaccaatccaacaacagcaacagccccagaaacagccaacagttgaggcccctccacaaccttccctcgaagaacttgtgaggcaaatgactatgcagaacatgcagtttcaacaagagaccagagcttccatttagagcttgactaatcagataggacaattagctacacaattgaatcaacaaaagtcccagaattctgacaagctaccttctcaagctgtccaaaatcccaaaaatgtcag

SEQ ID NO: 3051 - DNA, 420 bp, Glycine max
  unsure at all n locations
agcttgtgcattcaatatcttgatgacggtgctctatatgttctcaatattggactaatacatttgctgcccaagtttcatggtcttgcacgtgaatatcctcttaagcatcttaaggagtttcatattgtttgttccaccatgaagccccctgatgtccacgaagatcatatctttctaaacgctnttcctcattctctagagggagcgcgacaagattggttatactaccttcgctccacctccatttttagctgggatcaccttaacacggtgttcttggagaaattcttctctgcatctacgaccactgccatcagaaaggatatttcacgcattacgccactcagcgcacagaacctatatgaatactacgagagattacaaaactatatgccacctgctctcacactacatttc

SEQ ID NO: 3052 - DNA, 346 bp, Glycine max
  unsure at all n locations
tgtgggtggacgacgcatgaacganaacgcaattcatggngctccaaaaaagggttgaggatggagaattgcactaagcaatcactacgcatggctccaaggtccagggtggaggacgcatgaacgaaaatgcaattcatggggctccaaaaaagggttgaggatggagaattgcactaagcaatcactacgaacggctccaaactcgtgggtgaaggacgcatgaacgaaaatgccattcatggggcttcgaaaaagggttgaggatggagaattgcactaagcaatcactacgcatggctccaagctcctgtgtggaggacgcatgaacgaaaatcacattcat

SEQ ID NO: 3053 - DNA, 432 bp, Glycine max
  unsure at all n locations
agcttgaaattgaacaacggaagctctcgagattatcgagtgcgcatatattttacaccgatgttcgattcggcgaaataatatatcgagacgcacganattgaacaacggaagctctcgagaaattcgaatggtcataacatttcactcggatgttcgattccgcgacataatttatcgagacgcttcaaattgaacaaccgaagctctcgacaaattagaatggtcttaacttttcacgccaatgttccattccgggacataactcatctatacgcttcaaactgaacaacggaagctcttgagaaatttgaatggtcataagtcttcacaccgatgtctcgattggggacataatatatcaagacgattcaaattgaacaacgcgcgctctcgacacaatcgaatggccataacccttcacacacatgt

SEQ ID NO: 3054 - DNA, 407 bp, Glycine max
ctgcaagcttatataaatccgaacgccatactcacgtatatttcacaactgaaaagtgaatattgaacttatgaagtggtaacgggtgtcaatgtgcttacttcttttcatgaaagactggattctttgtcacagcgagtgctgatttattgtccacacatatttccataggttcttcttgtggcatttttaactctctcaacaagttccttagccaaattgcatgacaaacgcatgatgtggcaccgacatactccgcttcacaagttgatagcgtcactattgcttgcttctttgacatccaagtgaaagccctatctcccataaagaacacaacaccagtagtgctctttctatcatccaagtcttcactccaatcgctatcactatagcccacaatcgtataa

SEQ ID NO: 3055 - DNA, 391 bp, Glycine max
cgtagggttaaagtctcacgattgtcacgtgctcatgcaacaattgttagtcgtggctatacgagacatcttgctaaacaaagtcaggttagcgataactcacttgtgctttttcttccatgctatatgtagcaaagtcattgatcctgtcaagtttgatgagttggaaaatgaggccgcaattatactgtgccagttggagatgtattctccccttgctttctttgacatcatgattcacatgattgtgcatttggtcagagaaatcaaatgttgtggtcctgtttatctacggtggatgtacccggttgagcgatacatgaagatcttaatagggtatacaaagaatctatatcgtccagaagcgtctattgttgagaggtacattgca

SEQ ID NO: 3056 - DNA, 386 bp, Glycine max
gacctattaaactaagcttctctatatgtgatgtcctaaatcggtcatccgggttaaagttatgaccatttgaattactcaagagcttccgatgctcaatttcgagcgtcacgatattttatgcgcctgaatcggacatccgagtgaaaagttaagactatttgaatttctcgagagcttccgttgttgaatttcgagcgtctcgatatattatgcgcctgaatctgacatccgagttaaaagttatgaatatttgaatttctcgagagctttcgctggttaatttcgagcgtcacgatatattatgcgcctgaatcggacctccgagtgaaaagttatgaccatttgaatttctcgagagcttcccgtgttcaatgtccagcgtc

SEQ ID NO: 3057 - DNA, 243 bp, Glycine max
agcttgaaattgaacaatggaagctctccacagttttaaatactcataacttttcactcggaggccagattcagacgcataatatatcgagacgcttgcaattgaacaaccaaacgctcctcagaaattcaaatggtcataacttttcactccgacgtcccactctgcgcataatatatcaagatgcttcaaattgaacaaccacagctctcgaaaactccaacgcgctctaacctttcacat

SEQ ID NO: 3058 - DNA, 449 bp, Glycine max
  unsure at all n locations
gattctatagtcttaattgccaatgatgattaatttatcaatgatatagttaaagtttcacattttgcatctgggcattacttgtgaaaattatttataggtttaattactcatttgattntatagttccatcatttataccttttagtccctatagttgtaaagtgatttttttagtctttatgatttacattntaattgtcttttaatccttgtagtttgaaagtaattttttaagtcattataatttgtattttaatttctttataatccttatagtttgaaaatgatctttttaatccatatactttatattttaatttccttttagtccttatcattaaaatatgagtaatattatcaattataattaactacaaaaataataataagtaattcgtaactaatttatcgcaagataatttgaataatttntttaataattataa

SEQ ID NO: 3059 - DNA, 403 bp, Glycine max
  unsure at all n locations
tggacgctcctaatatctcccatacttnttggggtaggccattcttggatggtctttattttctcatggtccactttgaccccaattctatcaactacaaaccctaagaaaactatattatctacacaaaaagtacacttctctatatttgcatatagcgtgtttttcctaaggactaaaagaacttgcctgagatgtcccaagtgatcatctaggctcctactgtacattaaaatatcatcaaaataaacaactacaaatctacctatgaaatcccttaagacatgatgcataagcatcataaaggtgctnggtgcagtagtgagcccaaaaggcatcactggccattcatacaaaccanacttggtcttgaaagcggttttncactcattaccctttttca

SEQ ID NO: 3060 - DNA, 406 bp, Glycine max
gtgatccgcctctatatttgccacaattctatcttccctccatataatgagtttctggtgaagggtagatggcacagccccaactccatgaatccattctcttcctaataacaagttaaaattagccttggactgaatcaccaggaatagagttggtcgaactatactgcctacagcaacatctacttgaatggctcccaaagaatagccagttgtaccttcataattcgaaagcacaatgttgtgggcagatagatcagtgtcatgtttcccgattttgtagagcatatatcgaggcattaaattgacagccgctcctccatcaatgagcactttgttgattccaacattctcaacttttgctctgatgaaaagaggtttgagatgactcttcatctgaaaatct

SEQ ID NO: 3061 - DNA, 308 bp, Glycine max
  unsure at all n locations
tctaaaatgcccgattggtctgcctcagcaaatgtacaaaggggaccgctgtttggctgaccctcttcttcccattcaggttgggttgacccaaaaacgacatatatatttctgtcttatcccctcatcatccatatttccaatcatcacctatacttnttttaatgttaaataattacaaatttaaataagattaaaatattatttgattagttatttggacacttgccatttggttagttataacttaacatattatttttcattatacaatctatgttaggtttattctcatataatccttttta

SEQ ID NO: 3062 - DNA, 378 bp, Glycine max
agcttgtgcattcaatatcctgacgagggtgtttcatatgttctcaagactggactaatacatttgttgcccaagtttcatggtcttgcacgtgaacatccttataagcatcttacggagttccatattttttgttccaccatgaagcttcctgatatccaaaaagatcatatctttctaaaggttttttctcattctctggagggagtggcaaaagattggttgtactaccttgctcccaggtccattttcagctgggatgaccttaagagggtgttcttggagaaattcttccctacatctaggaccactgccatcacaacacacatttcaggcatcacgcaacttagtggagagagcttgtatgagtactgggaa

SEQ ID NO: 3063 - DNA, 423 bp, Glycine max
agcttcttatccaaggcactagaacgcccttgttgaggatcctttactccgacagcatctagggttcctcgaacaatgtgatatctcacactacgtaaatctttaaccctccccctcttactaagactacagaatattcttgtaaattatgtccaataccaagtatataagcagtaatttcaaatccaaacgttaagtgtactctactaactttatgtaaagcagactttggttttttgggtgtaataatggaaaagttgacagataagtcacccttattgccactctacagaaccatacatgagattttcacttcatatggctcctcgttcaattcttttgaagtcattggatctgtttcctagttcagtttgagaatctctcccctttttctaatttggtccgaagagtaactacgaccaa

SEQ ID NO: 3064 - DNA, 437 bp, Glycine max
  unsure at all n locations
ggctcgtcttgctgatatatgcagactnttctgatgatgaccgatgaacaattatggatcaacttgaaacttatgtgcttcaagtgagaagaaatgcttctttttccacttgtgaagatgttcaaagtttggctatgaagatggttcaaactgagaaacattcggtatttccattggtttataaacttattgagctagctntgatattgccggtgtcgaccgcatccgttgaaagagctttttcagcaatgaagattatcaagtctaaattgcgcaataagatcaacgatgtgtcaattgtatttgtaattaaattaaagtatacaagtaaactttaatattttagcttaaaaacatgaataccaataccacaatactattgataattgaatgaaattttaaaacattaataaaacaataattgttaattattaaat

SEQ ID NO: 3065 - DNA, 379 bp, Glycine max
ttcttctatgatcactcatgattataaagcggtgctccaaaaggtattgcctccatttcttaacagcagtggtaatcgcagtgagttcacgaacataagtggaggagctaagtaacctagcgcaaaactgtttgctaaaaaaatctattacgtgtcttccttacgacaccaccgtgcccatacccgaacccgaggcgtttgtctctaccatgaaggatttagtgaagtcaggaagtgctaagactggagaatgtgtcataccatgcttcaagtttttgaaggcaacgtcaacttcaacagtccacttgaactcttctttgttaacaggcatgagagtggtgctgccaaagtagcgtaccttcttatacatctatgataa

SEQ ID NO: 3066 - DNA, 230 bp, Glycine max
ttcgagcgtctcgatatattactggactcaatcagacatgcgagtaacacgttattgtcgttcgaaaattctcagagctttggaattcaatttcgagcgtctcgaaatattaccggtctcaatcagacatccgagtaaaaagttattggcgtttgaattagctctgaggttcagaatttcaattcgagcgtttcaatatattacgggactcaataatacattcgagcaaa

SEQ ID NO: 3067 - DNA, 455 bp, Glycine max
  unsure at all n locations
agctntngcaagctggaatcatatatcctatctccgacagccaatgggtgagtcccgtccaggtagtcccgaagaagaccggcctcacagtgatatanaatgagaaggaggagctgattcctactcgggtgcagaacaagtggagagtctgcattgactatatgaggctgaaccaagttaccaaaaaggaccattttcccttgccattcattgaccagatgcttgagcgcctggcangtaaatctcactactgtttccttgatgggttttctggttatatgcanattactattgctcctgaggatcagganaagaccacattcacctgccccttcaacacttttgcctataggaggatgtctttcggcctgtgcaatgcccctggtaccttccagcggtgcatgattagtattttcagcgacttcttaaaaaatgcatagaggtgttcatggatg

SEQ ID NO: 3068 - DNA, 444 bp, Glycine max
  unsure at all n locations
atatttctntgttctaatagtaactccaaccattttacagcttctaatgttatgattggtttggccacaccttccacatgtaaactcagccaatttcctctttagcttatgtcctgtgacattgtcctcatctacagatctccttctatttttcattggccttcctctttggaccctcttatgtggtggaacagggtgtgtatattgtgtctgggtccaatattgtggtatttggactggttcaatanaatgctggtatgtcttattataagcttctattgacagccactcatgacacatgtcctcaggcttcccttctttgtgagttattgttgcaatggcatgtcaacatggcatcccttcatcanagttgtaaaatcagcacacatgtatgttaggaatgaaaaaaaaaactataaagaacacaacctgtagttgcatact

SEQ ID NO: 3069 - DNA, 384 bp, Glycine max
  unsure at all n locations
gtggcatgtcccacttgtgctttttctatctaanttgcatcctgcacaatcaaaatctataaagcctgttagatttaaggaggtacctttgngatacctcacacccacattggttgtgcccttaagatacttaatgatcatattaacgaaaattaagtgagattccttaggattggactgacatcttgcacataagcaaacacttagcatgatatctagtctacttgtagtcaggtagagaagtgatccaatcatagctctacatcttgattcatcaacannatttaccttttcatctaagtcaaggtaggttgaagtagccattggagtagatgcttctttgcatttttccataccgaatttcttaattagttctatatagta

SEQ ID NO: 3070 - DNA, 454 bp, Glycine max
  unsure at all n locations
agcttctatagaggttnttgtggactgcttgtctatttataccagaataccttcagctacaatattgaaaagcaagggagctaggggatcttcttgtctcaaaccccttgtagggagaaatttcttagaagggcttgccttaatcaaaattgatataaaagctgagtggaggcaagctgatatccatgatctccattttgagcaaaatcccaacctgaacagcatgtagtccaaaaaagaccaagaaactgaatcgtacgccttttcaaagtccaccttgaagatcatcacaggtttcttatttctccttgcttcctcaaccacctcattgagaatcacaataccatgaagaatatgccctgctttaataaaggctgacttgctttcatcaattaacccattcattacagacctcaatctggtagacagcaacttggctataactntatacata

SEQ ID NO: 3071 - DNA, 434 bp, Glycine max
  unsure at all n locations
tgatcatacagctgcagagaggcggatccaaaaccactgtgtcgaacagtttaatagcgaagtggagctgctctgccagctgcgtcacccaaagatcgtctctcttataggattctgcaacgacgaatatgataacactgatgtgtactagtacacggtcaatggatctctaaatcgacacctacgaggtgaggataccgatgcactgccctggaataagaaggtagagatcttcatacgaatatangagcagcaagtggactacactaccttgacaccgacactaacaacattctattggatgataacatgcagccaaaactgacagatttcgaccttggcgacaccgagcatgtttatgtcaagcccaaaccaagtatagagagaatgataatatatgggaaatcatatcttatttatgagctacactcact

SEQ ID NO: 3072 - DNA, 417 bp, Glycine max
  unsure at all n locations
tgtggacattgtgcaatgggtgagaaaaatgacagactccaacaaggaatgagttcttaaagttcttgatcctagacttccctcaggtccacttcataaggtgattcatgttttttatgtaaccatgctatgtgttgaggaacaggcggtggagcggccaactatgtgcaaagttgttcaaattctgaccgagcttccaaaaccaccaagctcaaaacaaggagacttaacaatcatagaatcctctgtgtcattatcaaacagtttagagtctccaaccacggcatcaaaggaacccanagatcaacatcatcctcaatggccaccaaccgatctacttatcatttgaattttgagtgctcagttggagacaagggtgtgcgtcatattatttccttggattgggtagctatctat

SEQ ID NO: 3073 - DNA, 464 bp, Glycine max
agcttctgttcgtgcttaacagataattgaaagactattgtcttactccttgtgctgaattcacggtactcagctgaaatagcatagaatctgtaatcctcactggtttgaatacctgcagagatatcaacattcaaccaaacatatcttaatatcaattttaaacaaaagtaaacatgagcaacaataatagtataatacccgactattcaacatagcaatttagtttacctttgtcattagcgtctccattccattgaccagaggtgtggttccactccccagccacgttctcatcttttttccaatctgatttaacccatcgattttcccacccgtctggcatccacacaaagcacatgcacacgagttagaaaagtgggaaatactgatctaggattaaagaaaatacaaatgaacttcgaaaaggactacccgttgaggcgcaaggacaaataatattt

SEQ ID NO: 3074 - DNA, 326 bp, Glycine max
agtgcaattctccattctcaacccctttttctgagccccatgaattgcgatttcgttcatgtgtcctccaccttcgagtttggagctatgtgtagtgaatgcttagtgcaattctcaattctacaccctttttcggagcccatgaattagcgtttcgttcatgtgtccctcaccttcgtgtttggagctatgcgtagtgagtgcttattgcaattcttcattctcaaccattttcggagccccatgaatagcgtgttcgttcatgtgtgctccaccatcgagtttggagctatgcgtagtgattgcctagtgcaattctacattct

SEQ ID NO: 3075 - DNA, 450 bp, Glycine max
  unsure at all n locations
agcttaaaggaagtgaacgaattaggatgggcagatatgtctctgcactgattggtaaatctgttccccaaattcctgaaaaatgtaaagatccaggtacattcagcataccttgtattatagggaatagtaagtttgacaatgccatgctagatttaagagcttctggtagtgatatgcctctgtctatttttaattctctatctctaggtcccttgcagtcaactgatgtggcaattcatttagctaatagaagtgttgcgtatcctgttggtttcatagaagatgtcttagttagagttgacgaactgattttccctgttgattnttatattntgaatatggaagatggattntctcaaggatcagttcccatcattctaggcagaccctttatgaccactactagaactaagatagatgtttatacaggcacactatccatggagt

SEQ ID NO: 3076 - DNA, 396 bp, Glycine max
  unsure at all n locations
ttcctcttagtagggaatctttccttcctaagatagatcgattcccagtccccttcattaagaattagctcctttatttctctattgcctttagttgcatacacctttgtttgattctctatttggttcctaaccctctcatgcaacttctatacaaactctgacctagattccccttctttacgtataaaagaagtgtcaagtgggaggggaattaagtctaaggatgttagaggattgaacccattgacaacctcanaaggggattccttggtggttctatgaacccccatgttgtaggcaaattctacatgaagaagatattcatcccaagacttatggttgcctttcagaagatcccttanaagggtggatagagacctattcactacctct

SEQ ID NO: 3077 - DNA, 457 bp, Glycine max
  unsure at all n locations
gtcacctgcggcatgaagcttataaaaaaatatggcttcctaataggatgtgtactctctatgtaaggacagagatatgctntgctctgtgcactcttgaactatgttactatttgtgtgctcatgatcatggcgtcatatgtaatgaactttgtgcctttctcaatgcttctaattctgctgaaacctctatcattgtcggtcttttctttccattaagtctcaagcatattattgcaagatctgcaacagcaagaatgtcatctatacttgcgtccttgagcactctgtcatcaaaaattatacacacttggctcttcttcatcaatgaaatgaattgagcaaccagatcttgaccctcatcttcatataacaatgaagtatgctgtctcccagatatgagctgtacaagcacaactcccagagtatacacatcactcttatctgataattgact

SEQ ID NO: 3078 - DNA, 380 bp, Glycine max
  unsure at all n locations
cttgagcggttntcctctactcagttgaatccagtgtttcttctaatgctcattattaaacgaaatgcaaaatgtcttaatctcattattggttaagagaaattctatctttgtgctttcattcctcattcttcgcattatttttttggaaaaaatgtgtgttgttctgatcggtttgtggctttgtttctttaccatgcgtgcttgcattctagtgagaagtttcagaaacttcaaggtcttcagtcttttacattcacaagacttcaatgtcttctgtctgttacattccanatacttcaatgtcttttattttatacatttacaagacttcaatgtcttcttctttacatttcaaagacttaatgtcttttgctttt

SEQ ID NO: 3079 - DNA, 456 bp, Glycine max
  unsure at all n locations
agcttgtgttaatatgttctatagacactctntgtttctgttcttcttctttcacggcaaagtacttcaattccatatgcttagcacccgtagagtacttgtcgttcttagaaaagaatactgctgcggagttatcacaatacattttcagtggcctagcaatactgtcgacaattccaagccctgaaataaagttccgcagccaattagcctgaattgtagcctcaaaacatgctacaaattcagcttccatggtggatgcagcaacaactgattgttttgcactcttccatgatattgctcctccggctaagagaaatacaaagccaagagtggattntcttgtatccacacatccagcaaagtctgagtctgaatatccaatcacctctaggtgatcagacctcttatatgtaagcatgtggtcttttgttccctgtaagtatctcagaactt

SEQ ID NO: 3080 - DNA, 348 bp, Glycine max
  unsure at all n locations
ggcacgaaaatcattcactgatgaaaaagaatgacctaatccccacaaggactttcactggctggagaatatgcatcgattaccacaagcttcaagaagccatgaggaaagaccactttcttttgcctttcatggaccaaatgtaggagaggcttgtgggacaagcttattacaacttcttgtatggatactctggatataatcaaattacggtggaccccaaggatcaggagaagacgaccttcacatgaccttntggtgtctttgctttagaggtgcatgttggcatattttgtagatatggtggagaaaagtatcgaggtattcatggatgatttctcggtatat

SEQ ID NO: 3081 - DNA, 462 bp, Glycine max
  unsure at all n locations
tatgctgcanacatctacaatagacctcctcaacctcagcagcanaatctttcacaacagaataactatgacctctccagcaacaggtacaatcccggatggaggaatcatcccaaccttatttggtcgaatccttcacaacaacagcaacaacaacaaccttactttcaaaatgctgttggcccaagcagaccatacgttcctncaccaatctagcaacaacagcaacaacagaaacaacaaacagttaaggcccctccgcaaccttcgcttgaagaacntgtgaggcanatgactatgcanaacatgcagtttcagcaagatatcaaagcctccattcagagcttaactaatcagatgggacagttggctacacagttaaatcaacaacagtcccagaattctgatagaataccttctcaatctgtccagaatcacanaaatgtgagtgccattacattg

SEQ ID NO: 3082 - DNA, 477 bp, Glycine max
  unsure at all n locations
atgaattaaaaaaatctaanaaacacattatatatccagcaaagtatatttctttgttggtgaaatgatccggaagcaaaacctcaaatctgattggtcagtatctactttaattgttgatgtaagcaagttcacagtgtgatgagcaacaaatttctcatcatgtactccaccatgatgatgagaagacagatcgacttaaaagtccagagctcagagctattcctctggccagaatgttgactactagacccctacacatgataaataaccacaaaaaatgtntttttatataaatgtttgccaattaatcaccctcaatgtatcacttgataaatggtttttataaatggcatgcacttncggataccaataaatgagtgtgtaaagacatagctgattccaaacctggataatatagggctccatttggtgcaacaattcatacccctactggtggaaataattcaagtcaca

SEQ ID NO: 3083 - DNA, 502 bp, Glycine max
  unsure at all n locations
taagctctgcgtgncctctgggctcaaaatcccaaaacaaatccctcttattactagctattttgaattctttagttcctgaatgtacaactttcaaattggtggtcgttcccctctttggtttatgcaaaaaatgaaatcaatatcaaacaaaacatgcatacaattgtcatcgttattgctacttgaaccataaggaataacatctaaagaagtactttaaaacgtttatctattttttttggtattttttgaattacaatcttacttcaatatctaatattttaatgtacttaagtggaggatgttgacgaagagaaggagaatgaagaaaataatttaaagaagattaaggaagtgtcacatatttttctccttagcaaggaagtgtcacatgaatgctcgttggtgaacaagcataatggcatttggatgacagagcctgatgagatcacaaaggaggagtattatgctttctacaagagtctcaccaatgactgga

SEQ ID NO: 3084 - DNA, 506 bp, Glycine max
  unsure at all n locations
aaagttattcaaaataagaaaaatctcacaattatttccataatgagtgatcatggnggtgaatttgaaaataaagaatttgaactattttgtgataagcatggcattgaacataacttttctgcacctagaactcctcaacaaaatggagttgttgaaaggaaaaataggtctttggaagatattgctagaaccttattaaatgacactcctcttccaaaatatttttgggctgaagccgttaatactgcatgctatatcatgaatagggctttaataagacccattttaaagaaaactccatatgaattgtttaatggtagaaaacccaacatatcacaccttcatttatttggttgcaaatgctntgtactatacaatggaaaagataacttaggaaattnttatgcaaaatctgatgaaggcatctatcttggatattcattgcannagtaagcatatagagtatataacanaagaactatgatcatagaagagtctattca

SEQ ID NO: 3085 - DNA, 279 bp, Glycine max
acgacaataaatacttactcggatgtctgtatttttcccgtaatacatcgagacgctcgaaactgaatgttgaagctctcagcaaattcaaacgacaataactctttactctgatgtctgattgagtcccgtaatatatcgagacgctcgaaaatgaatgctgaagctctcagcaaattcaaacgacaataactttttactcggatgtctgattaaagtccgtaatacatcgagacgctcgaaacagaatggtgaagctctcaaccaattcaaacgaca

SEQ ID NO: 3086 - DNA, 416 bp, Glycine max
  unsure at all n locations
agcttaagaattctatttcgatcgtcccggtatatttttggtctcaatcagatatccgagntaaaaagtattgtcgtntgaattaactctgagggtcataattcaatttcgagcgtctcaatagattacgggaccgcatcatacattccagcaaaatggtattggcgcttgaattaactcacaacttcacaattcaatttcgatcgtttcgatatattaccggactcaatcaaacatctgagtaaaaaagctattgtcgtttgaatttgctgagagcttcaacattcaatttcgagcgtctcgatgtattacgggactcaatcagacatccgaggaaaaagttattgtcgtttgaattggctctgaggttcaaaattcaatttcgagcgtctcgatatattacgggactcaatcac

SEQ ID NO: 3087 - DNA, 482 bp, Glycine max
  unsure at all n locations
agcttgtaaggttaaagtctcacgattgtcacgtgcttatgtttaattgttagncgnggctatacgagacatcttgcccaacaaagacaggttagcgataactcgcctgtgctttttcttccatgctatatgtagcaaaaacattgatcctgtcaagtttgatgagttggaaaatgaggccacaattatactgtgctagttggagatgtattttccccctgctttctttgacatcatgattcacttgattgtgcatctggtcagagaaatcaaatgttgtggtcctgtttatctatggtggatgtacccggttgagcgatacatgaagatcttaaaagggtatacaaagagtctatattgtccagaagcatcgcatctattgttgagaggtacattgcagaagaagccattgaatnttgttcagaatacttagagaaggctaaacctattggccttcctgagtctcagcatgatgacagagt

SEQ ID NO: 3088 - DNA, 474 bp, Glycine max
  unsure at all n locations
tcaagaattatggcctcatcaaaatacttgtttcctgagggaaattctataaatagacctgccatctttaatggagtgggttaccactactggtaaacccgcatgcaaatctttatagaggcaatagatctaaatatttgggaagccatagaacaaggaccttatgttccctctataatagccggaagtgcaacaatagaaaaacctagagcaaattggactgaggaagaaagaagattagtacaatataatttaaaggccaaaaatattattacatctgccttacgcatagatgaatactctatggtttcaaattgtaaaagtgctaaggatatgtgggatacactacaagtaacacatgaaggcacaacagatgttaacagatctangataaacactttaacgcgtgagtatgaaccttntangatgaatgtaaatgaaagtatacaagacatgcaaaagagggtcacacac

SEQ ID NO: 3089 - DNA, 416 bp, Glycine max
  unsure at all n locations
agctngtaagggtntaagtgggaaatgatattgagacttcacttgggtaccaaccttgtgctacaacaattacagcaagacccactatccacaatgagagaacaattttttgttaacaccctgcatcttgtatgaaggatgttctctcttttggtttaagtcaggtcataaaatatactcctaaggagccttctcaccattagaagttcaccttcttcataggggtaaaactcctcaatatgcttatcacccgtggcttcaccctcacttccacttgaagcgggaaaagaagtagcttcctcttggctactatatatgtcttaacccctcatgatcatggttttctttgcagggtattgagaagcaatgcggcccttcccaatacatttgaagcacttgatgttactagttctatc

SEQ ID NO: 3090 - DNA, 474 bp, Glycine max
  unsure at all n locations
agcttcaacattcaatttcgagcgtctagatatatttcttgactcaatcaaacatccgagtaanatgttactgtcgtttaaaattgcttggctcttcagcattataattcgagcgtctcgatatattacgggactatatcagacatccgagtaaaaagttggtgtcgtttgaatttgcttagagattcaacattcatcttcgagtgtctcgttatattacggggctcaattagacatccgagtaaaaagttattgtcgttggaattggctttgagcttcaatattcaattacgagggtctcgatatattacgggactcaatcagacatccgagtaaaaagttattgtcgtttgaattntctcatagcttcatcattcaattntgagcgtctctatatattacaggactcaataagatatccgactagaaagttattgtcgtttaaattgctaagagcttcaacattcaactttg

SEQ ID NO: 3091 - DNA, 591 bp, Glycine max
  unsure at all n locations
agcttgaagtgaggaagtgtggaagggtgagacttcctacttttattcgttgaccacagagtagtacctagaatacagaagaagcaacaacaatcaatttaacaatattctttaaacatgcaagacacaattgattgcaacaaaataaataagataagggaagagagaatgcaaacacagttttatactggttcggccacaacccgtgcctacgtccagtactcaagcaacccacttgagatttccattatctttgtaaaatcctttacaaagtctgaaccacacagggacaacccatcccttgtgttcagatgctttacaacaagagactcacagtctcttaaccaatctcattgaataagaagaatggaagaagaattctctcttcaagagaagaatattacaatgaagatcatgtaaaaatccttatagattttgcaagtgtttggccaagggattcttttgagagagcatttgacaatgaagttcttttggaatctctctcattgtcttttgagaggataagacatttntgccaagccaaactctcttaatcttttgagaggataaaacattttgatcaatcaaaac

SEQ ID NO: 3092 - DNA, 310 bp, Glycine max
ttacgagtgcctgtatattgatgcgcctgagtcggacattcgagtgaaaagttatgaccatttgaatttctcgagagcttcctatggttaattttgagcgtgctcatatattatacgcctgaatcgaacctcagggtgaaaagttatgaccatttgaatttcttgagagcatccgatgctcattatcgagcgtctctatatgtgatgcacctgaatcggacctccgtgtgaaaagttatgaccatttgaatttctcgagagcttccgttgttcaattttgagcgtctcgacatattatgcgcccgaatcg

SEQ ID NO: 3093 - DNA, 294 bp, Glycine max
tcaaccaaggggagatggaccatttcaagtgcttgaaagaatcaatgactatgcttacaaagttgaactgcccggtgagtataatgttagttccaccttcaatgtctctgatttacctctttttgatgcagatggagaatccgatttgaggacaaatccttctcaagagggagagaatgatgaggacatgaccaatagcaagggcaaggatccacttgaaggacttggaggacctatgacaagggctagagcaaggaaagccaaggaagctcttcaacaagtgctgtccatact

SEQ ID NO: 3094 - DNA, 290 bp, Glycine max
tgtggggggacatgttgacttgctatgcaatctgacattcaccacagattctgccttattctattttcagatagggaatgcctctcacagcccctctgccaatgatctgcttcatgcctgttaagtgcagacgtccaaatctttgatgccatattctgacttcatcttctttggaggataaacatgtggaggactaactggcttcttgaggtgtgcataggcaacatgggtacttggatctgatgccgcttattataactacactcttctcattagtcaccaagcattct

SEQ ID NO: 3095 - DNA, 593 bp, Glycine max
agcttcccaaccaatctccgatatctttcaggatcagaataaggctccccctgattgggtaacaatttttgatttggattcatgggactatcaattgatctacaatctgacatactagtttctttaagtatgtctaacgcatacttcctttgtgagatgataatcccatcttttgactgagcaacttcaattccaagaaaatatttaagttttcccaaatccttagtatgaaaatgactaaataaatgttccttcagttgagcaattttttcttggtcatttcctgtgatgactatatcatctacatagaccaccaagtaaacacatctactcgatgaggtatgacaataaaaaattgaatggtctgcttcacttcgtttcatcccaaaagcctgaacaactgagttgaattttccaaaccaagctcgtggagattgtttgagtccataaagagacctccgaagtttgcaaaataagctagactccccctgagcaacaaatccccgtgggtggctcatataaatctcctcttctaattctcatgtagggatgcatttttaatatccaactgatacagtgatccatgacggatg

SEQ ID NO: 3096 - DNA, 297 bp, Glycine max
tcccaagtttttaagttcttcctcaaaactgtcctaagcaaagatcccaaagtcctattaacaacttccgtttgcccatcggtttgtgggtgacaagtggttgaaaataacaatttagtgcccaacttgctccacaaagtcctccaaaaatgacttaggaacttagagtccctatcactaacaatgctccttggcaaaccatggagcctcacaatctccttgaaaaacaaatcagccacatgggaagcatcatcaacttttttacatggaataaaatgagccattttagaaaaccta

SEQ ID NO: 3097 - DNA, 499 bp, Glycine max
agctttaagaaaagtcaaacgacaataacttttaactcggatgtccgattgagtcccgtaatatacgagacgcttgtaattgaaaatagaagctctgaacaaattcaatcgacattaacttttgactcggatgtccgattgtgctccgtacgatatcgagacgctcgaaattcaaaacggaagctctgagaaaaatcaaacgataataacttttaactcggatgtctgatcgagccctgtaatatatcaagacgctcaaaattgaaaacggatgctctaagaaaagacaaacgaccataacttttgactcggatgtctgattaagtccccgaagatatcgagacgctcgtaattgaaaatggaagctctgagaaaaatcaaacgacaataacttttcactcggatgtctgattgcgccctgtaatatatcgagacgcacgaaaatgaaaactgaagctctaagaaatgtcaaactacaataactgttgactcggatgtc

SEQ ID NO: 3098 - DNA, 295 bp, Glycine max
tgtatccatggcttcctatggtggtgagcttgttcttgactcatcttctccttgaagtggcatctccaatcacctttccttcttttccattccgttgtcattgatcttcaagaagcaaagggctctattgatgaagaagatccaatgcttacaagctctatatggagctacatcagtttatgaaatataggttgaagttgtgtataatatttgattgatatcattttttgggggatcaaggatatcatgcatatgttacaatttagatgcaaacaaaatttgcatagactaacca

SEQ ID NO: 3099 - DNA, 293 bp, Glycine max
tctctaaatttatattgcaaaacagagtatctagacatagttgtactcaaatatattatgtagctatccttaatgttttgtgtaatatattttctgtttctcctctggcagcttaaacgatgggagcggaaggagtgtaaaccaaacagtcttcctatcttgcacaaaatgcaggagatgcggtttaagtcatatttggacgagaaaggggtaaagttggggagattactgaaatcttcaagcatgacaacagtgttatagtgaaagatttaaatttgaagacaaagcatgtc

SEQ ID NO: 3100 - DNA, 709 bp, Glycine max
agcttgtaattgattaaaccgatacgagatataactctgtaagcttaaaacaacttttgtaatcgattactataagattgtagttgattaaaacacagagttttatcttctgaagaaattttctaactttgaaaattttcttttcactcacacatgatgatgcatgatgcacaaatgatatgatataaactaagatgcaacatttaatataacaaataatacaaatgtcattcaagagagttggaaatgtaaaagataaaacttcttcaagcttcaaaactaagtcttcaatgttgctcatgttgctccctctatctctaacataatattcaagtatttttttatcatcaagttatttttaactttcacaaaccaggtttaaaaatattttcaaagaaataaactctcacatagagaataaaggcaatgcaaaatgaatactcatgaattaactttgctagccaaagcataacactttgagaccaaatgatcatctatgagagcttttttggaaggagttttttgacactttgtgtttacttatatcctaagttctttttcttcaaagtttcaatctttcttatatataggctttaattaatgggtactagagagacgccccgtgccgatgcacgggcttatactaatatgtaaatatttatacatatacattattacatgtatacacctatataattttatttatttg

SEQ ID NO: 3101 - DNA, 294 bp, Glycine max
tgaaggtaaactagatgccttggttaacctggtaacctaactggtcatgaatcaaaaatctgcacctgtttccagactttgtggtttatgctcctctatcgaccaccacacaaaccttttcccttctgtgcaacaatctgaagcaattgaacagcctgaagcttatgctgcaaacatctacaacagacctcctcaacctcagcagcaaaatcagccacaacagaataactatgacctctccagcaacaggtacaatcctggatggaggaatcatcccaaccttagatggtcgaa

SEQ ID NO: 3102 - DNA, 295 bp, Glycine max
ttgagaaaattcaaacgacaataactttttactcggatgtctgattgagtcccgaaatatatcgagacgctcgaaattgaataccgaagcgctaagcaaattcaaacgacaaaaactttttactcggatgtctgattgagtcccgtaatatatcgaaaagctcgaatgtgaatgtagaagctctgagcaaattcaaacaacaataactttttactcggatgtctgattgagtcccgtaatatatcgagatgctcgaaatggaataccgaagctctgagcaaattcaaacgacaat

SEQ ID NO: 3103 - DNA, 589 bp, Glycine max
agcttctacattcaatttcgagcttttcgatatattactggactcaatcggacatccgagtaaaaagttatcgtagtttgaatttgctcagggcttcagaattccatttcgagcgtctggatatattacgggactcaatcggacatccgagtaaaaagttattgttgtttgaatttgctcagagcttcggtattccatttcgagcgtctcgatatattacgggactcaatcagacatccgagtaaaaagttattgtagtttgaatttgctcagggcttcagtattccatttcgagcgtctcgatgtattacgggactcaatcagacatgcgagtaaaaagttattgacggttgaatatgctcaaagcttctacattcaatttcgagcgtttcgatatattacgggactcaatcagacatccgaataaaaaggtagtgccgtttggaattgctcagagcttcaccaatccatttagagcgtctcgatatattaccggactcaatcagacatgcgagtgaaaagttattgtcgtttgaaattgctcagagcttcaacattcaatttcaagccgttcgaaataatacgggac

SEQ ID NO: 3104 - DNA, 312 bp, Glycine max
cactattgcttactcacccttcggagtttccaagtgccgattcgtcttcttctttagtccagtcttcttctggcttcaattcattagagggctttccttctgtgtccagcatcttgggatgttcccagcctttgatgacagctttccaggttctgctatccagtgatttgaggaaggccaccattcttgctttccagtattcatagttggttccatcaagaattggtggtctgttcactggtcctccttctttctccatgttcatcagaatttatctccctagatctcactcagtgatttcgagtgcccgct

SEQ ID NO: 3105 - DNA, 295 bp, Glycine max
tgaaggcaaactggatgcgttggtcaacttggtaacccagctggccttgaatcagaaatctgtacctatcgcaagggtttgtggtttgtgctcctctgctgaccaccatacagacctttgcccttccatgcagcaacctggagcagttgagcagcctgaagcttatgctgcaaatatttacaatagacctcctcaacctcagcagcaaaatcaaccacagcagagcaattatgacctttccagcaacagatacaaccctggatggaggaatcaccctaacctcaaatggtccagc

SEQ ID NO: 3106 - DNA, 403 bp, Glycine max
  unsure at all n locations
agcttcaaactcgaaggtggaggacacatgaactaaaattcaattcatggggctccgaaaaaggttgagaatggagaattgcactaagcaataactacgcatagctcaaaactcgaaggtggaggacacatgaaccaaaactcaattcatggggctccgaaaaagggtgagaatggaaaattgcactaaacaatcactacccatagttccaaactctaaggtggaggacacatgaacgaaaacgcaatttatggagcttcaaaaaagggtgagaatggggaattacactaagcaatcactacccatagctccaaactccatgggggaggacacatgaatgaaaaccatatntatggggctcccaaaaaggttgaaaatggagaatagctctaatgaattacta

SEQ ID NO: 3107 - DNA, 676 bp, Glycine max
agcttatagttattggagggagaataaaacaatccaaaatctaattgtacctttcaagtaacgaaaaattcttttttgcgcttttagaagaagagagggaggagcctccataatagcgacacacaactcccaccgtatataaaatatcgggcctttgattggatagaaaccttaaactccccacaagactcttgaagatcggggagtctaccttctctcttcataaacttgataacttaagccaccttccataggtgtgttcacgggattgcaatcaaacatattaaattttttcaacactttttttgtgtacctttcttgtgagacaaagataccattctctgtttgcttcacttccattcccaagtaatatgacatgagtcccatatctgtcatatcaaattcacgagacatggactccttgaagtcttcaaacaaatttgggttattgccggtaaagataacgtcttccacattaagacaaattaataagacatctccttattaaaagtttaacataaagagcatacttttcttgacatgaacaaacccattgtttggaagattgtcaatgcgatattccatgcccttgggcttgctttacacatacaagccttgtcaattcagaaattttttcttgaccttaagaaaaaccattgctgtcacataacatttt

SEQ ID NO: 3108 - DNA, 297 bp, Glycine max
tgcatgatttacacctccctctttctcaagcaaattcttcttgatatcatcaaaatcttcatgatttacacctcaaacctctagtaggggcaaattcatttgaggggctgccatttatgagaatggatatagaagctgattgattgcaagcattgatccatttcctccatataggacagaaccccattctgaccatcatataatccagaaagttccatgaaacagagtcataagcctttgcaaagtccaccttaaacaccaaagttggttacttacttcttttagcttcctctattg

SEQ ID NO: 3109 - DNA, 297 bp, Glycine max
tttaactgaatttgcaacattccaaatgttttttaaatggtgtaatcgattaccagtgtatctgaacgttgaaattcaaattcaattgtgaagagtcgcatcttttcataaaatgcattgtgtaatcgattacatggttatggtaatcgattaccagtgacaagttctaaataaaaagtcaagagatgtaactcttccaatggttttctcaagattttctcaaggttataactcttccaatggttttcttgacctgacatgaagagtctataaaagcaagaccttgaattgcattca

SEQ ID NO: 3110 - DNA, 583 bp, Glycine max
agcttcaacattcaatttcgagcgtctcgatatattacgggcctcaatcagacatccgagtaaaaagttattgtcgtttgaattggctcaaagcttaaacattcaacttcgagcgtctcgatatattgcgagtctcaatcagacatccgagtaaaaagttattgtcgtttgaatttgctcagagcttcaacattcaattttgagcgtctcgatatattacgggactcaatcagacatccgagtaaaaagttattgtcgtttggattggctcagagattcaacattcaatttcgagcgtctcgatatatgacaggactcaatcagacatccgtgtaaaaagttattgtcgtttgaattggctcaaagctccaacattcaatttcgagcgtctcgatatatgacgggactcaatcagacattcgagtaaaaagttattgtcgtttgaatttgctcagagcttcaacattcaatttcgagcgtctcgatatatgacgagacttaatcagacatccgtgtaaaagttattgtcgtttgaattcgctcataggttcaacatttaatttcgagcgtctcgatatattac

SEQ ID NO: 3111 - DNA, 582 bp, Glycine max
agcttatttgtaaaaaaaccctaaaacctaatttgtcaaatacccattaaaccccaatcagtcaagtaattctaaacccttatctttcaaatacccctaaaccataactagcaaagaaatccaaaaatctaatttgtcaaataaacataaaccctaattggtaaagtaacactaaacacaaatttgtcaaatacccctaaaccctaattagtgaagtatccataaaccctaagttttaaaataactataaaccctaattggtcaagtaacactaaaccctaattagtaaagtaaaactaaaccctaatttatcaaacacccttaaaccccaattagtaaagtaaaactaaaccatgatctgtcaaatatagctaaaccctaattagtcaagtaattgtatccctaatttgaaaataaccctaaaccctaaacagtcaagtaacactaaactctaattagttaagtacccataaaccccaatttgtcaagtaacccgtgaatccctaaatttcaaatactcctaaaccctaatataataaataacccttaaccctaattggtcaagtaacacaatattctaat

SEQ ID NO: 3112 - DNA, 295 bp, Glycine max
ttgagccaattcaaacgacaataactttttactcgaatgtctgattgagtcccgtgatataacgagacgctcgaaattgaatgttgaagctctgagctaattcaaacgacaataactttttactcagatgtctgattgaggcccgtaatatatcgagacgcttgaaattgaatgttgaagctctgagccaattcaaacgacaataactttttactcggatgtctgattgactctcgtcacatatcgagacgctcgaaattgaatgttgaagatctgagccaattcaaacgacaat

SEQ ID NO: 3113 - DNA, 483 bp, Glycine max
agcttacccatggcgtacctacaccatgcccaaattcaagggacaaattaaatatatgccataagttatgaagcaaattataaatatatcatgaatggtccgcagtatgaaatttctatatgccaaaaatcataaaattaaaaaaaattgcagcctgcatgatagggacttgactgtgaccatgtgcatgtggttcttttttttaacactgcaagttatgtactggcagtgtgggttgagactgaagataaggcagggtactttcaaatgacatgaaatggggtactcgtaaatcgtaatacttactctggtgccgaatatccagtggtccccaacatacgggtggaaacctgaccgttcctcttgtctgatcccatcttaggcaatccaaaatcagacaccttggcacgcatgttttgatccagtagaacgttgttactcttgaagtctctgtggatcacaagagagactgtttgttcatgc

SEQ ID NO: 3114 - DNA, 643 bp, Glycine max
  unsure at all n locations
agcttttctcagtcgtctataaggatgattgggtgttataaagcggtgatgcctactgtagactatttttctcccatgtttaagttgtatgtaacttgtattttcttcacagacggggcatgcatgatgacccttaacactgtaaccgctgagattcccatatgctggaaagtcattaatggtacaaaaaagcattgcacgtatttcaaacgtctccttgcgaaacgcatcaaatactacaaccccctcgtcccacaactttctcagatcttcaaccaacggacttagataaacatcaatgtcatttcctggttgtcttgggcccgatatcatcatagacaacatcatgtattatcgcttcatgcacaaccaaggaggcaaattgtaaattactagcagaattggccatgaactatgttgagtgcttaaggtgccatatggattcattccatcactggctagtccaagtctaagatttcttggctcattcccaaaatccggatacaaaccatcaatcttcttccactgcgagtaatcagcccgatgacagaccattccatcagaaatccttcatttgcatgccatgtaanggtctttgcgtcattctcgttgcaaagagacgcttaaccttggaatgattgga

SEQ ID NO: 3115 - DNA, 294 bp, Glycine max
tctattttttattacgagcgtctcgatatactacgggacacaatcggacattcgagtaaaaagttattgtagtttgaatttggaacgagcttcttttttcaattacgagcgtgtcgatatattacgggacacaatcgtacatccgagtaaaaaggtattgtcgttagaatttgctaagagcttatgttttcaatttcgagcgtctagatatattacgggtcacaatcggacatccgagtaaaaagttattgacgttagaattttctaagagcttatgttttcaatatcgagcgt

SEQ ID NO: 3116 - DNA, 540 bp, Glycine max
agcttgacagtgcctgattcattgaccagcaagtttgttcctttgatatctctacagaaccaaatcaactcaaccattttaacaaacttcaaacagcaatgccaaacagattttattagcaagatagaaaggttgctttcattaaacatccttgtcacctgtggatggttttgttactatgtaagtaagctaatcccgaaagaatatgccttgtaaaattgcaaaccacagattctgtcatagctccacaatgttcacgcataaatttactgattgatcccgggtagacatactccatatatatgtacaaatgatcgccaacctgaaaatacaaatgcttcaaaacgtcaatctaatttactatgacaaatatccttaactttccattgggttgtatcgattatacttggaacaaaaacttaacaaccaagaattaactcactgtttcacttccataatactgcacaatgttgggatggtgtagttgacggaaaattttgatttcctggaacacagaactttttagaataacagcctaaa

SEQ ID NO: 3117 - DNA, 291 bp, Glycine max
ttaactcggatgtccgattcaggcgcataatatatcgagacacttgatattgaataacagaagctctcgagaaattcgaatggtcataacttttcacacggatgtccgattccggcgcataatatgtcgagacgctcgaaattgaacaacggaagctctcgaaaaattccaatggtcataacttttcactcggaggaccgattcacgcgcataatatatcgagacgctcgaaattgaagaacggaagctctcgagaaattcaaatggtcataacttttaactcagaggtcc

SEQ ID NO: 3118 - DNA, 456 bp, Glycine max
agcttctcgatacattatgcgcctaaattggacattcgagttaaaggttatgacaatttgaattgctctagagattccattgttcaatttcgagcgtctcgatatattatgaatttgaatcggacctccgagttaaaagttatgaccatttgaatttctcgagagcttgcgttgttcaatttcgagcgtcttgatatattatacgccagaatcggaactccgtgtgaaaagttatgaccatatgaatttctccagagattccgttgttcaatttcgagcgtctagatatattatgcgcccgaatcggacctccgtgtgaaaagttatgactatttaaatatctcgagagcttctgtcgttcaattccgagcgtgtcgatttattatgcttcgcaaatttggtctcgaggtaaaaggaatgaccattggaatttctagagagctttcgttattcaat

SEQ ID NO: 3119 - DNA, 554 bp, Glycine max
  unsure at all n locations
agcttaatacaccaattattaatttttttttaatagattgtaggtattttatatgaaagataatcttatttaaactggataaataagataattataagtgataaaactctgtctccaaatatttaacgtaattatatatgtaagactaattaatctaaaataactttgcatgattaacatactcagtgctataacactaatagtttggtaataactaattcattgataaatattataaaatcatcaatatttgagagtattagaataaattttacttcgtattagaataaaattaattagatgcaaacctattaacgaaatgctttaacttcaccaaatatgtgattatgaaagcaaagggtagatggcagaagaaagagcaggataaataccatgggacggtggcatttgagaagtgattggaaaggaagcaggggcacttgtgcggaattgactntgaaatcttcataattagggccactagaagacataaaattatgatctatctttgattccaaagntcgtagttggtgtgattctgcttacataatgac

SEQ ID NO: 3120 - DNA, 395 bp, Glycine max
tggatgtagatgacgatatctatacagatggatcttatatatctatatatctatagatagatatatagatgtagatatatagatatagatcatacaatgaagtaccgcacgagtgggtatataggaatccaaatctgccgaatcactcatgttatgatcttctacatcctaggtcttcccgttccttcatctggcttatgttcttcatgtagcattcagactgaatgactctatgaaattacgtcgctacttccacatggtacgggtaacgtaggagacatctctatttttcctcgcgggaatccttagaattaccacagcttagctgtcaattcgcctctgaccatcagatgaaatgtgaataacccgtcctcccctctttgaaactttgaaac

SEQ ID NO: 3121 - DNA, 217 bp, Glycine max
  unsure at all n locations
accgcttagaataaagaacacaattatatttgtcgagaagtgccaaatngtattcatacgatctttgctgcgccgtttgattaattggaatgtttctttatacattccactacgcacgttntgcagatgtgtttccggacattcctttaacatgtcatctaagaaaaacagttgcttacattctatgaatttttttagaatactcttttctttaata

SEQ ID NO: 3122 - DNA, 398 bp, Glycine max
  unsure at all n locations
tctctatccaatcctttgaagaaacatgcaatgtcttaaaaaatgtccttttgagaacagtctaagccatcataacttaattttaataccttatgaattntcatatttgaaatctttnttagttttctcaattcactttctcatgcttctttacttcttgaacgaaaacttacacccaaaacttttaaagccaaaggaatacctttgctctaagaaattgctcttcttgattgaacctcatatccatctntagggtgtatttctccaaaaacagtcaaacagaacaactgaagagaatgctcagagctcaaatcttggacctgatatatntcatcaattgggctaagtatttgcttgtttctagttgtaacaatgatcctacttgctgggtgacactc

SEQ ID NO: 3123 - DNA, 431 bp, Glycine max
  unsure at all n locations
agcttgccttggcccttgatatatttgagggactcatggtcactatgaatgacaaattccttgggataaaggtagtgttgccatgttttcaaagcccgtactaaggcatacaacttcttatcataagttgaataaggaaaggcaagaccacttaacttttcactaaaataagcaattggatggtcttcttgcatcaacacagccccaatcccaacatttgaagcatcacactcgaattcaaaagatttttgaaagtttggcaacgcaagtatggnggcattaattaacttttgcttaataacattgaaagcttcttctttgttctctccccatctgaaaccacacattttcttgagcacttcattgagaggtgctgccaatgtgctaaaatccttcacaaatcgtctataaaaactttctaagccatgaaa

SEQ ID NO: 3124 - DNA, 386 bp, Glycine max
  unsure at all n locations
tatgaaccatttaatttctcgggagtttccattgttcaataaccaatgtctcgatatattatgcacctgaatcggaaatccaagtgaaaagttatgaccatttgaatttctcgagggattttgttgttcaattttcagtgtctccatatatggtgtgcctgaatcggacctccgcgtgataacttatgaccatttgaatttcttgagagatttcgttgttcaatttcaagcgtctcgatatatgatgcgcctgaatcggacatccaagtgaaaagttatgaccatttgaatntctcgtcagcttccgttgttcaacttcgagcatctcaacatgtgatgtgcctgaatcggacctccgtgtgaaatagtatgaccattttaatttc

SEQ ID NO: 3125 - DNA, 444 bp, Glycine max
  unsure at all n locations
taatgtactaagtcctccaactccacataattntgcaactctgcaacatcccttatatcactatttaacccatgtagcaaacaagccatagtagcctctcaatcctccgtaacattagctctaatcatggaaacctncatctccttataatactcatcaaaacttatactaccttgtgtgagtctttgtagcttgttatgaaggtttctttgataatgagaaggaacaaatcttcttttcatcaacctcttcatttcttccctactatccaccaagggttcttcatatctcgccctttccctttgtaattggttccaccagatgaaagcatagtcagtgaattctatggctaccaccttcatctttgtatccttagtgtaattgaggcatgcaaatagccgctcaattntcatttcccactccaaatatgcttctggatcactc

SEQ ID NO: 3126 - DNA, 472 bp, Glycine max
  unsure at all n locations
gcttcgacgctcaatccctggtgcctnttccttgttgaatgaagaatctntaaaatcaattgccaataaagtgctcaaaaattgtagtttgtcaaaaacttcaatatctaagattggatcactgaactctgtaactgacaaatgacgagtctttataccaatcttggtttcttttccaagttcttctgatctgaaatagaattctccaccaaggtataatgctagatcatgcacgagatcatgcattacaaaataattgccccaagtttgattacttgaacgttgaaaaaatgatcttgaaactaagtcatcaaaatactcgtaaccaacttctaacgcctttcctctgtttggaagcttcaaaagatcttcagccatccacaacaagatcaagtccttctttcgaaattcataatctttacggcataatgaacactaaacaaagcaccgttgtaaatgtggagggagatat

SEQ ID NO: 3127 - DNA, 296 bp, Glycine max
agcttctcgatatattatgcgcttgaatcggacctccaagtgaaatgttatgaccatttgaatttctcgagagcttctgatattcaattttgagcgtgttgatatattatgcgactgaatctgacctccgattgaaaagttatgaccatttgaatttctcgagagcttccgttgttcaatctcgagcgtctcgatatattatcctcctgaatctgaccttcgtgtgcaaagttatgaccatttgaatttctcgagagctctccctgttcaatttccagcgtctttatatatgatgc

SEQ ID NO: 3128 - DNA, 375 bp, Glycine max
  unsure at all n locations
agcttatgctgcaaatatntacaatagacctcctcaacctcagcagcaaaatcaaccacagcatagcaattatgagctttccagcaacagatacagccctggatggatgaaccaccctaacctcagatggtccagccctcagcaacaacaacagcagcctgctccttccttccaaaatgctgctggcccaagcagaccatacattcctccaccaatccaacaacagcaacaaccccagaaacagacaacagttgaggcccctccacaacccttcctcgaagaacttgtgaggcacatgactatgcataacatgcagtttcagcaagagaccagacgcttcattaagagcttaaccaatcagatgggacaattagc

SEQ ID NO: 3129 - DNA, 453 bp, Glycine max
  unsure at all n locations
cctgtcactatacttgattatntaaatgttcaattaaattcattttttatagagcatgtatacaccgttggaaatagattttttcagactagatatcattattataaatggtttttcaatcaaatatttaatataattacatattctaattttaatttgagacctctaattaaaatcaataattttgatttattaatatacaattaaatatgagaacaatacataaactagtgattattttttcttggttgaaaaaagaacttatagtttgacattaaaaacctatgaatgggtatacaataataaaataattaattctatactttataataaaagagatatacttaattactaatttgtaattntatcaattttttatctatgaattgaagacaatgttaggatttacaattaggatatactttatatgatgttcaatcaattaagttaatc

SEQ ID NO: 3130 - DNA, 419 bp, Glycine max
  unsure at all n locations
nggatttcctcttagtagggaatgtatccttcctaagatggagccaaacccagtcccgctcattaagaaatagctcctttcttcctctattgcctttagttgcatacacctttgtttggttctttatttggttcctaaccctctcatgcaacttctttacaaactctgacctagattccccttcaatatgcataaaagaagtgccaagtgggaggggaattangtctaatggtgttagaggattaaacccatagacaaccttaaaaagggattgcttggtggttctatgaacccccttgttgtaggcaatttctacatgaggaagatacccatcccaagacttatggttgcctttcagaagagcccttanaatggtgtatagagacctattcactacctctgtttgctcatcagtttat

SEQ ID NO: 3131 - DNA, 299 bp, Glycine max
gctggagctgctgcacatgatgtcccaccctatgtccaaaaataagatccggctgcacaatgcacaacgcaagatatagtgtcacatgaacaattgcagcttgccgattcacgatgtcggatacaatgtgcacaacatccctgcccaaaatactggagttgctgacagcatctgaaagttgccgatccacgatgtcggacaccatgtcctgcacttcggcccgacaatactggacatattaatctgctatatctttaacagactattgcgcacgtagcaagagataacatgatctatct

SEQ ID NO: 3132 - DNA, 433 bp, Glycine max
gtctcgcacgatatggcagtctatttcaatgtgtttagttcgttcgtggaaaatatggtttgaggctatctggatggcggactgattatcacaatagagagttgcaggttgaaggaaggggaccggaaaatcatgaaggaggtaggtgagccactgaagttcacacgtagtagaagccaaagctctatactctgcctcagatgaactgcgagagaccgtagattgcttcttggaccaccaggaaattagagactcacccagatagactgagaagccagtgatggagcgtcgtgtgtcgcaacatcctgcccaatcggagtcactgaaagctgtgagagtgagtgtaccttgagccacgaagaagatgccagaaccaggagttcctttgaggtaacgtatgacctatatagcagcttgtgagtgcgtggaagtg

SEQ ID NO: 3133 - DNA, 216 bp, Glycine max
  unsure at all n locations
cttactaacgcacctgttctagctctctctgatatttctaaaattgctgagctagaatgtgatgcctctggagtgggagttggagctgtattgttacaacgtgggcaccctattttttattntanagaaaaacttcatagtgccacccttaactaccccacgtatgataaagagctttatgccttaataagagccctcctgacttgggaacattac

SEQ ID NO: 3134 - DNA, 389 bp, Glycine max
agcttgcctaataaacaaggacacaacaagagacatgaatcttataaatataaatatagatacacatgcacggtaaaaaacttacattataataagaggtgacaagatcattataccatatataacattaacataacaacataaatgtttaattaaagaaaaaactaatatttaataaattactatcattattagctattgctgccttcatttgcgtctaattatttgtattacttattttctattcaaactaaacctgttcataacgcaataaaaattctaaagggtcacgcacagctttctgcactctctgtctcttacctatttgacagtgtgtatatatatatatgagatacacttccccccgttttatgtcttaaaactcccgc

SEQ ID NO: 3135 - DNA, 416 bp, Glycine max
agcttgcactcttaggggacatgatgaaagtgtgttatctggacaccgtggcaactctcttgaaatgataaagctcttatcttcttataatacggaaatagatgaaattatctcggacaacgcccctcacaatgtaagatacatttcactcactatccaaaaagatattctatatgtctttgctagaaaggcgcgagatgaaattcaagaagagatcggtaacgcaaaattctcgttcattgttgatgaagcccatgatgaatctaaaagagaacaaaccactctagctcttagatctcgcgataagaatggatatgtctacgagcatttcttggatatgatacatatgccagatactacatcatccattcttaagcacgggatatgtctcctattgcctcatcataatctcaaca

SEQ ID NO: 3136 - DNA, 377 bp, Glycine max
  unsure at all n locations
tatacggcctaggatgtggttntgtgattaaattcaattaagacacaagtcttgcacttgccacattggtacaactccctccatcaatgatcaccatgcaaactttgccattgatcaaacatctagtgtggaaaatgttttctctttgactttcctccatagacttcaattattggccaagtaaccgcctaatcatcaacaattctccctccagtgttttctccacttcctgctcatcatcctcactctcttctcccttttcaacttcggactcactaatgtactctccatctctaagaatcatggctgtcttgttagggaactcatatgcataatgttccaagccttggcaccgaanacacttcacatnctggctc

SEQ ID NO: 3137 - DNA, 498 bp, Glycine max
  unsure at all n locations
tgtattcttaggaatcactnggactagactcacccaccggctatcagaaatggngtagatgattccaactggcaagagcttggtcacctcctttntcaccacatctagaatgatggggttaagtcgtcgatgtggctgcctcactggcttagctccatcctctaaaagtatcctatgcatgcaggtagatgggctaatactangaatgtttgctaaagtccatccaatagctttcttgtgcttctggagcactaacaacaacttctcctcttgctcggcagtaagggaggcagagatgatcactggaaatttttccttgtcctccaagtaagcatacttgaagattgctggtaagggcttcaactctgatgtgggtggtggctgaatagtgggaggaaccanggtaggagaagaagaggagggttccttcacctgtacctcataaagcaagtcataagtatatgtaccttctgcaacatggttagtgcattatgactc

SEQ ID NO: 3138 - DNA, 360 bp, Glycine max
  unsure at all n locations
agcttgtagatccaccgaacgtggaggacaagatctgtgttgtgcctcatggcctttccaccgattcagatgtccgtaagatgtgcgcattgntcgatttccctttctctctcgttctcttgtttttttgcgtataagcgtgcgtgtgttgttgcgactgaaagggaggcgtatatgatctccaagagatctcctccaagcaatgcggagaagtttgagttccaagccgaagtgtcgtggctaccttatggattgtgttctgccccaaaaaccctaatcaacagcccattcacagcctcaagggccatcatgggcgacactaactatatctgtccgctccacataaataataattcacga

SEQ ID NO: 3139 - DNA, 285 bp, Glycine max
  unsure at all n locations
ggatctctaagtcanctgaggcatgcaagcttgtgaccatttgaataactcaagagcttccttgtntcattttgaccgtctcgatatattatgcgccttaatccgacctccgagtgaaaagtcatgaccatttgaataactccacagcttccattgttcaatttcgagcgtctcgatatcttatgtgcccgaatctgaactccgcgtgaaaagctatgaccatttgaattactcgagagctttcgttgttcaatttcgagcgtctccatatcttatgcgcctgaa

SEQ ID NO: 3140 - DNA, 413 bp, Glycine max
agcttcttcttgtttctcttctcatttgacaccaatatttttctcgagcacttcatcgagaggcgctgccaatgtgctagaatacttcacaaatcgtctataaaaacttgctaagccatgaaaactcctcacctcggtcacagacttaggtgtaggccattctagaatacccctaaccttcttctcatgaacttgcactccttttgaactcacaacacaaccaagaaacacaacatggttagaacagaagatgcatttttcaagatcgcgatacgagtgttcttttctgagcacaggaaagacagagtttaaatgatcaatatgccaatcaagtgaagtgctatccataagaatatcatccgagtacaacacaacttatttttctatgaactctgtgaagatatggctcatta

SEQ ID NO: 3141 - DNA, 399 bp, Glycine max
  unsure at all n locations
cgaagtcgattctacgacctgttttcttcactctgaattcttttgctanatttaaccttgcaatcacagtctcatagtcaactcgattgttagaagttttgatattaaaccttaatgattacttgagtgagatatgtccaggtccttcaagggtgattcctattccactaccattgaggttactagctccaacaacatagagcatacaccaatcacctctgtcactactactcgattcatatggaagctctaccatgatgtagaccatacattaagctctaatgggtccttgtggctagctccatggaccatgcaaccattctttcaacaagctctggcttttgaagcactagtctaataggatgagtggtcttgactctgatcaactgactttggaag

SEQ ID NO: 3142 - DNA, 346 bp, Glycine max
  unsure at all n locations
agcttgcatcagtaattntctagcatccatcaatatatagtactttgagtgctccaccatgtattctgcccaaggctgacactacattatctgtctagttccaccaaccaatgaggtttacattgaccagtctagcctaacaattatgcaaaagggggagaagacccacatcatttatggcatagacgttaatcacattaagatgctgaagtcaagacacaatctgaacaattatgactcggctagcattgataaaaccacgtcacttttgaattactaaacgtccaagagactcgcacggagaaagcatacaccctttcatatcgatatatttgactcccatgca

SEQ ID NO: 3143 - DNA, 388 bp, Glycine max
cctgactcaccatataccttgacccacggtgagaatgccaatccttaccctcggaagcgaaaaaagaatagaggggaaatttgcgatcaaagaataagagaaggagaatttccaatgaaagcataaaagaaatgaaggaaaattccccaatctaagagtgggagaaagcaaaacaaggaaaagaacgaaaattcctcaatcaaagagtgggagagagcaaaaagaaaagaaaggaaaattccctatcaaagaatgggagagagtataacaggaagaagaagaaggagagaaagctcctgatcaaggatcgaaagaaccagaagaaatgtgcagagaggtcttgggaccagacaatatctgaacagtacagaattgtcaccaaatgaac

SEQ ID NO: 3144 - DNA, 455 bp, Glycine max
  unsure at all n locations
tgagcattcaatatcctgatgagggtgttccatatgttctcaatactggactaatacatttgctgcccaagtttcatggtcttgcaagagaagatccttataagcatcttaaggagttccatattgtttgtttcaccatgaagccccctgatgtctacgaagatcatatctttctaaaggcttttccacattcactggagggagtggcaaaagatcggctatactaccatgctctcagatccatctccagctgagatgaccttaagagagtgttgttggagaaattcttccctgcatctatgaccacttccatcagataagacatttcatgcatcaggcaactcattggagagaacctatatgaatactangagagatttaatatattatgtgccagttgccctcaccaccagatgttagagcaacttcttctccaatatgtttatgaatgactc

SEQ ID NO: 3145 - DNA, 387 bp, Glycine max
  unsure at all n locations
agcttgttntanaccatatatagatctatctaagcttgcataccatacgctcagcactattataggagaaaccttcccgttgcctcatataaacctactcctctaaatcaccattaagaacagctgttttcacatccatatgctgcttctccaggacaaaatgagcacctaatgctcttattatatgaagagaatctttcttatatactggagaaaaagtctctttgcaatctattgcttccttttgagtaaataccttagcaacaagncttgccttgtatctctcaatgaagactaatgaatcctttttggtcttaaagacccatttacatacaatagcctctcgcccattacgcaactctacaacgctacacactttggtactct

SEQ ID NO: 3146 - DNA, 460 bp, Glycine max
  unsure at all n locations
agcttgaagataagactatacgaggtatcttccttgggtatagcaatatctctcagggctaccatgtctacaacttgcaaactaagaaactcttcatcagtcgagatgttgaagctgatgagtatgcttcttggaattgggatgaagaaaaagtggagaagaatgttcttatacccgctcaactacctcaagaagaagttgaggaagaagacccaggtgaaccaccttcacctccaccacaacaacaagatcaagaactatcatcaccagagtctactccaagatgagtaagatctttggtggacatatatgaaaccagtagcttggccatacttgaacctggaagctttgaagaagcgtcaaagcaggaagtatgggtcaaggcaatggaagaagagatacagatgatcgagaanaataatacatgggagtatgtaaatcatccccatggaaaagatat

SEQ ID NO: 3147 - DNA, 446 bp, Glycine max
  unsure at all n locations
tcctcgtggcttctttgagaagttttctcaagaggcttctntgataagctacatccttatctatccatccctctattaactaaattaacttccttaagaataattacggatgaaaataacgcaacaaataatcaaacatcaaacataattactaataatatatagatatatatatcacggtgttacacatcatatattgagacgctcgaaattgaacaatggaagctctcgagacattaaaattgtcataaattntcacacggatgtccgatcatgcacatcagatatcgagacgctcgaaattaaaaaaacggatctcgagaaattcaaatggtcataagtttcacacggaggtccgattcaagcacatcacatatggagacgcccgatagtgaaccacggaagatctcgagagattcaaatggtcataacttttcactcagatg

SEQ ID NO: 3148 - DNA, 442 bp, Glycine max
  unsure at all n locations
tctntcttgacagntgatgctagatccncatctgtaaagcctgtaacatctcccaacgtagcaacacattcaaaatctgaaactgatatttgtgtttttccttgtgaagcatagtacaactttttcaatattaggcttccatattccaagtttaaatgtgcattgacaatctataacaatcactcagtgctctgataattttctttactaattgaaaatggcaattcttcttttctaatttgttggctatatatcttttctttcgctttttaatttggcagctggcattcccaaaaggccttacttctgctcctggaagaccaagggtggctccaagcagtccagtcatatttgacgttagtttggaatatataccggcgcttgaagcggatgaggagtaaaataaggctgtcctttgtacgtgatcagtcttgattttatg

SEQ ID NO: 3149 - DNA, 405 bp, Glycine max
  unsure at all n locations
ngcacactanaccttctttaggagttgtaaaaccaggtggcactatcatgtagacatcttcaagtagatcaccatgcagaaatgcgttatttacatcgagttgatgtaaaaaccaatttttagctgttgctaacgcaagaactagtcgaaccgttgtaagtttaacaactggagaaaaggtctcagtgtaatcaacaccctcaagttgcgtatatcccttggcaaccaaacgagccttatacctctctatacttccatctgctttcctcttgatcttataaacccatttagaaccaatatgctgtttaccaaaaggcaaggcagtaagagtccagtttttgttactctccaaggctgcaatatcttttttcatagcatgtctccaacaagcatgtttcacagctt

SEQ ID NO: 3150 - DNA, 434 bp, Glycine max
  unsure at all n locations
agaagaaatcacatgtntgtcatcatcaaaaagggggagaatgtgaatgtatgtatacatgattttgatgatgtcaaaagaagaatcaatcaaggctcatcttgcttcaagattaatacaagattgtttcaacaaaaaaagccttgattcaagatttcttcaagatcaagccttgcctcacaatgaaaggtttcaagtcattcaaggcacatgtaatcgattaccaatacatgtaatcgattaccaatggtttgaaagtgtgtaatcgattacacatcatatgtaatcaattaccagagactctgaacattgcgaattcaaattntaaatgaagggtcacaactgttcaagacaaacaattgtgtaatcgattacactaattctgtaatcgattaccagagaagatttcaaggaatatcgccacagtcacatct

SEQ ID NO: 3151 - DNA, 480 bp, Glycine max
  unsure at all n locations
atgcactattcaatggagttgacaagaacatcttcagactgatcaacacttgcacagtggccanagatgcatgggagatcctgaatatcactcatgaaggaacctccaaagtgaagatttccagattgcaactcttggctacaaaattcgaaaatctgaagatgaaggaggaagagtgtattcatgacttccacatgaacattcttgaaatggccaatgcttgcactgccttgngagagaggataacagatgaaaagctggtgagaaagatcctcagatccttgcctaagagatttgacatgaaagtcactgcaatagaggaggcccaagacatttgcaacatgagagtagatgaactcattggttctcttcaaacctttgagctacgactctcggatagggctgaaaagaagagcaagaatctggctttcgtgtccaatgatgaacgagaagaagatgagtatgacctgaatactgatg

SEQ ID NO: 3152 - DNA, 426 bp, Glycine max
  unsure at all n locations
agctngaagctnggcctgaatagaatgagcacatgcagcacttgngcaagcaagcaaaatgtcatctgcatagaccaacagaacaaccagggaagcacctttgccaatggtcaaaagagaatagtcattctttgattgagagaaaccattagcaattaatgttgttgagagtttacaaaaccactgtctagaagcttgtctaaggccataaatggatttgttgagcctgcaaacaagattttttatcaactgaagtgtacccttttggaagttccatataaacttcctcaaatatatcaccattcaagaagacattatccacatcaagttgtaagattggccattttttagcagctgcaacagccaaaaggactttaactgatgtaagtttagcaactggagagaaagtatcagaanaatcaatac

SEQ ID NO: 3153 - DNA, 462 bp, Glycine max
  unsure at all n locations
agcttaatcatgtttntagattaaaaaaggctttatatggcttanagcaagcccctagggcttagtatgagcgtctgagtaagttccttttagaaaaggatttctctagaggcaaagtagatactactcttttcataaagagaaaattacatgatattttattagttcaaatttatgttgatgatattatttttggatctactaatgaattattatgcaaggaattctctcatgactgcaaagtgagtttgaaatgtcaatgatgggagaacttaatttctttcttggattacaaattaaacaaaccaagattcgaatttttgtcaatcaatccaagtactgcaaagagttaattcatagatttgggatggaaaatgctaagcacatggctacaccaataagcactgcttgctatntagataaagatgaaaccggtcagtcaatagatgttaagcaatatcg

SEQ ID NO: 3154 - DNA, 414 bp, Glycine max
  unsure at all n locations
tgtttggaactacaattggttcctatggacttntaaattacaaagataggttgaaataattttaatgaaaatgtgaaaggaccatataattttttcgttgttatatatttttgctttaaaatatgtgaaggaagaaacttgggctgaaaattcaagtccagatcttgctgtggtaaaatatatgataataatcacgtgaccataagaaagtatatgataataattaatcaagtcttgaaaatcagttttctcaattaagcatattactaatatgcacctttcattgatggatgataaaattatggttaaataaagtttaattgttaatntaaagttagattattggttggcaattcttaaaatgagactttgtggtaaagaaagtcttgagttgttcaagtgataaaaaagctt

SEQ ID NO: 3155 - DNA, 448 bp, Glycine max
  unsure at all n locations
ctcagcttgaggtattaaactcctatgctacttataataattataacaacgggtttataatgcttaactatttaaccaatctaacatttaataattgaatttcataaaagaaaaaataggttatacaaacagttttatatcatcatctaatcacaatccaacatatatgttatatttgctgattttatgataattattttaaaagttatatcaacagtgatttataattagatagcagtgttaaattattccgtactattagtgtataatcatcactactacaaaaattatattttaagatgcgaaatcgatgacgcttcttaagaaccgtcttaaaattgaacagaatggcaattttgtaaataaaanaagatatacaaagatgatttataaaaaatcgtttaaaaaatgaatgttaaagccgatcattaaaaccgtcttaaataca

SEQ ID NO: 3156 - DNA, 411 bp, Glycine max
  unsure at all n locations
agcttatgctgcatatatttacaatagacctcctcaacctcagcaacaaaatcaaccacagcagagcaattatgacctttccagcaacagatacaaccctggatggaggaatcaccctaacctcagatggtccagccctcagcaacaacaacagcagcctactccttccttccaaaatgctgctggcccaagcagaccatacattcctccaccaatccaacaacagcaacaaccccagaaacaaccaacagttgaggcccctccacaacctttcctcgaagaacttgtgaggcaaatgactatgcagaacatgcagtttcagcaagagaccagagcctccatttagagcttaaccaatcagatgggacanatagctacccaattgaatcaacaacagtcccagaattctga

SEQ ID NO: 3157 - DNA, 427 bp, Glycine max
  unsure at all n locations
agcttgcaaacgcaatcaagcatggcattgtatgaccccacactaagctcaaacccaccacgatacatctcaccggcgagcctttgagcttcatcgagcttcccatcaacgcaccaccctttgatcaacatatcacacgtggcttcgtcggggaaaaacaccttcgccaaatccttaaccattttttccgcgtaactagcgaaacccttcgaacacagcttctccacgaccacttttaaggaagcacgatcgcgcttcagcccgtagtctctctccattcgctcgaagaactgaaccgcctggctggggcggcccgcgcggacgaagcggtcgatcgcggaggctanggttttggggccggcggcggnggaagcggcggagaggacgtcatgcgtggccttgaagtccttacggcggccaaagtagt

SEQ ID NO: 3158 - DNA, 423 bp, Glycine max
agcttatgaaacctacagaaaacatgatataatatgtcaaaataagacaattgtatgattgtcgaaaaggaaattaaaaaaaaaaaaaaaaaaactaaccatgttggatggcatgtgcttaaatctgtgataactgtagtaaaaacaatcttctttaaaagaccctttgaccttaaaattcgaagtggaacgtgctgcatcagtggatgcacactgattattatatctggctgatatttcattaggcctttggcaacctcgctgtaaaaagagaaaagatattttaactatgacatgtgatgttacattgtatttgagaagagatacgcatgcacaagaaagtattttctgaaccatggaatgcagaaaaagtcaataaattgtgtctaatattaacacaatgcacaacaaacattgctagct

SEQ ID NO: 3159 - DNA, 448 bp, Glycine max
  unsure at all n locations
agctntaacttaagtgttagatcaagtggcctcaaaataattaagaagggggggttgaattaattattaatgaaccttgactaattaaaatttacccttcttaggcttttactatgttgttaagaaagtaaagaacagaaatataaacttaaccaaaagtaaaaacggtaattaaagtgcacagcggaaattaaaagagtagggaagaagaagacaaacacacaagagttttatactgattcgacaacaacctgtgcctacaagcaacctgcggtccttgagatttcttttcaaccttgtaaaatcctttacaagcaaagatccacaagggatgtaccctcccgtgttctctttgaacaacctagtggatgtaccttccactaganatgatccacaagagatgtaccctctcttggtctcagtcacaacaacccaagaagatgtaccc

SEQ ID NO: 3160 - DNA, 379 bp, Glycine max
  unsure at all n locations
tatacgggctaggatgtggntntgtgattaaattcaattaagactcaagtcttgcacttgccacattggtacaactccctccatcaatgatcaccatgcaaactttgccattgatcaaacatctagtgtggaaaatgttttctctttgactttcctccatagacttcaattattggccaagtaaccgcctaatcatcaacaattctccctccagtgttttctccacttcctcctcatcatcctcactctcttctcccttttcaacttcggactcactaatgtactctccatctctaagaatcatggctttcttgttagggaactcatatgcataatgttccaagccttggcaccgaanacacttcacatcctggctctt

SEQ ID NO: 3161 - DNA, 407 bp, Glycine max
  unsure at all n locations
ntgagcanattcaaacgacaataactntntactcggatgtctgattgagtcccgtaatatatcgagacgcacgaaattgattacagaagctcttagcaaattcaaaagacaataactttttactcagatgtctgatagagtcccgtaatatgtcgagaccctcgaaattgaatgttgaagctctgagcaaattcaaacgacaataactttttactcggatgtctgattgagtcccgtaatatatcgagacgctcacaattgaatgttgaagctctgagcaaattcaaacgacaataactttttactcggatgtctgattgattcccgtaatatgtcgagacccttcgaaatgaatgctgaaggtctgagaacatcaaacgacaataactttatctcgatgtccgatg

SEQ ID NO: 3162 - DNA, 436 bp, Glycine max
agcttcaacattcaatttcgagggtctcgatatattacgggactcaatcggacattcgagagaaaagttattgtcgtttgaatttgctcagagcatcaacattcaatttcgagcgtgtcgatatattacgggactcagtcagacatccgatttaaaatttattgttgtttgaattttctccgaccatcaacattcaatttcgagcgtctcgatatattacgggactcaatcagacatccgagtaaaaagttattgtcttttgaatttgctcagagcttcagcattcaattttgagcgtctcgatatattacgggactcaatcagacatccgagtaaaaagctattgtcgtttgaatttgctcagagcttccgtattcaatttcgagcgtctcgatatattacaagactcagtcagacatccgagtcaaaagttatt

SEQ ID NO: 3163 - DNA, 440 bp, Glycine max
  unsure at all n locations
agcttcaacggagtgttcgggtttatgtgngaatattcattcactgcatatcgtagctttccattaattatggctatagaatttgccaacacatgtgttctttgaacagggatggtttcatagtggaatgagccctgaggattcggtcgagctgcatttgctgtcaaattcagtcttcagaacaacacaatagaacacagtcagagccaatgatcacaagatccccaattatttttttttttgtttataggtaagaatcaaaaaattcataaaactgatacacattactgaattaactaagaaaatatgttctatttaccttctaatataaatgtttaaacattataaacttaacaatgtcatatttccatttcatttttatttttatattaaatatataaataaagtaacaaacgtatatcnttttactattctatata

SEQ ID NO: 3164 - DNA, 453 bp, Glycine max
  unsure at all n locations
agctngaaggtaaactacatgccttggttaacctggtaacccaactgtgttggatcaattggtctcagaataattaagaagggggggttgaattaattattactagacctttactaattaaaaattaccattcttaggattntactatgttgttgagaaaataaggaatagaaaagaaacttaaccaaaagtaaaagcaggaattaaagtgcacagtggaaattaaaatagtagggaagaaggagacaaacacacaagagttttatactggttcgacaacaacccgtgcctacatctagtccccaagcgacctgcggtccttgagatttcttttcaaccttgtaaaaatccttttacaagcaaagatccacaagggatgtaccctcccttgttctctttgaacaacctagtggatgtacccttcactagaactgatccacaagagatgtaccc

SEQ ID NO: 3165 - DNA, 214 bp, Glycine max
caatttcgatcgtctcgatatattacgggtctcaatcagacatctgaggaaaaaagttattgtcgtttgaatttgctgagagcttcaacattcaattttgagcgtctcgatgtatttcgggacttaatcagacatccgagttaaaaagtattggttgttgaatttgctgagagcttcaacattcaatttcgagcgtctcgatattttacgggac

SEQ ID NO: 3166 - DNA, 344 bp, Glycine max
  unsure at all n locations
agctntgagctaattcaaacgacaataatgttttgctcggatgtctgattgagtcccgtaatacatcgagacgctcgaaattgaatgttgaagctctcagcaaattcaaacgtcaataactttttactcggatgtctgattgagtcccgtaatacatcgagacgctcgaaattgaattctgaatctctgagctaattcaaacgacaataactttttactccgatgtctgattgagtcccgtaatatatcgagacgatcgaaattgaattctgaagctctgagctaattcaaacgacaataactttttgctcggatgtctgattgagtcccgttatatattgaga

SEQ ID NO: 3167 - DNA, 409 bp, Glycine max
  unsure at all n locations
ngaaggcaaactggatgcattggttaactgggtaacccagctggccttgaatcagaaatctgtacctgttgaagggtttgtggtttgtgctcctctgctgaccaccatacaaaccttttcccttccatgcagcaacctggagcaattgagcagcctgaagcttatgctgcaaatatttacaatagacctcctcaacctcagcagcaaaatcaaccacagcagaacaattatgacctttccagcaacagatacaaccttggatggaggaatcaccctaacctcagatggtccagccctcagcaacaacaacagcagcctgctccttccttccaaaatgctgctggcccaagcagaccatacattcctccaccaatccaacaacaacaacaaccccagaaacaaccaatag

SEQ ID NO: 3168 - DNA, 387 bp, Glycine max
  unsure at all n locations
gatgcatcctaaacctttccaccactttcttgaggtaattgctttgggataggaatagttcaccctttgctctatccctatgaatatcaatcccgagtatccttctagctgaccctagatctttcatctcaaattttgtgttcaagctttctttgagtttcctaatctcttccttattagcactcgctatgaggatgtcatccatatacaagataaggtagataacacacactctcccctttttcaggatatatacacangtgtcatatctggttctaatgaagccatatctgattaagaactcatcanatntcaagtaccatattcgagggctgtgcttcagtctatacaagaaatntttcagcaagcacaccttggtctcccctt

SEQ ID NO: 3169 - DNA, 457 bp, Glycine max
  unsure at all n locations
agctnggtcatgctaccttgaggttaatatcaaagcttcaaaagtatagcctcataagaggatttccaaagttgtcatatcaaaatgattccctttgtgaagcttgccataaaaaggaaacaagtaaaatgttcgtttaaatccaaacatattgtttccacttttaggcctttagagctcctacacattgacctatttagaccaatcaagactgcatccctctttggatgcatatatggtctggtcatagtgaaagattaccccagataggcatgggtcaggtttctaacccacaaggatgagtctattgataccttttataaattcagaaaaaagaatcagaatgaaaaaggtatttatatctcttcaatcagaagtgatcacggnggagagtttgaaaaaaattatgaagagaatgatattcacccctatttttccactccaagaacaccacaac

SEQ ID NO: 3170 - DNA, 425 bp, Glycine max
  unsure at all n locations
agctngccgccacggagttntccgactatgctcttgtgtggnggaacaagctacaaaaggagagagcaagaaatgaagagccaatggttgatacatggactgagatgaaaaagatcatgaggaagcggtatgtgccggctagttactcaagggacttgaaattcaagctccaaaaactaacccaaggcaacaagggggttgaggagtatttcaaggaaatggatgtgctcatgattcaagcaaatattgaagaagatgaggaggtaactatggctcgatttcttaatggtttgactaatgatatccgtgatattgttgagctgcaggagtttgttgaaatggatgatttgcttcacaaagcaatccaagtggagcaacaattaanaaggaagggagtggctaagaggagttctaccaactttgat

SEQ ID NO: 3171 - DNA, 340 bp, Glycine max
  unsure at all n locations
agcttggatattcttttagcatggaatctattcttcctaagatggagccaaacccagncaccctcattaagaactagctctgttctttctctattgcctttagttgaatacactttcgtttgggtctctatttggttcttaaccctctcatgcaacttctttacaaactctgacctatattccccttctttatgtataaaacaagcttcaagtgggaggggaatgaggtctaactgtattaggggattgaacccatatacaacctcagaaggggactgcttggtggttctactaacccccctgagtcggcaaattctacatgatgaagatactcattcca

SEQ ID NO: 3172 - DNA, 455 bp, Glycine max
  unsure at all n locations
tatgatattataaggaattgtgttgctaaagtatcatgttttcaaagctgccatgttaagtttgggagtaaacaagccaatcaagttgtccacaccttagatacgacatctagatcctttgcttgtccgcattattttgatcatagcccaatatgtattgactcttttattattggtgatttaatataattatattgctttcaaaaaaagtttaaaacgttaattaatatgatataagtttatcacctttaagataacttagttaaaaagcctattttgtaacaagctctaagtaaaacataaatttatcattcaataggcttatatgtttgactcttattgtagtcaacatttgaaatatntttaacaggtaaaaaaatgtatacttctgatacattcatataatctaatatgatgatgatgatgatgatgataaanatatatgataatcatta

SEQ ID NO: 3173 - DNA, 437 bp, Glycine max
  unsure at all n locations
agctnttcctcttttcttctcgagcaatagcctctgtttttctttatctcgatagctactgcacctaatgtgcagatctgtgcatggtgattttctagttcaagcttgatttgtgacatggtatcagagctcttcaaagagctctgctgcgcaatcaagagaagtttccgaagcaatttatgatttcttcacctctgttttgagtttcatctggctttgatcttcgattgtggcaatgagtgaaagagatacacatatcccagccatagacagcttcctttacttgcatccaagcgagaatcccgcggtttcgcttgtatctccagttcttgattccacaaattatcactcatggagcagatcaatgatgattgctctgagtgccananataaacttgagtttgttgatggaggagcagctgagccattgaaattga

SEQ ID NO: 3174 - DNA, 359 bp, Glycine max
  unsure at all n locations
gagaagatgagtggagggagagggagagaagngcacggaattntgtgcctcanaaaaggtctgcactttgaagtataattctcaaatgatcaaagttgaaaaaatgcacacacatgacctctatttatagcctaagtgtcacacaaaattggagggaaatttgaatttttattcaaatttcagttgaatttgaaattgaatttgtggagccaaaattttactaattatgattagtgaattttagctatggttcagcccactaattcaaaatcaagtccaagattctccactaagtgtgcttaggtgtcatgaggcatgtaaagcatgaagtacatacacaaagtatgactatatgatgt

SEQ ID NO: 3175 - DNA, 430 bp, Glycine max
agcttctagagtagtataatgaagtcggctatgatgaggagttaatatctgacctccaatactaaatgccgattcaaaagctacagtggagatcggaatagctaacacatcccttgcaattgcttgtagtgttggatacattagctcgttcaatttccaccacattaagatatcaaaatctgaatttcttggtaaaacttcatcctctaagtaatgatccaacttcgttttcatagttgaggttcttgccctttctttctttcaatgtatctatcataatcacacaatttactctttccatcactaaccacatctagtgattcaaaagaactagtagaatctggatgctttttggcttgatattccgaaataaaatcataacacaagtttcggatcctattaacttgtgaaaaataatccatgggataaa

SEQ ID NO: 3176 - DNA, 282 bp, Glycine max
  unsure at all n locations
cgagatgatgcgctccatgtatgttggatcaaatggagaatagagatcataatgaagaataaaggaggagaagagggaatgatggtgttcctatacaaaaccgaattgatggtattaaactcaacattgctccatttaaaggaaagaatgatcccgaggcctacttggagtgggagatgaaaatagagcatgttttctcatgcaacaactatgangaggaccaaaaggtgaagcttgccaccacggagttttccgactatggtcttgtgtggtggaacaagc

SEQ ID NO: 3177 - DNA, 459 bp, Glycine max
  unsure at all n locations
agctntgagcaaattctaacgacaataactntttatcttggatgttcgataaagtcacgtaatatatcgagtcgctcgaaatagaatacagaagctgtgagaaaattctaacgtcaataactttttactcggatgtccgattgagtcacgtaatatatcgagacgcccgaaattcaatacagaaactctgagcaaattctaacgacaataattttttacttggatgtccaattgagtcgcgtaatatttcgagacactcgaaattgagtacagaagctctgaggaaattcaaatataaataccttttgactcggatattcgattgagtcccgtaatgtatcgagacattcgaaattgaatacagaagctgtgagcaaattctaatgtcaataactttctactcggatgtccgactggagtactttatatatcgagacgctcgaaattcaatacagaagc

SEQ ID NO: 3178 - DNA, 377 bp, Glycine max
acacttcaaactaagcttgcaattgccaacggaagctctcgaaagattcaaatggtcataactcttatctcggaggtctgattgaggcgcattatatatcgagacgctcgaaaatgaacaatgggagctctcgagcaagtacaatggtcataacttttcactctgaggtacaatataggcgcataatatatcgagacgctctcaattgaacaatggaagctcttgagcaattcaaatggtcataacttttcactcggatgtccgattcaggcgcataatatatcgagacgctcgaaattgaacaacggaagctctcgagaaattcaaatggtcataacttttcactccgaggtccgattgaggcgcataatatatcg

SEQ ID NO: 3179 - DNA, 418 bp, Glycine max
  unsure at all n locations
tctagagattaagactatgctttcgagttcctctatgggatntttatatgggtcgggtttctacagttgattctgcccggcgaacagtggtggaatttctccgccgccactgttttgttagatctgagatttgggaatttttggatttttttaatgataataaatataatgacggtaaagaatcgtctttactcgttattaaaagaagcttcttcacaccaacgaaaccatggcttccgtgtacagctgtacggactgcggctccaacctgaatttgaactccgtttatgcgtaccctccggacttctacatcgaagccggcaacaagggctccgtctncttctccgccgtcgacgccaccaagttcaaattcgacaaggaggacaagaatcgtcccttcttcgaaaccgtcaactac

SEQ ID NO: 3180 - DNA, 435 bp, Glycine max
  unsure at all n locations
agcttcacacttgcaagaaggtttgccatgccttatatatgagcataatngggcttcacaccaaacacatcagtcatctgtttgaagtaagacctcccctcatccaacatctctgcccgagcacacgcacagagaacaccaatgaaggttacttcattagggagcaatctcagagtctcgtcactctcaactccatgtttcatcttccccatactgatcattacttcaaacaggtcgagtccatcttcaggactcccacgaatgcagtgccccaagatcatcatattccacgataccaaattcctttctctcatcctctcaaacactatctgcgcaacctccaccttcctacacttacagtacatgccaatcaatgccgtatcaagaatcaaacttgacctcaatgacatcctaacaatgctcccatgaaactga

SEQ ID NO: 3181 - DNA, 420 bp, Glycine max
  unsure at all n locations
tatctgactcanacgaggctggatagacttctcgtatctgactctctagttcccatgtggcgtcttctcctaatgcacctccctagatcaacttgactaatggattctccttctctcttaagtgctttgttcgcatatcctcgatcctcaaaggcaatgtttgatatgtcaagttctccttcacttgtatgtcatccaatttgatcacatgagatggatcatggatatacttacgagttaagacacaagaaagacattgtgaagattagaaagagacggnggtaatgcaatttggtatgccatgggactgactctttntgagaatttggaaaggaccaagaaaatgaggtgtgagtttttgggatttcaatgctcgaccaacccaagtncacggagtgactctagagaatacatgatcac

SEQ ID NO: 3182 - DNA, 377 bp, Glycine max
  unsure at all n locations
atggctcctattttcactctcattgatggacagacactaccatagtggaatgtcagttgaagaagcaattgatctcgttgataagtgcattatggaaatcagatccaggcttgttgttgcgccgcccaactttgttattaaaatcgtggacaaggatggtgcaagagagtacgcatggcgtgagtcagtcaaggatactcctgttccttcagcttgagtaactctttccctaattntcgttggacttctttctttctatttgcccatgcttttgtcttgctatagttntttttactggtcttggaatgtctctgaaaattatggtctatagatgctctaaagtaagacagtttatcattngaatttaatatgcatga

SEQ ID NO: 3183 - DNA, 427 bp, Glycine max
  unsure at all n locations
ggagaatgtgaatatatgtatacatgatcttgatgatgtcttaagaagaatcaaaccacgcttattttgcttcaagaataatacaagattggttcaacaaacaaagccttgattcaagatttcttcaagatcaagccttgcctcacaatgaaagggttcaagtcattcaaggcacatgtaatcgattaccaatgggttgaaagtgtgtaatcgattacacatcatatgtaatcgattaccagagactctgaacgttgggaattcaaattttaaatgaagggtcacaactgttcaagaaaaacaactgtgtaatcgatacactaattctgtaattgattaccagagangaatttcagggatatcgccaacagtcacatcttatcatttgaattntgaatggccatcnaggcctatatatatgtgtgac

SEQ ID NO: 3184 - DNA, 416 bp, Glycine max
  unsure at all n locations
agcttctgttttcaattacgagcgtctcgatatattatgggactgaatcgcacatccgagtcaaaagttaatttcgtttgaatttgcttagagcatctgttttcaattacgagcgtctcgatatattatgggactgaatcgcacatccgagtcaaaagttaatttcgtttgaatttgctcagagcttctgttttcaatttcgagcgtctcgatatactactagacacaatcggacatccgagtcaaaagttattgtcgtttgaatatgctcagagcatctgttttcaattacgagcgtctcgatatattacgggactcaatcggacatccgagtaaaacgttattgtcgntggaatttgctcagagcttctgttttcaattacgagcgttttgatatattacgggactcaatcgga

SEQ ID NO: 3185 - DNA, 432 bp, Glycine max
  unsure at all n locations
tctatagaaggttcgttcctaatttctctacaattgcatcacctctcaatgagctggtgaagaagaatgtggcatttacctgnggtgaaaaacaagagcaagcctttgctttgctcaaagaaaagcttactaaggcacctattctagctcttcctgacttttctaaaacttttgagctagaatgtgatgcctctagagtgggagttggagttgtattgttacaaggtgggcaccctattgcttattttagtgaaaaacttcatagtgccacccttaacaggggggttcatagaactaccaagaagtccccttctgaggttgtctatgggttcaatcccttaacaccgttagacctcattcccctcccactagacacttcttttatacataaagaaggggaatctanggtcaaagttgtaaagaagttgcatg

SEQ ID NO: 3186 - DNA, 445 bp, Glycine max
  unsure at all n locations
ntacagcagatgccactctactccaagttcttaaaggatatgttaacaaggaaacacaagtatattcaccaggaaaacattgttgtggaaggaaatggtagtgttgtgattcaaaagatccttccacccaagcataaagaccctgngagtgtaaccattccttgttcaattggagaagtcactgtgggaaaagctcttattgacctgngagccagtattaacttaatgccactctccatgtgcagaaggtttggagagttggagatcatgcccactacgatgactttacaacttgttgaccgctccattacaagaccatatggagtaattgaagatgtgctggtcagagtaaaacattntatcttctcggcaaactttgtggtaatggatatctgtgaagatactgacanttctgtaatattgggaaggccattttcatgtaact

SEQ ID NO: 3187 - DNA, 440 bp, Glycine max
agcttcttagtttcagatgatgcatctgagtttgtagctacctcatgcactcctctaatgactatcgcataatttctggcgctaaactgctgggagttggaagccatcttctcaattaaatttttggcttcagcaggagtcatgtctccaagggctccaccactggcagcatctatcatacttttctccatattactgagtctttcataaaaatattggagaagcagctgctttgaaatctgatggtgagggcaactagcacatagttttttaaatctctcccagtattcatacaggctctctccactgagttgtctaatacctgagatatccttcctgatggttgtggtcctggaagcagggaaatgtttttctaagaatactctcttaaggtcatcccagctcgtgacagaccttggagcaaggtaatacagccagtc

SEQ ID NO: 3188 - DNA, 439 bp, Glycine max
tccttgagaaaattcctaaagaagctagagcttagctacacacacctctctaatagctaagctcacctccttgagatgagaagctagagcttagctacacaccccctataatagctaagctcacccccatgacaaaatacatgaaaatacaaaaaagtccctactacaaagactactcaaaatgcctcgaaatacaaggctaaaaccctatactactagaatggccgaaatacaaggcctaaacaaaggtaaaatctattctaatatttacaaagataagcaggctcatacttagcccatgggctcgaaatctaccttaaggctcatgagaaccctagggccttcccttggatctctggcccaatctacttggagtcttctatccaatgcccttgcgggatatgaatggatcattcctcccttcttctcattctctcta

SEQ ID NO: 3189 - DNA, 453 bp, Glycine max
  unsure at all n locations
agcttggatttctttgctccgganacctctcctttctcatgtgaacacaaacccaatcttcggattggaaaacaacctttttgctccccttgtttgcttatctagcatagctctcattcctcttttcaatttacgccttgactatttcatggagctttttcacatagtccgctttggattgtccttccttatgcttaaaaactgaaatattagacattagtaacaaatcaagagcagttagtggattgaaaccataaacaacctcaaaaggagaacaactagtggtgctatgcacaaccctattataagagcaaactttccaattcttaagattctatttcaaaacgatccttagcaaggtacccacaagtctattcacgacctttgtttgtccatccatttgagggtgacaagtagtagaaaatagtaacttagtacccaacttttcccata

SEQ ID NO: 3190 - DNA, 151 bp, Glycine max
  unsure at all n locations
agcttataatatatcgatacgctcganataaatatctgaaactctcgggaaatttaaatagtcataactattcacacggatgtccgattccgcgcgcataatatgtcgagaggctcgaaatcgaacaacccaagctcttgagaaattcaac

SEQ ID NO: 3191 - DNA, 421 bp, Glycine max
  unsure at all n locations
agcttgttatatggacttggggaaggttactctacctgccattgacaacatataagcctaccacgagctcaacttactattgactgtatcgaggataaaatcaaatgtatgattagtaaatttcttgtcaagaattgaaatccgggtacttatctaagtcctcgatttacttaaatccacttggcaccactatatcctacttgacttgccagctaacattattatagaaaaagatgcgggattattcatcactctctttagcttcagaactatcacaaaacaatctaagggtcaacttgatggcatctatctaatccgtcgaggcttcaacanatagcagaatatcattcgcaaagacaaggtatgaaattacgagcccccttttgtttaactggatgggtttccaagctttttggttgat

SEQ ID NO: 3192 - DNA, 417 bp, Glycine max
  unsure at all n locations
tggctgcctgtctctcggtataatggtcacgctgaataatcctatcgaaaagctctccacctgcacataattccatcacaacatgaacagccacggcatcctcatatgcacctttgatggatataacattangatgcccggccaagtggtgcattatctgaatttctcttctcacatcctcgacatcatcatcggtgacgagcttcctctttgcaatagatttgcaggcgcactccagccctgttgccttttccacgcacaagaacgttgtcccgaactgaccctgtccaagttttctcccaagagtgaagaactccttgaaattatcggtctctctttgcaacacagaatcaacacgaagccctgcgctagaaactctcttcactgaaccacgtttcttctgtttcttcttatcct

SEQ ID NO: 3193 - DNA, 401 bp, Glycine max
  unsure at all n locations
agctntanacaatgagcagataactaattggagaagtatttgggctcatgcttgctacatgctatgtttctagaggaatcagcaagtccgtcaacctatgtttatcagacttcaaagccttgggagaccattntgtacctctccaaccaatataatcaagtgtaagcttcaagtattgttggttgagttataaaagggaagaagaaattatgattagatggaagtctcctgaagctgggtggtttaaacttaattctgatggttcagtgcatggcaacaatgggcctgcaagttgtggagtcattacagatgatagggggagatggtgttgacgctttgctaaaaagctagggaggtgttctgtcttcattgcggaattgtggggggttatcaatgagcca

SEQ ID NO: 3194 - DNA, 340 bp, Glycine max
agctatgaaaagcattgggcgcctcctaatttatttgtaattcatctatggtgggtatggggaatctatccttgacagtgatcgtgttcagagcgcggtaatccacgcagaactgccatgtgccatcgaatttacggacgagcaacaccggcgacgagaatgggctcgtgctgggtttgatgagccctttctgcaacatggagtccacctgagcttctatctcttgcttctgatagtgggggtagcgatatgggtagacgttcaccggcaatgagtggggaaaaagatgaatatggtggttcctccctcttgccggaggctaggtttgacgctgatggaa

SEQ ID NO: 3195 - DNA, 372 bp, Glycine max
  unsure at all n locations
tgcttctcctgaatatcannattcatttgggaaaaatatatggtcaaattaggattagttagtagggcactaactgaaattaaatngaatttgaatttaggaatgtaagcaacattatgcaagactaaggtgttggttaaacaaactgaaccaatggcaagaatgggtataatgtcactattaggtagagttacagttttatcataaacaagctaataagatctaaaatgatgaagagagcaagtaatatgaatgcttgcaccagaatctaaaagccaacaatcatgaagaaaattggaagtggaagtagaaagaatcataccacttatggaagaaacatcatgaagaatgacaacattggtagcatgactt

SEQ ID NO: 3196 - DNA, 387 bp, Glycine max
  unsure at all n locations
ngcctgtccgatgcagcagtaatgatggcccgagttatgttgttgaacggntactaaccccgaatgggtttaggcaaagacaacggcggcattgttagacaagtggcctcagatatcttaagaaaggggggttgaattaagatattccanactgtttcccctaattaaaaatctatttcactttttactcaagttatgaattcccttaatgacaatcttcttaaatattaattcanatgaagcaactngaatatgaatataaagcaataataaataaaggagattaagggaagagaaaatgcaaactcagttttatactggttcggccacacccttgtgcctacgtncagtccccaagcaacccgcttgagagttccactatcttgt

SEQ ID NO: 3197 - DNA, 203 bp, Glycine max
  unsure at all n locations
agcttatgacaatntgaaattcgcgagagctttcgaagattaatttctagcgtctcgatatattataagcatgaatcggacctacgtgtgaaaatctatgaccatttgaattatttgagagcttccgttgttcaatttcgagcgtctcgacatattatgcgcctgaatttgacttgcctgtgaagggtatgaccctttgaatt

SEQ ID NO: 3198 - DNA, 314 bp, Glycine max
  unsure at all n locations
tctacatagaantcgagctnttcgatatattacgtgactctttctgacatccgagtaaaaagttattgtagtttgaatatgctcagggcttcagtattccatttcgagcgtctcgatatattactggactcaatcagacattcgagtaaaaagttattgtctgttgaatatgctcagagcctcggcattccatttcgagcatttcgagatattacaggactcaatcagacatccgagtaaaaagtgattgtagtttgaaactgctcagagcttctgtataaattagcagcgtcatgaattttactggactcaat

SEQ ID NO: 3199 - DNA, 429 bp, Glycine max
  unsure at all n locations
agctttgagattattcaaacgacaataactntttactcggatgtctgattgagtcccgaaatatatcgagacgctcgaaattgaataccgaagcgctgagcaaattcaaacgacaaaaactttttactcggatgtctgattgagtcccgtaatatatcgaaaagctcgaaagtgaatgtcgaagctctgagcaaattcaaacgacaatcaacttttactccgatgtctgattgagtcccgtaatatatcgagacgctcganatggaataccgaagctctgagcaaattcaaacgacaataactctttactcggatgtccgattgagtcccgtaatatatcgaaacgctcgaaatggaatgttgaagctctgagccaatccaaacgacaataactttttactcngatgtcttgatgagtcccgtaatata

SEQ ID NO: 3200 - DNA, 414 bp, Glycine max
  unsure at all n locations
tggctgcctgtctctcggtataatggccacgctgaataatcctatcgaaaagctctccacctgcacataattccatcacaacatgaacagccacggcatcctcatatgcacctttgatggatataacattaggatgcncggccaagtggtgcattatctgaatttctcttctcacatcctcgacatcatcatcggtgacgagcttcctctttgcaatagatttgcaggcgcactccagccctgttgccttttccacgcacaagaacgttgtcccgaactgaccctgtccaagttttctcccaagagtgaagaactccttgaaattatcggtctctctttgcaacacagaatcaacacgaagccctgcgctagaaactctcttcactgaaccacgtntcttctggttcttcttat

SEQ ID NO: 3201 - DNA, 165 bp, Glycine max
agcttataatatatcgatacgctcgaaattaattatcggaaactctggcgaaattcaaatgggcataacttttcacccggatgtacgattctggcgcataatatgtcaagagtgtcgaaattgaacaacggaagctcttgagaaattcaaatggtcattactttt

SEQ ID NO: 3202 - DNA, 355 bp, Glycine max
agcttataatatattgatacgctcgaaattaattctcggaagctctccagaaattcaaatggtcattactattcacacggatgttcgattatggcgaatcacatatcgagacgctcaaaattgaacagcggaagctctcgagaaattcaaatggtcataacttttaacactgagttccgattcaggattataatatatacagacgctcgaaattaaacattggaaggtctcgagacattcaattggttatcacttttcacacggatgtccgattccggcgcataatatgtcgacacgctcgaaattgaacaacggaagctctcgagatattcaaatggtcataaccttttacacg

SEQ ID NO: 3203 - DNA, 297 bp, Glycine max
  unsure at all n locations
catgctttcccgaatgattgcatactgtacaggcatgaatttgaagaaatgtccaaatgccctgggtgtggggcatcaaggtacaatggtgaagatgatgangactgcagttctgatgaaaactcaaagaagggccctccagcgaaggagttgtggtatcttcccatcattccaaggtttaagtgtctttctgctaatgaggacaacacanaagaccttacctggcatgcaaatgggagaaactctgatggaatggtctgtcatctngactgatgctcccagtggaagaagaatgat

SEQ ID NO: 3204 - DNA, 391 bp, Glycine max
  unsure at all n locations
actggatgcattggttaacttggtaacccagctggccttgaaccagaaatctgttcctgtcgcaagggtctgtggtttgtgctcctctgctgaccaccatacagacctttgcccttccatgcagcaacctggagcaattgagcagtccgaagcttatgctgccaacatttacaataaacctcctcaacctcagcagcaaaatcaaccacaacagaacaattatgacctctncaacaacagatacaaccctggatggaggaatcaccctaatcttagatgggtctaccctcagcaacaacaacaggagccttctccttccttccaaaatgttgttggcccaagcagaccatacattcctncaccaatccaacaacagcaacagccccagaaa

SEQ ID NO: 3205 - DNA, 461 bp, Glycine max
  unsure at all n locations
tccttaacaagaatcctaaagaagctagagcttagctactcatacctctctaatagctaagctcacctccttgagatgagaagctatagcttagctacacacaccctataatagctaagctcaccccatgacaaaatacatgaaaatacaaaaaaatccctactacaaagactactcaaaatgcctcgaaatacaaggctaaaaccctatactactagaatgaccgaaatacaaggctcaaacgatggaaaaacctattctaatatttacaaagataagcgggctcacacttagcccatgggctcgaaatctaccctaaggctcatgaganacctanggccttcccatggatctctggcccaatctacttggagtcttctatccaatgcccttgcggggtaggatngcatcaatntatccctaaccagttcaaccacttaatccaaccctannnataaata

SEQ ID NO: 3206 - DNA, 259 bp, Glycine max
agcttaagctccttcaactgcacaaggctcttattatttgaagagtatccttgtggaaccttcacccaacgaagacactgacaaaaacttatcttctccttcttggacaaagtatggcaggctgggggcaagtaaattttcttcccatcagaccttggatgcaactgtgatcgtatacccatatcagctagatctatgtgtgtggctgtgtgtgtatggctgtgcgtgtgtgcttctgtgtatgtgtgtgtgcgtgtgt

SEQ ID NO: 3207 - DNA, 267 bp, Glycine max
agctctgtgctcaatttccactggaagatgacatgcctttccaaagacaacccgataaggagacattcctatgggtgctttgtaggcagtccgatgtgcccagagagcatcatcaagcctggtactccaatctttcctgcttggctgcacaatcttctctaaaattcgcttgatttctcggttagaaatttctgcctgtccattggtctgggggtggtatggtgtcgaccccccccgcctcccccttactctctccacaaatcctcc

SEQ ID NO: 3208 - DNA, 379 bp, Glycine max
  unsure at all n locations
agctnttaactgaatntgcaacgttccaattgttttttaaatggtgtaatcgattacaatatattggtaatcgattaccagtgtatctgaacgttgaaattcaaattcaattgtgaagagtcacatcttttcataaaatgctttgtgtaatcgattacatggttttggtaatcgattaccagtgacaagttttgaataaaaatcaagagatgtaactcttccaatggttttcttaagattttctcaaggttataactctctcaatggttttcttgaccaaacatgaagagtctataaaagccagaccttgacttgcattttatgtacttgatataactcttttcacaactttttgaacatcttcttaaacttcttcttc

SEQ ID NO: 3209 - DNA, 396 bp, Glycine max
agctctaggaattatattctggagcacttatcctttcaaggatctcatactcacacaataattattgcacaacccaaaattctataatattaactatcttccaaacgttagctatctttactagtgactttccaaggtatgaaaaattgaaatgttacattacttgatgttttaaaatgaaagtgattggactacaaaaatattctacaatataaaaaatagattgcatctcataaaatataattcacaacaaaattttctaatttaaactttcataacatggaaagctatttcattgaatacattcaatttggtgctcgacttccatcttatggcaaaaatctaaagtcaagtattatggaaatttgtacaatatttttaccaaataaataaatc

SEQ ID NO: 3210 - DNA, 342 bp, Glycine max
  unsure at all n locations
aatgtcttagctcatcattttttatatctcataccctccacaaacaacacgaaaaggatgaaagaataaacgtaactgaatcaatggaaggcaaaacaatccaatgatgatngaataaccactagtaaaaataattgggagaaaaacaagtacaaactcacaattattgctcttccaaaagcaccagcactgacataagcccatgttcctggaagcatccccaaccaactgcataacaattatcagttntaagacaganattcacgagaactatatgtngtcanatgcagttccagataatcatactgggatagttccaaatagatacacgacanacatatg

SEQ ID NO: 3211 - DNA, 331 bp, Glycine max
ttgacttgctttccaatctgacattcacttcagattctggcttcctctattttcagaatgggaatgcctcttacaacacctttggcaatgattttcttcatgcctcttaagtgcagatgttccaatctttgatgccatattttgacttcatcttcattgggagataaacatgtggaggaagtactgggtttcttgaagtgttcataggtaacaaatgtcctttgatctgctgcccttcattaaaacttcactcttctcatttgtcaccaagcattctgactttgtgaaagatacattgaatccttcatcacaacactgactgatgctgatc

SEQ ID NO: 3212 - DNA, 413 bp, Glycine max
  unsure at all n locations
tctcgttcacgctactcacacagggaaccatacattctttcattccacttaaccctacataatgtgctctacatacccactttcacattcaatcttatttcaatgtcaaactcgtatcttctactaattatgaattaatcttttcttccacatcgtgcgtattgcggaagcgaacaatcatatgaagattggtatagttgaagcaaagcatggcctctaccatntgataccaaaccagataactaccaaagccatctgctctaccatcactcatcctaaatgcaacatcatccccatagacctatggcattttagaatgggacacccatcaaatgaaaggctacaatgtatgaaaaactattatcctcttttgagaaatgatncaaaatttgtctgcaacacgtgtcactatg

SEQ ID NO: 3213 - DNA, 398 bp, Glycine max
tagactaagttcagcctaccatcctcagactgattgccaaactgaactgttcattcagtcgctaaaagaccttttgagggcatgtgtcttagagcaaaagggaagttgggagagttttcttccgctgatagagtttacttataacaatagttttcactctacgattgacatggctccctatgatgctttgtatggttaaaggtgtatgacacccctatgttagctagagcccggagaatgccttaccttatgacctgaaatggtacaacaaaccaccaataacgtcaagttgatccaaaaaggatgacgaccgctcacagttggcagaattgttttacgattagaagaggaaagatctgacattcgcgttggtgatcatgtattcttgaaagtcactc

SEQ ID NO: 3214 - DNA, 362 bp, Glycine max
  unsure at all n locations
taagatcctaagtgctgatagtataatacccttatgtatctaatctttgcttaacctttntgcactctactggccaggttctttaattcctttagactgagagagctaacagcatcacgaaggatgtgcctggaatgcaaaaaaatgacattgaatntttcatttcaatggagaattctactgaataatatttttaacagaatgtaacattgacctatttggattctgaatgtctctgatctgtctttttaatttggatatgttctgataaaactgttattcataaaaagtgtcaaccagttagagaaaccttgtggaggagcagtttttcaactaactgcagttgataccatttgttctac

SEQ ID NO: 3215 - DNA, 444 bp, Glycine max
  unsure at all n locations
tactcagcttgacaattaacacatacttaactcgatgtcttattgtgtcccgtatatatcgagatacctaaaattcagaacagaagctattagaaaaaatcaacgacgatgactttttacacggatgtncgattgggtcccataatatgtcgagacgcttgaaattgaaaacagaagctttcaagcaaatcaaaagacaataactttttactcgaatgttcgagtgagtcccataatatatcgagacgctcgtaattganaacagaagctcagaggaaattcaaacgacaataacttttgactcanatgtccgcttgagtcccgcactatatcgagacgctcgtaattgaaacagaagctctgangaaattcaaacgacagtaactntttactcgtatgaccgattgagtcccataatatgtcgagacgctcgtaattgaaaac

SEQ ID NO: 3216 - DNA, 264 bp, Glycine max
gtcttttaacccagagaatgggtttgggtgcacatgaaaaaagaaagatttccggaacaaaggaaatcaaagcttctaccaaggggagatggaccatttcaagtgcttgaaagaatcaatgacgatgcttacaaagttgagctgcccggtgagtataatgttagttccaccttcaatgtctctgacttatctctttttgatgcagatggagaatctgattagaggacaaatccttctcaagagggagagaatgatgaggacatg

SEQ ID NO: 3217 - DNA, 276 bp, Glycine max
agcttcgcatgttcttgacctctcacccccaatctaatggacaaacttatgtattaaaccgtgtcgttcagcaatatttacgggccttcatgcataataagccactctcttgcggcaagttcttaatttgggctgaatggtcctataatacgtcttgacatttaggaacaggggcttctccttacgagatcacgtatggtaagacacctcttactatcccacaatatgttataagaacatcgaaagtggcagccggggatgactttctgactaacc

SEQ ID NO: 3218 - DNA, 390 bp, Glycine max
  unsure at all n locations
taaaaattcacttacgagccctctcgatatattaccggactcaatcaacattcgagaataaagttattggtcgttgaattttctcagaggttcaacattccatttcgatcgtctcgatatattacgggactcaatcagatatctgagtaaaacgttattgtcgtttgaattggctcagaggttcaacattcaatttcgagcgtctcgctatattacgggactcaatcagacatccgagtaaaaagttattgtcatttgaattgactcangagctctacattcaatttcgagggtctcgatatattacgggactcaatcagacatccgcgtaaaaagttattgtcgtttgaatttgctcagaggttcaacattcaatttcgagcgtctcga

SEQ ID NO: 3219 - DNA, 446 bp, Glycine max
agcttcaacatcagaccacttccagggtgctggtactacttcacatggatttgatggggcctatgcaagttgaaagccttggaggaaagaggtatgcctatgttgttgtggatgatttctccagatttacctgcgtaaactttatcagagagaaatcagaaacctttgaagtattcaaagagttgagtctaagacttcaaagagagaaagactgtgtcatcaagagaatcacgagtgaccatggcagagaatttgaaaacagcaggttcactgaattctgcacatctgaaggcatcactcatgagttctctgcagccattacaccacaacagaatgggatagttgagaggaaaaacacgaccttgcaagaagctgctcgggtcatgcttcatgccaaagaacttccctataatctctgggctgaagccatgaacacagcatgttac

SEQ ID NO: 3220 - DNA, 440 bp, Glycine max
  unsure at all n locations
tccacatacttgatacccattctacattttcagcttacagatctaactatctttcanggcccagatagaccaaattggagagattcccaatctgagatggaatcttccccatgaatccaacataagagaggtcgaggtgagtcaaagaggtcattgcacaaaggaaagaaggaattgccataccttcaaaataattgtcgctcaagtcaagatatcgaagcttagagagattcccgatctgagagggtactgttccgtangcaacatatctcangtcaagatacaccanatntgagagattcccaatctgaggaggaatcttccccctgaatccagtaagagagaggttgaggtgagtcaangaagtcattgtcccaacgaaagaaagaatngacataccttctccaagaaatccattgccgctcaagtccaagtaattc

SEQ ID NO: 3221 - DNA, 451 bp, Glycine max
  unsure at all n locations
agcttatcggagatggagctntggtggagagattagtccttgtttggctgatttaaagcatttgaattacttggacttgagcggcaattatttccttggagaaggtatgtcaattccttctttccttgggacaatgacttccttgactcacctcgacctctctcatagtggattctatgggatgattcctcctcagattgggaatctctcaaatttggtgtatcttgacctgagatctgttgccaacggaacagtaccctctcagatcgggaatctctctaagcttccatatcttgactcgacctacaatcatttacttggagaaggtatggcaattccttctttcctttgtgcaatgcttgactagtagtagtagctagtgaccaaacctaattcgtattatcatagccatcatacaaacctagctcacactgntcacttgcatccatat

SEQ ID NO: 3222 - DNA, 463 bp, Glycine max
  unsure at all n locations
tccnctgcaccanatagctntttctatanatagtgatgtaagctccattgtagcttgtatgcctaggatcttcttcatcaatggattcctttgcttcttggaagatgaatggtagtggaatggagaaggaagagagagaggagatgccacttcaaggagaagatgagtctataagaagctcaccaccgtaagaggccatggataagagcttggaggaagaaggagatgaatgaagggagaggaagagaagagcacaaaattttgtgctctaaaagagctctgaaatctgaagtttaattntcaaatgatcaaagttgaaaaaatgcacacacatgacctctatntatagcctaagtgtcacacaaaattggagggaaatttgaatttctattcagatttcacttgaatttgaaattgaatttgtggagccaaattttggatccaaaattcactattatgatag

SEQ ID NO: 3223 - DNA, 416 bp, Glycine max
  unsure at all n locations
agctagaaggcaaactggatgcattggttaacttggtaacccagctggccttgagtcagaaatctgtacctgttgcaagggtttgtggtttgtgctcctctgctgaccaccatacagacctttgcccttccatgcagcaacctggagcaattgagcagcctgaagcttatgctgcaaatatttacaatagacctcctcaacctcagcagcaaaatcaaccacagcagaacaattatgacctctccagcaacagatacaaccctggatggaggaatcaccctaacctcagatggtccagccctcagcaacaacaacaacagcctgctccttccttccaaaatgctgctggcccaagcagaccatacattnctccaccaatccaacaacagcaacaaccccagaaacaaccaacagtt

SEQ ID NO: 3224 - DNA, 393 bp, Glycine max
  unsure at all n locations
gttgtaaaaaggaaatcaagttaaaaactctgtttaaagcagatatgttgtttctacttcaaaaccccttgaactacttcacattgatttatttggtccctctagaactatgagtntaggtggaaattactatgtctcggtaattgtggatgattactcaaggtttacttggaccttgttttcaaaaacaaaaaatcaagcttttgatgtttttcgcaaacttgccaaggtgatccaaaataaaaaaaaaggtctttacgttgtttcagttataagtgatcatggagatgaattaaaaatgagtcttttgaagacttctatgaagaacatggaattcaccacaatttttcagccccaagaatacctcaacaaaatggtgttgtggagaggaaa

SEQ ID NO: 3225 - DNA, 405 bp, Glycine max
  unsure at all n locations
tctcatatattatgcccctgaatcggacttccgtttgaaaatgttataccatttgaatttctcgagagctttggttgttcaatntccaatgtctcgatatattatgcacctgaatncgattgtcgtgagacaagttatgaccatttgaatttctcgacagcatgcgttgttcaatttctagcttctccatatattatgcgcctgaatctgacctccgtgtgacaagttatgaccattggaattgctcgagggcttccgatgttcgatttcgagcatctcgatatattatgtgcttcaattggacatgcgtgtgacaagttattgaccattgaatttttcgagcccatacgttgttcaatttcagcctctcgatatatatgcacctgaatcggacttaatgtgaca

SEQ ID NO: 3226 - DNA, 410 bp, Glycine max
  unsure at all n locations
ntagttntcatgttgttcatgttgctcttcttatctctaacattatataaaaataatattcagatnttagagtttatctaaagcttaagtttatggaatgtaacatgaacaatcaaaacctattactccgttccaaaactataaatgctctacaaattcaacactaaattcatagtcctttctctattatacccttgtttacagttatcagtgcattgaatattttttgtcaccaatagctaaccatttatcaatgagaatattcacttaatattgtctctagactctacggtatctaaatatntgtggttaatggtgattccaacaacatgattaaataggaatattttagtctaaagttttatcaattaatatntagtaatgggtgtgcactaaccttaaacatatat

SEQ ID NO: 3227 - DNA, 385 bp, Glycine max
  unsure at all n locations
agcnttcttaagaagattcgtaaagaagctagagcttagctacacatacctctctaatagctaagctcacctccttgagatgagaagctagagcttagctacacacnccctataatagctaagctcacccccatgacaaaaaacatgaaaataaaaaaaagtccttattataaagacaactcacaatggcccgaaatacaacgctaaaaccctatactactagaatggccaaaatacaaggccttgacgaaggaaaaacctattctaatatttacaaagataagcaggctcatacttagcccatgggctcgaaatctaccctaaggctcatgagaaccctagggtctttccttggatctctancccaatctacttggagtcttct

SEQ ID NO: 3228 - DNA, 446 bp, Glycine max
gttgatctcctttgttccggaaacctttcttttctcatgtgcacccaaacccaatctccgggttcgaagacaaccttctttctccctttgttggcttgtttagcatagcttttatttttcctctcaatttgatctttgactctctcatgaagcttcttcacatagtccgcctttgcttgaccttctttatgcttaaaaacagaaacattaggcataggcaaaagatcaagaggagttagtgggttaaaaccataaacaacttcaaaaggagaacaattagtggtgctatgaacagctctattgtaagcaaattcaacatggggtaaacaagcttcccaagtttttaagttcttcctcaaaactgtcctaagcaaagttcccaaagtcctattaacaacttccgtttgcccatcggtttgtgggtgacaagtggttgaaaataacaa

SEQ ID NO: 3229 - DNA, 458 bp, Glycine max
  unsure at all n locations
cgcgctngagcctggttgtggttcgttttccctcattcccccatcgacccgtcgagtcgctatgcaacatgatatgaagtagtagggtggttctaaagatttgctagcttagccctcagggaacagaggaagagtttaggcttggcttgagaagtagggtcattctctgaaatgttattaataaatttcaatatggagctgtacccaaggtgagttagatcaatntaatttaatttgcaattntattggctccagttttggttatttcgttattgtatgttacaatgtattatcttttaaggtggtggagtcccgttgattctgcactgaaccatgatggagcaccattaacgacatatcagtattttgaaaatatgatgaatttcctggtgcatctgtccaagaaattggacttccttccttccttccttcctttgagacatctgatctgaaacaag

SEQ ID NO: 3230 - DNA, 272 bp, Glycine max
catgcaagcttatcattatatctaagctagagagatcacctgacagattattgtgagagagattcaatgtttctaagctttttaattctccaaacgttgaacgtattgctcctctcaaagaatttccactaagatcaagacttgtaagaaatttcagttcgcccagctctgaaggaatatttccctgaaatttattttggctcatactcatgtccaataaatagagcaaatttccaagttgttctgggattaacccacacaaattatttgat

SEQ ID NO: 3231 - DNA, 475 bp, Glycine max
  unsure at all n locations
agtccactntagcttcttgccatcaccttgaatttctggaaaactgagaacacctcatcttttgccttgatcaagtatgcccacatcattctgctatgctcatctacaaatgatgtgaagtacttgttcccacccagttatggtacctcaaaaggaccacacacattagaatgcacaacaccaagtgcactggaagctctcattggcaaatgggaattaaaggaatttcttggttgcttgccaatgagacacacatcacacaccttctctggtacatttaattttggtaaacctataaccatattattagttactaacatattcaaacttttgaaatttaagtgaccaaacctgagatgccaaagccagctcaattggttgatctttgtagccattaaacattgtacttctgctgccttaatgttggcttgaaaggttctatttcttgagagtggagatatcaagactagcttca

SEQ ID NO: 3232 - DNA, 457 bp, Glycine max
tattctatgtgatttaccaaccacacaatgatcacaaaattcaagtttatctagtttatcaccacctagtagattttgtttctcaagttcatgtaatcctctttcactaacatgacctaatctcaaatgccaaagttttgttttatcaatcaaagtattactagctaccgatgcatgtccaacaatagtggaaccttcaagaataaacaagccattacttttattcttgttacccttagctatgattaaagatccatttgaaatcttaagaacaccatttaaaattctagttgaatatcctagatcatcaaacatgtttatggaaataagatttcttttgagttctggaatgtaccttacatttttcagtagatactctctattatcaaacatcttcaatctcacaattccaatgccttgtaccttgcaggggtagttgtctcctagcagtacagct

SEQ ID NO: 3233 - DNA, 432 bp, Glycine max
  unsure at all n locations
tgtatcacattcaaacgacaataacgttntactcggatgtttgattgcgtctcgtaatatatcgagacgctcgaaattgaaaacggatgctcgtagcacatgcaaaccgcaataacttttaactcggatgtatgattgagtaccataatagatcgagacgctcgaaattgaaaaaagaagttctgagcaaattcaaacgactataactttctactcggatgtctgattgagtcccgtaatatatcgaggagcacgaaattgagaacagaagctctgaccataatcaaaccacaataactgtatattcggatgtgcgattgagtcccgtaatatatgaagacgctccaaattgaaaacagaagctctgaacaaattcaaacgacaataactttgtactcggatgtccgattgagtcccgtaatatatcgagac

SEQ ID NO: 3234 - DNA, 345 bp, Glycine max
  unsure at all n locations
agctntgagccaattcaaacgacaataactntctactcggatgtctgattgagtcccgtcatatatcgagacgctcaacattgaatattgaagctctgagccaattcaaaccacaataactctttactcggatgtctgattgagtcccgcaatataacgagacgctcgaaattgaatgttgaagctctgagctaatctaaacgacaataacttttttctccgatgtctgatcgagctccgtaatatatcgagacgctcgaaattgaatgtggaatctctgagccaattcaaacgacaataactctttactccgatgtccgatcgagtcccctaacatatcgagac

SEQ ID NO: 3235 - DNA, 460 bp, Glycine max
  unsure at all n locations
tatgctgcanatatttacaatagacctcctcaacctcagcagcaaaatcaaccacagaagagcaattatgacctttccagcaacagatacaaccctggatggaggaatcaccctaaccacagatggtccagccctcagcaacaacaacagcagcctgctccttccttccaaaatgctgctggcccaagcagaccatacattcctccaccaatccaacaacagcagcaaccccagaaacagccaacagttgaggcccctccacaaccttccctcgaagaacttgtgaggcaaatgactatgcagaacatgcagtttcagcaagagaccagagcctccattcagagcttaaccaatcagatgggacaattagctacccaatcgaatcaacaacagtcccagaattctgacaagctgccttctcaagttgtccaaaatcccaaaaatgtcagtgccatttcat

SEQ ID NO: 3236 - DNA, 330 bp, Glycine max
gcttgatctttagttttatctttaatctttaatccctgaatgaactattcaagtttgtaattcgaactttaattatctcttaattcgctcctaaagatagatcgccaaatctgttgctaactgcacaataatctgttaaagatataacagatttatgtgtccagtatttccggcaggatgtcctggacattgtatccgacatcgtggatcctgcacaatctgttaaagatataacagatttatgtgtccagtattttccggcaggatgtcctggacattgtatccgacatcgcggatcctgcaccttcaattcttcatttgacattttat

SEQ ID NO: 3237 - DNA, 471 bp, Glycine max
  unsure at all n locations
cttgtaaagactaananactagatggagatatgatntatgactttctctntgtttttaagtcaaaaaccagaactaaccatctaatctgcactactacattaatgttctttttaaccatgagatttatacagggtaccgggaaaaaatatattaagttaaattcctttataaattctgtagttttgttaaaattttaaatggagggacattggaatgaatttatttagacttataaaaatcacttggggttcttttataattnttttaactcatttcaataaatttaacgattattctaataaataatttttcaataaaaatttattgaaaatgtgattgattatatataaaaaaaaaatatgtcttaaaccagcaatggttaaaaggttttaacaagatcctatatttatacaattnttaattagattcctaaccgctatcgacatgtttgaaattctttaataaataat

SEQ ID NO: 3238 - DNA, 471 bp, Glycine max
  unsure at all n locations
cacgtgccanaccacctcctcaggtgttgccacccaagcctccactcaccaatttctccatttataccctcattaccaccaccttaaaccctaccacattaattactcactcttcactcaaaactcttgtctttcattttgataattcccacactatggctgagcttcactaccaacaacaacaccaataccctcaccgataccctaatgatccatacgaacaacaaactagctactccactcaggtcgtcaaggcggccaccgccgtcaccgcgggcggctccctcttgatcctcgcctcgttgatccttgccggcaccatcatcgccctcaccatcgtcacaccaccgctcgtcatcttcagtccggttctcgtccccgcggtgatcaccgtcgcgctgctgagcctgaggttccttgcctncggcgggttcggtgtggcggcgaccacngtgctggcgtggatctaca

SEQ ID NO: 3239 - DNA, 236 bp, Glycine max
tatagaaagttcgttcctaatttctctacaattgcatcacctctcaatgagctggtgaagaagaatgtggcatttacctgaggtgaaaaacaagagcaagcctttgctttgctcaaagaaaagcttactaaggcacctgttctagctcttcctgacttttctaaaacttttgagctagaatgtgatgcctctggagtgagagtaggaactacgatcaacaaactagctactccact

SEQ ID NO: 3240 - DNA, 445 bp, Glycine max
tgagggagaatgttgagaagtaaaaatatttaatgtatagatctattatgatccgatttagaggaaaatgaatatcctttcattatcattggtatctattgtaatgacctatataattagaatggttctgttgtgtacttttacactaattttagtctattattcctttatattacttttattttacaaaattgattgagtccagaattaatttaggctgaaataattttaagtagcttttgtgttaaatcagaaaattaatatatttgatatagcatatgataaatttatgattagattatagtgtaaaaatgtacacaactgcaagaattatttattcttgatattgttacaattttaagaaactcttgcaatatttccttatagaaaagtcttgctattgtgttggtgtaaaaagtgagttattccaaaccaaaagctgatt

SEQ ID NO: 3241 - DNA, 436 bp, Glycine max
  unsure at all n locations
agcttgactcattacctatcatagactttntttaaaggctcgactcggcttacctaanagtctggcttggcctacgagcctatntaaaaatctgcttaaagacgtctctaatcaattaattgttttaaaacctagtaaaatactaacaaaaaaaataaacttataaaatttcgtataagtaatgtacaaatccaaaaataatgataaacaaaatcatattgaattcaagttattaaaacataaagtatatcaaaagaaaatgaaaaaaaagaacataatattaaaaaaatatatggattagagatgatctatactaatatagccaaataaaaatatttaaattgtctgaaaatgtctttacaaaacattnttttctttggaagtattaatcctgatgcattatctttctaacttaagtcttttctttttgaaaatt

SEQ ID NO: 3242 - DNA, 469 bp, Glycine max
  unsure at all n locations
attctttgtgggttgatgggttctgtcgcacagaatggcgtgatcactggctgacatattctcaattagctcagttgcttcttccggggtcttcagctttatttttccccatgtcgaagcatctagcagttgcttggtttgtggtctcagcccatctatgaacatattcaattggattggctctgaaaacccatgggtgggagttcttctcaataaacctctgaacctctctaatgcttcacttagagattcatcagcgaattgatgaaattaagagtttgcagctttcccttccgcagtcttggactctgggaagtatttctttagaaacttttcaacaacttcttcccatgttttcagactgttacccttaaacgagtgaagtcacctcttggcctctcatgctaatgagaatgagaataggttgagtcttatagcttcatctggcacaccgaanatcttaacaatg

SEQ ID NO: 3243 - DNA, 472 bp, Glycine max
tatatcaaggaataggctaaaaccttcgatgagatctccttccatcatgttccccgcgaggaaaatcaaatggcggatgcacttgctactttggcgtctatgttccagctaacgccgcacggagatctaccctacattgaattttggtgtcgtggcaaacccgcgcattgttgccaagtagaagaggaacgggacggaaagccttggtatttcgacatcaagcgatatgtcgtaagcaaagaatacccgccagagattgccgacaatgataagaggacattgagaaggttggcaaccgatttcttcatgagcggaagcatactgtataagagaaatcacgacatgacactcctgcggtgtgtggatgccagggaggcaaatcacatgatcgaggaagtccatgagggctcgtttggaacgcacgccaacgggcatgctatggctaggaagatccttagagcaggttattact

SEQ ID NO: 3244 - DNA, 396 bp, Glycine max
tcataagagagtcaaaacatcaaattgagaggagaaataaaagctatgctaaacaagccaacaaagggagaaagaaggttgtctttgaacccagagattgggtttgggtgcacatgagaaaagaaagatttccggaacaaaggaaatcaaagcttctaccaaggggagatggaccatttcaagtgcttgaaagaatcaatgacgatgcttacaaagttgagctgcccggtgagtataatgttagttccaccttcaatgtctctgacttatctctttttgatgcagatggagaatctgattagaggacaaattcttctcaagagggagagaatgatgaggacatgaccaagagcaagggcaaggatccacttgaaggacttggaggacctatgacaa

SEQ ID NO: 3245 - DNA, 449 bp, Glycine max
  unsure at all n locations
gctattacggacctatgaaactcagcttanaaatatatgtagaacataacaagctagaagaataaatggaagttaattatattntcttaaaatcttattttattatttgatgtagctccatgtagagcttgtaagcattgaatctttcttatcaatggagtcatttgcttctcaaagatcaatgacaacggaatagagaatgagaaaaggttatttgagacgccacttcaaagagaagatgaatcaagaacaagctcactagcatatgaaaccatgaataagagcttgaaggtaggtagaagaagatgagtggagggaaaaggagagggggacatgaaatttatgcctcanatgaggtctgaactttgaagtgtaatttctcaaattatcaaagttgaaaaatatacacacaagacctctatctatagcctaagtgtcacacaaaatta

SEQ ID NO: 3246 - DNA, 460 bp, Glycine max
  unsure at all n locations
ctattacggacctatgaaactcagctatcctacaaaacaggacatccttactttatatatgcagaggactaagcagacaaaatcaccgaattaactttcatatggattctagtcacagcccaacgattcactaccttgaactaacatccatataagacacaaactgcaccctctgaacacacatgatcttaaccctaacgatctacattgagcaagcttaagcagtgatcaaacttgctctttggaactggctgtgtaaacatattagccggattgtgcagagagataatcttatgaactttgattcttctttctgaccgaatgaagtgatatctaacatctatatgcttggttctatcatgatgaacctaatccttggccaagcatatagcactaaggctgtcacagtagatgttagcatattcttgattaatntcgagatcatttatcagacctctca

SEQ ID NO: 3247 - DNA, 369 bp, Glycine max
  unsure at all n locations
tgaagagcctcctcaatcaaactgaaaaacctatattcctcaatgaagttagcacccatcttttcataaaacttgatggtgagaatattccaatcaagcataacccacttgacccttatgcaccccatttttatggcttgctntgccaccacagagagcaacattctcccaagccccttcgtcttataacactccctcaagaacaagttctccatgtaaaaccctcgcttctctagaacgagagagaagttccgagaaaacaagacaaacccaacaatggaaacacctttgagggtttttaaatcgtagtttctcgagataactattacttaatgggaataataaatgaataattaataattatggact

SEQ ID NO: 3248 - DNA, 405 bp, Glycine max
  unsure at all n locations
agcttacactgattgacaatccgtaaggttagtctttatgacttatacggattgttaaaaatatgttttagaaaataatttaaaattaatgatccatacaggtctcaaacctgtgtgactctcatgttattatcataacactctaatcaactcaatgaataggtcaattatgttaaaaaataattagcgtcgctatatataacattaaaatttttaatgtatatttaatttacataataaattttgtaacaattatttttgatctaataatgtttttttacatatataaattctaaataaaaattatacggttaatgaacatctatatatgtaaaaaatacattattacaataaaacttattattacacaatttattatatnaacttatatgtgtattaaatata

SEQ ID NO: 3249 - DNA, 420 bp, Glycine max
  unsure at all n locations
gctttaatactttgaaatagaaaatgacgtctgcatccataatcactactccaaattggacactagattttgaaataatgtgtgatgcaagtgattatgcagtaagagcggttctgagtcaatggaaaaataaaatttttcatgtcatacactatgcaagaaaggtattaaatgaagctcanatacattatgccacaactgagaaagaattgctcgcaatagtatatgctttggaacaatttacatcttatttgataggatctaaaattgtgttttttactgatcatgctgctataagatatctgttagttaaagctgattctaaaccctaacttattaatggattctattattgaggaatttgatttatagatcaacgataaaaagggaagtgaaaattatgtacctgatcatctgtct

SEQ ID NO: 3250 - DNA, 405 bp, Glycine max
  unsure at all n locations
gcatgcaagcttgctnctncaccttctctaatagcccacaagagatcttcctccatggctctcctatcaaggatttggccatttgcatcaactattcttgcatctacgacattgtcagctncaaggccatactttctcatcatggatccatatgcacctcccgtgatgtgccctccaacacctaaacttgtgcaaaggcctgcagggaaaccatgaaccgaacttttctcatatattttgtaatagacctccccaatagtggcancggcttgaatccaagcagtgttgtcttctatatcaacgttgacggcgcgaagctttgacaaatcaacaattatgaaaggggtctcaacttcagaaacatatgagagtccttcatagtcatgggcaccgctacgaattctc

SEQ ID NO: 3251 - DNA, 317 bp, Glycine max
agaatcggacatccgtgtgagaagatatggcctatctgaatatctccagagattctgatgattgagtttcgagcgtatcgatatgttataatcctgaatctgacatccgcgtgaatagttctgaccgtttagatttcaccagagcttgcgtcgtcaatttcgagtgtcactatatgtgatgcgcctgaattggacatccgagttaaatgttatgaccatttgaatatctcaagagcttccactgttcagatttgagcgtctcgatatgtgattcgctcgaatcggactctcgtgtgaaaagctatgaccattataat

SEQ ID NO: 3252 - DNA, 239 bp, Glycine max
agcttcaatgtttaatttcgattgtctcgatatattataagcctgaatcggacctacgtgtgaaaagttatggccattcgaatttcttgagagctctcgttggtcaatttccagtgtctccatatgtgatgcaaacgaattcgacacgccggtgaaaagataagaccatatgaatttctcgagggctttccctcctaaaattcgagcgtctccatatattctaagcctgaactcggaca

SEQ ID NO: 3253 - DNA, 445 bp, Glycine max
  unsure at all n locations
tcttgagctnggtatgaaaagttaagttcngttttaattgaaaatggctntataagaggaaaggtaaatactatgctatttcagaaagattatggaagtcaaatcctagtcgtcaagatatatgtggatgataccatattcagtgctactaatgacttgttgtgcgaggatttttccaaacttatgcaggcagagtttgagatgagtataatgggagaattgaagttctttcttggacttcaaatcaagcaaacaaacaatggcatatacacacatcaaaccaagtacatgaaggaacttctgaagaagttgaagatggatgatgaaaaccaaatgaaaacacttatgcatccaaccactgtacttggactaggcaaagaatcaaagcgggtggatgaaaagacatacaaagaaatgataggatatcttttgtatgtcattgagt

SEQ ID NO: 3254 - DNA, 157 bp, Glycine max
catgcaagcttataatatatcgagcgcgctcgaaattgaacaacggaagctcttgagaaagtcaaatggtcataacttttaactcggaggtaattcatgcgcctcacatatagagacgcttaaaaatgaaccaccgaagctctcccgaagttaaaat

SEQ ID NO: 3255 - DNA, 461 bp, Glycine max
aaacgttcagaaactgctggtaatcgattactatatatgtgtaatcgattacacagtgcaaactttgaattcaaattttaatagctgttgtaaatcagttttggccactggtaatcaattacatcctctggtaatcgattaccagagagtaaatttgttaaaaaagactttttaacttaaaattcttggccaaaccttttgctacttcaattggaattctcttcctatttaatataccctttctaagactctagagactgtcttgatcatccatcttgaatatctttaatttctttgtcttgaataaagcttttagactttgagacgcatgtgaaactttggcatcatcaaaacattcagctagatcctttgtctacaaaagtgtgacagagagacaggtgcgatcatagttctggatgacattgcttctcagcagcatcctccccagcgatcataattct

SEQ ID NO: 3256 - DNA, 432 bp, Glycine max
tcaacattcaatttcgagcgtctcgatatatggcgggactcaatcagacatccgagtaaaaagttattgtcgtttgaattggctcagaggttcaacattcaatttcgagcgtctcgatatattacgggactcaatcagacatccgagtaaaaagttattgtcgttggaattggctgagagcttcaacattcaatttcgagggtctcgatatattacgggactcaatcagacatccgagtaaaaagttattgtcggttgaataggctcagagcttcaacattcaatttcgagggtctcgatatattacgggactcaatcagacatccgagtaaaaagttattgtcgtttgaattggctcagaggttcaacattcaatttcgagcgtctcgatatattacgggactcaatcagacatccgagtaaaacgttatt

SEQ ID NO: 3257 - DNA, 393 bp, Glycine max
tgtagtcccgggatctctaagtcacctgcggcatgcaagctttgagccattacacgacaataactctttattcggatgtctgattgagtcccgtaatatatcgagaccgtcgaaattgaatgttgaagctcttagccaagtaaaacgacaataacgttttactcggatgtctgattgagtcccgtcatatatcgagacgctcgaaattgaatgttgaatctctgagccaattcaaacgacaataactttttactcggatgtctgattgagtcccgcaatatatccacaccctcgaaattgaatgttgaagctctgagccaattcaaacgacaataactttttactcggatgtctgattgagtcccgtaatatatcgagacgctcgaattgaat

SEQ ID NO: 3258 - DNA, 336 bp, Glycine max
catgcaacttcacgatgtgtactccctcggctgctgactagcagagtatacggccacggaacaactactacaaggtatgaaactacatgagagaaaaaggttcttacaagacaccactaagtatgtgcgggacgaccctattcttttttgcattcgttttgacagaccgtcaaagcgatgtctaacaaaagaagaacaagctatcatactttggcattgccataactcaccacgacgaggccactttaactgagatagaacaactgcaaagatccttcaagaaacattatattggcctacattctttatagatgcttatcaccatgcacgatcatg

SEQ ID NO: 3259 - DNA, 457 bp, Glycine max
taagctccttcaactgcacaaggctcttaatatttgaagagtatccttgcggaaccttcacccgacgaagacactgacaaaaacttatcttctacttcttggacaaagtatggcaagctgggggcaagtaaattttcttcccatcagaccttggatgcaactgtgatcttatacccatatcagctagatcttgacgggtattcaagccatccttcgtcgtgccttgaattttaaggagcgtcccaatcacactgtcacaaaaatttttctccacatgcataacatcaatacaatgtctaacgtcaagatcacaccagtatggaagatcaaagaaaatggacctcttcttccatatgcaactctgacttttatccttcttttgggtcttcccaaatacagtgttcaggtgttgaacccgctgatatacctgctcaccagtgaacagtatcggcgcaat

SEQ ID NO: 3260 - DNA, 298 bp, Glycine max
  unsure at all n locations
ttccacaattttagtcgtgctatacgagacatcttgccaacagagtcaggttaccataactcgcatgtgcttttnctttcatgccatatgtagcaaagtccgtgatcctatctagtttgatgagctggaaaatgacgccgcaattatactgtgcttagtggagatgtattttccccctgcttttttgacatcatgattcacttgaatgtgcatctgggcagagaaatcaaatgttgtggtcttgttatctactgtggatgtacccgggtgagtgatacatgaagatcttaaaagggta

SEQ ID NO: 3261 - DNA, 327 bp, Glycine max
  unsure at all n locations
agcttaattattttcactcagaatctttcattatctatatccctaggatgagaatttgcagagtttcattaccattaatgggtggctccgtgatttcttatggacccacataattcagtcttatggttctttattatctgcatatggtctctctttcttgagtgcacattctgtatgggcttttaatttaatgtttctattcagcgggcggggttattggcaattctagcatatggtttntggcacaataatatgcaaagaaaatctcttatgctatgtgtttattgattatgaagatcgatgatatgatcttcccttaacgttcac

SEQ ID NO: 3262 - DNA, 356 bp, Glycine max
tcttttcttttagaagatggtttttaatatgaaagacaaagttgatacaactcatttcagaagagaagtacgcaaaatttcattataattcaaattcatgtagatgaaattattttttgagttactaatgaatctttgtgtagggatttctctaatcctatgaagaatgaatttgaaatgagcatgagatgagaacttaagttcattttgggacttcaatcaagaagtatagcaaaggcatatatattgatcaataaaagtacactaaaaaacttctgaagaagtttaagatggaaggtgctaaacctatgaaaacccttatgcatgcttctattcctctgagcaaagacaaatat

SEQ ID NO: 3263 - DNA, 446 bp, Glycine max
  unsure at all n locations
agcttcaagaaaaacatggcctcagcaaactccttatttccagaagggaattctatcaatagacctccaatctttaatggagagggttaccattactggaaaacccgaatgcaaanttttattgaggcaatagatctaaatatttgggaagccatagaaatagggccttatatacccaccacagtggaaagagtttcaatagatggtagttcatcaagtgaaagcataactatagaanaacctanagatagatggtctgaagaggatagaaaacgagtacaatacaacttataagccaaaaatataataacatctgccctgggaatggatgaatatttcagggtttcaaaattgtaagagtgctaaggaaatgtgggacactcttcgattaacacatgaaggaactacagatgttaaaagatctatggataatgcactaactcatg

SEQ ID NO: 3264 - DNA, 322 bp, Glycine max
  unsure at all n locations
agtgaccataagagccctaaatatttgtttgatcaaaaagagctttacatgaggcagaggagatggttagagttctttaaggattacgattttgagcttagctatcatctatgtaaagccaatgtagtagctgatgccttaagtagaaaatcccttcaaatgtctgctttcatggttagagagttagacctcttagagcagtttatagacatgagnttggcatgtgagatcacctctagtagcattaagttgggtatgttgagagtcaccagcgaactcttgagcgagatccgtgaaggtcagaagtttgacccattcttgt

SEQ ID NO: 3265 - DNA, 416 bp, Glycine max
  unsure at all n locations
aaacccaacacagcagctatgagcttatcaattaccatcacaagtttagtcaactttcgctgtgatgaatcaatatatagacttatcttcacttgggacttgggtacaccgtggcctttcatggctcctgacactttatccacagactttttcacaatggttttgaaagccaccttactcatattaccttgccgccatgatggtttcaaaacctcccttacaaaaatcgcaatggaaactttgaacaatttcatcgatctggaatccttactctnttttcttttcccacgagacttgacctgattaatctcaacctcccctgaagtcatttttgcaacatccacatcatcacttaagctctcattttcaacagcacctacttctgcatctgctggntcaccatattcatcattatt

SEQ ID NO: 3266 - DNA, 372 bp, Glycine max
  unsure at all n locations
tattgcaaactatttccccaattaaaattctatttcactttcaatgccagttataaattcccttaaaaatgaactcttaaataatgattcaaatagaacaatctgaatataaatataacgcaataataaataaaagagttcaagggaaaagaaagtgcanactcggatttatactggttcggccacacccttgtgcctacgtccagtccccaagcaacccgcttgagagttccactatcttgtaaaatccttttacaagttctaaacacacaaggataatccttcctttgttttcataattcttttacaacaagagaccctcggtctcttaatcccctctgagaatttagaaagaagagaagaatgaatctc

SEQ ID NO: 3267 - DNA, 417 bp, Glycine max
  unsure at all n locations
agctntcaaagtgttccttcgccacatcatatgtggaatacttgggccatattgtgtcttgtcgtggcgtaaagcccgtgccggcgaagatagaagcggtgtaaaattggccaactccccaatctaccagagcattgcgaggcttccagggcttgtcgggattctaccgaagatttattaaaggctattcctcaattgcagctcccctcacgacactgcttgccaaggattcattccactggaactttgaggccaaacatgccttcatgaacctaaagcacaccctatgtagtgcccctgtgttaagcttacaggatttttccctcccattttgtgtggaaatggacgcttccggatcggctgggacggtttgctataaataccgaagcattttacaaacatctgtcactctgtgct

SEQ ID NO: 3268 - DNA, 358 bp, Glycine max
  unsure at all n locations
attcccgaaaattagctntttatgattatatcggaaataatccagcaaaaggggggttatttatagcaggttcaatggacaatggagatggaatagccgtcggttggttacgacatcctgtctttagagataaagacgggcatgaacggtttgtacgtcgtatgcctactttttttgaaacatttccggttgttttggtagatggggatggaattgttagggccgatgttccttttctaagggcagaatctaaatatagtgtggaacaagtacgtgtaattgctgagttctatggtggcgagcttaatggagtcagttatagcgatcccgctactgtgaaaaaatatgctagacgtgc

SEQ ID NO: 3269 - DNA, 433 bp, Glycine max
  unsure at all n locations
gcttctgatctcgataaagctactcaaaatcaattagcaagaggtcaacgattgcgcgagttgcttaaacaatcccaatcagctcctcttaccgtggaagaacagataataactatttatactggaacgaatggttatcttgattcattagaaattggacaggtaaggaaatttcttgttgagttacgtgcttacttaaacacgaataaacctcaattcaaagaaatcatatcttctaccaagacattcactggggaagcagaagtccttttgaaggaagctattcaagaacagatggaactctttttactacaggaacaggtagaaaannaatgattaatcatttaataactttataatttcactttcaaattcttataaattagtatctttaatatctttttatttcatttgaatattatattaatatatt

SEQ ID NO: 3270 - DNA, 398 bp, Glycine max
  unsure at all n locations
agcttaaggattcttagggaactactagagacatcactatcactgccaaactacacacatcagcctgcttagaggtaagggatgagtttatcgcaattgaggttaaaatgaacatatgtagtgatgtagatccatgtgcagcttgtaggccttggatcttcttcatcaatgaagttttttgcttcttgaagatcaataaaaggggaatagagaaggaagaaagacgattagagatgtcacttcaaggagaagatgagtcaagaacaagctcaccatcaaaagaagccatggataagagcttgaaggtangatgagatgagtggagggagaaggagagaangagcatgaaattttatacctcaaatgacgtctgaactntgaagtgtaaatctaaaatg

SEQ ID NO: 3271 - DNA, 359 bp, Glycine max
  unsure at all n locations
agctnggcacttgtgatggtgcgagtttatatatatcttgtttcccctgataattattcacgtaaataagtttatattgagatgataattaggcaaaattctttctatgatttttgttagtaatcaacataattaaagaactttntactattgagggaaatcctacaatatttttataaattttgatcatttagattcattacgtaactaattcttaatttataactttgtcatatctaaagtttattgtttccattcgaacttaaaaatcaaacatacaaattatctttcataacctcaatatgtattatcaaataaattatactttntaactnttttttaagataatagagaaacaa

SEQ ID NO: 3272 - DNA, 365 bp, Glycine max
  unsure at all n locations
agctntgcttctacacttatcagtgatggtgggtcacattnttgtaatgcacagttgcagaatatgttggggcactacaatgtcaagtataaggttgcttctccttatcatccctagacaaatggccaggccgaggtatccaataaggaattaaagaaaatcctggagaagactattacatcctcaagaaaggaatgggctgtgaaattggattatgctttatgggcttatagaactactttcaagactccaattggtttgtccccattttagatggtctatgggaaggcatgtcatccaccgatagagatgaagaacaaggcttactgcgctctcaaattcctcaatnttgatgaatccttatc

SEQ ID NO: 3273 - DNA, 409 bp, Glycine max
  unsure at all n locations
ttcttatcttcatattctagnggctgctacgcatacaccttttcatttatgaatccatttagaaaggaacccttaacatccatctggtatagtttaatgtttttgtgtgttgcataagctaaaagtattatgatggcttcaagtcttgctactggtgcaaaggtttcttcatagtcaattccatcctttngattgtatccttaagtaaccagtctagccttgtttatgactacttcaataatgcccttgactgttaacttgttggtagctcacactctatgacacttcacacggtgacacttcactcaacttctcgttagtcagaatcctctaccagtcagaatccttcgtaagtagtctttttcgagacctagacaatcttctttgactgctttaagagcaatgacta

SEQ ID NO: 3274 - DNA, 403 bp, Glycine max
ctggatgcattggttaactcggtaacccaactggccttgaaccagaaatctgtacctgtcgcaagggtctgtggattgtgctcctctgctgaccaccatacagacctttgcccttccatgcaacaaccgggagcaattgagcagcccgaagcttatgctgcaaacatttacaatagacttcctcaacctcagcagcaaaatcaaccacagcagaacaattatgacctctgcagcaacagatacaaccctggatggaggaatcaccctaatctcagatggtctagccctcagaaacatcagcagaagcctgctccttccttccaaaatgctgctggcccaagcagaccatacattcctccaccaatccaacaacagcaatagccccagaaacagccaacagttg

SEQ ID NO: 3275 - DNA, 313 bp, Glycine max
cgacagttagtgtttactctgatgtcggataaaggcccgtaaaatatcgagacgctcaatattgaaaacagatgcagtcagcaaattcaaacgacaataacttttgactcggatgtccgattgtgtcccgtattatatcgagacgctcgaaattgaaaactgaagctctgagaaaaatcaaacgacaataactgtttactctgatgtccgactgaatcccggaatgtatcgagacgctcgttattgataacagaagctctgagcaatttcggacgagaataactgttgactcggatgtgcgattgagtcccgt

SEQ ID NO: 3276 - DNA, 342 bp, Glycine max
  unsure at all n locations
tgctcaccactactagagggaaatcttttanggtgtttcataaaaacctcctcctctaaatcaccattaaaaaaggatcttttcacatccatttgttgcaactcaaggtcaanatgaacaatttataccaagataatacgaagagaatatttcttagatacaggagaaaaattctctgtgtagtctattccttctttttgagtaaatcccttaacaacgagtcttgccttggatctctcaatgttgcctaatgaatccctttggtcttaaagacccatntacaaccaatgacctttaccctattatgcaactctacaaggtttgaanactttgtactctgca

SEQ ID NO: 3277 - DNA, 416 bp, Glycine max
  unsure at all n locations
agcttctanactntgtacaagaatgaagctctgataccacttgttagacaagtggcctcagatatcttaagaagggggggttgaattaagatattccaatctttttcccctaattaaaaatctatttccctttttactcaagttatgaattcccttaatgacaatcttcttaaatattaattcagacgaagcaactggaatatgaatataaagcaataataaataaaggagattaacggaagagaaaatgcaaactcagttttatactggttcggccacacccttgtgcctacgtccagtccccaagcaacccgcttgagagttccactatcttgtaaattccttttacaagttctaaacacacaaggacaatccttcctttgtgtttagagatcctttacaacaagagactcaca

SEQ ID NO: 3278 - DNA, 437 bp, Glycine max
  unsure at all n locations
tgcagccgtccgtcgcagacatctcaaattgtgcgcactgtttagttaataaaaaggaaaatnttctcttttacaatttgataaaaacaaaaattatgcaaaaaaatgaattaggttatantaattttttttaaaaagaataattcagtaaataattataaaattatatggtttaaagaatttgtaacagtaatgaatgatataatgatgatcattactatcgtgtatatgtaataacataaaaatagatataaaggttttcttagacaactaacaanaaaagataaaagaattttagattgaataaaaggataaaataaaatttcaaataaaatagtatggataatttaaaaaaaaacttataaaataatntattctccataagttacttcaattagtgtatggaaaataaactactaaaataacgttgtgtactt

SEQ ID NO: 3279 - DNA, 318 bp, Glycine max
agcttgtttcttgctattccaagacactatagagcttcctaatatgtggcatgtcccacctgtgtattttctatataatttgcaacctgcacaatccgaatttaaatagcctattataattaaggtggcacctttatgataccacaaacctacattcgtagtgcctttaggaactcaatgatcctttgaatggttgtaaagatagattccttaagagttctctcggtatctttcacataagtaaacacttagtaagatatcctgtctttttgaactcagtacataagtgatccactcccacctttatatcttgactca

SEQ ID NO: 3280 - DNA, 471 bp, Glycine max
agcttgtggatgttctaagacgtaatattggagcgttttcttggagctcaactgacatgctaggtatagatccaaatttcctccatcacaaattggttttagattcctcggcaaagccagtcatccgaaaatgaagaaagttcggagaggataaaataaaagtaattactgatgaaacaaagaagttgatttcagccaaccatgttagaaaaattcaatatttgacttggctggtgaatgtggtgatggttaaaaagtcaagtgggaaatggataatatatggtgacgtcacaaatttaaacaaagcatgcttcaaggattcatatccactaccaaacatcaatcgcctagtcaatggggcatcatgttgcaaatggcttagcttcatggatgtctacttagggtataatcaaatcaagatgcatcccatggacgaaagacaaacaacttttatagttggataatccaatt

SEQ ID NO: 3281 - DNA, 362 bp, Glycine max
  unsure at all n locations
cgagggtctcgatatattacgggactcaatctgtcatccgagaanaaagttattgtccgttgaatttgctcagagcatcaacattcaatttcgagcgtctcgatatattacgggactcaatcagacatccgagtaaaaagttattgtcgtttgaatttgctctaagcttcaacattcaatttcgagcgtgtcgatatattacgagactcaatccgacatccgagttaaaagttattgtcggttgaatttgctcagagcatcaacattcaatttcgagcgtcttgatatattacaggactcaatcatacatccgagtaaaaagttattgtcgttgaattactcagagcttcatattaatttcg

SEQ ID NO: 3282 - DNA, 385 bp, Glycine max
  unsure at all n locations
cgacaataactttttactcggatgtctaattgagtcccgtaatatatcgagacgctcgaaattgaatgttgaacctatgagccaattcaaacgacaataactttttactcggatgtctgattgagtcccataatatatcgagacgcttcgaattgaatggtgaacctctgagccaattcaaacgacaataactttttactcggatgtccgattcagtggtgtaatatatcgggacgctcgaaattgaatggtgaacttctgagccaattcaaacgacaataactttttactccgatgtatgaatgagtcccganatatatcgagacgctcgaaattgaatgttgaacctctgagccaatcanacgacataacttttactcgatgt

SEQ ID NO: 3283 - DNA, 502 bp, Glycine max
  unsure at all n locations
agcttaacattcaatntcgagcgtctagatatattacaggactcaatcaaacatccgagtaaaatgttactgtncgtttaaattgcttagctctccagctttaaatttcgagcgtctcgatatatgacgggactatatcagacatccgagtaaaaagttattgtcatttgaatttgcttagagattcaacattcatcttcgagtgtctcgttatattacgggactcaattatacattcgagtaaaaagttattgtcgttagaattttctcagagcttcaacaatcaatttcgagcgtctcgatatattacgggactcaatcaggcatccgagtaaaaagttattgtcgtttgaattggctcagagcttcaacattcaatttcgagcgtctcgctatattaccggactatatcagacatccgagtaaaaagttattgtcgcttgaattggctcagagcttcaatattcaattacgagtgtctcgatatattacgggactcaat

SEQ ID NO: 3284 - DNA, 446 bp, Glycine max
  unsure at all n locations
atcttcttcatcagtggattccttttcttcttggaagatgaatggcaacggaatggagaaggaagagagagaggagacacaacttcaatgagaagatgaatctagaagaagctcaccaccatatgaggccatggataagagcttggaggaagaaggagatgaatgaagggagagggagagaagagcacacaattttatgctctaagagagctatgaaatctgaagtttaattttaaaatgatcaaatttgaaaaatgcacacacatgtgctctatntataacctaagtgtcacacaaaattggagggaacattgaatttctactcaaatttcacttgaatttgaaattgaatttgtggagccaaattctcactaattatgattagtgaattttagttatggttcagcctactaatccaacatcaagcccaagattcttcactaagt

SEQ ID NO: 3285 - DNA, 438 bp, Glycine max
  unsure at all n locations
gcttatcatcaacatgatccncatttgggtgttcacattaccatttggaatctgtgcttcccaaacctccactttcttcatcaaacaaggtgccatcatgaacagaaatatangcaataatggatttgtggttcccccagcttcaattttcactcttgcagccgttgggatgatactttcagtgaccatctatgacaagctccttgtgccagtgctaagaaaactaacaggaaatgacagaggaatcagcatcctccaaaggattggtattggaatggtcttctcagtcatcacaatgatagtggcagctttggtggaaaaaaagaggcttgaggcagttgaaatgaatggcccattaaagggttctttgtccatgagttgcccttggttggccccacaatttatgatcattggatttggtgatgggtttgctcttgt

SEQ ID NO: 3286 - DNA, 437 bp, Glycine max
  unsure at all n locations
agcttcgatggagaacaaccttatgttgtagagggtacacgcacggagaagaagataacgggagaagaagaaagcgcgagcaaaataggtggcgtctaatataatttaaattgtaagttcaacatcagttttcaatacaaaagtgatgttaacgttaacatcagttttattcaagaaaccaatgttaactaatcatacattaacatcggttttcagaaacccgatgttaaagtaacttcgttaacatcggttttcttgaaacccgatgttaacgtatatacattattcacaattatgccaccacatttatcttaacatcatntttaaaaaaaaaaaaactgatgttaataaagtctccttatttaaccatttngccaccgtgttttgttaacattgattttatcaaaaaccgatgttaacttaacgatgttaaatgt

SEQ ID NO: 3287 - DNA, 568 bp, Glycine max
  unsure at all n locations
agcttgtattgaacactacttatatatatatatatatatatatatatatatatatatatatatatatatatatatatatatatattaaagaaactaattngtgtacccaaaaatatgactataccaaaaaagtcactaattcaaaaataaataagtctcattaggtaaatataataaatttaattcattaaaaacttctttaggtgtgatatacattcattcactaaatatatatatttttttttcaaaaatgataacatatatgtcagagtgctcaggattcttcctagtgcatcagtgaatgcttcttggcaattatgtntcctcttcataatatgttatgtatgtttttattacactaataaaaacaattattaaaaaaattattnttcaatatcaatgagtacaaatgaattatgatgtaaaaaatacatatattttttagaaataaatactttaattcgtatcattataaacgtggaaaaaaataaatacctatatagccatgtgttaatatacaagacagtgaggagaaaataaatgtgtaaaagaatatatacatatttaa

SEQ ID NO: 3288 - DNA, 603 bp, Glycine max
  unsure at all n locations
aaagaaaagcatatagtccatgcgttcaagtttagttttaacatggcacttttacttcgtataatttttcgtttgttttaatgttattacttattagactaagattcgctaagtctcatatntaagttttatgaataaaaagatgtataattaaaagaaaaaatttcattaaaaatgattgaacttgtcttagatgcatngttgcatttgttggaaacaataaccacaatgaaatttaaacttaaaatttcgtacacatttcctaaatttatcaccactaacctaattctaatagttttcttttacataaatatacattgataaagcttcgatacttaattaagtatttagaagacataagagttattcttaatgacttttatacttcaaacgaatatcttatataaagaaaatagaattggttttatatattaagaaatatttatatttttctacttatctataactaaatactcatatcttacataaaagtaatcgttttattcttatttagttaatgagctacaaaaaaagtgcagatattgtttaaaactcgctgatatgagtggttactagaatacctctactatgatagatcatctg

SEQ ID NO: 3289 - DNA, 333 bp, Glycine max
  unsure at all n locations
ttagtccagacttctaatgctcttaatctctcctcgtctaaatcaactaactcatctgacatcattttccaataatggtcgatcggaatgtccatttgtttttgtactctagctgattgcaaatgtatttcgaccggaagtatagcatcgtgcccataagtcagtcgaaatggggtagtattaagtgattccctatgagaatttctacatgcccatagaacttgatctaacgttntattccaatttcttggcttttgggcaatgtgttttttaatcaagttgaatacaatcttattggctgcttcgacctgaccatttgcttgcgcataatat

SEQ ID NO: 3290 - DNA, 510 bp, Glycine max
  unsure at all n locations
agcttccttgtcgaatntcaagcgtcgcggtatatgttgggtctcaatgagacatccatgtcaaatgttatagcggtttgaatatgctccagctttcgtgtctctcgatatttaagtcaaaagttattgccgttggaatatccctggagcattggtctttcatctcgagcatctcgatatgttatgagcctcaatcggaaacttgagtcaaaagttattgcaatttggattntccagtagactccttgttcaatttcgagcgtctcgatatattatggaccgcaatcaaaaataaagtcagaatttatgggaatctaaatttgctgggagcttcgatgttcaatttcgggcgtctcaatatattatgggactcatacagacatccgagtcaaacgctatgctagtttgatntttttgggagattctatttcaatntcgagagtcttaatatgttatggcctgcaatcggatatcatagatagaacttatggccattgataattggctgga

SEQ ID NO: 3291 - DNA, 385 bp, Glycine max
  unsure at all n locations
agcttctaaactntatacaagaatgaagctctgataccacttgttagacaagtggcctcagatatcttaagaaggggggttgaattaagatattccaaacaatttcccctaattaaaaatctatttcactgttttactcaagttatgaattcccttaataacaatcttcttaaatattaattcagatgaaacaatttgaatatgaatatcaagcaataataaataaaggagattaagggaagagacaatgcaaactcagttttatactggttcggccacacccttgtgcctacgtacagtccccaaacaacccgcttgagagttccactatcttgtaaatcccttttacaagttctaaacacacaaggacaatccttcctttgtg

SEQ ID NO: 3292 - DNA, 342 bp, Glycine max
  unsure at all n locations
cctcatcagcaaaatcaaccacagcagagcaattatgacctctctagccacagatacaaccctggatggaggaatcaccctaacctcagatggtccaaccctcagcaacaacaacagcaacctgctccttccttccaaaatgttgttggcccaagcagaccatacattcctccaccaatccaacaacagcaacaacccctgaaacagccaacagttntaggccacattatttccaataagggtattgaagtagatcctgcaaaaatttctgttatttcacaatngccttacccctcctgtgtgcgagaagagtgatctnttcttggtcatgcaggattctac

SEQ ID NO: 3293 - DNA, 484 bp, Glycine max
  unsure at all n locations
gcttctaaactttatacaagaatgaagctctgataccacttgttagacaagtgaccttagtatcttaagaaggtgggttgaattaagacacaaaaatatccctaattaaaatataactctctttttaattaataatgaaaccctaattatgaattatttcaagaacaattcacaataaaacttctttaaagcgaaatataaactgcaataaaataaaagaagttaagggaagagagaatgcaaactcaattttatactggttcggccacgccctgtgcctacgtctagtccccaagaaacccgcttgagattccactatcttgtaaaatgcctttacaaagtctgaaccacacaaggacaacccttccctcacattcaaaaatccttacaacataagagaccctctgtcccttaatcaatntctttgaatgagaagaagaaaagaattctctctttaagagaaaatatacaatggaagatactc

SEQ ID NO: 3294 - DNA, 364 bp, Glycine max
  unsure at all n locations
gaagatatcctaacactttctttgccgctgtctagagctctatacctgaattactctgatatcttccaagcattccaaccacaaatgcaatgtcaagtcttgtacacacctgcgcatacataaagcttcctacaatggaagcatatggaatgtttctcatttgttccctttgaagcttatttttatgacattgattcaaattgaatctatcacctttcacaataggtgtcatgttgggtgaacaatcttcatncgaaatatttctagaactttgttagtattggccttcttatagagcccgagaatcccttgatatcaccatctatggatctctatgccaatgacatatgctgcctcacccata

SEQ ID NO: 3295 - DNA, 394 bp, Glycine max
  unsure at all n locations
acttaaaattctggaagaagacaactaacaatctttttgaattggaacccgtgaatgctatgccttatgttattgtgtctaacatgcattatgaatctcggaaatgggatgatgttgtgaaatacaaggttggtgaaatcaaaggaataacaaaggagcctggatgtagttggatcaagatgaactacagagtgcatacattcatttctgaagatagaggacatccaaaggaagctgagatttgttccaagattgatgaaatcgtaagaagaactaaggaagctggttatgttccagatatgaattttttgttgcatgacatggattcaganggaaaagaagttggtcttgcttatcacagtaagaaatcggatgttgctttgggattacttgc

SEQ ID NO: 3296 - DNA, 242 bp, Glycine max
cctttatatatttgagggactcatgggcactctgaattacaaattcccttggataaaaagggtgttgccatgttttcaaaacccgtacttaagcgtacaactccttattataaattgaataatttaaggtgagaccactttactttttacttaaataaaccatttgattggcctctttcattaacacaacccccattccaacattttaaacattacactccatttttaaaaaatttttaaaa

SEQ ID NO: 3297 - DNA, 418 bp, Glycine max
agcttccacgttcaatttcgagcgtctccatatgttacgggacttaatcagacatccgagaaaaaagttagtatcgtttgagttggctcatagattcaacattcaatttcgagcgtctcgatatattacgggactcaatcagacatccgagtaaaaagttattgtcgtttgaattggctcagaggttcaacattcaatttcgagcgcctcgatatgttacgggactcaatcagacatccgagtaaaaagttattgtcgtttgaattggctcagaggttcaacattcaatttcgagcgccttgatatgttacgggactcaatcagacatccgagtaaaaagttattgtcgtttgaattggctcacaagttcaacattctatttcgagcgtctcgattgttacgggactcaatcagacat

SEQ ID NO: 3298 - DNA, 332 bp, Glycine max
agctttgagctaattcaaacgacaataactttttgctcggatgtctgattgagtcccgtaatctattgagacgctcgaaattgaattctgaacctcagagctaattcaaacgacaataactttttactcggatgtctgattgagacccgtaatacatcgagacgctcgaaattgaatgttgaagctctcagcaaattcaaacgacaataacttttttcctcgaaggtctgattgagtcccgcaatatatcgaaatcatcgaaatggatttctgaagctttgacctatttcaaccaccaataccttttttttcgaatgttggattgagtcccg

SEQ ID NO: 3299 - DNA, 137 bp, Glycine max
tgggttcatactatgtagctcatcatgatgtatcttttccattccaatgatctatgctttagagccttcttcggatgttacatagctagtggagcatggctgaatgttcaccaggaattctttaacttctgtcatgt

SEQ ID NO: 3300 - DNA, 580 bp, Glycine max
ctggttatcaactcgtcccccgggtggtccattcaacccgtcttttttatgatcttccatgcccatgatgcatcctccaaatccaatgatgaatctgtctcctctaaatgcttctccaatgaaccctgcaggaattggttcttcaccttcgatgctacgtccacctcatttccaacagttctatgatcaacaacaccaccatcaacatcctcagtcttttggacttcctggtcggcctgaatatgatccgtcatccaagtctttcaaaggggtctttgggccacttccatctgatgttgcaatggagctcagtaatgtccttaacaatctgaatggtacaaaagaatccatcaaaggtgcaaaactttggttcatgcagagatctccatttgcaccagccctagcagaagctcttacagatagggtctttgcattggatgaagttgagagacaattacacataatataccttgccaatgacatactttttgacaggtatcatatttgattaattcacatattataaaatgttagaaatgttcttctaataagcagaaaagatggatcacacatacaccta

SEQ ID NO: 3301 - DNA, 449 bp, Glycine max
tctcgatatattatgcgcctgaatcaaactttcgtttcaaaagttattatcctatgaatttctccactgtattccgtgtgacaagttatgaccatttgaatttctcgatagcattcgttgttcaatttcgagcgtctctatatattatgcgcctgaatcggacttccgtgtgacaagttatgaccatttgaatttgtcgagagcattcgttgttcaatttcgagcgtcctcatatattatgcgcctgaattagacattcgcgtgacaagttatggccatatgaatttgtcgagagcattcgttgttcaatttccagcgcctcgatataatatgcgcgttaatcggacttccgtgtgacaagttatgaccatttgaatttctcgagggcttcccgtgttcaatttcaagcttctctatatattatgcgcccgaatcagacttccgtttaa

SEQ ID NO: 3302 - DNA, 379 bp, Glycine max
ttctggtcggtattgatttttggtatatcccttcaacactttcatgtagcgttcaactggatacatccaccacaaaaaaaccggaccacacaacccaatttccctcacaagatgaacaattaggtgaaccatgatgtcaaaaaatgatggtaggaaatacatctccaactggcaaatgacaatggcagcctcattctctaagtcatccaattgttgaggattaatgaatttgctacatatggcattaaaaagaaagcacaaactggttatggcaaccctaactttgtcaggcaagatgccgcgaatcgcaacaggcaataattgttgcattaagacatggcaatcataagacttcaagccaaccaacttaagatcattg

SEQ ID NO: 3303 - DNA, 448 bp, Glycine max
tttttggtctttattgaatgttgagtttgggattaaccacaggctgtgcgaaaagttcttccctcgctgaatggtaaaactactgggatgtccttccaagtcccccctgatgatgtttcaaatgttgacctaactgtcatgctaaagaagccagcatcctatgagcaaatcaaagctgctatcaagttagtttttgaacctttttgaaaatcttttcatttggcagatcgaatcatgtttttttcccgttgacccaacaactttttgtgttcaaatttcagggaagaatcaaaaggcaaactgaagggtattttgggatacaccgaagatgatgttgtgtctactgattttgatggtgataacacgtgatgttgtgttctgaagcaacattggaagataaactatcatgatcacttttttggtgttctcttggtctataatgacttac

SEQ ID NO: 3304 - DNA, 521 bp, Glycine max
  unsure at all n locations
tagcccatcatcaatattgatttcagaaaaaaaaagcaagtgattatattgaactgagccagaccaaggaaaaatacatcaaagaaaataaataatctagtatagctaattttataatcagataaagcatctgagacctgctgccatgtggtatcaacaggaagctgccgccgagcatcgccagcatcaaaatccagtacaccataatccctcaaccgaatctacacagcaataactaaaatcagaagtctttttgaggattaaatgcatggcattatctataagacacatttttcaaattgagacaaacccgaaggaaggcacggattctttgcaaattcccaacaccaccaccaagagcagcctaccattagataaaaaagcaagcagaaattaagtgttgataacaaatacaaattcatgcttgctctcttatatgaattaagaaataaagaacagcngatataaacaaaaaaaattgagagaagcttgcanagtatttcactatttcttggagcatg

SEQ ID NO: 3305 - DNA, 408 bp, Glycine max
gctaacccatggaagctcctaatatctcctacactttttggagtgggccattcttggatggccttgattttataaggtctccttggaccccatttctaccaactacaaaccctaagaaaactatattatctacacaaaaagtacacttctctatatttgcatagagggtatttttcctaaggactgaaagaacttgcctaagatgtcctaagtgatcatctaagctcctactgtacactaaaatatcatcaaaataaacaactacaaatctacctatgaaatcccttaagacatgatgcataagcctcataaaggtgcttggtgcattagtgagcccaaaaggcatcactagccattcatacaaaccaaacttggtcttgaaagccgttttccactcatcactctttt

SEQ ID NO: 3306 - DNA, 448 bp, Glycine max
tatccccataagagtgcagaacagctggcgagtcagcattgattatatgaggctaatccaggtaaccaaaaaagatcattttcccctgccattcattgatcaaatgcttgagcgcttggcaagtatgtctcattacaatttttttatggcttttctggttatttacaaattcatattgctcctgaggatcaagaaaacaccacattcacctatccctttggcatttttgcctataggaggatgccctttggcctatgcaacgcctctggtaccttccaacggtgtatgcttagcattttcaatgattttttagagagttgcatagatgtgtttatggatgattttactgtttatggatcctcttttgatgcatgtttggatagtctagatagagttcttaatagatgcattgaaactaaccctgtgctgaattttgaaaaatgtcact

SEQ ID NO: 3307 - DNA, 442 bp, Glycine max
agcttcgacatcagaccacttccgggtgctggttctacttcacatggatttgatggggcctatgcaggttgaaagtcttggaggaaagaagtatgcctatgttgttgcggatgatttctccagatttacctgggtaaattttatcagagagaaatcggaaacctttgaagtattcaaagagttgagtctaagacttcaaggaaagaaagactgtgtcatcaaaagaatcaggagtgaccatggcagagaatttgaaaacagcaggttcactgaattctgcacatttgaaagcatcactcatgagttctctgcagccattacaccacaacagaatgggatagttgagaggaaaaacaggactttgctagaggctgcttgggtcatgctttatgccaaagaactttcctataatctctgggctgaagccatgaacacagcatgc

SEQ ID NO: 3308 - DNA, 395 bp, Glycine max
  unsure at all n locations
agcttnaccattcaatgaacataaaaacttgctaggagacattcataatgctctgaatatagaaatgtatgacagaacaaaattttgttctccaacaaataaacaatcaatcaaatgaatgtttattattattatgctgtaataatttgtgtaattaacagaagacctctagtccatacaatacaccggcgtgttgtcggtgctcatcctttacaaaataaatgtcaacaatcttctggaacgcgtgccacgtgagcaagctgtctgacccagcctggtggcactgccctacggcgcgttccacgttaagcgaccgggcgacgcggtccaatccgccgtagagcgtgtcacagaacctcatcatgtgcttgacatcataaacgttgtgcccaaaa

SEQ ID NO: 3309 - DNA, 318 bp, Glycine max
tctgttttcaattacgagcgtctcgatatattacgggactctatcttacatccgagtaaaaagttattgtcgtttgatttttctcaaagcttcagttttcaatttcgagcgtctcgatatactgtgggacacaatcggacatccgagtcaaaagttattgtccgatgaatttgctcagcgcttctgtttttaatttcgagcgtctcgatattttatggggctctatccgacatccgagttaaaagtcatcgtcgattcattcttcttagagcttcccttttcaatcacgagcgtatccatattctacgggacaccatc

SEQ ID NO: 3310 - DNA, 514 bp, Glycine max
gcttgaaccttgaatcttgattcttgaaatcaactttcctcttgaatcttgaagtgttgttcttgattctatcttgaacatcttgaactcattctttgattgacctttgagctttttgtcatcacctttgtcatcatctttgttatcatcaaaacatctttgaatcaatcttgattcatcatgaagctttgcgtctacagctggatcaacacaattctcatgctaaaagttttagaatggccagggatagattggcagatgatcaagccgataatatcaaattgcaactgatagctgctcggggaaaagatggccatgcatataatatgcctaatgttcccgatattgctgcactaattgttggcgattttcatccaggctcaaaaagagatattattgttgaaactcaaaatggagaattacaaagaatccatgaactgcaccatagctatctaccactacagtaccttctactctttccttatggagaagatggatatagagctgacatact

SEQ ID NO: 3311 - DNA, 727 bp, Glycine max
tcaacaatgattttccatttatcccttcatgttcaggaatattctttcttgcaagctaagaattgttgaacaattacttattgtatgatattgatattttttataaccttcatctgattttaaatctaaaatgataatgtaaagagataatgaggggaaaaactagaataaatattattttcaatttaaattcaaactatcttttgttaatagataacacaataatttttttaataggagagggacaaagaaaaaaaaaacaaaagcaactacaaatgtggaaacttaattcccacacttaatcagcttgaagtggatgtgatcattagtagttgcttcatgtttttctaaaaaatcaactgatacattctattataaagatttaatttgaattttacataagacaaatatgatagttaaaaaaactcttataagataagctatataaagaggtgactgataaaattgtataacacattaaagaaaacattaaatactatacaagcataaaaaatataagattatatatatactatgtgtgtatatataatcaactaatgtaattagcttattcaaattaataatagctataacacgtataaatatttttatatgtataaattaattaaaacatatattggattttctctctccctctctttcggttaaaagaaaagataaattcaattattaaagataatgtgataaatttccttttaattttttt

SEQ ID NO: 3312 - DNA, 566 bp, Glycine max
tgaaatagaacaacggatgccctccagaaattccaatggtcataacttttcacacagatgtccgattcaagcgcataatatatcgagacgctcgaaattgaacaacggaaccagtcgagaaattcaaatggtcataacttttcgctagaatgtacgattctgggacataatatattgagacgcttgaaattgaacaacggatgcgctcgagaaattccaatggtcataacttttcacatggatgtccgattaaggtgcataatatatcgagacgctcgaaatttaacaacagaagctctcgagaaattcaaatggtcataagttttcacatggatgtccgattcgggcgcatgatatattgagacgctcgaaattgaacaaagaaagctctcgataaatttaaatggtcataacttttcacacgaatgtccgattcaaggacttaatatatcgagacgctcaaaattgaacaacggaacctctcgagaaattcaaatggtcataacttttttctcggatgtctgattctggcgcataatatatcgtgatgatcgaaattgaacaac

SEQ ID NO: 3313 - DNA, 576 bp, Glycine max
  unsure at all n locations
agctttagcttcttaaggaagttttctcaaagaagcttctcaaggaagttttcttaagaaagcttctcaaggaagttacctagtctataaataaaagcatgtgtaacacttgttataactttgatgaatgagagtcttgtaagacacaactcaaagttcaacttctctccctttttcttccttcaatttcgtgctccctcctctctttcttttagcaaatgctcacccccccctctaaaatttaattggattgggcttctcccaattcaattaaatttattttcaaccacacacatcaaatattcacttaatgcatgccaaattagaaaactacccctaatacaaaaaactagtctaggtgccctaaaatacaagagatgaaaaatcttacatttctagggtaccttaactatattgtggagccctaaatacaaggcccaaaaataatgaaaccttaatctaatatgtacaaagataagcgggctcatacttagcctatgggtccgaaatctaccctaaggctcatgagaaccctanggccttctcctgcatctctggtccaatcttcttggagtc

SEQ ID NO: 3314 - DNA, 573 bp, Glycine max
catgcaagcttcaagaattatggcctcatcaaactacttgttttctctaggaaattctataaataaaacttccattttttaaggaatggggtaaccaccactggaaaacccgcatgcaaatctttatagaggcaatagatttaaatatttgggaagccatagaacaaggaccttatgttccctctataatggccggaagtgcaacaatagaaaaacctagagcagattggactgaggaagaaagaagattagtaccatataatttaaaggccaaaaatattattacatctgccctaggaatagatgaatactttagggtttcaaattgtaaaagtgctaaagatatgtgggatacactacaagtaacacatgaaggcacaacagatgttaaaagatctaggataaacactttaactcgtgaatatgaactttttaagatgaatgtaaatgaaagtatacaagacatgcaaaagaggttcacgcacataggtaatcatcttgcatctctaggaaaaacttttcaaaatgaagatctagtaaataaagtcttaagatgtcttaatagagaatgac

SEQ ID NO: 3315 - DNA, 352 bp, Glycine max
tccttgatagaatgtccatccactacaacatgttttgtgcgatcaagacaaactggattgggtgctctagctatgggtgctttattaacacaaaacagatccattggatcttgagctgaacacatgacttactctacctacctcttctaccagaagatgcctcacgctcatatgaccatacctctaaactgcgcttctgcactagataacacaaccaccttctgccttttactgctccgagagacaagatttcctcccacaaatgtgaggtcacctgatatggaatgtttagtagttatactccctgccccatctgtatcaatataaccctgaatgtgctgatgctatcttt

SEQ ID NO: 3316 - DNA, 491 bp, Glycine max
ttttaatggtaaaaggtataagacacccctatgtttttctttaacccaaaaatggccttaccttaggacctgaagtggtacaacaaaccacaaagaaagtcaatttgatccaagaaaggatgcccactgctcaaaataggcaaaaaggttatcatgataaaaagaggaaggatttggaattcaagggtggtgatcatgtattcttgagagtcacgctgtggactagggttggtcgagcattgaaattcccaaaactcacaccttgctttatcggccctttccaaaatcttaaaaaaattggccctgtggcataccaaattgcatttcccccgtctctttttaatcttcacaatgtctttcatgtgtctcaactccctaagtatatccatgatccatcccatgtgattgaattggataacgtacaagtgaaagagaatttgacatatgaaacattgcctttgacgatcgaggataggcgaacaaaacaccta

SEQ ID NO: 3317 - DNA, 427 bp, Glycine max
tgcatgatttacatctccccctttctcaagcaaattcttcttgatatcatcaaaatcttcatgatcccgactcgttggtggaggatgcgtgaatgacaatcaattcatggggctaccaataaaaatggagaatggaggattagcgaataacgctacgcaatcaattcgcggttctaccgactcgttggtggaagatgaatgaatgacaatcaactgatggggctgcgaataaaagtggagaatggaggataggagaatagcgcgtggcaatcaattcacggggctgcagactcgatggtggaggatgcaagaatgacaatcaactaatatggcttcgaataaaagtggagaatggagaataggcgaacagcgctaggcaatcaattcggggggctgccgactcgttggtggaggatgcatgaatgac

SEQ ID NO: 3318 - DNA, 538 bp, Glycine max
tcaacattcaacttcgagcgtctcgttatattatacgactcaattttatctttcgagtataaagttattgtcgtttgaattttctcagagcttcaacattcaatttcgagcgtctcaatatatgacgggactcaatcagacatccgagtaaaaagatattgtcgtcttaattggctcagagcttctacattcaatttcgagcgtctcgatatatgacgggactcaatcaggcatccgagtaaaaagttattgtcgtttgaattggctcagagcttcaacattcaatttcaagcgtctcgatatatgacgggactcaatcagacatccgagtaaaaagttattgtcgtttgaattggctcagagcttcaacattcaatttcgagcgtctcgatatatgacgggactcaatcagacatccgagtaaaaagatattgtcctctgaattggctcagagcttcgacattcaatttcgagcgtgtcgatatgttacgggacttaatcaggcttccgggtaacagatattgtcgtctgaattggc

SEQ ID NO: 3319 - DNA, 534 bp, Glycine max
  unsure at all n locations
tgaacctaaatatcacaaccatcaaacaaaaaatcaagtcacacacatttgattaaactataacctaagttaacaaaaaaaaattacaactgtcaactggttatcaaggtttaaaaaaaaaagtctgcaacatcaaagtttccaagtggcagggaaaggcggagagctaataacaaaatcaccaaatcaaccaacacaaatctcaatatctatcaactaactgatcgaatttcttcaagcaaaaagctaacatttaacagaattttaccaaaaaccaaggcatcacaaatccgatcgaatataatacaatctcaattcaagccaactgttcaaagattttaccaatctcgacgccaagaccctacatcccgcatatgagaaagttggaaccgaagagcctttgcatgatctctcgcccatacacggcgagttgtcagctgtggagatcctcatcgatgtccggcgggtttgatttgcccaaagccatattggacgctccttcactcgcgtncccgctgttgctgcatatagtgc

SEQ ID NO: 3320 - DNA, 670 bp, Glycine max
tcaacaatacattccttctgaaacgggtcgtatttctcacatgaattgagcctatgtagatatctttcaatatgatacattcaatgatattgcattttttggatcaagtggcctcaaaataattaagaaaggggggttgaattaattattaacgtgtcttgactaattaaaaatttatccttcttaatgttactagattcaatcaagctttactactaagttatgagaaagtaaagaacagaaacaataacttagacaaaagtaaagcgaacacaacaaaaagataaagagtgtagggaagaagaagacaaacacaagatttatactggttcggccacaacccgtgcctacatccagtctccaagcaaccaccggttcttgagatttccaataatcttgtaaaatccattacaagcaaagacccacaagggatgtaccctcccttgttctctttcaacaaccaagtggatgtaccctccacttgaactgatccacaagagatgtaccgtctcttcaatgtctttcttggtcttcctctgttccttttaaaaaaaattaaaaatcatgcaatctacttttagcaccaatgtatccaacatctttctttatatgtttgcaaaccatcttaccaatttttcttttggcatctttttgtggagtcacttgatgc

SEQ ID NO: 3321 - DNA, 513 bp, Glycine max
tcttagtctcggctgatgaagatgaattcatggttacttcatgcactcctctaatgacaatagcatcatttctggcactaaattgttgggagtttgaagccatcttctcaattaaatttctggcttcagcaagggtcatgtctccaagggctccaccactggcagcatctatcatacttctttccatgttattgagtcctttataaaaatattggaggagaagctgctcagaaatctggtggtgagggcaactagcacataattttttaaatctctcccagtattcatataggctctctccactgagttgcctaatgcctaaaatatcctttctgatggtcgtggtcctggaagcacggaaaaatttttctaaaaatactctcttgaggtcttcccagctcgtgattgttggaccttgtggcctcagatatcttaagaaggggggggttgaattaagataacacgaactattccccaatttaaatcttgctctctctctttaattaacaatgc

SEQ ID NO: 3322 - DNA, 438 bp, Glycine max
tggtactacatctgggtttgattcagcattaaaatatatatccttctaatcattacatgatgttgttttgattataatgaattaaatgaagagttcattgttttagggttcaagatgtgtacttgcaggggaccatcttcaacttcctccaaccattcaaagtgttgaagccgagaagaaaggcttaggaagaacgctctttgaacgacttgcagaagtgtatggagatgaaatcacatcgatgcttactgtccagtaccgtatgcatgaacttatcatggattggtcttctaaagagctttacaacagtaaggtactcccagtttttaaagtgtgtctcaagattgcattcattgtaaagcaatctttatatgccactacaaagcataatttatcaatcctgaactgcaaaattctattatgttgggggggtggggg

SEQ ID NO: 3323 - DNA, 618 bp, Glycine max
  unsure at all n locations
agcttatatctagatgtcaaataaagaagagttctctgcctcatatctttgattatgatttgggtcaaagcaaaccactgtgcaatcaaagttctatctagatcaaggttgtcaaaatattaagtggccttctaatctttaattaacttgtgtgatattaatgtgttttgattatacattatgtttttctttaaaatctattaattggtattttttggatcactatataattgatgtgaagtgtatattaagtttgttgatgattaatttttgttaagaaatttgactgattatttttaatgaaattttttcactaaatcatatatataaagctcaaatctgatattattttaaaaaaaatcaaattcaatttcattcaaattaatgattttttggtatttatttattggtatgaattactaagatggtgcattttgagattgttacgtgttagattaacattaaaattttagattcattaaaccaaactttttttaattttcattttgatcaaaattgagaaaatacgcgggggattcttttttatcatatttttgngatattgngttttgtatgtaataattaataaaaaaaattaaggaggtcaattttttttat

SEQ ID NO: 3324 - DNA, 301 bp, Glycine max
ttttttttgtgaaactatctcatcctctttttcaagtgtaaaatgaagcttgacaagttcaggtgcaagtgctgctactggtggaagcacttgaatttggttgcctgaccacaaagggatggcactcccatttttcgaattttgcacagtttgggaaagcaatttgttataattttgggactgagcttggttcaactgagtagccatctgccccatctgatttgtcagactctgaatggaggctcttgtctcttgctgaaatttcatattctggatggtcatttgcctcactaattcttct

SEQ ID NO: 3325 - DNA, 674 bp, Glycine max
  unsure at all n locations
tcgagccaaaatcctgactcaccataaacctggacccagggtggaaatgtcaatccttaccctcggaagcaaaaagaatagaaagggaatttccaatcaaaaaaaatagaaagaaaatttcccatggaagccaaaaaagaaaagaaagaaaattccccaatcaaaaagtgggagaaagcaaaaagaaaagaaaggaaattcccaatcaaagaatgggagaaagtaaaaaaggaagaagaagaaggaaagaaagctcctgatcagggatcgaaggaaaaacagaagaaatgtgcagagaggtctttagaccggacaatatctgaacaatacagaattgtcaccaaatgaacaaaaagaaggaaaggaaaccacgacctaaaatggtcttctccctttgattaccaaccaaaatcccgtgcgctagcgactttttcgccccgcactaaacaaaaaaacagaaaaagaaaaagccaacaaaaaatcaaaagccaaaaacacacaaaagccgaaaaacccaccaaaagaacccattcccaagggaagtcctattgatccatgatcacacatgntaattttgatttgataggaaataatttgcaaagtcaagtcatgatatatctatggttcggaattaggatgaaacacttacctgtgcgagattgatacactttgag

SEQ ID NO: 3326 - DNA, 575 bp, Glycine max
cgacctgccggctgcaagcttaaaaccccttgttcattactaaacaagctgatttttttatcacaatcacaagcaagatgctctaacatgtagaagaaaacaaattcaaatgaaatgcaataaaaagtagagaagggaaagaaaggctaagctgcctcccaataagcgctcttttaacgtcattagcttgacgcctctttctgttatccaagatcaaacaaggttcctacttcaagcaccttcttctcaggtctcctttcctccatcccatgcacttttagacagacattttggctaggtggatctttgtcctcatggaacaaatcaaagctgatcttctgatcttctatgcccatttgcagcattttctttcccatgtctacgacgcagctcgcagtagacatgaatcggcatccaagaatgagaggaatgtcaacatcctcttccatatttatgacaacaaaattagctggaaatataaggtgcttatccttcaccaaaacatcttcaatgactccatatgggcttgtgatggagcgggcaactaactggagggtcatgcctgtgggcattat

SEQ ID NO: 3327 - DNA, 604 bp, Glycine max
  unsure at all n locations
agcttctaaactttgtacaagaatgaagctctgataccacttgttagacaagtggcctcagatatcttaagaagggggggttgaattaagatattcccaacttttctcctaattaaaaatctatcttactttttacttaagttatgaattcccttaatgacaatcttcttaaatattaattcaaatgaagcaacttgaattatgaatataaagcaataataaataaaggagattaagggaagagaaaatgcaaactcagttttatactggttcggccacacccttgtgcctacgtccagtccccaagcaacccgcttgagagttccactaacttgtaaattccttttacaagttctaaacacacaaggacaacccttcctttgtgtttagagattctttacaacaagagactcacagtctcctaatcccttagagaatgagaagaagaagaggaacaaatctctcttgaaagagatggattntacagattgagcactcaattaattccttaatgaattgcaatgaattggccaaggaattctttaagaggataaaatgaaattgctttttgagaggataaacactttgttgttctgaaaactct

SEQ ID NO: 3328 - DNA, 339 bp, Glycine max
  unsure at all n locations
atgccaccttgtanggttaaagtctcacgattgtcacgtgctttttctactaattacagtcgaggctatacgagacatcttgccaaacagaagtgggttagccataactcgcatgtgctttttcttacatgccatatgtagcaaagtcgctgatcctatcaagtttgatcacctggaaaatgaggccgcaattatactgtgctaggtggagatgttttttccccctgctttctttgacatcatgattaacttgattgtgcatctggtcagagaaatccaatgttgtggtcctgtttatctacggtggatgcccccggttgagtgacacatgaagatctt

SEQ ID NO: 3329 - DNA, 507 bp, Glycine max
gtcacctgccgcatgcaagcttccttcgagcagcaaagccatagagtaaaatggttgtacaagagaaaacctttagtatcaaaaaaagaaggggaaaattaaaggctcgcctagtagcaaaaatgtattcacaattgaggagccttgatgatgaatcttttttttgtaactttatatgaatgatatattgattattggtaaccatttgcatgatgtgaatgagttgaaattcatgttgggtagggagtttgacattaaggacatggatcctaccaagaaaattcttgggatgaagattcatcaagatagaaggtccaaaaaattatggctctcacaacaagtttatgttgcaatgtgctggacaggttttgcatgagtaatgctaagtctgtgaatagtctacttgtaaaccacttcaagctttttgtagattagtgcctaaagatagattaggaagtggaatacatgtcaaaggttccatatgccattggatttggttggttgatg

SEQ ID NO: 3330 - DNA, 419 bp, Glycine max
tgccgccacagagttttccgactatgctcttgtgtggtggaacaagctacaaaaggagagagcaagaaatgaagagccaatggttgatacatggacggagatgaaaaagatcatgaagaagcggtatgtgccggctagttactcaagggacttgaaattcaagctccaaaaactaacccaaggcaacaagggggttgaggagtatttcaaggaaatggatgtgctcatgattcaagcaaatattgaagaagatgaggaggtaactatggctcgatttcttaatggtttgactaatgatatccgtgatattgttgagctgcatgagtttgttgaaatggattatttgcttcacaaagcaatccaagtggagcaacaattaaaaaagaagggagtggctaagaggagttttaccaactttg

SEQ ID NO: 3331 - DNA, 492 bp, Glycine max
agcttcggtattcaatttcgagcatctcgacatattacgggactcaatcgaacatccgagtaaaaagttattgtcgtttgaatttgctcagagatttggtcttcaatttcgagcgtttcgatatattacgggactcaatcgaacatacgagtaaaaacttaatgtcgtttgaatttactcagagcttccgtattcaatttcgagcgtctggatatattatgggtctcaatcacacatccgagtaaaaagttattgttgtttgaagttgctcaaagcttcaacattcaatatcgagcgtttcgatatattacgggactgaatcatacatccgagtaaaaagttactatagtttgaagttgctcagagcttaggcattcaagtccgagcgtctcgatatactacgagactcaatcagacatccgagtaaaaagttattgtcgtttgaatttgcttagagctttcgtcttaaatttcgagcgtttcgatatatta

SEQ ID NO: 3332 - DNA, 449 bp, Glycine max
agcttgacggagtttgtcgcatcggggaacaatttatctttaaaagtgggtcccaattggattcctaattttcaacttacctatttggaagtgacatcatggcagttaggtcccagctttccattgtggattcagtcacaaaaccaactttaatatgttggactatctaacacggggattttcgattctattcccacacagatgtgggaagcactttctcaggttttgtatttaagcctctctcgtaatcatatccatggtgagattgggactacattaaagaatccaatatctgtcccaactattgatctaagctcaaatcacttgtttggtaaattaccctatctttcaagtgatgtgcttcagttagatctttcaagcaattcattctctgaatccatgaatgactttttatgtaacgatcacgacgagccaatgcaattagaatt

SEQ ID NO: 3333 - DNA, 611 bp, Glycine max
ttgatgtgttctaaaagttggttatggaattcagagaatgcatgtaatattctgaatgcttatgtgatactttatgaattgcttatatttttaaaacttataacttgttatttattattttataattattatttataggttctagatcaattgaagaatcaacgtttactgatgagattgaatccgatgatgaaggtatattcacttttagtggttctaattttttttaatatcattatacatatctaatttttcaaattttttaaaatataggtggatctttggtcagtaacattactcaatgtttgcaagattagtagacattattgttgatcggtaaagtaataactatacttatttactaatgtgatgtgtgattttaagatttgaaacatctaaaatatgatgtttgattttataaataccaagttgagcgcttgagaagaaatgttaatgacatgtttggtgaagttggtggttattttgatgatggacattggtttcattttctatttatttctaatttggtgtaatttgaactaatgaacatttgaattatggtgcttcatatttgacggtatttatttacccttaaaaaaataatggaatca

SEQ ID NO: 3334 - DNA, 450 bp, Glycine max
ttagacgcactataccaacctctaggatccagggacggccaattatctatatataggcttgctaagggtagagagaggaagactagagatttggatcaagtaaggtgtgttaaggataaagaaggcaaagtcttagtgcatgaaaaagatatcaaggaaaggtggaaggcgtatttccacaacttatttaatgatggatatggatatgactctagcagtctagacacaagagaagaggaccggaactataagtactatcgtcggattcagaaacaggaagtaaaggaagcgttgaaaacaatgagtaacggtaaggcggtggggccagacaacatacctattgaagtgtggaaaactcttggagatagaggtcttgagtggctcaccaaactctttaatgaaattatgaggtcaaaacgcatgccggaggaatggaggagaagcatgtta

SEQ ID NO: 3335 - DNA, 416 bp, Glycine max
agctctgacaagacaagacacactgctgtcttgttcaacaagataaaacagagaaatctattctaaagatacatataattataacccataattataatactccccttcaagctggagcatataaatcgtatgcaccaagcttggaacatataaactgaatcctaggcccccttaaaggtttactcaaaatatctactggctgatcattagagttaatgaattcagtgacaatctctttagacaatagcttcttccgaataaagtgacagtcaatctctatgtgcttggtcctctcatggaagactgggtttgaagcaatgtgaagagcagcctgattatcacaatataacttcatttgcaccactttgcaaaaattcaactcttcaagaatttggttaacccacataagttcacac

SEQ ID NO: 3336 - DNA, 348 bp, Glycine max
  unsure at all n locations
cattgcataccatatctgcagggagaaatcttactactttatgaactgttaaacggtcggtcagacagagaacaataattgacaagatttaagtaggtttctaccttctctctgctcttaggccactcaattgggcgtttataaccttcacgaacaggaacaatgcangtaggacgttcttcaggacagtgcctttctcgatgttcatagtgtttactactctggagactcctaatagcctctcagttattgaggccaggtataaaatcaggaccagcagtgacattacaaagcttccacttgtatccaattggctgcttggaagactcttgagaatccttttcattc

SEQ ID NO: 3337 - DNA, 470 bp, Glycine max
  unsure at all n locations
actaagcttgatcttcactaattgacactaatcttttcttccacatcttgtacattacaggatatgaacaatcgtatgaagattggtacagttgaagtgagacacgacctttaccacctcacactagaccaaataaccaccaaagccgtatgctccactattattcatcctctgtcataccccatttttgacccgtttttatttcttttttctcgtcttttaagccggaaatttccatcatttcagatgaaatttcggcagggaggtattttaaaatacctcatttttgttttgaagacgcccctttttttattattattatttatttatttaccttttttattattattattatttntatttttagttattattttcttttcttttcctttcctggttataagtgttttttattatttccgtnttttttattattatctttattagtatcttctnnttcgtttttttcg

SEQ ID NO: 3338 - DNA, 460 bp, Glycine max
  unsure at all n locations
atatttcttgacaacatccatcatgcctgcactattcatgattcttcttttgtatgaataggccaaaatggtgatagttcaacaacttttcctataataatcagcgttggtgacaccagctgagcagatgtaattttctcgtgaaggtcctttagttcagcaaacacctgcatcatagcaaaataatcagctattggacctagcatccggaaaagttgaattaagaaccagctatatatagattcacacacaattgtatttatttatcagtttttaatatcaaccatgcagaagtacaaaataaaatgtctcaaattcacaactacctcctaaaacaaaacattattaagatcactatatcctattagccttgactgtagtgtcaggtacactttcttcacacccctcacattcaatctttaattgttgaatatcttttactacagntaatttgtcaaga

SEQ ID NO: 3339 - DNA, 385 bp, Glycine max
agcttgtaattcctgatccttatataacatatgttgtaaaggttgggactggaacgagtcaccaatggctttcttgaggagagagacatgaaagatcggatgaattttactgtgagatggaagatccaacttataagcaacaacacccacctagtttaacacttggaaaggaccataaaaccgaggggagagtttttcattaatccttttagccaacgatcttcttctgtaaggttgcatcttcaagaacacccaatcactgactgcatattctatgtcccgacggcgtttgttgacattcgctcacatgatatcttgagacttcaacaaattttctcttagagtagccaataattcattccgagcaattgttagtttattgact

SEQ ID NO: 3340 - DNA, 402 bp, Glycine max
  unsure at all n locations
tggacctgngtgttgtccagattcatcatatcttctgtaatactcatcacctctatcatatctaataattttcacatttatgtctaattgcccttttatttcattgtagtaaatttctaaggcatacattgcctaagaaatctcgggcagtaagtagacataaccgtaatgtgaataatcatcaataatggtgataaaatatcattcctttccgaaagaactaacatcaaaaggtccacaaatatcagtatgcacaatttcaagaagctgagtgcttcttgtagctcttttctttgtatgttatgcttgttttcccttaatacaacccacacaaatatttagatccataagatccacataaggaagagtttcattctttattaatctttccatcctttctct

SEQ ID NO: 3341 - DNA, 317 bp, Glycine max
  unsure at all n locations
agcttgtgcctcttcacgtgtganatatgaatgtagcatatagatctaaagacccttatgtgctttgctgatggcttcttgccgttccaagctgtaattggagtcttgttttttacagcttagctggacatttgttgagtatgtaaacagcagtgtagactgcttcacctcaaaatgtgctagggccgcccctcctccttgagcatcgatctcaccatctccataactatgcgattctttctctcggatactccattttgttgaagagaatatgcgactgtaagttgccgctcaatgcctttcatcctcataaaatc

SEQ ID NO: 3342 - DNA, 390 bp, Glycine max
  unsure at all n locations
tctatataatgttcgttcctaatttctctacaattgcatcacctctcaatgagctggtgaagaagaatgtggcatttacctgnggtgaaaaacaagagcaagcctttgctttgctcatagaaaagcttactaaggcacctgttctagctcttcctgacttttctaaaacttttgagctagaatgtgatgcctcttgagtgggagttggagctgtattgttacaaggtgggcaccctattgcttantttagtgaaaaacttcatagtgccaccctcaactaccccacctatgataaagagctntatgccttaataagagccctccaaacttgggaacattaccttngttccaaggaaattgtcattcatagtgatcatcaatcacttaagt

SEQ ID NO: 3343 - DNA, 217 bp, Glycine max
aagttatgaccatttgaatttcctcagagctacctttgttcaatttcgagcgttttgatatattatgcgcctgaaacggacctccgagtgaaaagctactaacatttgaatttctcgagagcttcccatggtcaattttgagcgtgtcgatatactatgcgcctgaatctcacctccgcgtgaaaaggtatgaccattttaatttcttaagagcttc

SEQ ID NO: 3344 - DNA, 352 bp, Glycine max
  unsure at all n locations
gcttctcgatatattatgcacatgaatcagacttctgtttgaaaagttatgaccatttgaatttttggagagcttccgttgtgcaatttcgagcgtcttgatatattatgcccctgaattggacttccgtgtgataagttatgaccatttgaatttctagaaagcttccgttgttaatttcgagcgtctcgatatattatgcgcttgaatcggacttncgtgtcataaggtatgaccatttgaatttctccagagctttcgccggtgaatttctggcttctcgatatattatgcacctgaatcagattttcgttttgaaaggtatgaccattttaatttctcgagagcattc

SEQ ID NO: 3345 - DNA, 372 bp, Glycine max
agctctgatgcaacatatggagaggttaatgaatttacaagatgatgcgctccatgagaggttggatcaaatggagaatagagatcataatgaagaagaaaggaggagaagagggaatgatcgtgttcctagacaaaaccgaattgatggtattaaactcaacattcctccatttaaaggaaagaatgatcccgacgcctacttggagtgggagatgaaaatagagcatgttttctcatgccacaactatgaggaggaccacaaggtgaagcttgcccgcacggagttttccactatgctcttgtgtggcggaacaagctacaaaaggagagagccagaaatgaagagcccatggttgatacatggaccgag

SEQ ID NO: 3346 - DNA, 448 bp, Glycine max
tatatacagaaatgcttggattgtctacaagctaaatcaaactatacactgccagcaggactactccaacctttacctattcctcaacaagtttgggaagatgtagccatggatttcatcacaggtttaccaaattcctttggattatctgtcataatggtagtcattgatagactcaccaaatatgctcatttcattccattaaaagctgattataacagtaaggtggtagcagaggcatttatgagtcacatagtcaaattacatgggataccaagatctatagtgtctgatcgagatagggtttttaccagtactttttggcaacatttattcaagttacaaggtactacattggccatgtcatcagcttatcatccacagtcagatggacaatctgaggtgctgaataaatgtttggagatgtatcttagatgcttcacgtatg

SEQ ID NO: 3347 - DNA, 445 bp, Glycine max
  unsure at all n locations
tctactcttcttctccttagtctcctcttcagccatcccagttatgtgttagacaagtggcctcagatatcttaagaacgagggggttgaattaagatattcgatactttttcttctaattaaaaatctatcttactttntacttaagttatgaattcccttaatgacaatcttcttaaatattaattcaaatgaagcaacttgaatatgaatatacagcaataataaataaaggagattaagggaagagaaaatgcaaactcagttttatactggttcggccacacccttgtgcctacgtccagtccccaagcaacccgcttgagagttccactaacttgtaaattccttttacaagttctaaacacacaaggacaacccttcctttgtgtttagagattctntacaacaagagactcacagtctcttaatcccttagagaatg

SEQ ID NO: 3348 - DNA, 364 bp, Glycine max
gcttaacatcataccacttccacggtgctggaactacttcacatttacttgatggggcctatgcatgttgaaagccttggaggaaagaggtatgcctatgttgttgtggatgatttctccagatttacctgtgtcaactttatcagagagaaatcagacacctttgaagtattcaaagagttgagtctaagacttcaaagagaaaaagactgtgtcatcaagagaattaggagtgaccatggcagagagtttgaaaacagcaagtttactgaattctgcacatctgaaggcatcactcatgagttctctgcagccattacaccacaacaaaatggcatagttgaaaggaaaaacaggactttgc

SEQ ID NO: 3349 - DNA, 397 bp, Glycine max
  unsure at all n locations
caaagaaatagtgtggctttatggattaccgaggagcattgtcagtgatagggatgcaaaattccttagtcacttttggaggaccttgtggggtaagattggtactaaattgttgttttctactacttttcacccacaaactgatggtcaaactgaggtagtcaataggactttangaacactgcttangactgttttaaagaanaatcttanatcttgggaagcctgtttgcctcatgttgagtttgcttataatcgagctgtccatagcacaactaattgttcaccatttgagatagtatatggatttaatcctttgactcctcttgatttgttgcctatgcctaacattgctatgtttaagcataatgatgcacaggctaaagctgagtatgtg

SEQ ID NO: 3350 - DNA, 346 bp, Glycine max
cgtaatcattcaatgcattcataatacagccacattctttcatagctgctctaaaaaaatgaaacagtcatcatctgagagtaggtaagatataataggtacacccctacagattttgatgccatgagtatgtcttcacccttctaacttcttaataagagcttaaatcccttcagcataaaggatgaacagaaaaagagaaaggggatatccttttctgagaccccaccatcggatgataagacccaccaagctttcattgacagtaacatagtactagacagattggatgcgaatcaaaatccacttaacccaagttgcactaaatcccattttggtcttgaca

SEQ ID NO: 3351 - DNA, 428 bp, Glycine max
agtgattccaattgaatccctacatcttctatgttccagaaacaattaagctaagatgccaaagagaaaatcgttgcctataaaaatagacaaatcctctatgcattagaagtctcaaagtgaccaatgagcaaagagctcaagtggcaacagcatcagacttcattttgattcctgttacaaactcctgaccctttccgttgcctcaattcctaggtctacacagcctcccttggaacctggaaaaatctattaaactaatattgtatatttttatgacttcagatggaagttttgaatatgctataggattttgttagtgaaaggaggtcttaaaacctgcaaaacataagccagcatccctacaggcaagagcagtcatcatcatgtgtgaaccatccagtgaatgtacgaagtttggaggaaat

SEQ ID NO: 3352 - DNA, 336 bp, Glycine max
  unsure at all n locations
gaatcgttacacatatactgttatcgattaccagagcagattttcagaanatattctcatttgtcacatctttttatgtggttcttgaatggctatcaaaggcctatatatatgtgacttgagacacgaatttgctaagagtttttcagaacaaaaaggtcttatcctcttataaagcaaaatcgttttatcctcttacaaattccgtggccaaattacttgtgattcaataaggaattatttgagtgctcaaattgttcaatctatctctttcaagagagatttcttcttttcttcttcttcattctgaanagggattaagagaccgagggtctc

SEQ ID NO: 3353 - DNA, 399 bp, Glycine max
ccctctgctgcggctaagctatcttgaaagaagtgcattttcttgcttttgtccgtagaatatgcccccattcttcggcaatacatctgaagatgaccatttggacacgtcgcctctttgtatttatcaaaatctggtactttaaacttgggaggaatgatgatgtcaggtaccagacacagatcccgctaattcgagaacgggtagttgctgaggccttctaccactcttagcctctcttcaagtaaatcaatctttcccttgtctattgcaaagggaacaagttccttaacgggtgatgatggagacaggacgtggcggactatgtttggttggggcaactcatggggggccgaatccttgatgagaagtagagggcctaaatgagcatcttcttca

SEQ ID NO: 3354 - DNA, 398 bp, Glycine max
  unsure at all n locations
agcttcttcttgtttctctcttcatttgaaacctttattcttcttgagcacttcattgagaggcgctgccaatgtgctaaaatccttcacaagtcgtctataaaaacttgctaagccatgaaaactcctcacctcggtcacagacttaggtgtccgccattcttgaatagccccaaccttctcctcatccacttgcactccttttgaactcacaacaaaaccaagaaacacaatatggttagtacaaaagatgcatttttcaagattggcatacaattgttcttctctaagcacagcccagacagattctacatgatcaatatgcaaatcaagtgaagtgctatagataagaatactctgaaagtacaccacaacgaantttcctatgaactctctta

SEQ ID NO: 3355 - DNA, 182 bp, Glycine max
ccatcttgggatgttcccagcctttgatgacagctttacaggttctgctatccagtgatttgaggaagggcaccattcttgctttccagtattcatagctggttccatcaagaagtggtggtctgcgcactggacctccttctttctccatgttcataagaatttatctccctacatctcac

SEQ ID NO: 3356 - DNA, 429 bp, Glycine max
agcttaagctccttcaactgcacaaggcttttaatatttgaagagtatccttgtggaaccttcacccgacgaagacactgacaaaaacttatcttctcctttttggacaaagtatggcaagctgggggcaagtaaattatcttcccatcacaccttggatgcaactgtgatcgtatgcccatatcacctagatcttgaccggtattctagccatccttcgtcttgccttgaatgttaaggagcgtcccaatgacactgtcacaaacatttttctccacatgcataacatccatacaatgtctaacgtcaagatcagaccagcacggaagatcaaagaaaacggacctcttcttcaatatgcaactctgacttttatccttcttttgggtcttctcaaatacattatctaggtgttgaacccgctgatat

SEQ ID NO: 3357 - DNA, 313 bp, Glycine max
agctgtgagcaacttcaaacaacaataactttctactcggatgtctgtttgagacccgtaagatatccaaacgctcgaaattgaataccgaagctctgagcaaatctaaacgagaataagtttttactccggaagtcagatgtgaggacccgtaatatatcgagtcgctcaaaatggaataccgaagctgtgtgctaattccaaccacactacctttttactcggatgaatgattcagtctccgaatatatacaaacgctcgaaatcgaatacccaatctctgagcaaatttacacgacaataactttttact

SEQ ID NO: 3358 - DNA, 441 bp, Glycine max
agcttctgataaaaaccgagcagttctaataagatttgtcatacgaatacccttacgctttgcagatatataaggcgacattttacgattccattttctagtaccgcggccaaaatgaactcctgcttccatcatctcttccaagattatgtccccatatcttcttgtcatttatatttatccccacacttttctttcatttcaaaatcgaaattctataaatcttttgaaatgaacaaaacagacccggtatactgaaatagaaataagtgttccaaaggaaccttctcttctaccgaagattggccttcgataaacgatcgggccatcttttctatttcatacttaatatgaccattctctttattatctttcttttattacacaacatcaaatgaccgaagatgaatccgctcttaagaatcattattttacgaatta

SEQ ID NO: 3359 - DNA, 410 bp, Glycine max
  unsure at all n locations
agctntgaatgcactattcattggagttgacaatatcatcttcagactgatcaacacttgcacagtggccaaagatgcatgggagattctgaaaatcactcatgaaggaaccttccaagtgaagatttccagattgcaactcttggctacaaaattcgaaaatctgaagatgaaggaggaagagtgtattcatgacttccacatgaacattcttgaaattgccaatgcctgcactgccttgggagagaggataacagatgataagctggtgagaaagatcctcagatccttgcctaagagatttgacatgacagtcactgccatagaggaggccccagacatttgcacatgagagtacatgaactcattggttctcttcacacctctgagctacgactctcggatagggc

SEQ ID NO: 3360 - DNA, 397 bp, Glycine max
  unsure at all n locations
agcttcatgatgatgattctagtatgaatcaagttgttntgatgatgacaaacagtccaaaagaatgatttcaagattgagtcaacaagttcaagatcaagattgatttcacgattccagagaagaaatcaagacgacttccccagggaagtactgaaaaggacttttccaaaaccaaacatagcgcagttttgttttacaaaagagttttctcaaaattttctaagttaccagagtatttactctctggtaatcgattactagtttcctgtcatcgattaccagtgataaagtttcatttcacaagctcttaactgaatttgcaacattccaaatgatctttaaatggtgtaatcgattacaatatattggtcatcgattaccagtgtatctgaac

SEQ ID NO: 3361 - DNA, 415 bp, Glycine max
agcttaagacttcaagatctgaactccttatttctttgagcatttcgtgcaagcttcattcaaggtaaggggggtctttccacttcttgaaccctaaccttgtttttggaagctaggcttcattgcatgttgtattgatgtttaaaattatgtatatgttgccatgactaaaactgtgtaatatgttttttttttcttgaatttttaaggctaaaatgagttttttgggtattaaaacttacggttagccttaagtttcccttatatcaaagttttctagcaaaagttatgaataaaacaagtttaaggactttctgtatgaaattctgatactgcggacagatgtcctaccggatgtcacgacatcacgctctacaacatgcagattgtacttgactgtatgaacacattaaac

SEQ ID NO: 3362 - DNA, 213 bp, Glycine max
cagcttgtgcctccttacgtctggaatatgaatgtatcatatacatccaaacacccttaagtgctttgctgatggcttcttcccgctccaagctctaattggagtcttgtcttttacagacttagctggacgtctgttgagtatgtaaacagcagtggcgactgcttccgcccacaatgtgttatgtagtcccttttccttgagcatcgatct

SEQ ID NO: 3363 - DNA, 426 bp, Glycine max
  unsure at all n locations
ggtttctggaccgagaatcatctntgcaaagagccattttggagcaattgggctatctgaggattggtgcctttctgctgctgattacctaaactgtgccctgctccattttccattctgttacctagggcttccaattggaatcaatccgagaagaaaggtggtgtgggagcctataatcagaaaatttgaggctaggctaaataaatggaaccagagaaacatttcgatggctagtagaatcactctaattaatgttgtcctaacagcattgcctttgttctatctgtccttcttcagggcccctatagcagtgattaatagattaactgccatccaaaggcactntctttggggtgtgtaattggaagggaagaaaattgcttgggtagcttggagacaggtgtgtgcctctagagaaatggg

SEQ ID NO: 3364 - DNA, 396 bp, Glycine max
gcatgcaagctctggcgagaaatatacctttgagcgggtgtttgcaaggttggtttgactaatgttgtgagcatcaaagtgccaggcctcggggaaggactcatccgcttgtgttcccatccaaaccgcaagcatgatttccccattattatgaattttttggcccttcttgtcctccaatatgtaccattgaggagccaaggggctgtctgggggtacccgaagaggaacctcagtgagatcaaacataactctccccacaaaatcatccttgacaatgtccttatccttgacggcgactctaagcaaatttgattgcagcctgtccttggagaaggcgaagatttgattccagacagggttctggctcttgtccaagtgcttggtgaggccctt

SEQ ID NO: 3365 - DNA, 397 bp, Glycine max
  unsure at all n locations
tcaacctcagcagtttaatcaaccacagcagagcaattatgacctttccagcaacagatacaaccctggatggaggaatcaccctaacctcagatggtccagccctcagcaacaacaacagcagcctgctcctttcttccaaaatgttgctggcccaagcagaccatacattcctccaccaatccaacaacaacaacaaccccagaaacagccaatagttgaggcccctccacaaccttcccttgaagaacttgtgaggcaaatgactatgcagaacatgcagtttcagcaagagaccagagcctccattcagagcttaaccaatcagatgggacaattggctactcaatngaatcaacaacagtcccagaattctgacaagctgccttctcaagct

SEQ ID NO: 3366 - DNA, 311 bp, Glycine max
agcttctaaactttatacaacaatgttgctctgataccacttgttagacaagtggcctcagatatcttaagaaggggggttgaattaagataatgcacactattctccccattaatactctatttccatttcaatgccagctgcaagttcccttacaaacgaactcttaaataatgatttcaatacaacaacctgaatataaatctcaagcaataatatactcaatagtttaagggaagagaaagtgccactcatattatattggtttggcacacccttgtgcctacgttaatcccaagcaaccccttgag

SEQ ID NO: 3367 - DNA, 415 bp, Glycine max
catgcaagcttctgttttcaatttcgagcgtctcgatattttacggcgctctatccgacatccgagtgaaaagttattgtcgtttgattcttctaagagcttcccttttcaattacgagcgtctcgatatattacgggacacaatcggacacccgagttaaaagttattgtcgtttgaatttgctcacagcttctattttcaattaccagcgtctcgatatattacgggactcaatcggacatccgagtaaaaagctattgtcctttgaatttcctcagaccttctgttttcaattacgagcgtcctgatatattacgggactcaatcggacactcgagtcataagttattgtcccttgaatctgctcacagcttctattttcaattacgagcgtctcgatatattaccggactc

SEQ ID NO: 3368 - DNA, 418 bp, Glycine max
gcttcatgcacatgaagtcaagtttcttgcttctaaaagggattgttagtttggaagcggtgttctcttctaccaccgtctcatcaagggtttgatcttttcagacgctgttgggttcaaaggttgccgagaaattgaagggccttatgttgagtatcttgcagaacagtttgggaagcctgttttgctttcaggacctttcatacctgagccacccaacactgtttttgagggaaaatggggttcatggcttgaaaggttcaagcttggttctgtggttttctgtgtacttgggactgaatggaagttaccacatgatcaattccaaggactattgttgggtcttgaacttacagggcttccttttttggctgttctaaaagttccaattgggtttgagacaattgaagctgctcta

SEQ ID NO: 3369 - DNA, 441 bp, Glycine max
  unsure at all n locations
cttgctatcccatggaagctcctaatatctcccacactntntgtggtgggccattcttggattgccttgattttatcagggtccacttggaccccatttctaccaactacaaaacctaagaagactatattatctacacaaaaggtacacttctctatatttgcatagagggtttttttcctaaggactgaaagaacttgcctgatatgtcctaagtgatcatctaggctcctattgtacactaaaatatcatcaaaataaacaactacaaatcgacctatgaaatcccttaagacatgatgcataagcctcataaaggtgcttggagcattagtgagcccaaaaggcatcactagccattcatacaaaccaaacttggtcttgaaagcggttttccactcatcaccctatttcatcctgaattggtgataaccactttta

SEQ ID NO: 3370 - DNA, 212 bp, Glycine max
cgtaatatatcgagacgctcaaaattgaatgttgaagctctgagcccatatacacgacaatgaccttttactcggatgtctgattgagtcccgtaacatatcgagacactcgaaattgaatgttgaacctctgagcatattcaaacgacaataactttttactcagatgtctgattgagtcccgtaacttatctacacacttgaaattgaat

SEQ ID NO: 3371 - DNA, 450 bp, Glycine max
  unsure at all n locations
ctagaacgtgatgaacttcagtcattattctaatagcaccattatgcattatatatagntaaattattctattaattcttcctctactttattaattctatttccaacttattttttatggaaatttaatgtaaaatatattctattttttctgttatatcactcaatatttcttaattattaaaaaaagaacgagttatatttgattattattctattaaattcaaacaattntattttcaaaattttcctctatttttagaagttgtattcttaatcaattatttcattcttcttttaacattctttaataactattataatattatttaataacgtactatgaaaaataatcaatcaatttatttcatttctttttagtattttttaattaacaatatatctttgtaggtaatatatgtatgctatatcagtttttcagagcaatga

SEQ ID NO: 3372 - DNA, 306 bp, Glycine max
  unsure at all n locations
agctagngaatgtgttcgggtttggtgttcatgtattttttctttcctacacctgatctagcgagagtatatantcttatccatatgctaatctgattttctatgatcaattgcagtgttagtgtgtttggcgtctcaacataactaatgcagtgttcctatgattcacaaggaaacagcgcccccactattctactgctaatgcgagaatgattatactcacacgatggcctacacgtacgtaccaataatattatatactctgtcatttgagccattgactatgattgcgtcactgactatcat

SEQ ID NO: 3373 - DNA, 436 bp, Glycine max
acgacaataactgtttactcggatgtctgattgagtcccgattatatcatgtatctcgaaattgaatgttgaacctatgagccaattcaaacgacaataactatttaatcggatgtctgattgagtcccgtaatatatcgagacgctcgaaattgaatgttgaagctttaggcaaattcaaacgacgataactttctactcggatgtctaattgagtcccgtaatatatcgagacgctcgaaattgaatgttgaacctatgatccaattcaaacgacaataactatttactcggatgtctgattgagtcccataatatatcgagacgctcgaaattgagtgtgatcctctgagccgattcaaacgacagtaatcttttactcggatgtccgattcagtggtgtaatatatcgggacgctcgaaattgaatgttgaa

SEQ ID NO: 3374 - DNA, 436 bp, Glycine max
agcttcaacattcaacttcgagcgtctcgttatattataggactcaatttgacatccgagtaaatttgttttgtcgtttgaatttgctcagagcttcaacattcaatttcgagcgtctccatatattacgggactcaatcagacatccgagtaaaacgctattgatgtttgaatttgctcaaagcttcaacattcaatttcgagcgtctagatatattacaggactcaatcaaacatccgagtaaaatgttactgtcgtttaaatttgcttagctctccagctttaaatttcgagcgtctcgatatatgacgggactatatcagacatccgagtaaaaagttattgtcatttgaatttgcttagagattcaacattcatcttcgagtgtctcgttatattacgggactcaattatacattcgagtaaaaagttatt

SEQ ID NO: 3375 - DNA, 437 bp, Glycine max
agcttatcgtaaccgattacacatttatttttgagacaatgattgattttttaggagtctctgctttaatccattaccagtagatataatcgattacttctctcttaaaaagtgtttcagaagtgatcaagaacactttaatcaattacatcaaaaatctaatcgattacattgttcttgaaagttttccaatttttgggaagaacactttaatcaatcaaaatggtaataatcaattacttctttgaaataattgattacattgtatatttaattgattacaggcagttattacgagctggtataagctagaataacattattagaaaatatgttttttacatcggttatttatgactttcaacatcggtttttaaatcgatgttgaaagtaccgacgttgatagtattattggtaacatcggttttttaaaaact

SEQ ID NO: 3376 - DNA, 402 bp, Glycine max
  unsure at all n locations
tagagctaattcaaacgacaataactntctactcggatgtctgattgagtcccgttatatatcgaggcgctcgagattgaatggtgaagctctgagcaaattcagacgacaatatctttttacacggatgtctgattgagtcccgtaatatatcgagacgctcgatattgaatgctgaacctctgagctaattcaaacgacaataactctttactcggaagtctgattgagtcccgtaatatatcgagacactcgaaatggaatgttgaagctctgaggatattcaaacgacaataactctttactcggatgtgtgattgagtcctgtcatatatcgagacgctcgaaattgaatgttgaagctctcagcatattcaaacgacaataactttatactcgaat

SEQ ID NO: 3377 - DNA, 328 bp, Glycine max
  unsure at all n locations
agcttcaacattgaatntagagcgtctcgatatattatcctgactcaatcagacatacaagtaaaaagttattatcgtttgaaaatcctcagagcttcggtattcaatttcgagcgtctcgatatattacgggactcaatcagacatccgagtaaaaagttattgtcgtttgaattagctctgaggttcataattcaatttcgagcgtctcaatatattacgggactcaatcagacattcgagcaaaaagttattgtcgtttgaattagctcagagcttcagaattcaatttcgagcgtctcaatatattacaggactcaatcagaca

SEQ ID NO: 3378 - DNA, 425 bp, Glycine max
  unsure at all n locations
agctngccaaattcttattatttagcagtcccaatataattnttagattgggagaaataataaatcgttactatatcattatgagaaatacaaccaatctgtgttctaaacaaataattaaagaatacctgaatcaaccatacaacattctcactgtacaaatcattattcactatccaactggctagttggtcccactcactttgcttcctaccatatattgatattctatattcagccatctgtgaataaataaggcacagaaataagttaacatctagatggggataagcatatataaacaacagtcaagaaatggtaaattatagtcaacaagtcaaaacacattggccaacataggtcctcatactcatgaacatattattgcactattgngtagtggtaaataaagacgcattgtaatt

SEQ ID NO: 3379 - DNA, 378 bp, Glycine max
tagttgtaccatgtttagtttacttgagatcagatggcagaggtgtgaatattggtttggcatcaaccatcttagccttttcaagcaaatcataaatatatttagcttgagataacaatagagaaccattactcaaatgttttacttcaatacccagaaaataatccaagtttcctagctgtttaagagcaaaaacaacatgtagtttggtaattaagtttcaaataagaactggagatgaccctgtgatgataatatcatcaatacatatcaacagataaagacacttagaatcagtgttgaacactagaagggatggatcacactttctttgaacaaagccaaaagtcagtagtgttttggttaatctttcatact

SEQ ID NO: 3380 - DNA, 357 bp, Glycine max
  unsure at all n locations
tccaagagttgaggcgattgacaacagctccaatgttgattntgtccgaccctaagagaccatttgaagtgtattgcgatgcgagcgggcaaggcttanggtgcatattgatgcangagggaagggtanttgcttatgcttcacgcccattatgtcctcatgaagttaactatccgacccatgacttggaactagcagctgtggtctttgccttaaagatttggaggcactatttatatggcactcgttttgaagttttcagcgatcacaagggcctcaaatacttgttcgatcagaaggaactcaatatgaggcaatgaagatggatggagttcctcaaggattatgactttggtc

SEQ ID NO: 3381 - DNA, 455 bp, Glycine max
  unsure at all n locations
gcaagcttctaaactntatacaagaatgaagctctggattcatcttgttagacaagtggcctcagatatcttaagaaggggggggttgaattaagatatcccaaattactttccacaattaaaaatttatttcactttcttttcaagttatagattcccttaacaatgaacttcttaaatattaattgaaataaaacaatttgaatatgaatgtaaagcaataataaacaaaggaggttaagggaagagaaagtgcaaactcagatttatattggttcggccacacccttgtgcctacgtccagtccccaagcaatccgcttgagagttctactatcttgtaaattccttttacaagttctaaacacacaaggacaatccttcctttgtgtttagaattcctttacaacaagagacccacagtctcttaatcccttagagaatgagtagaagaag

SEQ ID NO: 3382 - DNA, 460 bp, Glycine max
  unsure at all n locations
ggaatcttctaccccatttctgacagccaatgggtgagtccagtttaagtggttcctaagaagacatgcctcacagtgattaagaatgagaagaatgagcttatccccacaagagtgcagaacagctggcgagtctgcattggttataggaggctgaaccaggtgaccagaaaatatcattttcccctgccattcattgatcaaatgcttgagcgcttggcaagtaagtctcattactattttcttgatggtttttctggttatttacaaattcatattgctcctgaggatcaaganaagaccatattcacctgttcctttagcactttttcctataagaggatgccctttggcctatgcaacgcccctgataccttctagtgatgtatgcttagcattttcagtggatttttagagannnncatataggtgtttatggatgattttactatntatggat

SEQ ID NO: 3383 - DNA, 451 bp, Glycine max
agcttccttaagaagattcctaaagaagctagagcttatctacacatactctctctaatagctaagctcacctccttgagatgagaagctagagcttagctacacaccccctataatagctaagctcacccccatgacaaaaaacatgaaaataaaaaaaaagtccttattacaaagacaactcaaaatgccccgaaatacaaggctaaaaccctatactactagaatggccaaaatacaaggcctagacgaaggaaaaacctattctaatatttacaaagataagcgggctcatacttagcccatgggctcaaaatctaccctaaggctcatgagaaccctagggcctttccttggatctctagcctaatctacttggagtcttctaaccaatgcccttgcggggtaggattgcatcacatacgatatgtcattaagtaatgcatttcag

SEQ ID NO: 3384 - DNA, 432 bp, Glycine max
agcttcttagtttcagatgatgcagatgggtttgtttctacctcatgctctcctctaatgactatggcatcatttctggcactaaactgctgggagttggaggccatcttctcaattaaatttctggcttcagcaggagtcatgtctccaagggctccaccactggcagcatctatcatacttctctccatattactgagtccttcataaaagtattggagaagaagctgttctgaaatctgatggtgggggcaactggcacatagtttcttaaatctctcccagtactcatacaggctctctccactgagttgtctaatacctgagatatccttcctgatggctgtggtcctggaagcagggaaatttttttctaagaatactctctaaaggtcatcccagctcgtgatggaccttggagcaaggtaatac

SEQ ID NO: 3385 - DNA, 362 bp, Glycine max
aaattatcttttccattattcaatacaaatcatttacagcctaagatatgaagatgtgagatgttcggttatatgccattgaacaattcatatggcagtttctttacaatgggtcttattaaagccctatataatatgtagcatgcagtgctaacgacttcagcccaatagtattttggaagaggagtatcatataataaagttttagcaatctcttccaaagatctatttttcctttcaacaacaccattttgttgacgggttctaggtgcagaaaagatatgctcaatcccatgcttatcacaaaatattttagattctttattctcaaactcacgcgcatgatcactcctaatagatat

SEQ ID NO: 3386 - DNA, 431 bp, Glycine max
agcttatgctgcaaacatttattatagaccccctcataagcaaaaccaacatcagcagaataattatgatctttcaagcaacagatacaatccaggttggaggaatcatccaaatttgagatggacaagtcctccacaacaacaacagcctgtccctaccttccagaatgttgttggtccaagcaagccatatgttcctcctccaatgcaataacagtagcagaagtcacaacaaagacaacaagcaactgaggctcctcctcaaccttccttagaagagttagtgaggcaaataaccatccaaaatatgcaatttcaataagagacaagagcctccattcagagtctgacaaattagatggagcatatggctactcagttaaaccaagctcagttccaaaattctgacaaattgccttcacagactgtgc

SEQ ID NO: 3387 - DNA, 415 bp, Glycine max
agcttgactactttggtactgatcatattctcggattaaatgatgatcaatgtcaatgtgcttggattgttcatgatgagtacagcttgaagcatgacttatagcaaatttattattacaaaatatcatcacagagggcacatcaactttaaagtaaagaagtaacttgcttaaccaaacaatttcactagtaacagaagacaaggcaagatattcagattcagtggatgattttgaaacaatgggttgtttcttagaacgccaagaaagaaggttgtttcccagaaagacacaaaagccagaagtggatcttctggtatcaacacagctggcccaatcagcattagcaaaggcagtgaggttgagagagttctgagcagatttgatatattgcagaagatgatgaacaacatgt

SEQ ID NO: 3388 - DNA, 439 bp, Glycine max
  unsure at all n locations
tgctaacccatggaagctcctaatatctcccacactttatgatgtgtgccattcttggatggccttgattttctcagggtccacttggaccccatttctaccaactacaaaacctaagataactatattatctacacaaaaagtacacttctctatttttgcatagagggtgtttttcctaaagactgaaagaacttgtctgagatgtcctaagtgatcatctaggctcctactatacactaaaatatcatcaaaataaacaactacaaatctacctatgaaatcccttaagacatgatgcataagcctcataaaggtgcttggtgcattagtgagcccaaaaggcatcactagccattcatacaaaccaaacttggtcttgaaagcagttntccactcatcaccctttntcatcctgatttggtgataaccactttta

SEQ ID NO: 3389 - DNA, 433 bp, Glycine max
  unsure at all n locations
agcttcttggaggaccaaattgcaaggaagctattctcgaactaaatgcttcagatgaaaggtacatttttgtaatttctcaattcagttttcaattctggacgatttcctgttaatttatcctttcacttttggttatagatgacttgctccacggttgaactcactgttcaataggtggagaagttgagggaaatgagtccactttatgaaattgtcaaggaaggtatcaacatcaaggacattcaatgggcacagcactgattattatcaagctctcagattgcaatgcaagtgatgggaagcaattgtgattgaactccagacgtagctgccactcttgcaattgcagattcttcgaacttgctgattatntagtaatttgtatctcgagggtacattacaattagaaatttaccctggcagagctatt

SEQ ID NO: 3390 - DNA, 361 bp, Glycine max
aagcttctcgatgtattatgcgcctgaatcggacatccgtgtgaatggatatgaccattggaatttcttattagcttccgttgttcaatttcaaacttctccatttattatgcgcctgaatcggactttcgttgaaaagttatgatcaattgaatttcacgagagctttggttgtccaatttcgagcgtctcgatatattatgcacctgaatcggacttccgtgtgacatgttatgaccatttaaatttctcgagaccataccttgttcaatttcgagcgtctcgatatattatgcgcttgaatcggacatccgtgtgacaagttatgatcattggaatttgtcgagagctttcgatgttc

SEQ ID NO: 3391 - DNA, 422 bp, Glycine max
  unsure at all n locations
agcttctcgatatattatgtgcctgaatcggacttctttgtgacaagttatgaccattngaatttctcgacaccatacgttgttcaatttcgagcgtctcgatatattatgcgcctgaatcggatgtccgtgtgacaagttatgaccatttgagtttctcgagagctttcgttgttccatttccagcttctcgatatattatgcgccggaatcggacttccgtgtgacaagttatgacgcattgaatttctcgagagctttggttgttcaatttcgagcgtctcgatatgttatgcacctgaatcggacttccgtgtgacaagatatgaccatttgaatttctcgagagcattcgttgttcaatttccagcatctcgatatattatgcgtctgaatcggactttcgtgtgacaagttatgac

SEQ ID NO: 3392 - DNA, 435 bp, Glycine max
  unsure at all n locations
agcttcaagaaaaatggcctctatatactccttanttccataacgaaattctatcaatagacctccaattnttaatggagagggttaccactactggaaaacccaaatgcaaatnnttttttatgcaatagacttaagtatntgggaagccatagaaatagggccatatatacccactacagtagaaagaattacaatagatggtagcacatcaagtgaaagcataccattagaaaaacctaaagatagatggtctgaagaggatagaagacgagtacaatacaatctaaaagccaaaaacataataacatttgccctgngaatggatgaatatttcagggtttcaaattgtaagatcgctaaggaaatgtgggacactctacaattaacacatgaaggaactacagatgttaaaagatctatgataaacacact

SEQ ID NO: 3393 - DNA, 414 bp, Glycine max
  unsure at all n locations
agcttgaaattgacaacggatgctctcgaganaatctattggtcataaattttcacacagatgtccgattcggggaaataatatatcgagactcacgaaattgaacaacggaagctctcgagaaatttgaatggtcataacatttcactcggatgttcgatccggggacataatttatcgagacgctcgaaattgaacaaccgaagctctcgacaaattagaatggtcgtaacttttcacgcgaatgttcgattcggggacataactcatctagacgctcgaatatgaacaacggaagctctcgagaaatttgaatggtcataagttttcacacggatgtccgattcgggaacataatatatcaagacaatcgacattgaacaacggaagctctcgagaaaatcgaatggtcat

SEQ ID NO: 3394 - DNA, 402 bp, Glycine max
agctttgatttcctttgttcctgttacctttcttttctcatgtgcacccaaacccaatctccgggttcgaagacaaccttctttctccctttgttggcttgtttagcatagcttttatttttcctctcaatttgatctttgactctctcatgaagcttcttcacatagtccgcctttgcttgaccttctttatgcttaaaaacagaaacattaggcatatgcaaaagatcaagaggagttagtgggttaaaaccataaacaacttcaaaaggagaacaattagtggtgctatgaacagctctattgtaagcaaattcaacatggggtaaacaagctctcccaagttttaagttcttcctcaaaactgtcctaaacaaagttcccaaagtcctattaacaact

SEQ ID NO: 3395 - DNA, 433 bp, Glycine max
  unsure at all n locations
tctcgcgaaatattggttctaatatggtactaattgcatatttatgggcttgtacagatccaaaatanttgtttagtggagacaataatttttttatcaatggcaataaaaacaccacaacaactatcatttatatagatagatagataaatatatacccaaatattgttattgatccataataaatttttcttcatttttgttccctgatatttgacatggttttttaaattgtagtcattagttaagtgatgacatgtcactactaaaaaatagggtttcaacattggttattaaggactttccacatcggttattaaccgatgatgaaagtaccaacgttgaaagtaatatcgttaacatcgattttccaaaaccgatattaatataaaattacaacatcggttattgaaataactgatgttatataata

SEQ ID NO: 3396 - DNA, 435 bp, Glycine max
gcttctcgagaaattcgaatggttataacttttcacacaaatgtccgtttcggggactttattcatctttactctcgaaattgaacaacgcaagctctcgagaaattcgaatggtcataacatttcgcacaaatgtccaattctgggacataatatatcaagacgctcgaaattgaatagcggaagctctcgggaatatcaaatgggcataacttttcacatggatgtccgattcgggaaaataatatatcgagatgctccaaattgaacaacgaaagctatcgagatattcgaatggtccgaacttttcgcacggatgtccgattcggggacataactcatctagacgcacgaaattgaacaatggaagctctcgataaatctgaatagtcataagatctcacacggatgtccgatttggggaaataatatatc

SEQ ID NO: 3397 - DNA, 458 bp, Glycine max
  unsure at all n locations
tctanactntatacaagaatgaagctctgataccacttgttagacttgtggcctcttatatcttaagaagggggggttgaattaagatattccaaactacttccccaattaaaaatctatttcactttttattcaagttataaattaccttaataatgaacttcttaaatattgattcaaataaaacaatttgaatataaatataaagcaataataaacaaaggagattaagggaagagaaagtgcaaactcagatttatactggttcggccacacccttgtgcctacatccagtccccaagcaacccgcttgagagttccactatcttgtaaattccttttacaagttctaaacacacaaggacaatccttcctttgtgtttagaattcctttacaacaagagacccacggtctcttaatcccttagagaatgaggagaagaagaagaatgaatctc

SEQ ID NO: 3398 - DNA, 439 bp, Glycine max
agcttgccttgccccttgatatatttgagggactcatggtcactatgaatgacaaattccttgggataaaggtagtgttgccatgttttcaaagcccgtactaaggcatacaactccttatcataagttgaatagttaagggtaggaccacttaacttttcactaaaataagcaattggatggccttcttgcatcaacacagccccaatcccaacatttgaagcatcacactcaatttcaaaagatttttgaaagtttggcaacgcaagtatgggtgcattagttagcttttccttaagaacattgaaagcttcttcttgtttctctccccatttgaaaccagcatttttcttgagcacttcattgagaggtgctgccaatgtgctaaaatccttcacaaattgtctataaaaacttgctaagccatgaaaactcctca

SEQ ID NO: 3399 - DNA, 403 bp, Glycine max
cgagtgtgaatgccttgctgagggcgttgtggggacagaggtattataactcttaagacgattatgattgttgggaagaaaggggttggggggaataagaagcctatgtttgttcagtttgtgttggagcccttgtggcaggtgtatcagggggccttggaaggggataaggggctggtggagaaggttattaggacctttagtttgtcggtgccgcagcgggagctgcagaacaaggatgtcaaggttgtgctgcatgcggttatgagccgctggcttccgctttcggaggcggttttgtccatggtggttaggtgtttgccggacccggtgacggcgcatgcatttaggatatccaggttgattcccaagaaggaggttattggggatgtggagggggttg

SEQ ID NO: 3400 - DNA, 444 bp, Glycine max
  unsure at all n locations
agcttgaaagaagaaaattagtaattaatgtaaggttagaaattaagtggtgataattaaggttgattaatggtgatctagatttcatagaattagaaaataggtaattaagtcttaagagtttaaagttgagagtatttttgtaaatgaccatacgactagtttaaaaatagaattttagtttaattagtgtctgattatatatatggaataattaaaatatgttagagttgtaacaccctgaaaaattataactcaggctgatagaggaaactctatgttgtgtcatctgtgcatgtgtgtatataattgcaatgattatgtgtttttaattattaatttttgtgctatatatgaatatattttgtgtaaataatttgtttagtctagcttggcagagatacgagaactgcctaaatgaaaattccatttgtaacanaattg

SEQ ID NO: 3401 - DNA, 460 bp, Glycine max
  unsure at all n locations
agccgacctgctgcatgcaagcttgttcgtaagtctcatcccatatcgagggctcaattntcttgagtgttttgttaaatggcttcaccttctcagcaagcttcgggaggaacctagacagggatgctagcctaccatttagtttttgaacttcttagtcgttgatcgagttgtgcatctccaatatggcagtgtatttatgggggttagcttcaatcccctggtaagtgatcatgaagccaatgaacttgcctccgcttaccccgaaagtacatttttcagggtggaggcgcatgtcatatttgtggagttccccaaagacttcttccagatccatcatgtgttaggctatgctttgagacttgatgaccatgccgtccatatataactcgacgtttcatccaatctgttgtttaaatacttggtccatcagccgttggtatgtagcgcatgcattttt

SEQ ID NO: 3402 - DNA, 434 bp, Glycine max
  unsure at all n locations
agcttatagaatatataatataataacaatgacattttgtgagtctatacatgtttcctttgatgagtctaatgccattctaccaaggaatgattttttagatgatatttcagattccttagaagatacacatattcatggaaatgaatctaaagaaaaagatgaaggaagcaatgaggattctcaagataatggggctagaggaaataatgaacttccaagagaatggaaagcctcaagagatcatcccctcgacaacattattggtgatatatcaaaaagggtaacaactagacattctcttaaagatttatgcaataatatggcttttgtatctatgattgaacctaanaatataanagaagccatagtagattataactggataattgctatgcaagaagaanctgaatcaattgaaagaaataatgtgt

SEQ ID NO: 3403 - DNA, 420 bp, Glycine max
agcttcttgacatcctggaggactatttgaatatttattttgggcctaaaacgtatgagagagtggatggatctgtttcagttgctgatcgccagtcagctattgcacgctttaaccaagacaaaagtcgatttgttttcttgttatccactcgctcttgtggacttgggataaatttggcaactgctgacactgtcatcatctatgattctgatttcaatccccatgcagatatccaagcaatgaatcgagcacacagaattggacaatcaaatagacttttggtataccggcttgtggttcgtgctagcgttgaagagcgcatcttgcagcttgctaagaaaaaattgatgctcgatcagctttttgtaaataagtctggatctcaaaagaggtagatgatatttaaaatggggactg

SEQ ID NO: 3404 - DNA, 439 bp, Glycine max
gaccttgaaactcagcttatgagagagtcaagatcatttggaggataataaaactttgctaaacagccacaaagggagatagaagttgtcttcgaacccggagattggtgttgggtgcacatgataaaagataggtttccggaacaaaggaaatcaaagcttcaaccaagtggagatggaccatttcaagtgcttgaaagaatcaatgacaatgcttacaaagttgagctgcccggtgagtataatgttagttccaccttcaatgtctctgatttatctctttttgatgcagatggagaatccgatttgaggacaaatccttctcaagagggagagaatgatgaggacatgaccaagagcaagggcaacgatccatttgaatgacttggacgacctatgacaagggcaagagcaatgaaagccaatgaagctcttctac

SEQ ID NO: 3405 - DNA, 460 bp, Glycine max
ctcaagctgcacccggaagcctaatttaaacgagatcattttgttcaagctcgcacctcgcgtagcttgaaggcttagagggttgggtcgaccctcattttcacacaaaataaaacaaagaattaaatttgaagaatcttgcaaggtgatggtgaggagtgtgagctagccgacgatggcaataatgtggtcttgtagggcggaagagaggatttttcaactaatgaggatgaatatcttgttgttgttgttgaagatggagatggtcttgatgaccttggagagctcgacggggagtgagagaggaagaggaggtgggcgaaggtgatgaagcaacgttgggtgtcgaagggatgatggtttggcaggggagtggaaatctatgagagggagatgcggatggtgtcgagggtgctcaaatgcaaatgatgacaataacatcacagatgggagaacaaat

SEQ ID NO: 3406 - DNA, 453 bp, Glycine max
tgtattgatttaaaacaaaaatgtaaaacatgtattcaagcaaagcaacctataatgggttttactacatgtattgaaagagaaactaacttacttgaattagttcatagtgatgtatgtgataataatgatgtgttaacacgtggtagtaagagatactttattactttcattgatgatttctccaaatattgctatgtgtatttagttaatcacaaaagtgagttgtttaataagttcaaagtatataaaatagaagtagaaaattaattagaaagaaaaattaaaattctttgttttggtagagggggataatacatatttttatatatgaataatttttttgaaatgcattgtattattcatgaagtgacatctttgtatgcttctcaatctaatggtattgcagaaagaaagaatcgtaccttgcttgatatggtgaatgttatgctt

SEQ ID NO: 3407 - DNA, 433 bp, Glycine max
  unsure at all n locations
tcagtccctgaganactggttcccagaagacatcagggagtgattattgctgangaccctagctctgcaacaagtcctagggaagtagacccggagatggacaagaaaatccgcagtattgtgagtagcattctgaaagatgcttctgtgcctgatgctgagaaagatgttccaacatcttccaccccaagtgtttccgtgcctgatgctgagaaagatgttccaacatcctccgctccaaatgctgaagccctcccgtcacccagtgaagaggaatcaacagaagaagaggatcaagcctcagaggagactcctgcaccacgggcaccaganactgctccaggtgacctcattgacctggaagaagtcgaatctgatgaagaacccattgccaacagggtggcacctggcattgcggaaagacttcaaaaca

SEQ ID NO: 3408 - DNA, 445 bp, Glycine max
tctagaatggtgtaccagatgatcgtggccccatccaagctatcttggaagaagtgcatcaacaacttctcatccctggaatgtgcccccatcttgcgacaatacattttgagatggttctttggacaagttgtccctttgtacctatcgaaatcaggtaccttgaatttcggggggatgacgatgttcggtactaagcaaagatcagtcatgtccgcaaacggatagtcgccaaagccttcaacagccctcaatctctcttcgatgagatcgagtttcctcttttcttctgctgccgtgcgtagccctcctgtggacaaaaatattggctgtgctggggagtttcgaggttctcccatgaggttgggctgaggtagtgcgttgggtgccggcccctcggcagggaatggggagtaggaatcaatgtctccttgggcatgccctc

SEQ ID NO: 3409 - DNA, 430 bp, Glycine max
tgcaagcttctcgatatattatgcgcctgaattggacttctttgtgacaagttatgacaattttaatttctcgagagcattcgttgttcaatttcgagcgtctcgatatattatgcgcctgaattggacttccgtgtgattagttatgaccatttgaatttctcgacagcttccgttgttcaattgcgagcgactcggtatatgatgcgcctgaattggacttccgtgtgacaagttacgaccatttgaatttcttgagagcttacgttgttcaatttcaagcttctcgatttattatgcaccttaatctgacttccgcttgacaagctatgaccatttgaatttctggagagcttccgttgtgcaatttcgagcgtctcgatatattatgcgcctgaatcggacttccgtgtcataagttatgaccatt

SEQ ID NO: 3410 - DNA, 453 bp, Glycine max
  unsure at all n locations
cttgatgctagtgttgaatgtgttaaaggtaaacagaccaaaagctagaaattaggtgcatatagagctacatacgtcttggaattgatacatacggacatttgtgggtcatttcatacatcttcatggaatggtcatcaatattttatatcattcatagacgattactccagatatgcatacttatttcttatacatgaaaagtcacaatctttggatgtgttcaaaacatttaaagttgaagttgaaaatcaactcaacaaaagaatcaagagtgttagatctgaccgtggtggtgaatactatggttgatatgatggttcaggtgaacaacgtccggngccttttgccaagtacctagaggaatgtggaatcgtcccacagtacaccatgtcagggtcacctagcatgaatgatgtggctaaatgacgaaacataactcttaaggatatg

SEQ ID NO: 3411 - DNA, 435 bp, Glycine max
agctctgatgcaagatttggagaggttaatgaaacttcgagatgatgctctccatgagaggttggatcaaatggaaaatagaaatcataatgaagaagaaaggaggagaagagggaatgatggtgttcctagacaaaaccgaattgatggtattaaactcaacattcctccctttaaaggaaagaatgatccggaggcctacttgtagtgggagatgaaaatagagcatgttttctcatgcaacaactatgaggagaaccaaaaggtgaagcttgccaccatggagttttccgactatgctcttgtgtggcggaacaagctacaaaaggagagagcaagatatgaagagccaatggttgatacatgggtggagatgaaaaggatcatgacaaagcggtatgtgccggctagttactcaagggaattgaaattcaa

SEQ ID NO: 3412 - DNA, 475 bp, Glycine max
  unsure at all n locations
ctatagaccactcaagcttcatgatgatgaatcaagttgattcaagtagttctgattatgacttagatgatgacttaaatcccaagagaatgatttcaagatggagtcaacgtgttcaagatcaagataaaatcaagattaatttcgagtttcatgaaattacatcaagaagaatcaagattcaagagaagatgacttcacaagggaagtgttgaaaagaatttttcaaaaatcaaacatagcatatttttgttttacaagaaaagtttttctcaaaattttctaaggtaccagaggttttactctctggtgatctattaccagtttcctgtaatcgattactagtggcagagtttgatttcaaaagcttttaactaaatttgcaacgttccaattgattntcaaatggtgtaatcgattacaatatattggtaatcgattaccagtgtatctgaacgttgaaattcagattcaa

SEQ ID NO: 3413 - DNA, 433 bp, Glycine max
tcttatccaaggctcatcttggtggtgaagctcttttttccatggcttattccttaatggatggcgcctcctctcacctcttctcctttgtcttccgctgcatctccatggtgaaaaatcaccattgaaggacctcattgaagctcaaagatccagcctccatagaagctccacaagctagcttccatcaagaaaaaaaaaaaagtccttactacaaagactactcataatgccccgaaatacaaggctaaaaccctatactattagaatggccaaaatacaaggcccaaacgaagaataaacctattctaatatttacaaagataagcgggtcatgcttagcccatgggctcaaaatctaccctaaggctcatgagaaccttatggccttcccttggatctctaacccaatctacttggagtcttctaccca

SEQ ID NO: 3414 - DNA, 440 bp, Glycine max
  unsure at all n locations
nggccgccacggagtttccgactatgctcttgtgtggtggaacttgctacaaaaggagagagcaagaaatgaagagccaatggttgatacatggacagagatgaaaaagatcatgaggaagcggtatgtgccggctagttactcaagggacttgaaattcaagctccaaaaactaacccaaggcaacaagggggttgaggagtatttcaaggaaatggatgtgctcatgattcaagcaaatattgaagaagatgaggaggtaactatggctcgatttcttaatggtttgactaatgatatccgtgatattgttgagctgcaggagtttgttgaaatggatgatttgcttcacaaagcaatccaagtggagcaacaattaaaaaggaagggagtggctaagaggagttttaccaactttgattcttctggttggaaagaca

SEQ ID NO: 3415 - DNA, 437 bp, Glycine max
agcttgacattggagtcaatcgtcgcctagacggtttgtgcacacgcttcattcttagccatattgttggtgcagtcaaaccccagtctggctataaaaggtatacattgattgtctagagagaccaatattgttccaacgccatggcctagaatgtttgaagctccgtcaaaccacacgatccacttgtcccgatcctcgtctagcttttcctcaaacaaggccatgatgtcctcatccgggaattcgggatgcatgggttgatagtcgttgagaggctgctgagccaaataatctgccaaggtgcttccttttatcgccttttaggtgacatagactatatcgaacttggatagcaaaacttgccaccgggcgatcctcccagtgaaagcatgcttctcaaagatgtacttaaccgggtccatcttggatatcaa

SEQ ID NO: 3416 - DNA, 424 bp, Glycine max
  unsure at all n locations
ntagaagttggggtcacttattatttaactcattgatttgccgttaaaactaatggaaaaacgagagtgtgtaatatttttgtttttcgtcttgtatgaacatccttcagtaaaatgaacatttctctctatatgattaactttggattttgagtcatacctcatccaaatctagacatacatgactttttatactggtaaagtttataaattttttgtatatgataagtataagttatgcaatagttctataaattctctatagaagacaaaaatgtaaacttgagttttaatataaatgtttaatcagataaatatatctatgtataaatttggtttgagttggattagattgaatttcaaaatgaaatccaaaatctgattttatccaaaaaaaatgggttattatattttaattgtcaac

SEQ ID NO: 3417 - DNA, 411 bp, Glycine max
tggttacctctttcttcactatacatcaagaatcaccgggttgagtcttctctgtggttgtcttactggtttagcctcatcttctaaatttattcgatgcatacatgtggatgggctaataccaggaatatctgccagggtccagcctatagctttcttatgcttcttgagaacaaataacaacttctcctcttgctcatcagcaagggaggcagatataattactggaaaacttttgccatcatccaagtaagcatattttaaattagatggtagaagcttcaattctggtgtgggcggctggatagtggtagaaagagatggtttctcagcctacacctcataaagaaagtccaggtatttgtacttacttgaacatggttagtttgatctgactctataaaatcaatc

SEQ ID NO: 3418 - DNA, 332 bp, Glycine max
ctggaactacttcacatggacttgatggggcctatgcaagttgaaagtcttggaggaaagaggtatgcctatgtgggtgtggatgatttctccagaattacctgggtctactttatcagagagaaatcagacacctttgcaactgtcgagcacttccacatctttggaagtccatgttacattttggcagatagagagccaaggagaaagatggatcctcagagtgatgcaggaatattcctgggatactctacaaacagcagagcatatagagtgttccattccagaaccagaacagtgatggaatccatccatgtgggtggtgatgatct

SEQ ID NO: 3419 - DNA, 535 bp, Glycine max
agcttgtattacttatattacaataaaaaatttgtattacttatatgtacaaatgaatgtgtatagtttttataaattatgtaaaataatttatatgaataattttaatacatataatcctttgtatataataatcttgaatatgattgtttttcgtaaataataattatttttctgtgaatgataattgtgatctttaccttaactaaaaaatatgtggttaaaaaatatgtttaatttttttgaaacacagcactcagtttttctccaaattaaaacagataatttaaactaaatgtaatttatatttagaattgacataacaaagaaataacatagtatttgaaatgaaaaaaaaaactgagaaataaaacgtcaataatagagtttaaaattatatcattccctagcaataaaactaacaactatactttcaaatgattttattaatatcatgttaaatattaaaaattttttaatactatgatattatttagaagtaggtcttataagatgatatatctcattgaatcta

SEQ ID NO: 3420 - DNA, 510 bp, Glycine max
tcttatccaagctcatcttggtggtgaagctccctcttccatggcttattccctagtggatggcgcctcctctcacctattctcctttgtcttccgttgcatctgcatggtggaaaaccaccattaaaggacctcattgaagctcaaagatccagcctccatagaagccccacaagcaagcttccatcacatatggaactattaaaaaaatcattagtaaaaaaaacataaagttattgtgatagtaatttgttgaacaatgaaatagttatttgttagaaataaaaaccaaaattgtagttgtattttggtcattacattaaatttttattagaattagtgttgtcaactttatatatttcacaaaaaatctatatgcatttatcaatatatttaagtaataaaaaaagtttatgaataaataataagacattggttatgaattattaaattgggattgattgaagtattgcttgaacgctcacaaattattatgaatcctttaatgtg

SEQ ID NO: 3421 - DNA, 493 bp, Glycine max
tataactgcatggtgtgccacaataactgataagatgcaaaataaatttagaaaaaaatcattattccctagatacctattaattgcaagagagaaatgatctaaaaatagtattatctaatgtaagctgaatggctgatccttcaagaaatgtatataatcatttcctataattattagaaattatttcttatttattactgttactattgtttgaattaaattaaaaagaaaataatatacagataggacaaggaatctttcctaaaagacaaaaacagacaagaaagctttcttttttctttacttaaaattatagcattcctctcttagtaaattcaccaaactcctgcaattcagatgttaaaacacagaatcctacttcataagccttatctgggctcagatttaatgagtcaaaatcctaatataattagcaatttactcaatcttggagaatgttgctatcaaacaaattcacaattagtttaag

SEQ ID NO: 3422 - DNA, 629 bp, Glycine max
  unsure at all n locations
tgaggattgtgtaccttccagattggatggttatcggtttcaatgacttagtctctacgcatttcgtccttgggggttgtgtaccctttgggttggatcattcccaatccatagcttaacccttccgattcgtgccttgagtccaaccttgcctcatcatatctatgtctaatctaattatctctaaaagcctaaacgcaccataaaatcgtcatagacacaattaatcacacctcgagaatcttgagatatgggagaatattttgaaatgtcataatgcattgactcatgaatataagagaggatacacatagtaaatgatgataaatagtcatctctttgacctaagaagacaagttgagcaatacaatttgcttgagtactctggattangttgtgtccatctacgagaaaacctttttctaaaataaatataaatatttgtgttcaatttgtctcttcctttacttctttattattatatttattcctaaatataaagttcttttaactaattcatatcatttaaaagaaatttaataatttaagtagtactattaatttgttagaaattggattatcttttaaaatacccttataatttttctaatcctattataagaaataaa

SEQ ID NO: 3423 - DNA, 337 bp, Glycine max
gcttgtcatgttttctggtgatgcagactttgctgatggagctcataatcttctcaataaagaaagtgaaatacgccgtggtggatttggagttgtttatcgaacttttcttcgtgatgggcatgcggttgcaatcaagaagctcacagtcttcagtttgatccaatcccaagaagactttgatagagaaattaaaaaacttgggaatgtcaagcacccgaatctcgtggcacttggagggtattattggacttcatccttgcagctccttatttatgagtacctatccagtgggagtttgcataaagttctacatgatgatagcagcaaaaatgtc

SEQ ID NO: 3424 - DNA, 256 bp, Glycine max
  unsure at all n locations
aaactcagcggcaccaagctccggatgagctctagctatcacccacaatcgggtgggcaaactgaggtcatgaatagaattgtcgaacaatatctttgcgcattcgtacaccaccaaccttctacctgaggtcgctttttgacttgggccgaatggtcatacaatacttcngttcattcggccaccggcatgttcccctatgaaattacatttgggaagaaaccacccttgttctctgcgatacattgaaagaaca

SEQ ID NO: 3425 - DNA, 548 bp, Glycine max
  unsure at all n locations
tgacagcacgataagctagaaagagcttattttgttgagcttatctctgaaactggtataattaaaatagagcttatttgaaggctaaaaatgattttcatgagcccaaaaaagataatgtaattttttatggccaaataatatatgttcataaaacaaaaatttaaggattgatgatcctgcttgtggtgtgcaagtttttgtgcaagctatgtgaagctactgcctgcaatgaagacatatgaatatggctttcgtgtgtttttgttgacattttgtattgtattggtatctgggagaactagcaaggaatttttctccacagccttttacagattaattcttattgcaattggtgctagcatatgcttgtttgtaaatattttcatataccccatctggtctggggaggatctgcataaattggtggtgaaaaatttcaatggagttgctgcatctttagaagggttgcttgaatttccccatatgttctgaatcccttgcaagatttgttggtgctttttatgcctggntgctgtacttaattt

SEQ ID NO: 3426 - DNA, 608 bp, Glycine max
ttgatttcctttgttccggaaacctttcttttctcatgtgcacccaaaccctatcttcgggttcgaagacaaccttctttctccctttgttggcttgtttagcataacttttatttttcctctcaatttgatctttgactctctcatgaagcttcttcacatagtccgcctttgcttgaccttcttaatgcttaaaaacagaaacattaggcataggcaaaagatcaagaggagttagtgggttaaaaccataaacaacttcaaaaggagaacaattagtggtgctatgaacagctctattgtaagaaaattcaacatggggtaaacaagcttcccaagtttttaagttcttccttcaaactgtcctaagcaaagttcccaaagtcctattaacaactttcgtttgcccatcggcttgtgggtgacaagtggttgaaaataacaatttagtggccaacttgctccacaaagtcctccaaaaatggcttatgaacttagagtccctatcactaacaatgctccttggcaaaccatggagtctcacaatcttcttgaaaaacaaatcagccacatgggaagcatcatcaatttttttacatggaataaaa

SEQ ID NO: 3427 - DNA, 493 bp, Glycine max
ttacgcgccatgcatgactactatccatttcgtacgtagtcttccaggtaaatgggtatcttcttcttcctcttgggcctaacttcactctcctcctgttgttcctttgctaattgcagacccctcgagttattcgtaacactctcgtgcccatcaaacaacaccttgtcctcaaggtggtgaagctccttaaagtctgaccactcttcccacgatgtttcttcaagtggcaggcctttccactgcaccaacaccataagttttggtcttgactaagagggaattagtttggacgctactatggctaaaggagtgacgacagggtgattgtccaaagccataggtggaagatcaacagtgcctctcggacatgcaatggccacatagggtttaaagagagaagaatgaaaaacggaatgaatgcgtgaatggtctggtaattgtagctggtaagctactttacccatgcgtgctgtaatttggaagggctcat

SEQ ID NO: 3428 - DNA, 484 bp, Glycine max
tgaagggctaacctatttagcaacaatattatttaatgaaaattttattagcaatatgatatataataattattttaatgaaattgcaaaattactttatgtggtctaacgatttgaatcattttaatgtttgaaattggttaatttcaataagcatagatggataacaagaatatggactcttttcttttgggtaagggtgttcgctggccggttttaaccaaattcaagactcaacctaatcaaatttgattagtttgctttgatttggtttttacattttttaaacccaacccaattcattcatgaacgatttggttcagttcgtgccaacaggttatccatttaaattagatctttttttcttataactactattttatatcaagattcatccaaatatccaatacaattaatatcatcaacataatattctaaaatacactaatgccacttttaaaaaatattcttcaacgatatttac

SEQ ID NO: 3429 - DNA, 309 bp, Glycine max
tctcttgaacatcttgaactcattcttttgattgacctttgagctttttgtcatcacctttgttatcatcaaaacatctttgaatcaatcttgtttcatcatgaaggtttgcttctacagcgatatctcaagggggtatagttgtagacccctctaagatagaagatgctctcgagtgggagagttcaaagtctgcttttgagattaggagttttctacgcttagtaggatattatcgaagaatcatagaaggtttctccaagttagctctacctctgaccaaactgacttgaaggggtcaagttttgt

SEQ ID NO: 3430 - DNA, 639 bp, Glycine max
tgggagaggatgctgaagatgaagcagtggagaggttcttgagccatggaatgagggagttgccatcaagattgggaatttgggtgtagtaaggggatgatgagccaaggcttggattgtaggaagcacatggacttggatggtaagatgagcaagggcttgctgctgctgatgatccaccaactatctccatgccctctgaaggcttgcatccctaattgtacacaaaatatattttcattaactgatcataatatgtggcatgtaataggatttccatcaccaaaatcttttcaaatataacaaataaatcattagtaagacactctaataaactccttcatgttggttccagtaaatatgtggattttttggtagattttattcccaaatcagtggaaactcagattaacttcaaccaataaaaaaaaatgtgttgaaaagaagtaaatgcacgagttatttaactcagcatgttctcagtatattgttgctatcaaatctaaccaacatggcataactattatttattgaataactcaacttcattcaaactaattaactataatttatcgaatagaacaattgtctctcttctatttatgttgggtactcgctacaatgtaatctctttttttt

SEQ ID NO: 3431 - DNA, 347 bp, Glycine max
  unsure at all n locations
caatcaacttgcttcaccagcagctcctattgaaacaccaaacttagtttttaaggctacacaaagagtctaacatgctatgacaaattaaatttcacttttcttctagttcgtatttctcagaatattacacatacaacagagccgataccaaccaattgaactatgttttccaatattaacttgagcagcaaccaactctcttcaaagcagacacatcatttttcagaatcaatttctcttctttggcaagcacagatgcagttccattntcagccccctctactgctttcttgctaacaatgcggtagatttgaatcagaacttcagcacatgcattctctaca

SEQ ID NO: 3432 - DNA, 347 bp, Glycine max
  unsure at all n locations
ctatcttgttaaaaaatcaaaacaggatcaatggcatattctatttttattatcatatcagaattataggaagaatatctcctgctattaattgcattaattataattaatttatataaatgaacatcccatgtgtactttgatacacgatttttactctattattcctttatttttctcttattttacatatttactaggagaaagggtaaaataatagataacctctgtattacaatacttatgtagcatatttttggatgagttntcggtaccttgtacctagtataaatatattctanttgccgataaaaaatgtaacatttctataccaatataaatcattt

SEQ ID NO: 3433 - DNA, 407 bp, Glycine max
tctggtgggacatcttgacttgctttccaatctgacattcaccgcagattctgccttcttctattttcagattgggaatgcctctaacagcacctttgtcaatgattttcttcatgcctcttaagtgcagatgtccaaatctttgatgccatattctgacttcatcttctttggagaatagacatgtggaggagtaactagtttcttgaggtgtccataggtaacagttgtcctttgatctgctgcccttcattaggacttcactcttctcatttgtcaccaagcattctgactttgtgaagtttacattgaacccttcatcacacaactgactgatgctgatcaagttcgcaatcagtcccttcaccagcagtactttgttcagactaggaagtccatcatggact

SEQ ID NO: 3434 - DNA, 461 bp, Glycine max
  unsure at all n locations
gatatttgtgttgaatgcattaaagggtaactgaccaacaacatgatattatgttcatatagangtacatatgtcttggaattgatacatactaacttttgtgggtcatttcatacaccttcatggaatggtcaacgatattttatatcattcatagacgattactccatatatgcatacttgtttcttatacatgaaaagtcacaatctctggatgtgttcaaaacaattaaagttgaagttgaaaatcaaatcaacaaaagaatcaagagtgttagatctgatcgtggtggtgaatactatgacagatatgacagttcatgtgaataacatcccgtngccttttccacagtacaccatgccagggtcacctaacatgaatggcgtggctgaaagaataaacacaactcttaacgatatggtaagaaacatgatttgcatttctacttactagagcactc

SEQ ID NO: 3435 - DNA, 505 bp, Glycine max
caaagtatataataataatttatgaatgaccgttcaaactataatgggagtctaatcaaaatccaactctcacaccgaaagcaatgaggactgcggacaactaataacatatgtcatcataacttatatatagtttaaaacttgtgattaaatgttaaaggtttcgaatttattaaacaaggataaattatttaatttacttaaaaacaattgttactggaattgttaattatttcatccttttgtatgtatttggcaataccccaaagaaactatattgaattctatcttgtactgtattatatatgaaggattgtccctaataaggcacaaattcacataagggatgttttatgacttattgatgacttaataacattgatttaaataaaaggggatgctgttaatcaatgtactttaaagaattaataatatttgtttatttaaaaatacaacacagtatacctatgatatttttttaaacttttttaatttttgattcttt

SEQ ID NO: 3436 - DNA, 364 bp, Glycine max
  unsure at all n locations
aacatactccctaacaaaacagcttaagtagttgagtaaataaatgatagggcagtgtatcgagtattgcgccaataagacctatggtgtttccacaagcaagccatgcattgcatgaagaaggaagttgagtattgtgaaggaaaataaaggtctttcgaaccaggggctggagtactcaattctttaacaagttctttgtttcttctgagacagaatgccgaaaaccattatcagtaaccattggtaataattataataataacaaataaattattgcacttctagcggntaagtgctttctagcatatcactttagagttctggtattctgtagttntattagatgtgttaccgaatatac

SEQ ID NO: 3437 - DNA, 536 bp, Glycine max
  unsure at all n locations
tctatgccctctttctctgtcttaacgtcttcttcacaagaataaatagaacaccgaacccccaatcccattcgttcccgctaaatccaacgaaaacccaatggtgggcccctctccctcccatggcaacaacctcaaattcctctgcagctacagcggcaaaatcctccctcgttttcccgacagcaagctccgttactttggcggccacacccgcgtactcgccctccctcgctccgctcccttcttcggtaaaaccaccaccttctcctcccttcttggtttcccttacattgacggcgtataactgtatttgctttggcatgcttcttttcataaaaaatcatgttcaacgtgcttcggaaatgcctgattcatgtcaaacaaacatacattaataacgtccttgggaatacgctacacaaaattacctctaaagaaaaaataattctgnggacgtgcttcttttgntnnttgcgttatttattctacctaatgaactttatattataaacccacttgcatacatttacatt

SEQ ID NO: 3438 - DNA, 363 bp, Glycine max
tacctcagtgagagtgcttctagcaaaagcaacaactaggaattggtgtttataacaaatggatgttaacaatgctttcctcaatggggatctgtttgaggaagtttatatggacttgcctcaaagttacaaaaccattgctcttgatcttgtatgcaaactcaataagtccttgtatggccttagacaagccttaatgcaatggttttgcaagttttcttctaccctattacaataaggtttcattcaatcaaaaaatgattattctattttcacttatggctttggatccttattagtagtgccttttagatatgttgatgacattatacatgttggcccaaagatcttcatgtgttgctg

SEQ ID NO: 3439 - DNA, 470 bp, Glycine max
tatcattgggggtttaactttatcattttgtcaatgttggattaaattttagcttatatattgctaatttcagcttataagtgaaaatgaagctactttagctcctatatataaccattgattaatagcaatatggcactttgagcaagatttactctctataagttttcatatcaagagtcaaatgctattgaaatggataaatgcacaatataattggtgtgtatcaaccctaacacaacaacactaccacaaaaacacacaccctatgatccacaatttgaaacgaagggaaaaagtcatgaaaagtgaaaaagaagagaacctagctgatgtaagctccattggagcttgtaggcctaggatcttcttcatcaatggattcctttgcttcttggaagatgaatggcagcggaatggagaaggaagagggagaggaaacgccacttcaaggagaagatgagtctaga

SEQ ID NO: 3440 - DNA, 452 bp, Glycine max
  unsure at all n locations
agcttaaataatataaaatagttacgagaaaaacttggtcaagacgaatttgaattattgaaaatatgaacttgctcactcagcaaacaatgtagacgaatttaaaattcctttgaaagtaaaatatttgattaaaaaactatatataaattaaggaacttagtttgacatatatttttaaaaagaaaaatagtttgacatgattttttaaaagtaataatagagaaaacttgatatagtaaagaaaagaaatgggacatcattattaggactttatctntattaaatattattaatattggctctagtttgattagaaaaaaaaatgaataattaatattggcttacttgtgaacttttatacaacgaaatatgtagatgaaaaactatcttctattgtctagaacgaacaacaaaattatattntatctacacaaaaataatagaaatac

SEQ ID NO: 3441 - DNA, 485 bp, Glycine max
  unsure at all n locations
ttgaaaatagagtgagattgaaaacatatattatggacaaaaacttagagaataattattggagttgctttaaaacttgctcttttaggcttcaattttcttaaattaataatatataaacattcttatatactattttggtggtccttattataaagtccaattaactaattatcaaaattaagaaaattggtgaatttaattgaaggcattaaagacatttttgtgaaaaaaataatacaaaggacattttaggttgaaccttataatacaggatcaagtgacacttgtaatgtggatattataataagcattagatggagtaccatattaacacccataatttttctttcactctttttctatcatgtaatatcaattaccatacttggatttctttctcttctctctttatgggncaattaatgttcaatgaaatgttttttcatttcttaactcaaattgaaaataaaaatatttatttt

SEQ ID NO: 3442 - DNA, 415 bp, Glycine max
tatgactcagtttcttggggattcctaaactatatgatgatgaggatgggattttgtgaaagatggagaaaatggatccatggatgcctttctagtgcaactatatcaattttgatcaatagcagcactactagagaatttgtgcctgagaggggactgaggcaaggagatccccttgcacctttcctatttaatatagcagctgagggactcactggtttgatgaggacagctgtctccaaaaacattttcagcagctataaagtgaggaggcaaaatgaggagattaacatcttgcagtatgcagatgatacactgttttttggaactgcaactacagctaatgttagagtcatgaaatctatcctcaaaattttcgagttggtttcatgactcaagattaactatgctaaaa

SEQ ID NO: 3443 - DNA, 326 bp, Glycine max
  unsure at all n locations
tgcttgatattgagtggtgtagccactctagaactgcctgcaccttagtagcattcataacaacctcttcacctgaaactatatgtcccaagtactctatcttcaatacaccaaaagagcatttaaaccacttatcaaacaaaacattttctttcaatactttgaatacaacctctagatggcataagtgttcatgccatgtggaactatataccaatatatcatcaaaaaacactaacacatatttccttaaagcatgtnggaaaatatggttcatcaaacactgaaaagaagtcgaagcattggttaaaccaaatggcattatt

SEQ ID NO: 3444 - DNA, 370 bp, Glycine max
tagacatagaaggagagagcctgagcaaaataaggctcgcgttctaatatttttaaatgtaagcccaacatcggttttcaataaaaaaaaaaaactgatgttaatcaaatgatgttaacattaacatcggttttctggaagaaaccaatgttaacttatcatatgttaacatcggtcttctgaaaaaccgatgttaatgaactaaagttaacatcggttcttgaaaaaccaatgttaacgaagtaatattaacattgggttttcaagaaccaatgttaatgtctgttcgtttacatcgggttttcagaagaccaatgttaataaactcacattatttacaattgtgccaccaggtttatgttgacatcgg

SEQ ID NO: 3445 - DNA, 267 bp, Glycine max
taaacattcaacttcgagcgtctcgatatattacgagtctcaatcagacatccgagtaaaaagttatggtcgtttgaattggctcaaagcttcaacattcaatttcgagcgtctcgatatatttcgggactcaatcagacatccgagtaaaaagttgttgtcgtttgaatatcctcagaagttctacattcaattttgagcgcctcgatatatgacgggactcaatcagacatccgagtaaaaagttattgccgtttgaattggctc

SEQ ID NO: 3446 - DNA, 429 bp, Glycine max
  unsure at all n locations
tatgactcagtttcttggggattcctaaactatatgatgatgaggactgggatttgtgaaagatggagaaaatggatccatggatgcctttctagtgcaactatatncaatttgatcaatagcagcactactagagaatntgtgcctgagaggggactgaggcaaggagatccccttgcacctttcctatttaatatagcagctgagggactcactggtttgatgaggacagctgtctccaaaaacattttcagcagctataaagtgaggaggcaaaatgaggagattaacatcttgcagtatgcagatgatacactgttttttggaactgcaactacagctaatgttagagtcatgaaatctatcctcagaattttcgagttggtttcaggactcaagattaactatgcctaaaaagccaattgggtg

SEQ ID NO: 3447 - DNA, 375 bp, Glycine max
  unsure at all n locations
agcttcaagaaaaagatggcctcagcaaattccttatttccagaagggaattctatcaatagacctccaatctttaatggagagggttaccactactgganaacccgaatgcaaatttttatcgaggcaatagatctaaatatctgggaagccatagaaatagggccttatatacccaccacagtagaaagagtntcaatagatggtagttcatcaagtgaaagcataaccatagaaaaacctaaagatagatggtctgaagaggatagaaaacgagtacaatacaacctaaaagccaaaaacataataacatctgccctangaatggatgaatatttcagagtttcaaattgcaagagtgctaaagaaatgtgg

SEQ ID NO: 3448 - DNA, 410 bp, Glycine max
tcagcttgttaacatgaagcctgactttctcaataggaatgtgaaccaaaggtttagtggcggtgaacgcaagcgcaatgaaatcttgcagcttgcggttttgggggcggacttggctattttggatgaaattgattctggtttggatgttgatgcgctcagggatgttgcgaatgcagttaataggattctcaccccagaacagtccttggtgatgataactcattatagacggattctggatcttttgaatcctacacatgtccatgttatggtaacttactgttgatcttcaatatcattgccagttctgaatatggaatatgtatgatacatgggtgttcacttttcattactgggattaaggagctagtcctatcacattcttttcacccttatattgggatact

SEQ ID NO: 3449 - DNA, 265 bp, Glycine max
gcttctagatgagttatgtctgcgaatcggacatcctgtgataaagttatgaccatttgaatctctcgagtgcttccgttgtttaatttcaagcgtctcgatattttatgtcctcaaatcagacatcggagcgaaatgttatgaccattcgaatttgtcgagagcttccgtttttcaatttcgagcgtctagatgagttatgtcaccgaatccaacatctgagtgaaatgttatgaccattcgaatttgtcgagagctcccgttg

SEQ ID NO: 3450 - DNA, 326 bp, Glycine max
gctcaaacattcaatttcgagcgtctcgatatattactggactctatcatacatacgagaaaaaagttattgtcgtttgaatttcctctgagcttcaacattcaatttcagcgtctggatatattacgggactcaatcagacatccgagtaaaaagttattgtcctttgaattggatcagaggttcaacattcaatatcgagcgactcgatatatctcgggactcaatcagacatccgagtaaaaagttattgtcgtttcaattggctcagaggttcaacattcaattttgagcgtcccgatatattacgtcactgaatcggacat

SEQ ID NO: 3451 - DNA, 302 bp, Glycine max
  unsure at all n locations
ctcgtccacgtggcccaggtcaccggtgcgaatgataccgcttgccgtcgatctccatgaagacctgggccgtggcgtncgggcgcttccagtagccgtcgaagacctcgggtccgtggacgacgatttcgccctgctcgccctgcgggacatcggcgccggtttcggggtcgatgacacgcgcctcggtgctcatgataggaatgcccaggcattgctgcttgggatgctccaacgggttgctgtgcgtgggcgcggccgtctcggtcaggccgtagccctcgctgaagcgcaggccgtat

SEQ ID NO: 3452 - DNA, 396 bp, Glycine max
agctcgtatgacgggcatgaggaagatgaacattgttgttctttgaagatatgttactttggcagggaaggaaaatgcgcacgtgggaaattcgtcatgcaatggtgatggtgtgggaaagtgtgaagatgggttgttgcttaacgaaagtaataatgatagtgttagtgttggtggcttgcttggggaatgtgacatctttgatgggaaatgggtgagggatgaattcaagccttactatccattggggtcttgtacaaacgcagattgggattttgattgccatctttatggatagcctgattgtgattatgtcaagtggaaatggcagccaaatgggtgtgacattccaaggaatggtgatgcttttgctgttgttgttacaattggaaatgg

SEQ ID NO: 3453 - DNA, 424 bp, Glycine max
gcttagtttatgattatttaacactaagataggggtttttttaatatgtgtgagacattataagagtcaaatcttaacttatttatatgatagccacatatcctccagatttaatataatattcatgatcttatttaaaagtatattttgcaataagacatttaaataaggcataaatttatttttcaataaacttaattataaactttaacttaactttttgtgtagaccagcatgattaatatttaaaaagacaagtaaatgtaatattttagtaaattataaccaatctaatataataataatactaacaatgaatacttatttataaatttttaaataaatcagcctatttagcctagaagaacttttgaatgacctagaacctaacctggttaactaaataaactctattagaagtctt

SEQ ID NO: 3454 - DNA, 335 bp, Glycine max
ttcgagtgcctgtatattgatgcgcctgaatcagacatccgagtgaaaagttatgaccatttgaatttctcgagagcttcctatgtttaatttcgagcgtgtcgatatattatacgcctgaatcgaacctcagtgtaaaaagttatgaccatttgaatttcttgagagcatccgttgttcattgttgagcgtctctatatgtgatgcacctgaatcggacctccgcgtgaaaagatatgaccatttgaatttctcgagagctttcgttgttcaattttgagcgtctcgacatatgatgcgcccgaatcggacatccatgggaaaagacatgacta

SEQ ID NO: 3455 - DNA, 404 bp, Glycine max
  unsure at all n locations
tcttcactatacatcaagaatcaccgggttgagtcttctctgtggttgtcttactggcttagcctcatcttctaaatttattcgatgcatacatgtggatgggctaataccaggaatatctgccagggtccagcctatagctttcttatgcttcttgagaacaaataacaacttctcctcttgctcatcagcaagggaggcagatataattactggaaaacttttgccatcatccaagtaagcatattttaaattagatggtagaggcttcaattctggtgtgggcggctggatattggtataaagagatggtttctcatcctacacctcataaagaaagtcgaggtatgtgtacttactgaaacatggttatgttgatctgactctataanatcaatctcaag

SEQ ID NO: 3456 - DNA, 346 bp, Glycine max
  unsure at all n locations
cactatatacctaagctctcgagctaatgatacttgngagttagttcctcttcttccaagctatatacctgcttggtgttgatgggtatatgctataaaagttggggccaacggacatattgatcgcctcaaagctcgattggtagccgaaagttatactcagatttatggcctatattatggagatactctcttccctgtggctaaaattaacttctgttcgactctttcttgccataattgtgatccgtcattggctactatatcaggaggatattaaaaatgccattctacatggggaattagaaaaagagagttatatggagcaatcactgggatttgttgc

SEQ ID NO: 3457 - DNA, 403 bp, Glycine max
  unsure at all n locations
gacatcttgacttgctttccaatctgacatttaccactgattctgcctnnnggtatagtcagattgtgaatgcctctaacagcacctctgtcaatgatttttttcatgcctcttaagtgcagatgtccaaatctttgatgccatattctgacttcatattctctggagaatagacatgtggaggagtaactggtttgttgaggtgtccatnnnnaacagttggcctttgatctactggccttcattaagacttcactcttctcatttgtcaccaagcattgtgactttgagaaggttacattgaatacttcatcacacagctgactgatgctgatcaagtaggaatctgtcccttcaccaccgtactttggccagactacgaaggacatcatggactagcttt

SEQ ID NO: 3458 - DNA, 392 bp, Glycine max
  unsure at all n locations
tcagagatatgttcaggcaaggtttttatcaacctattgagtttatattcggcagtgtattcagtgcttgcagaagccttctngaaccagaatttggaccgcaaatacatggaatgtgtgctaaatttggtttaaggaggaatgtttttgctgggtgctccctctgtgacatgtatgcaaaatttggattcttaccttcagcaataaaggccttttatcaaattgaaagccctgatttagtgtcatggaatgcaattattgcagcattatctgacagtggtgatgttaatgaagccatatattttttttgtcagatgatgcatacgggattgatgccagatggcattacttttctctccttaccttgtgcttgtgggagcccagtgacaatc

SEQ ID NO: 3459 - DNA, 410 bp, Glycine max
  unsure at all n locations
cgcatgatntacattctcccnctttctcaagcaaattcttaattcttcttgacatcatcaaaatcttcatgatttacatataatagtcgctaagttcttcacttaaactcttgcaagagtcatgaatactataggaggaatgtttttctcttttcatttctttcattatttttcttctttctttctctcttattttctctctttcatcttgacttatttcttccactctttttttttacctttttcttttctctcttgtttttctttccacaacttaagggatctcaactcatctaatatcttatacaaggggtccttatgagtagagccctcaccattaacactagatgaagaatgaagactcatgttggttcctatgttatggttcttccttggttggggtttgaaaa

SEQ ID NO: 3460 - DNA, 441 bp, Glycine max
  unsure at all n locations
aatactccagcttatttgtgggagccttgtagatcaccaatgaattcgtggatcatatacgcgaagctcattatgatgacccgtttttgcaaggcaaggtgttagatgtaatgggggataacggtgtggagtttgagaaggacacaaccgggttaattagatttaaggggaggatatgtgtgccatctttagatgatttgaaagttaagatcttggaagaagcacataaaagtcgtcttagtttccatccaggaatgactaagatgtaccaagatttgaagagaaatttttggtggcattgcatgaagaaagatgtacttgaatatgtatcgagatgtttgacatgtcaaaaggctaatgctgagcaccagcgaccatcangagaacttgagccattggaaattttggaattgaaatgggagagcatatctatggattttg

SEQ ID NO: 3461 - DNA, 433 bp, Glycine max
agctctgacgcaacatttggagaggttaatgaagtaatgagatgattaactccatgagaggttggatcaaatggagaatagagatcataatgaagaagaaaggacgagaagagggaatgatggtgttcctagacaaaatcgaattgatggtattaaactcaacattcctccctttaaaggaaagaatgatccggacgcctacttggagtgggagataaaaatagagcatgttttctcatgcaacaactatgaggaggaccaaaaggtgaagcttgccgccatggagcttttcgactatgctcttgtgtggcggaacaagttacaaaaggagagagcaagaaatgaagagccaatggttgatacatgggcggagatgaaaaggatcatgacgaagcagtatgtgccgactagttactcaagggacttgaaattc

SEQ ID NO: 3462 - DNA, 373 bp, Glycine max
tataatatatcgatacgctcaaaatttaacatcggataacttttcacacggatgctcgattcaggcgcataagatgtctagaggctcgaaattgaaaaaccgaagctcatgagaatttcaaatggacataacttttcacacgaatgtccgattcaggcttataatatatcgagatgctcgaaattgaataacggaagctcttgagaatttcaaatggtcataacttgtcacactcgggtccgattcaggcttataatatatcgagacgctcgaaattaaacatcggaagctctcgagagattcaattggtcataatttttcacacggatctccgattcgggcgcatcatatgtcgagacgcgcgatattgaac

SEQ ID NO: 3463 - DNA, 382 bp, Glycine max
  unsure at all n locations
cttgatctaccaccaccgccgccaccatcattttagttnttctcttattttaatattactagtactttgatttctagccgtgtatttggctatattattatggcatttgaacaatttagtatttctttatttgcatggtgtgtttgaaaaattatgaattatgttatatgactatgtgacttttctatatatttgatctagtcatgtttcttgcttcatgattggtttgtatttttccatgattgttgtgtgaatgattagttgtatttgcatgtttcatacttgttacgcactctggctttttgttgattccaaagggggagagaaatanggattaaatcaagaactcacatgagtaataaacttaatttttagtgaatca

SEQ ID NO: 3464 - DNA, 340 bp, Glycine max
agcttattctaaagcgggaagagaaaaaagaaatttcatagaaaaactaaacccaagccgagaagcacagaagcaactcacggtttgcgaataattttgaaaaggacactattagaggccaggagaggtgcaacagagagtaccccgtgaaagcccttaacaacttttgaaagtcagacacgacgtcattctcgccgcccccaccgtgctgtgcagaggcaacatcgactgtgtgcatctcagctcctgcgaaatcctacaacagaccaacgaccacaacgaccaatccataattctaatgcttatttgcgattaagagcaaaaacgaacatcgtacgac

SEQ ID NO: 3465 - DNA, 428 bp, Glycine max
  unsure at all n locations
agcttcttggaggtttgatggatcctcctctaatgtataggccatataatcgggcccatagtatttagcaattcttgctctcttacctcttcgaggctctatttctggttctagttgtgcaagattttcactactaatagcaggaaggtgactagatgaagtacccccactattccttaatttaaaaggaaatttattttcataaaaatcagcatcatttgactctatgatcacttttgcgtttaggtcataaaacctatacactttgctattaataacataaccaatgaacactcattcataggctctacttgcgagtttaaccctcttggggtctaggatccttacataggccaaacatncttaagttctcaaataggacaaatttggctgtcttttcattaatatctcatagggagatgtcttgc

SEQ ID NO: 3466 - DNA, 395 bp, Glycine max
cgttagtgtgtgttaaatgtctaaaataaagaaaaattatgtataatgtttctctgtttaaaactttatcagtgaaaataaaatattttgaatatgaattttgtagtatttttttaattagattaggttggtgttaatgatttattagtgtgttaataattcatgaacgtttcaactttcatttaaaaaaattagtagatcatatttatttgaagaaagtattttgagtatgaaatttattttaatatgaagttgtagtatttttttaattagattaggttcattcttttgtgttaaaaattgataagcgttcaagttgaaagtgttatttgatgatgttttgctgcttcttgtatcatatctaatttaatatatctgtagtaattttgtaatta

SEQ ID NO: 3467 - DNA, 395 bp, Glycine max
  unsure at all n locations
agctttggcctttatgttgctcaccatgttgttccccctatctctaacaatctcttcctttgtggctttgatgatgccaaacttgaatatgacattgagtgcatttggagggtctgagtgatgtaagctccattggagcttgtacgcctaggatcttcttcatcaatagattcctttgcttcttggaagatgaagggcagtggaatggagaaggaagagagagagtagatgccacttcaaggagaagatgagtctagaagaagctcaccaccataggaggccatggataagagcttggaggaagaaggagatgaatgaagggagaccgagagaacagcaccanattttgtgctctacaagatctctgaaatatgaagcttaatattcacatgatc

SEQ ID NO: 3468 - DNA, 376 bp, Glycine max
agcttaacaaaaggcatgcgaagcgggcccaatttctagagcaattcttttatgttatcaaacataaaaaggcaacaggcactattgtagccgatgctctctctccgcgtcatgcattactttctatgccttgaaacaaaattgatcggtcttgaatgttcgaaaagcatgtatgaaaatgacgaaacttttcgagaaatttctaacaattgtgacaaattttcacaaaacggcctctttacacatgaacgctttcttttcaaagaaaacaaatcgcgtgtgcctaaatgttctactacaaatttgcttgctcgcgaagcacatgaacgaggtttaccggcgcattctggcgtccaaaacactctagaaacatcac

SEQ ID NO: 3469 - DNA, 409 bp, Glycine max
  unsure at all n locations
agcttgaaggcaaactggatgcattggttaacttgttaacccagctgtttttgaaccataaatctgtacntgttgcaagggtctgtggtttgtgctcctctgctgaccaccatacagacctttgcccttccatgcagcaacctggagcaattgagcaccccgaagcttatgctgctaatatttacaatagacctnctcaacctcagcagcaaaatcaacctcagcacaacaattatgacctctccaacaacagatacaaccctggatggaggaaccaccctaatctcagatggtctagccctcagcaacaacaacaacaacctgctccttcctttcaaaatgctgctggcccaagcagaccatacacttctccaccaatccaacaacagcaaccaccccaacaaaacca

SEQ ID NO: 3470 - DNA, 390 bp, Glycine max
agcttatagggagccatgttaatggtagaatgtttactatcgttataagcgaactctatcaatggaagaaaaccctcccaacttctctcctgctctaagacacatgctcttaaaaggtcctccaatgactgaatggtccgttcagttcggccatcagcctgaggatggtaggctgaactcagtctaagcttggttcccaccgctctgttcaagctctcccaaaacctagaggtaaatctacgatctctatcatatactatgctacatggcacaccatgtaacctgacaaccctccttatatacaacgtagtcaacttttccaacgaatatctgatactaatgggaatgaagtgagtacacttaatccatctgccacaataacccatatag

SEQ ID NO: 3471 - DNA, 262 bp, Glycine max
  unsure at all n locations
aacaagggaagctctcgaganactcanagancatttcttatcacacagatgttcgantcaggcgcataatattccgagacgctcgaaattgaacaacgaatggttgtgagaaattcaaatggtcagaacttgtcacacggatgttcgaataaggcgcataatatatcaagatgctcgaaaatgaacaacgaatgcccttgagaaatgcaaatggtcataacttgtcacacggatgactgattcaggcgcattatatatccag

SEQ ID NO: 3472 - DNA, 397 bp, Glycine max
tgaagacaagactatacgaggtatcttccttgggtatagcaatatctctaagggctaccgtgtctacaacttgcaaactaagaaactcgtcatcagtcgagatgttgaagttgatgagtacgcttcttggaattgggatgaagaaaaagtggagaagaacgttcttatacccgctcaactacctcaagaagaagttgaggaagaagacccaggtgaaccaccttcaccttcaccacaacaataagatcaagaactatcatcaccagagtctactccaagacgagtaagatctttggtggacatatatgaaacctgtaacttggccatactttgacctggaagctcttgagaagcgtcacaacatgaagtatgggtcaaggcgatggaagaagagata

SEQ ID NO: 3473 - DNA, 264 bp, Glycine max
ctcaagcctgtgtcgcactttcaactggcgatgttgaatatataaacgtttgaagcctatggactcaaagtctttggatgacgcaacaacttatagactttggagatatcctcaatcacattcctcttaaatgggacaacacaagtgctcttaatctaacgaagaacccaattatgcattcttaaaccaagcccacacgaaataggcatcatttcctaagagaacatgtgtctaaaggggactgttgcattgagctcattgata

SEQ ID NO: 3474 - DNA, 401 bp, Glycine max
agcttaatgaacctcatatccaaatgcaaaacatgctgatgattcattcaagcaatcacaaacaagtaatcctaactatatgcagcgatgaataaaattaacaagggttgggttgcctcccagtaagcgctcgtttaacgtcattagctcgacgcatcttacttcatatgtcttgaaaatacatgagagtggtcatcctcttaatatctccttcacgatactgctttaatctctaaccatttactacccatggtctgtctacattttctaattgaggatcaaataattccacagccgcgtagggcttgacatctttgatgatgaaaggtccagaccatttggattctatcttgcctgtaaataatttcaatcttgaattgaacaacaacacttgctgtcct

SEQ ID NO: 3475 - DNA, 449 bp, Glycine max
  unsure at all n locations
ataatttaacatatntacagccacaaatgaaaacttgttcattgtccagtccctcctaccctctctcctatctcctaccacaacctcaacaaaccaaaaaaagacatacttcaaatcacagacaacactgctggggccaatatcctatcttttttcacccaaaaatggggtattagagaaaagaattacaatgaagagagttaaaattaaaaaatagacttctttatcgaattttcctttccaaagtaaaaattggcatttctaaagtagtcatctaccgctattgtttttcattgtttaaatgcaatgacccgtccctcatcaacgttaggctcagactggcaaacctctctcgcgaatactgccttgatgcttttctccaatctgtgccagccttcatcattgtagcaaattcgtcgtaacttatccttccatcctgcaatttcatg

SEQ ID NO: 3476 - DNA, 389 bp, Glycine max
gcaagcttggtactacatctgggtttgattcagcattaaaatatatattcttctaatcattacatgatgttgttctgattataatgaattaaatgaagagctcattgttttagggttcaagatgtgtacttgcacggcgacatcttcaacttcctccaaccattccaagtgttgacgccgagaagaaaggcttacgaagaacgctctttgaacgacttgcagacgcgtatggagatgaaatcacatccatgcttactgtccagcaccgtatgcatgaacttatcatggattgcgcttctaaagagctctatcacagcaccgtactcccagtttttaaagcgtgtctcaagattgcattcattgcacagcaatctttatatgccactaca

SEQ ID NO: 3477 - DNA, 438 bp, Glycine max
  unsure at all n locations
tgtgtcgcactntcaactgccgaggctgaatatataattgtatgaagtttatgtactcaaagtctttggatgacgcaacaacttaaagactttggagttatcctcaatcacattcctcttaaatgtgacaacacaagtgctattaatctaacgaaaaacccaattatgcattctagaaccaagcacacagaaattaggcatcatttcctaagagatcatgtgtctaaaggtgactggtgcattgagttcattgatagtgaacatcaattagtagacatcattgatagtgaactangcatattcgatgcatctagcatagaatgacatcttatntgcataagggtatgtttcactttgtcattcatatcatnntgtcttgnttgggtatgtgtttagcttagtgattcatgtgcattctttagttggttgaatatcaca

SEQ ID NO: 3478 - DNA, 384 bp, Glycine max
  unsure at all n locations
agcttcttagtttcagatgatgcagatgggtttgtagctacctcatgcactcctctaatgactatggcatcatttctggcgctaaactgctgggagttggaggccatcttcctaattaaatttctggcttcagcaggagtcatgtctccaagggctccaccactggcagcatctatcatacttctctccatattactgagtccttcataaaaatattggaaaagaagctgttctgaaatctgatggtgggggcaactggcacatagtttcttaaatctcttccagtattcatacaggctctctccactgagttgtctaatacctgagatatcctnctgatggttgtggtcctggaagcacggaaaaattnttctaagaatactc

SEQ ID NO: 3479 - DNA, 426 bp, Glycine max
  unsure at all n locations
ntgagacgcatgtgatnccttggcatcatcaaaacatcagcttgatcctttgtctacatctgtgtccatgttttcgacttctttatttcaatttccaaattttggttaatatattcttttctacaccctttccacaaataattcaaaattagatttattaaattagttgtaagactcaagattctgtggttcgttaataaattaatccaatcaaaaagttgtttaaaagtgtgtgttataactttttctaactagaaatatctagtttttactctttaaacataaataaaactctaattaaacattctaattaaaactctaattaataaacttaaaagtatgtgttataacatgcttcctacactctaattaaacattctccctcggcaccacatantttataaaataaaatatttttagtctctt

SEQ ID NO: 3480 - DNA, 295 bp, Glycine max
  unsure at all n locations
agcttggacttcctgtgttctgngaacctctcttttttcaggtgtacccaaacccaatcacctggttcaagcacgactttctttctgctcttgttggctcgccttgcatagctcgcatttttcttttcaatttgaaccttcactcgctcatgcaacttcttcacatactcagctttagcctgcgcactcctatgcttaaacatagcaatgttacgcatacgcaacaaatcaacaggagtcacaggattaaatccatacactatctcacatggtgaacaattagttgtgctatgga

SEQ ID NO: 3481 - DNA, 447 bp, Glycine max
agcttatatcaagtaagttatgctacacttcacataaactattagttattcaacaatttatatatttgttatcatcaaaactatgggtattttggatcatccagtcaaagcctgacatgagaattgtccagagatgcaacaacactagactcattttaaaaaaaaaactatagctttgtaataatttttttctatattgtttttataaataaattaaagcttctatttattttatatctcattttttattcaaattaaaatgtgacatgttattaaaaggtatcattcttttaattaattttcctagcattttacaatcatagattcttattgattgaattttcaactctatgatatatcacacatattgaagaactacacacaaaatcacattatacagaacactacactaacactagtattctcataaagaacaaaactttgata

SEQ ID NO: 3482 - DNA, 405 bp, Glycine max
  unsure at all n locations
agcttgaaggcaaactggatgcattggttaacttgttcaccctgctggccttgaatcacaaatttgtacctgtcgcaagggtttgtggtttgtgcttctctgctgaccaccatacagaccttcgcccttccatgcagcaacctggagcaatcgagcagcctgaagcttatgctgcaaatatttacaatagacctcctcaacctcagcagcaaaatcaaccacagcagaacaattatgacctctccagcaacagatacaaccctggatggaggaatcaccctaacctcagatggtncagcccttagcaacaacaacagcagcctgctccttccttccaaaatgctgctggcccaagcagaccatacatttctccaccaatccaacaacagcaacaaccccagaaac

SEQ ID NO: 3483 - DNA, 336 bp, Glycine max
tccttgagaagattcttaaagaagctagagcttagctacacacacctctctaatagcttatctcacctcattgagatgagaagctagagcttagctacataccccttataatagctaagctcacccccatgacaaaatacatgaaaatacaaaaaagtccctactacaaagactactcaaaatgcctcgaaatacaaggctaaaaccctatactactagaatggccaaaatacaaggccctaatgaaggaaaaacctattctaatatttacaaagataagcgggctcatacttagcccatgggctcaaaatctaccctaaggctcatgagaaccct

SEQ ID NO: 3484 - DNA, 408 bp, Glycine max
  unsure at all n locations
ctgatgcatgcaagcttaatgaagccacaagaaaagatcactacccgtcttccttcatgtgttcttatgcttgagagacttgcaggacaatctttctactattttttggatggatactcgggttacaattagattgcagtagatcctcacgaccaagaaaaaacagctttcacatgtcccttcggtgtttttgcttatcgtcgcatgccattccggttatgtaatggccccgctaatttccatanctgtatgacggctattttttctggcatggtagagaaacgtattgatgtctttatggatgatttttcagttcttggcgcatcttttgagaaccgcctagccaatctagagaaagcgttacaacgctgtggagaatcccatctggcgcttaactgcgaaaaatat

SEQ ID NO: 3485 - DNA, 410 bp, Glycine max
  unsure at all n locations
gtacaaacttggtagcattacttattatccaaagagtttgttatccatagtgatcacgagtccttaaaatacttaaaaggccaaggaaagcttaataagaggcatgctaagtgggtagagtttttagagcaatttccatatgtcatcaaacataaaaaagggaaagggaatgtaccggttgatgcgctgtctatgagacatgctttacttgctatgcttgaaactaaactgtttggtctcgagtctttgaaagacatgtatgtgaatgatgtggactttgctgaaatttttgctgcatgtgaaaagttttctgaaaatggttactatangcataatggattcttgtttaaagcaaataaattgtgtgtgcctaagtgttccattagagagttgcttgtgagtgaatcaca

SEQ ID NO: 3486 - DNA, 428 bp, Glycine max
  unsure at all n locations
agcttctatcgctctcattcatctttactcgttctatctcagaccttttatctctgctgcctaagattttgcatacacctcccttaaagcgaagtgtgtagtctctctacatcatttggccaatgcttagaagattttcttttacgctaggaactagtaagacatcatggatgagtcgcgtacatttatatgtctccaccatgacagtgcctttgccttttgatttaaccacacttacatttcccactccaactttgactttgacagactcatcaatacttttgaaaatagtctcattcttggncatgtgattgctacatccactatccaagtaccagctttcctccttttcttttattgagtcttgagtggccgacaacgcacattgttcttgatcatcgctctctgtgatattagcttgatgccta

SEQ ID NO: 3487 - DNA, 345 bp, Glycine max
agcttaaggttaatttcaatgctgctaacacactacctagtgagacgcttaccacgtatgtcatacaaagatgatttactttgtggggcatatcaaaacgcgaaccaagttaacaactctgctctaagtaaaaacattatttccacctcaagacctttagagttgttacatcctgatctatctggaccaaccagaaacacatctatcactggaaagaggtatgaacttgtcctagcgcatgactattctagatggagatgggttatgcttctatctcacaaggatgactctttcaatgtcttctttaaattctgcaaaagagttcaaaacgaaaaaagagtatgc

SEQ ID NO: 3488 - DNA, 311 bp, Glycine max
  unsure at all n locations
tagaagattattcaaatggtcataacttttcactcggatgtattattcaggtgtatcacatatcgagacgctcgaaatcgaacaacaagagctctcgagaaattccaattgtcagaacctttcacactgaggtccaattcagccgcatcacatatcgagacgctcgaaatttaacaacggaagctctgacaaaattcagatgctaataacttttcactcggatgttcgattcaggcgcgttacatatcgagacgctcctaattgaacaacagaagctctcgagaaattccnatggtcaaaaattttcacac

SEQ ID NO: 3489 - DNA, 345 bp, Glycine max
  unsure at all n locations
agcttntaatggaagtcaagagcaagcaattgtgccgacccgccgactggtgagcacgtatatgagcgggttcaacaattcaatactgcatttggcaagatccaaccgaacgatcaacgtcacagttgcatatggaacaacacgtccattttctctgatcttccgtactggtctgatcttgacgctagacatcgcattgatgctatgcctgcgcagacacatgtttgtgacactgtgattgtgaccctccttaacattcaacgcacgacgaaggatggnttgaataccccgccaagactagctgatatgggcataccatcacagttgcatcccaggcttgatggg

SEQ ID NO: 3490 - DNA, 387 bp, Glycine max
agcttgtgcatataatactctgatgacgatgtcttatatgttcttaaatctggactgatccacttgctgcccaagtttcatggtcttgtaggtgaagaccctcataaacatctgaaagaattccatattgcctgctccaccatgaatccttcagatgtccaagaagatcacatttttctaaaggcctttcctcattctttagagtgagtgcgaaaggactggctatattaccttgctccaaggtctatcaccagctacgatgaccttaagagagtattcttagaaaaaaatttccctgcttccaggaccaccaccatcagaaaggatattttacgcattaggcaactcagtggagagagcctatatgaatactgcgagagatttaaa

SEQ ID NO: 3491 - DNA, 339 bp, Glycine max
  unsure at all n locations
tgtagcanattcaaacgacaataacttttaactcagattncttattgaattccgtagtatatcgagacgctcgaaattcagaacaaaagctctgagcaaaatcaaacgacaataactttttactcggatgtccgaatgaatctcgtaatatatcgagccgctcgtaattgaaaacagaagctctgagcaaattcaaacgacaataactttttacttgtatgtccgattgtttcccgcagtataacgagaccctcgtaattgaaaccagaagctcgtagcaaactcacacggcaataaatttttactcggatgtccgaatgaatcccataatatatcgag

SEQ ID NO: 3492 - DNA, 338 bp, Glycine max
tattgggctgtaaagacctgcaacttctctattgatcaggctttataggaaaggaagttgcaactaagtgagctagatgagatccgtttagaagcctatgagaattccaaattctacaaggagaagaccaagaagttccatgatagtttgatagctaagaaggactttgtggttggacagaaagttttattgtataactctaggttcagactcatgaatggtaagttgaggtaaaagtggattggtccttttgtggtgactaatgtttttccttatggtacagttgagatcaaaagtgaatccacagattagagcttcagggccatggacactggctg

SEQ ID NO: 3493 - DNA, 423 bp, Glycine max
  unsure at all n locations
agcttcaagtctgcttaacataacactntttagtttactattttcttatattgcttcatgctattagtgcaaactgttttgctatgttctgtgtttttttgatcgtgttggggttctgagtttgaaagttgaacggttgtgtttagctttctgaaccaaaggttacaagggccttggtatgttgttgttgntgtatggcactataacacatgaatgcactttggtttgcaacctgctgcgtctgcaaagggttgtgaagccaatttaatattaaataaaaacaaatgctntctctctttctctctntgnatgtttatngaacaattataaatatttatagattatcttcaataatatttgatgaaaatataatttaataatattctatattaatccaacttcttatatagtcatgtaatttac

SEQ ID NO: 3494 - DNA, 358 bp, Glycine max
ctacccttattttccaatctaagtaagcttctacattgaccttcctgatgcaatcctacctcgcaagggcattggatagaagactccaagcagattgggccacagatgcaagaaaatgccctacggctctcgtgagccttataatagatgtcagacacatgggcttagtatgagtccacttatctttgtacatattataataagagttcattattattgttccttgtatttacggctccatgactgtcgtacgataccctagatatgtacgattctccatccctcgtattctaaggcacctatgctagcttttatattattggtaactatataatttcacatgcgttaaggcatattt

SEQ ID NO: 3495 - DNA, 396 bp, Glycine max
  unsure at all n locations
agctcggccagcttcggaagtcctatgaaattgatccttagccaataatggcgtgaaaggtgctgctatggttgcgtaccctttaatgaagcgtcgataaaaaacctgataaacctaggaatccnctcaacgctcgagtcgactgaggggtcggccattgttgcacgacggcaactttcgcaggaactggttcaacgccttttgcagaaaccaagtgacccaggtattccacttgttgggtcgcaaaggaacatttggatagtttcacgacaaagctgttgtcggtgagagtttgcaaggccatccgcagattctcgagatgatcagagaaactctggctgtatattagaatatcgtccaagaagatgataacccatttatgcaagtagggtccaa

SEQ ID NO: 3496 - DNA, 322 bp, Glycine max
  unsure at all n locations
nggacaatggtaatgcaatcttgcataaatcctagatgaatcttctatagaaacttgcatgaccaagaaaaaaacacactttctgcacagaagcatggtaaggtagagaagtaataacatcaatcttggccttattgacctcaatacctctactagagaccaaatgccttagaactatatcatcatgtaccataaaatggaatttctcaaagttaaaaacaaggttagtcacaatgtagtagtcaagaacttgagagaggctatccaaacatgcataaaaaaggaaccataaacagtgaaatcatccacaaacaccttcatg

SEQ ID NO: 3497 - DNA, 391 bp, Glycine max
  unsure at all n locations
tcacaaaagtttatatggcttgaaacaagcatcgaggtagtggtacaagaagtttaatgagtttatgagcaactcaggattcataagatgtgacatggaccatngctactatgttgagaaatatactaatagttatgttatccttgtcgcgtatgttgatgacatgttgattacaggatctagtatgatagaaattaatagtttgaagcaatagttggcagataactttgaaatgaaggatcttggtccagctatacaaatccttggtatgagaattcttagaaacagatcagaaggagatttgaagttgtctcaggagaaatatatacacaagttgcttgacaggttttaccttgaagaatctaagaccaggaataccnctttgggatct

SEQ ID NO: 3498 - DNA, 465 bp, Glycine max
  unsure at all n locations
ctctcttgttntaattcatatattgttataatataaaataatatctcacatatgtatacttatatctaaattatcagatacataatagaagatatataaactaacgcataaacgtatatagcatgtatagatatcaatgtgccaattccaaataaagtttacgtgaaagaataagacaattaggtaatcaattacacttttatatatagcaaatggaagattgacattcaagctaggagttcacgattctcaaaatattaatacataaaagtgagctaattcaaatacaaggatcacaaaaattgaatttcacgtcaccacaaattacaataaacaaatgaatatatatagtgtaaaaaaataagaatcacgatactgcaaattgcacagttaatgtaacaaactgaaatagaagaaggggtgtgggaatngaaagcaaatngatatcaattattagtagtgcat

SEQ ID NO: 3499 - DNA, 442 bp, Glycine max
agcttggaaggttgcaggattggtgttgaacggttgaggcttattttattatatcatcaacaattttccttatcctacaagtctatcttctttaacttcaagccattattgcttttcaaaactacatgtaccttgtcttgtactgactataactcccactttttaatcactttaattcaagtggattaatttaatgtcatgtgaaaaattgagtatattctttaaaaacatggcactatctatgaacaatgttcctctaatttgtaacctatcgttagacaattaatgaagttggcagaagacgttgatgtcgttgattaatatgctcccctaataataatttcgggacatctctaaaggtagtatcataattaaatttaaattgaaggtttcttaacaagtaattactaattaagaaatattaaaaaaattaataatatat

SEQ ID NO: 3500 - DNA, 422 bp, Glycine max
  unsure at all n locations
agcttctggtgggacatcttgacttgctttccaatctgacattcaccacagattctgccttcttctattttcagattgggaatgcctctaacagcacctttgtcaatgattttcttcatgcctcttaagtgcagatgtccaaatctttgatgccatattttgacttcatcttctttggaggatagacatgtggaggagtaactggtttcttgaggtgtccataggtaacaattgtcctttgatctgctgcccttcattagaacttcactcttctcanttgtcaccaagcattctgactntgtgaagtttacattgaatccttcatcacacaactgactgatgctgatcaagtttgcagtccagcccttcaccaccagtactttgttcagactaggaagaccatcatggactagctttcccat

SEQ ID NO: 3501 - DNA, 422 bp, Glycine max
  unsure at all n locations
gcttcacattcaatttcgagcgtctcgatatattacgagcctcaatctgacatccgagtaaaaagttatggtcctttgtattggatcagagcttcaacattcaatttcgagcgtctcgatatgttacaggactcaatcccacatcacagaaaaaagttatcgtcgtttgagttggctcagagattcaacattcaatttcgagcgtctcgatatgttacgggactcaatcagacatccgagaaaaaagttattgtcgtttgaattggctcagagcttcaacattcaatttcgagcgtctcgatatgttacgggactcaatcagacatccgagtaaaaatttattgtcgtttgaattggctcagagcttcanagttcaatttcgagcgtctcgatatgttacgggactcaatcagacatccgag

SEQ ID NO: 3502 - DNA, 313 bp, Glycine max
  unsure at all n locations
tccatcaagttatgaccatttgtatntctcgagatctttcgtggttcaatttcgggcgtctccatatgtcatgtgcctgaatcggacctccgtgagaaaatctatgaccatttgaacttctctagagcttccgttgtgtaatttcgagcttctcgatatctgatgtgcctgaatcggacattcgagtgaaaagttgggacaatttcaatttctccagagcttccggtagtcaattatgagcgtctcgatatgtgatgtgcctgaatcggagctccgagtgagaacttatgaccatttgaattgctctagagct

SEQ ID NO: 3503 - DNA, 423 bp, Glycine max
acctgcatgcgagcaagcttcggtattcaatttcgagcgtctcgatatattacgggactcaaattgacttccgagttaaacgttattggcgtgggaaaatcctcagagctttggaattcaattgcgagcgtctcgatatattacgggtctcaactcagacatccgagtaaaaagttattgtcgtttgaattagctctgaggttcagaattcacattcgagcgtctcaatagattacgggactcaataagacattcgagcaaaaagttgttgtcgcttgaattagctaagagcttcacaattcaatttcgagcgtctcgatatattatgggactcaatccgacattcgagtaaaacggtattgccgcttgaaaatcctcagagcttcggtattcaatttcgagcgtgtcgatatattacgggac

SEQ ID NO: 3504 - DNA, 475 bp, Glycine max
  unsure at all n locations
tcctatgaaccctcaggttattttgttattaaataaatttataagacataattgactatttgtagttaacttaattattagcattaaatttataatacttttccaaatttatctttaattttataggggacctattcatcttctctaatcttcataggagagagaaagagataattcatggtattttagtcaaaatagttaatgcaccatatagatgaaataaaatcttataataagaaacaaaaaaatttgttgactatgtcttgtaaataaggactaagttagtattttaattaaattgatgtttgaaagtttaggtagttggatcagtctttggtgccattgttggaggcacgaatttggatgaaaggaagcgatgtgcagaggaggtagccaagcgaaatgtatcaggtttctttntcttttggtggtnntgaaattgcgattagtggttttgaaccttctttaattatac

SEQ ID NO: 3505 - DNA, 468 bp, Glycine max
  unsure at all n locations
cactggaattgcaatgttccatataatatttaaatggtgtattcgattacaatatattggtaatcgattatcagtgtatctgaacgttgaaattcaaattcaattgtgaagagtcatatcttttcataaaatgcattgtgtaatcgattacatgattatggtaatcgattaccagtgacaagttttgaataaaaggtcaagagatgtaactcttccaatggttttctcaaagattttctcaaggttataactcttccaatggttttcttgaccagacatgaagagtctataaaagcaagaccttgacttgcattcaaacaactnttagaactttnttagaacctcttgaacaacttttgagaaatcttgaaacctttccttctcatctttcttcttcttcttcctttgccaaaaagctttctaagttttctgttttccaaaccttgttcttctacagaaaacaaaagt

SEQ ID NO: 3506 - DNA, 477 bp, Glycine max
  unsure at all n locations
tcatcatcttgagganntttttccaaagaaatgaaggcacatgttactgagcattcttccacattattagggattcggagttgaatcacgaggaacaaccttgaaggttcctaatccttttgctataaaacaaggtaacataacaaaaataaaaaaaaaatgtatatgaagaaaaatggatgttcaacatcatggtcattgatacacatggtgcacaagataagaaagtctacactaattgtagatgtgaccatatgaatctctcaaaggacttttataatgttacaagggatatacataactaaacgttgactacaaattataaaagaggtctcttttgttgttatgtcaactttcagtgcaaacaaatagagggttntcaaggttcaaggagaatgaattccttaagatacanaataagttgggttgattggaacaaacaccaagtaccagataaagtttatattcttcatttca

SEQ ID NO: 3507 - DNA, 428 bp, Glycine max
  unsure at all n locations
gtgaatgctctattcaatggagttgacaagaatatcttcagacttatcatcacatgcacagtggccaaggatgcatgggatatcctgaaaaccactcatgaaggaacctccaaagtgaagatgtccagattgcaactattggccacaaaattcgaaaatctgaatatgaaggaggaagaatgtattcatgactttcacatgaacattcttgaaattgccaatgcttgcactgccttgngagagaggatgacagatgaaaagctggcgagaaagagcctcagatccttgcctaagagatttgacatgaaagtcactgcaatagaggaggcccaagacatatgcaacttgagagtggatgaactcattggttcccttcaaacctttgagctaggactctcggatagggctgaacagaagagcaagaatct

SEQ ID NO: 3508 - DNA, 344 bp, Glycine max
agcttataatatatcgatacgctcgaaattaaacatctgaaactctcgtataattcaaatagtcataactattcacacggatgtccgattcaggcttataatatatcgatacgctcgaaattaaacatcggaaactctcgcgaaattcaaatggtcataacttttcacacggatatccgattcgggcacataatatgtcgagaagctcgatattgaacaacgaaagttctttacatatcaaatggtcttaacttttcacacggatgtccgattcaggaatatcacatatcgagacgctcatattgaacacaccaagctcttgagaaattcaattgggcctaact

SEQ ID NO: 3509 - DNA, 339 bp, Glycine max
agcttatgaccattcgaattttttgagagtttccgttgttcacactctagcgtgaatatgagttatgtccccgaatcggacatctgtgtgaaaagctatgaccattcgattttctcgagagcttccgttgatccacctcgagcgtctcgatattgtacgaccccgaattggacatctgtgtgaaaacgtatgaccattcaattttctcgagagcttcctgtgaacaatttcgagcgtctagatgtggtatgtcccctaatcggacattcgagtgaaaacttatgaccattcgagtttctcgagagcttccgatgttcaatttcgagcgtctcgatatat

SEQ ID NO: 3510 - DNA, 449 bp, Glycine max
  unsure at all n locations
tatcttataatcaagcatccanaacacgtattcatgtatatngattaacactctcataatnttatnttttttgttattgttcttccaatcttattcgttcttccttcgacacagacacatataagcaaaatgcattatttaaagtaaattattgttatctaaacctctgccgatcctatataataatattgcatatgcatntcttgaaatggaatcttatacacatataattaagtgataagccatcatgtttaatgtgtcaatcaagcatatgaactaaattattattctttagaaactaattatgaatactaattaatgaagatgattgcttagtgnggaagcatacatgatgcattaactgatgaagtatgacccacaaattaatatataacacatatcacaaagtcaaattaatagagctagttgatcaatttacaaacaaaatt

SEQ ID NO: 3511 - DNA, 451 bp, Glycine max
  unsure at all n locations
ctgagtagccatctgccccatctaattngtcaaactcttaatggttgctcttgtctcttgctgaaattgcatattctggatggtcatttgcctcactaactcctctaaggaaggttgagaaggggcctgacttgcttgttgtctttgtcgctattgctgcattggaggaggaacatatggcctgcttagactatcaacattctagaaatgagggacaaattgttgttgctgctgttgttgttgtggaggatttgcccatctcagattcggatgattcctccaacctggattgtatttgatgcttgaaagattataattattctgctgatgttgagctttttgttgagggggtctattataaatgtatgcagcataggcttcacgttgctcattgactccaggttgctgcaaagaacgatagagatctgtatggtgatcaacagaagaacat

SEQ ID NO: 3512 - DNA, 377 bp, Glycine max
  unsure at all n locations
agcttgcatgccttactatgtatgtattgaagagatttgtgagattgattacggngaatttagagtacctcttttcaaatgtaagtgggtgaatggaaacacaggtgtgcgtaaagacaaaatgggattcactttagtagaccttaaaaaagttggttacaaggacgacccattcataatggcagcgtaagctcgacgtgtgttttatgtagaagatccatgcgactctagatgggcggtggttttgcaagggagaacaatttgtatcggtcaccatgttgatggatcaacacttgatgtcactgacatgccgtctttctccaaagatatgccttcaagtactgttgaacaggaagaggatgatgtatatgcaaatc

SEQ ID NO: 3513 - DNA, 473 bp, Glycine max
  unsure at all n locations
agcttaaacaagtagttgctttaggactngatttacactaaanaattaattagattggattatggtatatcttcttataatgagtcaaccaatgacagatgttacccaaaaagagccttgaagcatataacctctaggcccaaattctaaaccagtaaaatgtaagatgtgctagtgagatgaaatgtgatgcagtgcttgttaatgaagggaaaaaaaagaagctaaaaagctccaccatggcttgaaaaagaattgataagggtttcttattttcggtaatctattatatggttggtgcacaataatttagaaggcaggatatgtatagaagtntgtatgaccaactaaagtgttcataagctaagtactccacaaacttatgtacctgtggccatatattcaggagcaacatagccatatgtgcccattacccttgtagagacatggctcttatcaccagctggtccatc

SEQ ID NO: 3514 - DNA, 450 bp, Glycine max
  unsure at all n locations
tctgcatggctgacaacttcagttatttacattcgttatctntctcaacaagtataattagtcaaccgttaataaaaagaagacaagaggtatcatgagagtaataaagaaatgaatctcatttttcataacagaggaaactgtgatgacttatctacaaaacccataagaaaatagaaatgcaacaacactttagcactcaaaatgcaatttcatcctcaattaacttaaatatattnttagtcttttaaatttgagttacttaaatatgtttgtggaatgttagtataattgttttgtaaaaaattccaatgtaaaaagaatagatatgagtagtaaactttattaaaagacaattgatcgaataacttcccgcataaaattattgtacattaactgtaactcttaagtaatatgatgatatagaatatgtacataataatatatcac

SEQ ID NO: 3515 - DNA, 432 bp, Glycine max
  unsure at all n locations
agcttcctatggatttaatagtgtcaccatagttctccaagtaaacctatcaagaggtgatccctcttgctgtctgattntcaattggacaagcacgtaaattggaattgtgagcttaacaccaattacaatgttgaccagagcataataattctgacccatcattgcctgacatgtggtgaggccttggaaaggttcttttaccaactcatagtangtgtcattcttgcttgtagtgtanggtgtgttatactggtagatgtttcctgaaacaaaacatangaacaatgattgacttatcggactntntaatcatacattataaaactaattatttcacacttcgtgttaattaagtactagtattaatgacaaaatgagcaataacatattgaatccttatttgtggcagcataagctcggagacactta

SEQ ID NO: 3516 - DNA, 353 bp, Glycine max
  unsure at all n locations
actcagctatactatatcgagacgctcaagattaaacttctaanactctctttatattcaaatggtcataactntttacacggatgtccgattcgggcgcataatatgtcgagagtctagaaattgaacaaccgaaacttttgagaaattcatatggtcacaactattcacacggatgcccgattcaagcttatgatatatcgagacgctcgaaattaaacgtcggaaactctcgggaaattcaaataggcataactattcacacggatgtccgattcgggcgcttaatatgtcgagaggctcaaaattgaacaacggaagctcttgagaaattcaactgttataacttttca

SEQ ID NO: 3517 - DNA, 420 bp, Glycine max
  unsure at all n locations
ctcaagctggaagagaccctaggctnggaggaatagttcccgtgaggaagttgaaacttatgtccaaagcaacgagggttgaacagttgctgagcgtgggtggaataaaacccgtgaaccggttgttctgcaggtaaagttccttcagaatattattattcccagcgtcaccaccgcacagcgttgtcgggattgagccgctgaagttgttggagctaagatccagcgactctaaagtggagagcttcgtcagagactccggaaggggaccaaggaacgcgttgaacgccaccgcgagctctntgaggctnttcattggcgtgagaacgtccataggcagcgcaccggcgaagaggttgctggagatgtcgaaggactgaagagaagtgcaagcgccgaacgcttcggngagagcgcctg

SEQ ID NO: 3518 - DNA, 287 bp, Glycine max
  unsure at all n locations
agctntctccactaagtngccttattcctgaaatgtcttttctgatggccatggtcctagatgcaaggaagaacttctccaagaacaccctcttaaggtcatcccaattgaaaatagacctgtgagcaacgtagtataaccaatcttttgccactccctctagagaatgaggaagaacctttagaaaaatatgatcttctttgacatcacggggcttcatggtggaacaaacaatatggaactccttaagatgcttatgaggatcttcacctgcaagaccatgaaac

SEQ ID NO: 3519 - DNA, 464 bp, Glycine max
  unsure at all n locations
tgatgggtaaactggaatgctcatgtgatgcctccttacaaaatgcactagagcttggtcttggatatctaaatcaaatcccatcatatggtcatcgagaagttctgatcttatattcggctctcagtacatgtgatcctggtgatctcatggaaaccatccagaaatgcaaaaagagtaaaataaggtgctcagtcattggtcttgcagctgaaatgtttgtgtgcaaacatctctgcgaggaaactggagggacttattctgttgcactagatgaggttagtttgttgattttgatgatacccatgtagatgtagtacaaatacaaataattatctatgannagttattgaatntttatagtcaagcaaccttaatttaagcaagtacttaagatattgctgatcaccttagaatttgtttgcatctttcaagtgtttgaaattcatgaatgtatgcattat

SEQ ID NO: 3520 - DNA, 467 bp, Glycine max
tagcattacttattacccaaagagtttgtcattcatagtgatcacgagtccttaaaatacttaagaggccaaggaaagcttaataagaggcatgctaagtgggtagagttattagagcaatttccatatgtcatcaaacataaaaaagggaaagggaatgtactggctgatgcgctgtctaggagacatgctttactagctatgcttgaaactaaactgtttggtctcgagtctatgaaagacatgtatgtgaatgaagtggactttgctgaaattctagctgcatgtgaaaagttttctgaaaatggttactataggcataatggattcttgtttaaagcagataaattgtgtgtgcctaagtgttccattagagagtggcttgtgagtgaatcacataacgaggggatgatgggacactctgtgattcaaaagaccctgtaaattctgcaagagcatttcttttg

SEQ ID NO: 3521 - DNA, 446 bp, Glycine max
  unsure at all n locations
agcttctattgctctcattcatctttacttgggctatctcagaccttttatttttgttgtctaagattttgcatacacctccttcaaagtgaagtgtgtagtctctctccatcatttggccaatgcttagaagattttcttttaggctaggaactagtaagacatcatggatgagtcgcgtacatttatatgtctccaccatgacagtgcctttngcctttgatttaaccacacttacatttcccagtcgaactntgactntgacagactcatcaatacttttgaaaatagtctcatccttggccatgtgattgctacatccactatccaagtaccagcttcctccctttccttttattgagtcttgagtggcgtagaacgtacattgttcttgatcatgctcctctgtgatattagcttgatgcctatttttggtgcgacaattt

SEQ ID NO: 3522 - DNA, 459 bp, Glycine max
  unsure at all n locations
agcacctaatgtcatattagatgggaattgtgtatcttaacataagagatttcagatggactttaatcataatcccacagctgaccttttcacgagatctctacttaaccctttggttaaatgatcggccaataaatatgcacatagaatcattagattctagcatctcgtgactctataaccgagttcacagcaacagaatcattagattctagcacatagaatctatatgctttagaatgttcagctgatccaataaatatgcaatctatacctctttcacctatggttttccttttaggttctgtaagcctgactacagccctacatccncaaattttgagataactcanattaacatagcctcaccccanaatccttcacttaaacccgaataggataacatggaattcaccatttctttcaaggttctattcttcctttcagctacaccattct

SEQ ID NO: 3523 - DNA, 437 bp, Glycine max
agctagccatttaaaaaggcattgttgatatcaattttctgaagatcccaatgaaaggaagtgactaaagtcagaatagttctaattgttataggtttcacaactggggaaaatgtttctttgaaatcaaaatcaggctgttgatggaagccttttgctacaagacgtgccttgtacttactgacagacccatctgaattatgcttgactctaaaaacccacttgcaaccaattggttgcctagtaggaggtttaggaaccagttcccatgtattgtttttgagtagtgcagccatttcttcatccatagcatctttccacttaggatctttaagtgctgttttgacagttttaggcacagcatgagttagaagcaaggttggttggagtctaggcttgacaattccattttttgatctagttgtcataggatgaat

SEQ ID NO: 3524 - DNA, 450 bp, Glycine max
  unsure at all n locations
agctagtatggagaatgtcgaagctataaaagtcatgctaaggtcttttgagctggtatcaggactgaagattaattttgctaagagttcttttggtgcttttggagtatcagctcaatggaagcacctcgcggccaagtatttgaattgcagcttgatggcttttccttttgtgtacctgggtattcccattgaggccaatccgaggcggagtagaatgtgggattccattattcacaaatgtgagagaaaactctcaaattggaagaaaaggcatatctcattcggnggacgagtgacactgatccaatctgttctaacttccatccctatctttttcttttcttttttcaggattcctcaatcggtggcaaccaaattagtaaagattcagcgtgtattcctttgnggaggggagcatgatcaaaagaagatagcttggataagttg

SEQ ID NO: 3525 - DNA, 349 bp, Glycine max
  unsure at all n locations
ctaagcttcttgagttgctaatctcttccttattagcacttgctatgaggatatcatccacatacaagagaaggtggagaacacactctttcttccttntcagaatatatacacaattgtcatacctatttctgatgaagccatacctgatcaagaactcatcaaacttcaaataccacattcgagggcttngcttcagtccatacaaagattttttcaacaaacacaccttgttctcccctctttcaaaaccttcaggctgattcatgtaaatggtttccttcatatttccatgaagaaaagcagttttaacatctagctattcacgttccaaatcatactgatttac

SEQ ID NO: 3526 - DNA, 469 bp, Glycine max
  unsure at all n locations
attgaaattaaaagacattacaagtgatagttataaggtgatgtatctaaaattgattgaaacagtggccaaacattaattatacatctatttatttaaaatatactacaacaaatggagaattttaaaattgtgtattaggataataatttttttctttaattgtgtgaagactttacccgtattcacaccgaaatcaatctcttgttataaattcttttgaactttattagtttgagtatggtgtattatgctcttctatagaagcttatatntatagtgttaaagaaactatgaatttgatctttttagaagagagatttgatttacaataatctcatatttctttattntaataaactctccgatttaatgcagagatacttntcacataatcacatgactaaatataagagaagattgattatatattaattatataacaataaaagattattcgtatntttat

SEQ ID NO: 3527 - DNA, 466 bp, Glycine max
  unsure at all n locations
gagctgctgcatgcaagcttaaaggcttatttatttatttatttatctcattctagcattaaattaaagagtgagtgtataatacaaatctgctctttcggcatgattttgcttttctgcttttccaaacacattcaaagcagatccctcacgatataaattatcttcagccctaactggattgactttttatcttgtaaaaacaacatatttcggaaacatcaattgagtagataaaaattccataatcatacccaatcaaacatgtcaaccactaacatctttcaaaggaaagataactgaagattgccactgaaacatgccataatatcattaattcattattattcagattcagacacttccatttaacatgagtagattcccttcttattttcaaaaaacaacacanagttaggggttaattaaaaaatcactgttatatttatttatgtgtggatcacct

SEQ ID NO: 3528 - DNA, 260 bp, Glycine max
  unsure at all n locations
tgtattatacgcctgaatcgacctgagtgagaaagatatgaccatttgaatttatctagaacatacgtggatcatatttgaacgcctctgtctgtgatggaccttaatcggacctccgtgtgaacaggtatgaccatttgaatttctcgagagcttccgttgttcaatgtctagcgtctcgacatattatgcgcccgaatcggacatccgtgggaaaagctatgaccatttgaatntctcgagagcttccggtgttgaat

SEQ ID NO: 3529 - DNA, 350 bp, Glycine max
cgagtgcctgtatattgatgcgcctgaaatcgtcattcgagtgaaaagttatgaccatttgaatttctcgagagctttctatgtttaattttgagcgtctcgatatattatacgcctgaatcggacctcagtgtgaaaagttatgaccatttgaatttcttgagagcatccgttgatcattttcgagcgtctctatatgtgatgcaccttaatcggacctccgtgtgaaaaggtatgaccatttgaatttctcgagagcttccgttgttcaatttcgagcgtctcgacatattatgcgcccgaatcggacatccatgggaaaagctatgaccatttgaatttctcgagag

SEQ ID NO: 3530 - DNA, 315 bp, Glycine max
  unsure at all n locations
agctntctatgcatagaatattcaaggaaaatactgtcatctgacttagcatcaaattttcctaagttatcttttccattattcaatacanaacatttacaaccaaagatatgaagatgtgagatgtttggttntctgccattgaacaattcatatggagttttctttaaaatgggtcttattaaagccctatttaaaatgtagcacgcagtgttaacggcttcagcccaaaagttttttggaagaggagtatcatttaataaagttctagcaatctcttccnagatctatttttcctttccacaacaccatttt

SEQ ID NO: 3531 - DNA, 436 bp, Glycine max
  unsure at all n locations
agcttgaggagtaacattaaatttcagtctagcattttcatctgtttatgagtataaattataaccacttttcacatgttagcattattagaatgcttcattaatattattttattgctgtaccatcttgcttccttattgtcttttaggtttccatttctactttttttctcctagaaaaagcttgttgagttagaatctttaacaacttgtgctgttcatggacattngtgtttctaactatgacaatcttctgttttaggctgttaaaatattaacgacagattatgaaccctcagatttagacatcctttatgctgagggagttacttcatctaatggngtggcttgtgtggagttttcatttcccaatcagcttctgacgaaactgttgacactactgatctacatgattctttggtcaggtatgtgaaaa

SEQ ID NO: 3532 - DNA, 460 bp, Glycine max
  unsure at all n locations
ngtatattgtcttattcaaaactggaccactntcatattcttctttcgcattggcataatgttcaattactgtcaaggcttttggagcatctataacttgttcaactatattgtgtgcaacatttcggttgataagctgcatcaaatctctctttttcctctgtattctttcagcacagaaagtattttttggttctcaattgcttggcaactatagtttgtatctctcctttgacgatcttcttccgtatcgcatccagagaagcccccttctcaagctcttctaacaatacttttcttgcttcctcaaattccatctaattcaattaagcagtgagtgccaaaaagtattgttagagaaaatgaaatatgatngacaatctaagtaattaatatttaatactcagcagaaaaaagaagaaatcagaaaagatgttataaagttacaagttgttggtcc

SEQ ID NO: 3533 - DNA, 329 bp, Glycine max
  unsure at all n locations
agctttntattctaatttagaaatccatgaaggttctctaaactctgaagtttatgggatcaagatggtcattgaccaatccctattttatgatttaaccaaattgcctagtgaaggtgtgccttttgagggtgcactgattgatgaatggaaattcgatttctctatgcatgatgcccgccggttggtttgcaccaaccaagcggatatgaccggaagacttcttgtcggttcattggcttttgaaagtcgcatcctccattaccttatagtttgcattntgcttcctagatcttcaaaccttgcccaagtttctgaagaagatctca

SEQ ID NO: 3534 - DNA, 470 bp, Glycine max
  unsure at all n locations
gttttaagttcttcctcanaactgtcctaagcaaagtttccaaagtcctattatcaacttccgtttgcccatcggtttgtgggtgacaagtggttgaaaataacaatttagtgcccaacttgctccacaaagtcctccaaaaatggcttaggaacttagagtccctatcactaacaatgctccttggcaaaccatggagtctcacaatctccttgaaaaacaaatcagccacatgggaagcatcatcaactnttttacatggaataaaatgagccattttagaaaacctatcaacaaccacaaaaatggaatctctaccattgcttgtttttggcagccccaaaacaaaatccatggataaatcaatccaaggatactccggaattggcaatggagtatacaatccatgaggctttaccttagactttgcctttntacatacaatgcaatgttcacaaaatttctgcaca

SEQ ID NO: 3535 - DNA, 350 bp, Glycine max
  unsure at all n locations
tatatattgagtagcttcagatgccgaacacaactgctttaaaagaggagtgaaggaggtcattaaaggtataaggagaggccataacggggctgactgttgtcgtgctaactatggctttctcacagaaacattacacatgcttaccctaatgatccggtattgtgaatgcacattgtgtgtgatggctgcgaacatgtcaccgattgatgtcatcactcatgttcctattctttgtgaagagtctgacgttccttatatctatgttccatctagagaagtacgcaaccaactctgcattncatatctagactatgctngngtgccatatgcccttatgctattattga

SEQ ID NO: 3536 - DNA, 416 bp, Glycine max
  unsure at all n locations
agtcccttaccaccttgtggtaatgctttgtattataccatccatcaaagaccttaataggcttaggaccccaatcaatgctcttagatttcatgaggataaggcagtgatcagagtagctcctttcaacgttgtgctgcgaactgtctggccacttataaagccaaccatcagagacaacagctctatccaatttgcttttacaggaaccattaggcctaacccatgtgaactgcttacccacactacgaatatctttcacctccatgatagcaagccaatcattgaaatctgacatgatgctggactctgaatntccatgattgcttcccattctctctgaagggtgcctaatacaattaanatcgccaataagacaccagcatatatcttgggaatgcagcttccttctactc

SEQ ID NO: 3537 - DNA, 438 bp, Glycine max
  unsure at all n locations
gctatatttaaagacgtacttgaatattataagctagctaaattgacttgcctaataattatgataatatattttaagatnttgtttgtgatcataatattgatacgaaatagtctccgtcgaacgcagtaaatcctagaccacttagttaagagatacaaatcactaccacttatatcaatcattgttggttgtataatttttaagataattattataaaaattaataagctaatatagtacataaaaattggaattgggataacattntaacaaggaaaaatattatatattcttaaatttgggaaatcaagaaaaatatagaaagaataataaagggaaaataacttatttgattttttgaagaanaaaaaatatggtatcatgatgaatntatggtgtttcccaaatgcatttaagaaattttaaaaatntata

SEQ ID NO: 3538 - DNA, 369 bp, Glycine max
ctatagacaatgcagactcttcaactgttctgcacccaagtatgaatcagctcctccttctcatcttttatcacggtgaggccggttttcttcatgattacctggacagaactcacccattggctgtcggagataggataaatgattccagtttgcaaaagcttggttaccttctatctcactacatcaagaatcaccgggttgtgtctactctgtgtctgccttactggtttagcaccatcctcaagattcatctgatgcatacatgtggatgggctaataccatgaatgtcacgcatggtctagcctatagacttcttatgcttcctgagaactgataacaacttatcctcttgctcatagcaaggg

SEQ ID NO: 3539 - DNA, 324 bp, Glycine max
  unsure at all n locations
agcttaacanaagacatgcgaagtgaatggaattcctagagaaattcccttatgttatcaaatataaaaagggaaaaggtaatattgtagctgatgctctttctcgacgtcatgcattactttctatgcttgaaacaaaattgattggtcttgaatgtttggaaagcatgtatgaaaatgatgaaacttttggagaaatttttaaaaattgtgaaattttttcagaaaatggtttctttagacatgaaggctttctttccaaagaaaacaaattgtgtgtgcctaaatgttctactagaaatttgcttatttgtgaagcacatg

SEQ ID NO: 3540 - DNA, 575 bp, Glycine max
aacgattaatatattattatatttaaggcatacgagtaaataatatatttgattttataaaaaaaaatttaaaaattatttttttgcacaagaattatattttttatataaattattggatgagtacttgttgggaattgatatacacaatccccaacaggagagatagaaaaaaaaattcacatccatcataaatcaagaaaaagaacggttttgggagaaaaacgaagatgaacaacacagacaagaagagagagtttaatctgtgggtggatgtggagggaccttgcccgccctatttttttatattggattaatattggatatgttattttaaaattagaatatttttatctttaacaatatttcatgcacttataatttttattttgaagagaataatacttttagagtaatattagaattatctttttatggtcttcattgtgaagataatttctttatctatttataatatatgttactagtaattttcacttttcatgtttttctttttataatcattattgatatttttaaaactataattaagtacatctataattgaacaattt

SEQ ID NO: 3541 - DNA, 605 bp, Glycine max
taataagtccatttatagattgaaacaagcttcccgccaatggtatttaaaatttcatgagatcatttcttcatttagctttgaagagaatgttatggatcactgtatatactacactgtcaagggtagtacgatttgttgacttgtattatacgtcaatgatattctgcctgcgactaaagataaaggatcgcctcgtgaggtgacactatgcctctcatataactttgatatgaaggatatggctgacgcatcttatgtcataagcataaagatccatagagaaagatctcgaggcattttaggcttgtctcaagaaacctatatcaaccaagttttagagagatttaatatgaaagagtgttcaccacgtgtagctcccattgtgaagggtgacaaacttgctttgagtcaatgccccaaaaatgattttgagcgggaacatatgaaaaatattccatatgcttcagcacttggcagtcttatgtatgctcaggtttgcactagacctgatattgcattccctgttggagtcttcggaagatatcaacgtaatctatgtattgaccactataaagctgcccagaaagtgatgagatatcttc

SEQ ID NO: 3542 - DNA, 577 bp, Glycine max
ttgtcttcatgaatcatatcgaaactgatttactggtcttttatggccatttgtagtttcctcttccccatgtctaccacacagcttgcggtggacataaaaggtcttccaagaattaggggaatgtcagcatcttcttcaatgtctatcactacataatcaactggaaagataaaatgtttgaccctaaccaaaacgtcttcgatcactctgtagaagcaagcgtcatgatgatgaatcaagttgattcaagttgttttgatgatgactaagatgatgacaaaaagcccaaagaatgatttcaagattcagttaacaagttcaagattaagtttaatttcaagtttcatgagaagaaatcaagaagattcaagaatcaagagaagtttgatttcaagattcaagagaagaagaattcaagattcaagagaagaaatcaagaagacctcacaagggaagtattgaaaatatttttcaaaaaacaaacatagcacaattttgtttttcaaaagaatttttctcaaaattttctaagttaccagaagttttactctctcgtaatcgattaccaatttcc

SEQ ID NO: 3543 - DNA, 326 bp, Glycine max
  unsure at all n locations
agcttatagggtaaaagtctcacgattgtcacgtgctcatgcaacaattgttagccgtggctatacgagacatcttgccaaacaaagtcaggttagcgataactcgcctgtgctttttcttccatgctatatgtagcaaagtcattgatccagtcatgtttgatgaagtggaaaatgaggccgcaattatactatgccagttggagatgtattttccccctgctttctttgacgtcatgattcacttgattgtgcatctggtcagagaaatcaaatgttgtggtcctgtttatctacggtggatatacnccggtgagcgatacatg

SEQ ID NO: 3544 - DNA, 581 bp, Glycine max
tctcccaattcaattaaatttatttccaaccatacacatcaaatattcacttaatgcatgtaaaattacaaaactactcctaatacaaaaactagtctaggtgccctaaaatacaagggctgaaaaattctacacttctaaggtaccatacctatattgtggagccctaaatacaagaccgaaaaataatgaaaccttaatctaatatgtacaaagataagcaggctcatacttaacccatgggcccgaaatctaccctaaggctcatgagaaccctagggccttctcttgcatctctggcccaatttttttggagtcttctatccaatgcccttgcaaggtaggattacatcattccctcccccttgaaaaggatttgacctcaaatcctgaggttcttgaaactctgggcttttttcctcaatacttttaaaacgaacaaaaacatatgtattagtggtgtttggtatgttgaagtaaggtaaggtcttaaaacccatttcctgggcatctttccatgaaagaacatcgttcctcagtaactcaatgagtggtgctaaaagtataaaaaaatatgggac

SEQ ID NO: 3545 - DNA, 632 bp, Glycine max
  unsure at all n locations
tgccttgccccttgatatatttgagggattcatggtcactatgaatgacaaattccttgggataaaggtagtgttgccatgttttcaaagcccgtactaaggcatacaactccttatcataagttgaatagttaagggtaagaccacttaacttttcactgaaataagcaattggatggccttcttgcaacaacacagccccaatcccaacatttaaagcatcacactcgatttcaaaagatttttgaaagtttgcaacgcaagtatgggggcattagttagcttttgcttaagaatattgaaatcttcttcttgtttctctccccatttgaaaccaacatttttcttgggcacttcattgagaggtgctgtcaatgtgctaaaatcattcacaaatcgtctataaaaacttgctaagccatgaaaactcctcacctcggtcatggacttaggtgtaggtctttcttgaatagccctaaccttctnctcatcaacttgcactccttttgaacttacaacanatccaagaaaacacacatggttagtacaaaagatgcatttttcaagaatggcatacaattgttcttcttctagcacacaccagataaattntaaatgatcaatatgaaaat

SEQ ID NO: 3546 - DNA, 418 bp, Glycine max
  unsure at all n locations
agcttcttcttgtttctctccccaattgagaccaacatttntcttgagcacttcattgagaggtgctgccaatgtgctaaaatccttcacaaatcgtctataaaaacttgctaagccatgaaaactcctcacctcggtcacggacttaggtgtaggccattcttgaatagccctaaccttctcctcatcaacttgcactccttttgaactcacaacaaaaccaagaaacacaacatggttagtacaaaagatgcatttttcaagattggcatacaatggttcttctctaagcacagtcaagacagattttaaatgatcaatatgcaaatcaagtgaagtgctatagataagaatatcatcaaagtacaccacaacgaacctttctatgaactctctcaagatatgggtcattagtctc

SEQ ID NO: 3547 - DNA, 341 bp, Glycine max
  unsure at all n locations
agctntatcatcatcagatagtgagccaatgaactcctatctcttctctctgcagacatgttccatctacacaaccgcatccacctccatcacccatccatctgttaaacaagtggcctcagttatcttaagaagggggggttgaattaagatacaaaaactatcccccatttaatttttttaacaattcaacccttattatgaattactctaagaacaattcaaaacaaacttctttaaagcgaaatataaacaataataaataaaagaagtttaagggaagagagaatgtaaactcagtttttatactagttcccttatgttcagataaccttacaact

SEQ ID NO: 3548 - DNA, 239 bp, Glycine max
agcttgacaggtttaggtgctactactggtagaggcacttcaatttgcttgccagacctcaaggtgatggcactcacattttttggattctgcacagcttgtgaaggcaatttgttagaattttgggactgaacttggttcaactgaatagccatttgcccaatctgatttgtcagactctaaatgaaggctcttgtctcttgctgaaattgcatattctggatggccatttgcctcac

SEQ ID NO: 3549 - DNA, 361 bp, Glycine max
tcttggggttggcaggctattatagaaagttcattgagggattttctttattggctttgcccctaactaagttgactcgtaagaatgagaagtttgtttggaatgagaagtgtgagcaaagtttccaagagttgaagaggcggttgacgacagctccagtgttaattttgcccgaccctaagagaacatttgaagtgtattgcgatgcaagcgggcaaggcttggggtgtgtgttgatgcatgagggaagagtattggcgtatgcttcacgtcaattacgtcctcatgaagtttactatccgactcatgacttggaactagcagccggggtctttgccttaaagatttggaggcattattt

SEQ ID NO: 3550 - DNA, 443 bp, Glycine max
tccaatccatcttcttctacttcctctctttctccttctcattctcctgtttctcaaccactctctccagcagaaactccacaaaatagaactgctaccacttcaaagagttactttggcctagctactatacttgctctagcaattggaggctgtgcctttatctccctcctagttttgatcatctttgtatgctgtttgaagaggaccaagagtgaaagcagcggcatactgacaggaaaagcaccttgtgctggaaaggctgagatttcaaagggttttgggagtggagtggaagaggctgaaaagaacaagttgttcttctttgaaggttgctcttacaagtttgaccttgaagacttgttaaaggcttcagctgaagttcttggaaaggggagctatggaacaacatataaagctgctttggaggatggaacaacagt

SEQ ID NO: 3551 - DNA, 432 bp, Glycine max
  unsure at all n locations
agcttgcttcagaaaataataacactaaaaaatcaggtcattcactttaaattatgaccaataatattaaagtacattcaagcattcattcatttattcggaaacaattgggagattgaaatttttgctcacgaaaaaaggatacaataaaaaaattactatatacaaatccatgctacctgttcattntcaccatccttcttcgaaagaaataaatgccaaaagcagacagaacatgatacctcatacatggcttcgagccttttgagcaccagatcgaggaatagccaacacagctatgagtccactgataagggctgaaacagctgccacagcaaaggctggtgagtntccttcaccaaatagctgatcccatggtccacttcccagtgacactattatctgttaanacatgataaacatgtaacttag

SEQ ID NO: 3552 - DNA, 708 bp, Glycine max
tcattaagaggcttcctctagaagcttcctcgtggcttctttgagaagctttcacaagaagcttctttgagaagctacatccttatctatccacccctctattaactaaattaacttccttaaaaataattacggatgaaaataacgcaacaaataatcaaacatcaaacataattactaataatatatagatatatatatatcagggtgttacaactctcccacccttttagaaatttcatcctcgaaatttaccttactcacacaaggatgggtgagcttctcgcatctgaatttctaattcccacatggcatcttctcctgatgcacctccccatatcaccttgaccaacgaaatctctttccctcttacgtgttttgttcgccaatcctcgatcctcaaaggcaatatttcatatgtcaaattctccttcacttgtacatcatccaattcaatcacatgggatggatcacggatatacttacggagttgagacacatgaaagacattgtgaggattagaaagagacggcggtagtgcaattaggtatgccacagggccgactttcttaagaatttggaaaggaccaataaagcgaggtgtgagttttcgggatttcaatgctcgaccaacccccagaccatggagtgactctcaagaatacatgatcaccaacctcgaatccagatctttcctctctatcatga

SEQ ID NO: 3553 - DNA, 491 bp, Glycine max
ttgaggaaattcaaacgacaataccttttgacacggatgtcggattgagtcacgcaatatctcgagacgcttgaaattgaataccgaagctttgagcaaattcaaacgacaataactttttactccgatgtgggattgagtcacgtcatatgtccagacgctcgaaatagaatacccgagctctgagcaaattcaaacgacaatacctattgactcggatgtccgattgagtcacgtaatatctcgagacgctcgaaattgaataccgaagctctgaccgaattcaaacgacaataactttttactcggatgtgcgattgagtcccataatatgactagacactcgcgatttgaaataccgaagctatgagcaaattcaaacgacaataacttttatcttggatggccgattgagtcacgccatatgtcaaagacctcgaaaataaataccgaagctttgagaaattcaacgacaatacttttactcggat

SEQ ID NO: 3554 - DNA, 317 bp, Glycine max
atcattcgtcctattataggtgctaaacgattcacaccaatcatgataataccaaaaagacttcgctcataaataatgggaagagtatctggggagtctattgttaccacattcatgacccaaacatttcaattcttcgagctatagcatatttggaaaccacatacggggaaagatgctcagccaagcgggacatattagcaagtgaaaatctaattcagagtaacaaatcgataagtataacagtgactttagctcaccctctattgatagatctcatatcaatgacttgccgtacattgccatttaattcccat

SEQ ID NO: 3555 - DNA, 261 bp, Glycine max
agcttttgagcaattcagatggtcataacttttcacttggaggtgcgattcacgcgcataatatatcgagatgctcaaaattgaacaacggacgctctcgagaaattaaaatggtcataacgtttcactcagaggtgcgattcaggcgcctaatagatcgagacactcaaaattgaacaacgaaagctctcgagaaattcaaatggtcataacttttcacttggaggtccaattcaagcgcataatatatcgagacgctca

SEQ ID NO: 3556 - DNA, 333 bp, Glycine max
  unsure at all n locations
agcttgcagaanatgtcgatgttgagtgtatactatntttcttccatgtctcaattgtacatagcttgtgtcttcttcatagataacgcatgcacgatggcccttaacactgtatccactcaaattcccgtatgttggaaagtcattaatggtacaaaatagcattgcatgcaacttgaatgtctcatttcgatacccatcaaagacagtaaccctctagtcccaaacctttgtcaagtctttaatcaagggatgagataaacagcgatgctatttcctagttttgttgggctcgatatcatcatagacaacatgatgtatctttacttcatg

SEQ ID NO: 3557 - DNA, 561 bp, Glycine max
ttgagtttcttcttcatgaatgcaggaagaatcaacaattaactggaaggaactgactcaaacttgtgagatggcagaaaagtgcctaacaacaaactactatggtgcaaaggaaacaactgaggcatttcttccccttcttcaattatccaactcacctatgattgtcaatgtttcctcccaagcaagattgttaaaggtacaatagtggctaaacttttcttttgaaacttgaaatatgattttacactaaagtctcaacattggcaaatttgtgttatgttgatgtttcaagggatagcaaacgaattggttaaaggggtgtttgatgatgctgaaaatcttacagaagagagaatagatgaggtactcaaagtttatcaaagacttaaaagaaggctcacttgaaaacagaggttggccaacctttttgtctgcttatatggtctcaaaagcagccatgaattcatacacaaggattctagccaagaagcaccaaaacctttgcattaattgtgtgtgtcctgggtttgtgaaaacagacataaacagaaacactgg

SEQ ID NO: 3558 - DNA, 609 bp, Glycine max
  unsure at all n locations
tcaagaataatggcctcaacaaacttcttattcccataaggaaattcaataaataggcctcctatttttaatggagagggttaccactactagaaaacccaaatgcaaattttcattgaggcaatagacttaaacatttgggaagccatagaagttggaccttatgtacccaccatggtggctggaaatacaacaatagagaaacctagagaagagtggtctaaagaagaaagaagaatagtgcagtacaatttaaaggctaaaaacatcattacttctgcctaggaatggatgaatattttagggtgtcaaattgtaagagtgttaaggatatgtgggacactctacaagctacacatgagggaacaattgaggtcaaaagatctaggataaatactctaactcatgagtgaattatttaggatgaacacaaatgaaagtatacaagatatgcagaaaagattcacacatatagntaatcatcttgcatcattaggaagaacttttcaaaacgaggatctcatatataaagtgttaagatgtttaagtagagaatgcaacccaaagtaacagccatcatagaatctagagaattttctattatgtctc

SEQ ID NO: 3559 - DNA, 359 bp, Glycine max
agcttggagaaccaagccaatcagaatgctagacgaaatatagatgggaatagaggtaacaatggcggtaatgacggaccgaggcagaaccgggttgagggagtaaagctcaatgttcctcccttcaaaggtagaagtgatccagatgcctacctggactgggaaatgaagactgagcacatatttgcctgcaatgactacactgatgcgcagaaagtcaagctagcagcagctgaattctccgactatgctcttgtttggtggcataaataccaaagagaaatgttgagagaggaacggcgagaggtatatacatggactgagatgaaaagggtgatgagaataaagtatgtgcccac

SEQ ID NO: 3560 - DNA, 592 bp, Glycine max
tggttatctccttcttcactacatcaagaatcaccgggttgagtcttctctgtggctgtcttactggtttagctccatcctctaaatttattcgatgcatacatgtggatgggctaataccaggaatgtccgccagggtccagcctatagccttcttatgcttcttgagaactgacaacaacttttcctcttgctcatcagcaagggaggcagatataatcactggaaaactcttgctatcatccaagtaagcgtattttaaatttgatggcagaagcttcaattctggtgtggtcggctggacagtggtagaaggagatggtttctcagcctttacctcataaagaaagtcagaggtatgtgtacttcctgaaacatggttagtcctatctgactctataaaatcaatctcaagaggtaaaacaccaccaccaggcatgcaatcaatatcactctcagattcactctcagcatcaaattcagacatatgatcaagtacaatttcagactccatgcatgatgagtgagaggcatgcatattttaataaagatcagccatgtattcctcaacaacatggtcaattttttcagc

SEQ ID NO: 3561 - DNA, 292 bp, Glycine max
agcttggcgggttcaggtgcacgtgctgctaatggtggaggcaattgaatttgcttgccagacctcaaggtgatggcactcacatttctcggattctgcacagtttgtgaaggcaatttgtcagaattttgggactgagcttggttcatttgagtagccatctgccccatctgatttgtcagactctgaatggaggctcttgtctcttgctgaaattgcatattctggatggtcatttgcctcactaactcttctaggaaggttgaggatgagcctcacgtgcttgttgtca

SEQ ID NO: 3562 - DNA, 385 bp, Glycine max
agcttctggtgggacatcttgacttgctttccaatctgacattcaccacagattctgccttcttctattttcagattgggaatgcctctaacagcacctttggtaatgattttcttcatgcctcttaagtgcagatgcccaaatctttgatgccatattctgacttcatcttctttggagaatagacatgtggaggagtaactggtttcttgaggtgtccataggtaacagttgtcctttgatctgctgcccttcattagaacttcactcttttcatttgtcaccaagcattctgactgtgtgaagtatacattaaatccttcatcacacagctgactgatgctgatcaagtttgcagtcagtcccttcaccatcagtactttgt

SEQ ID NO: 3563 - DNA, 560 bp, Glycine max
cctaaaatattggacatggcagtttgttgtcgtccgtcctgtatgttctgttttgatgattgcattacagctacgcggctgtatccaaattggttgagctgggcattcaccatcgttcttaacatatctgtgtcgttagccttgtattctctggtggccttttaccatttgtttgctaaagaactggcaccacacaaacctctagctaaattcttgtgcatcaaaggaattgttttcttctactcttggtaggtaagctcatacagaaaaaaaaaacctatttttacatatagatcaatacaaataattggactagttgatggttctcaaccatttttcctttggttttattttttattttttttcatattgcttttacttatttattttggtgtagccaacaagacaataaactcaatgtaggaaatttcaacctaaaaaagcagagaggatcataatgctttgggggttcatgccaaggacatatgtcatgagaagacaaagcataattttgaaatggcacaggagagcataagataggtacgtccacacttgacagt

SEQ ID NO: 3564 - DNA, 343 bp, Glycine max
cttaactcggaggtccgattcaagcgcataatatatcgagacgctttttattatccaacggaagctctcgagaaattcaaatggccataacttttaactcggaaggcggattcaggcgcgtaatatatcgagacgctcgaaattgaacaacggaagctctcgagaaaatcaaatggtcataacttttcacacagaggtctgattcacgcgcataatatatcgagacccctctaatttaacaacggaagctctcgagaaataccaaaggtcataactgttcactgggatgtccgagtcaggcgcataatatattgagacgcttcaaatagaacaacggaagctc

SEQ ID NO: 3565 - DNA, 582 bp, Glycine max
tcgaatgcactattcaatggagaagacaagaacatcttcagactgattaacacttgcacagtggccaaagatgcatgggagatcctgaaaatcactcatgaaggaaccttcaaagtaaagatgtccacattgcaactcctggctacaaaaatcgaaaatctgaagatgaaggaggaagagtgtattcatgacttccacatgaacattcttgaaattgccaatgcttgcactgccttgggagagaggataacagatgaaaagctggtgagaaagatcctcacatccttgcctaagagatttgacatgaaagtcactgcactagaggaggcccaagacatttgcaacatgagagttgatgaactcattggttctcttcaaacctttgagctacgactctcggatagggctgaaaagaagagcaagaatctaactctcgtgtccaatgatgaaggagaagaagatgagtatgacctggatactgatgaatgtctgaccaatgcagttgtgctccttgaaagcagttcaacaaagtgctcaacagaatggacaagaagcagaaaccacatgtccagaacatccctt

SEQ ID NO: 3566 - DNA, 607 bp, Glycine max
ttgacattatgatacatggtgcctcctcattgttgaatggagcagcttcaaaattgataatggacaagaaagttctcagaaattttactctaccaacaacatcagggttgtccaagaatgaagaattgaatttggcaaatgacaaatgacgagtcttagtattgatctttgtttctttcccaagttcttctgatctaaaataaaaatctccaccgagtgacgttgctagatcatgcatgaggtcatgcatcacaaaccatttccgatcagaccaactacttctatttgtacttgaacgttggaaaaatgatctcgaaaccaaatcatcaaaatactcatgaccaacctcttctaaagtcctaccatttcttggtttcttcaaaagatcttcggccatccacaacaagattaattcatttttttcaaactcgtaatcttgtggatacaacgaacaataaacaaagcacccgtttaaatgtggagggagatcatgataactaagtctcagtgctggaataactttacactcactttcagaaagttcccacatgtcactattcagaatattattccaatccccaatgtcatgctttcttctcaacatgcc

SEQ ID NO: 3567 - DNA, 385 bp, Glycine max
  unsure at all n locations
gatgcttaagttggtgataacagggttcaaaccaacatcacaatatgtgtgaacttacttgggcaatctcaaatccacgtccttcgccaagtatgatgttttttgcgggcacacaaacattttcaaatgttacttctgcatgcccatgcggtgcattatcaaagccaaacactggcaatggtctctttatgtgaacgccaggagtctggacatccactaagatcatagaatgcttgttatgcttcactgcattgaagtcagttttcccctgtccatatngttttatcagtctctggtctctattgacatgaacggcacatggactgctaatgcaataactttcaaccaatactcaccatgactatcagaattctacattttggat

SEQ ID NO: 3568 - DNA, 553 bp, Glycine max
  unsure at all n locations
tactcttgcttgcaaaggcccgtccttgatatttgttttcaaaaacgatggaagttctttatggttaagctaatgcttggagaaaaataagatcttcgtaagacccaaatagtgtgggctgttggtgatttttagtactcagcttactatccagaaaacctaaaaggttcttcttataaataatataaaaaaaagtctaggaccatcatattttatatattttttaaatgaaataactttctgtgtccacttgangagtgtcatctatccatctaaatcaatatttccttttgcttgctcttataatagcgttatgtctaattgtaacttatgatatagtataatataatttaactaggatgctctgtcccctttcccttgctctattatgtttatctttatcttattattcggtatttttgcctttatttcttgcttgttttattcttacctctttattattagattccactcagtacttctttgatattaattaaatttaaatttctaccataaatattatgtatagtttacattttcgatttttttccaa

SEQ ID NO: 3569 - DNA, 307 bp, Glycine max
tgacaatcctgagagtcactccatcgccagttttcatcagcccaaatgccaccgcaagcttctcactgtggtacctgagggcatactccctttcttccccttccaactcgtgcatcgcggactctggcacgggtgcatagcctgcatccttgcaccttcatatcaactcatccaagaaacaataaatctcattagtctcacggtgagacttgtcacccatgctaaacagataacttctattgtcaacatctatggtgctataacccacttgcttctaatgcctctttggatatcacattctaccgat

SEQ ID NO: 3570 - DNA, 386 bp, Glycine max
  unsure at all n locations
tcacctgcggcatgcaagctntctccactaagttgcctgatgccaganatgtcttttctaatggcagtggtcctagatgcagggaagaatttctccaagaacaccctcttaaggtcatcccatctaaaaatggacctgngagcaaggtagtatagccaatcttttgccactccctccagagaatgaggaaaagactttagaaagatatgatcttcctggacatcagggggcttcatggtggaacaaacaatatgaaactccttgtgatgcttaagaagatcttcacctgcaagaccatgaaacttgngcagcaaatgtattaatccagtcttgagaacatatggaacaccctcattacgatattgaatgcacaagctttcataagt

SEQ ID NO: 3571 - DNA, 619 bp, Glycine max
cattgcaaagcagatatcgggtctgctattgcataagtatctcagatatccaatcaacttcctgaactcagtagcatcaaccagttcctctttaggatccttctccaacttaagccctggttcaattggtgttacagagggattgcaattcagcataccaagtttctttaagacctcctgtgcatatctgctttggtgcatgagcactcacttctgtacttggttaaattctaatccaaggaaatgtgataatttccctagatcagtcatcccaaactcagccatcatgaactgcttgaaaatatgaatctccttttcactgctgccagtcacaagcagatcatctacatatagacagaccagcagtaaattggttgaacaattggcccttatatacaccacatgctcactcttgcatttactaaagttttgtttggctaagactccatcaatcctcatgttccaggcccttggtggctgttttaaaccatacagggcttttctgatccagtacaccttgtcttcatgctttttcttctcaaagcctggtcactgtaatatgtatacctcctcttctagataaccattcaagaaagctgacttaacatccatatggtac

SEQ ID NO: 3572 - DNA, 495 bp, Glycine max
tagatccaattcaaacgacaataactttttactcggatgtctgattgagtcccgcaacatatcgagacgctcgaaattgaatgttgaaactctgagctagttcaaacgacaataactttttactcggatgtctgattgagtcccatcatatatcgagacgctcgaaattgaatgttgaagctctgagccaattcaaacaacaataactttttactccgatgtctgattgagtcccgtaatatatcgagacgctcgaaattgaatgttgaatctctgagccaattcaaacgacaataactttttactcggatgtctgattgagtcccgtaacatatcgagacgctcgaaattgaatgttgaagctctgagccaattcatacgacaataactttctactcggatgtgtgattgagccccgcaatataacgagaccgctcgaaattgaatgtggaagctctgagcaatatcaaacgacaattaaccttttactcggat

SEQ ID NO: 3573 - DNA, 345 bp, Glycine max
  unsure at all n locations
atccttagagtcacctgccgctgcagcttaacaatcaatttcgagcgtctcgttatattactggactcaatcagacatccaagtaaaaagttatcatcgtttgatatggctcaaagcttcaacattcaatntcgaacgactcgatatatgatgggactcaatcagacatccgagtaaaaagttattgtccttcgaaatggctcagagattccacattcaatttcgagcgtctcaatatattacgggactcaatcagacatccgagaaaaaagttatttttcgtttgatttgctcaaaggttcaacattcaatatcgagcggtttgatatattacgggactctatc

SEQ ID NO: 3574 - DNA, 351 bp, Glycine max
  unsure at all n locations
agctnttntcagtcgtttgtaaaggtgattgggtgttataaagcggcgatgcctactgtagactgtttttctcccatgattaagttgtatgtaacttgtgttttcttcacagatggggcatgcatgatgacccttaacactgcaaccgctgagattcccatatgctggaaagtcattaatggtacaaaagagcattgcacacatttcaaaggtctccttgcgaaacgcatgatacactacaaccccctcgtcccacaactttctcagatcttcaaccaacggacttagataaacatcaatgtcatttcctggttgtcttgggcccgatatcatcatagacaatatcatgta

SEQ ID NO: 3575 - DNA, 585 bp, Glycine max
  unsure at all n locations
tatgctgcaaacatttataatagactccctcagttgcaaaaccaactacaacagaataattatgacctttcaagcaatagatacaatctaggttggaggaatcatccaaatttgagatggacaagtcctccacaacaacaaaagtttgtccctccttttcataatgctgctggtcgaagcaagccatatgttcctccttcaatgcagcaacaacagcaacagccacaacaaagacaacaagcaactgaggctcctccttaaccttccttagaagaattagtgaagcaaatgaccatcaagaatatgcaatttcagcaagagacaagagcctccattcaaagtctgacaaatcaaatgggggagatggctacacaaatgaatcaagctcagtcccaaaattctgacaaattgccttcacaaattgtgcaaaatccganaaatgtgagtgccatcaccttgaggtttggcaaccaaattcaagtgcctccaccagtagcagcacctgcacctgaacctgtaaagcttcattcttcactagaaaaagaggatgagatagttggtgtcataccctaatttcgtctgggg

SEQ ID NO: 3576 - DNA, 535 bp, Glycine max
tctgctgcaacatttataatagacctcctcaacaacaaaaccaactacaacagtataattatgacctttcaagccaaagatacaatctaagttggaggaatcatccaaatctgagatggacaagttctccacaacaacaacagcctgtccctcctttccagaatgttgttggttcaagcaagccatatgttcctcctccaatgcagcaacagcaataacagtcacaacaaagataacaagcaactgaggttcctcctcaaccttccttagaagagttagtgaggcaaatgaccatccagaatatgcaatttcagcaaaagacaatagcctccattcagagtttgaaaaatcagatggggcagatggctactcaattgaaccaagctcagtcccaaaattttgacaaattgccttcacaaactgtgcagaatctgaaaaatgtgagtgccatcaccttgaggtctagcaaccaaatttaaagtgcctccaccagtagcagcacctgcacctgaacctgtcaagctttattctacac

SEQ ID NO: 3577 - DNA, 524 bp, Glycine max
  unsure at all n locations
tgtactttaccttatgagccgcatanttcggactcccacaagttgttccacaagttgtccgaacgatactcgccccctatcagaatattcaaaagtttgaagcagcttggtattattatatcttacatgagtcgaggtcctatataaaagctaatttggtgacgagctcacctgctcaggaaatgcactcaaaccataatcggaaatctttatatttcctagtgaatcacagaaaagattttcaggctgctcaaggcaggacgaaaaaaagaaaattttaagaaatcacagtaaggacaacaaacaacttctcagatctcactcaatgcaaacctttaaatctcagtgataaactcccttactgtggcaagaatctacaccggcaataagctgttggaaatatcttctagagtcagcttcactaacgcggccatggagtatcctgacaatcatattattcaccatcaaacattttccataacttgcattgtgattgataaaaggcacagtaaaagcttcaaaaa

SEQ ID NO: 3578 - DNA, 317 bp, Glycine max
gcttgagcacctctttcctcacctcttccttcatttatgggttgagccttctctggggctgcctgactgatctataggcttcttccatcattattctgtgcatgcaattggtagggctaactcctttaaaatcatatatgtgtcacccaatcgcttccctgtgtctcttgaggacttctaccaacctgttcttttcttctactgctagttcactgctgatcaccataggcgtgtgctcctcctacaagaacacatacttttgatggttgggtaggtaagatcttcagctctaccttggtcttctcggatgtactcct

SEQ ID NO: 3579 - DNA, 536 bp, Glycine max
tgttacaaatatcgtcaacacgaaaacccttaagggattctgtgagcatgtctactagttgatcttcgaagttgataaacttaatgatgatatctcttaaaggtaccttctcttgcacaaagtggcaatcaatctttatgtgtttagtcatctaatgaaagacatggtttgaagtaatgtggagagcaacttcattgtcacataatattttggtatgttgaacgtctccaaattttattagttagagaagtttcctaagccatgtgatctcgcatgtagctacttccatggcatgatactcaactttggcactggatctagcaatggttttttgcttctttcttctccatgagatcaagttccctctaataaggacacaatatctagaagtggagctcctgtctgatggtgatcttgcccaatcaacatcagagtagcaaacaactttgacctttcctttctcttcatatagaaatccatgacccaatgcattcttgatcttgaagtatgcacattgtagcaataaaatgactatc

SEQ ID NO: 3580 - DNA, 371 bp, Glycine max
  unsure at all n locations
agcttagtaggtctcgacctttctatctgctccaatctttnttcttgtgagcccatttacaaccaattggttttatatcctttgaagcttcaactaaagtccataatttgttgatcttcatttattccatttcagattccatagcttcttgcaatttcttacaatctaagctttgcatggtctcttcatagcttcttggatcatcatcatcatgataaaactcatttgatgtgtcatctaggaccatcaagtttaatctatcaggtgcatgatgcactcaagtagatcttttagaagcctcatacattgggtttataggttggtaaattgattctaagattggttcattaacctaatcttgaactataact

SEQ ID NO: 3581 - DNA, 299 bp, Glycine max
  unsure at all n locations
agcttctggaatactatccgccggaatcggacttctgtgtgacaagttatgaccattagaatntctcgagagctttcgttgttcaatttcatgcttctcaatatattatgcgcccgaatcggacttccgtttgaaaagtattgactcattgaattcttcgagagcttccggtttcaatatcgagcgtctcgttatattatgcgcctgaattcgaagtttgtgtgaaaagttatgacaatttgaatttcttgacagctttcggtgttcaatggtgagtttctcatatactatccgccgga

SEQ ID NO: 3582 - DNA, 397 bp, Glycine max
  unsure at all n locations
agctctcgagagattcaaatggtcatatctttttaaacggaagtccgattcaggcgcataatatatcgagaagcttgaaattgaacaacagaagctctcgagaaattcaaatggtcataacttatcacaccgaagtccgattcaggcgcataatataccgagaacgctcgaaatgaacaacggaagctctcgagaaattcaatggtcataactgatcacacgaaagtccgattccggcagatagtataccgagactcttgaaattgaacaacggaagctctcgagaaattctaatggtcataacttttcacatggaactccgattcaggcgcataatatatcgagacttttgaaatataacaacggaagctctcgagaaattcanatggtcataaaa

SEQ ID NO: 3583 - DNA, 369 bp, Glycine max
actggatgcattggttaacttggtaacccagctggccttgaatcagaaatctgtacctgtcacaagggtttgtggtttgtgctcctctgctgaccaccatacagaactttgcccttccatgcagcaacctggagcaattgagcaacctgaagcttatgctgcaaacatttacaatagacctcctcaacctcagcagcaaaatcaaccacaacagaacaattatgacctctccagcaacagatacaaccctggatggaggaatcaccctaatctcagatggtctagccctcaacaacaacaacaacagcctgctccttcttacaaatgctgctgcccaagcaaacatacattcttcacaatcaacaacac

SEQ ID NO: 3584 - DNA, 439 bp, Glycine max
  unsure at all n locations
ctaggattgaagcgcagtgaagcagatcattcaattntctatagtcacacttctccatgaaagtgtatntatctaattgtccatgttgatgacatagttattacagggaatgatgttgctacaatttgtctgctgaaaaagcacttattcatccactttcataccaaagaccttgggtgtgtaaaatactttcttggtattgaggtgactcaatcaaacgaaagcatttgntatttctcaaagaaagtatgctttggataggtttttttccagcaatacactccatctcccctatttgctcaaaatacacctctttgtatactaatacccaaaatacaactttttctcacctttgagaagttgagactggccaccccgacttctgtacgacgcgctnttttttaatttaattnttattttatttttaaatgtatgtttc

SEQ ID NO: 3585 - DNA, 384 bp, Glycine max
  unsure at all n locations
ctgatgcaacattnggagaggttaatgaaacaacgagatgatgcgctccatgagaggttggatcaaatggagaatagagatcataatgaagaagaaaggaggagaagagggaatgatagtgttcctagacaaaaccgaattgatggtattaaactcaacattcctccatttaaaggaaagaatgatccggaggcctacgttgagtgggagatgaaaatagagcatgttttctcatgcaacaactatgaggaggaccagaaggtgaagcttgccgccacggagttttccgactatgctcttgtgtggtggaacaagctacaaaaggagagagcaagaaatgaagagccaatggttgatacatggacggagatgaaaaagatcatg

SEQ ID NO: 3586 - DNA, 306 bp, Glycine max
agcttatgaccattcgaatttctcgagagtttccgttgttcaatttcgagcgtgtagatgagttatgtccccgaatcggacatctgtgtgaaaagttatgaccattcgattttctcgagagcttccggtgttcaatttcgagcgtctcgatttattatgaccccgaatcggacatctgtgtgaaaacttatgaccatccgaatttgtcgagagctttctgtgatcaatttcgagcgtctagatgagttatgttcgcgaatcggacattcgagtgaatacttatgaccattcgaatttctcgagagc

SEQ ID NO: 3587 - DNA, 423 bp, Glycine max
cacagacctgcatttatagctcacccctacttgaattccaaggtgagaaatgggaaattccaattgactgcagttgagaaaagaagttgcttccctacaccagccttcagatttacccagacacccgaattggctcttattgtagtttatctttagaccagaaaccaattcaaaacatttcatgatacactctaaaactctaacattatcattagtggcagccccaaagaacaaggtgtcatctgcatattgaagtatattaacttcctctttcttctttcccacttgatagctgctgaagagattgtttgttactgctgatctcatcaacccggtaaggccttccactactatattgaatagcaaaggtgcaaggggatcaccttgccttaagtctcttaaggacaaattcctgagaagtac

SEQ ID NO: 3588 - DNA, 304 bp, Glycine max
  unsure at all n locations
atatgtaagttggatcgagcctttgaaaaaatcatatgataagtaatgagtcaagcnttaagtttgcgtattcaactcaaaccaagctcaagcctactaaagctngactngactcgacttctttctacccttactgtggagtataaatttactataaggaaatcgcgcttcagagcataattttgttcttagaaaaatgttatactaaaatttatatgcacgtacgaatttagttttaataattttatattaaaagtaaaatattatgtcatgagtttacatgttttattttatttaaaaatac

SEQ ID NO: 3589 - DNA, 403 bp, Glycine max
gcacaaatggccaattatgtgcttctaaccaatgaccaattcttgtcaaaccgaaccattccccaatccgtgtcagttctaaaccatgaacaatacagccttgccttcatgcccatttcacctctttggagggaactcagaaaaatatgcaacactcagttatttgcccacaagtctcttgatgctagccaagatgttaggcgtaagatagtgcagcaactagtctccgatatccatcaaagcagccagataggtgaagcagtggatattggaacagcagcattcaagactaccataaatcttttatcaaacactatcttctctatggatttgattcactctacacgtaaagcagaagagttcaaggacttggtgaccaatatcacaaagctggttggaacac

SEQ ID NO: 3590 - DNA, 456 bp, Glycine max
  unsure at all n locations
cgcacggtcagagaacatggttttgaaggcattagcttctattgcatcgcctatataaaggatacggnggagacaatttatgacaatagcacaaactcgcagagatgaaatattcaaaaataataatattcaagcttaaattgctggaatcagtaaaggtccacttcacttgtccaaaggtccacttcaaaaataataatacaggaagatgtatgacacctgtcttanagcacgagtcatggccaaaatggctcctctcccatcactaggaggttgagtaatatgatatgcatcacctagtcaaaatccacatgaaataagtcaaccaaatataaactaaggctagaagaaaatcctacatatcttgcaattagacaaactacctgacatcccatagccacggacctctgcatagatnttggctcctcggttttttgcatgctcaaattcctaaaa

SEQ ID NO: 3591 - DNA, 439 bp, Glycine max
tgccaagagtgtggccttcagttgaaccatatactcagagtgaggagctgagaggatgaggtattgaccagggggatgattgtctctgcgagagagagaatcagttactatattcgaggaacccactttatactgaatttcgtagtcgtatccaagcaacttggctaggtaaaattgctgttccgacgtctgaactacctgagacatgagctcacgaaggctccgatgatctgtgaagatggtgaatttatggcccagtagatattgccgccacttgcggacggcggcaacgatggcatgcaattcgcgaacgtaagctgaagcgtgttggaggcgttgacaaaatgatttgctgaaataagctatggggtggccgtgttgctgaaggaccgcgcccatggccgtgcttgatgcgtctgtttcaagtatgaaagggatc

SEQ ID NO: 3592 - DNA, 464 bp, Glycine max
  unsure at all n locations
aagctctctaaactttttgcaagaaanatgtactaanaagtaatataatattttttttattgatttttatgtatgaaattaatttcattagttatcattaacagacaaattcaaggttgtaataattaaaatcaacgcaatgtgataaaatttggaggatgaactagagtatatttaaagaatttatttataataacttatttacatcttaattgaacttattttatgagattaatacttgtgtaactatttaagaaaacttaaaaaagtaattataatatgtttataagtcattttcagcttatatatttcaaaaaactatttaaaataacttatatgaaaataatttaatcatgcatattttctcttcaattataaaaacatttcatatantaaattttacatgataaatacttattcaacaaatatttaattgagttatttatcctagcatacctttaatt

SEQ ID NO: 3593 - DNA, 340 bp, Glycine max
  unsure at all n locations
agcttctcaagaaagcttccatgatttgagtctttgatgcaatccttcttgtgaagggacgagtcaccatagccatgagcatgatgctccaagaggattgggctagagttgctgaagaacgccctangattctcatgaacctcaaggtagatctctaagcccatgggccaaggttgggtccacttgtctttgtaaatattagaataggttnttcttcttttgggccttatattctggccattctagttgtatagggttttagccttgtatatcatggcattttgagtagtctttgtagtacggacttttttctattttcatgtnatttggcatgggggtg

SEQ ID NO: 3594 - DNA, 425 bp, Glycine max
  unsure at all n locations
acgtccaagtttcttgtgccatacccagtgacttcctttgatggataatagacatgttacattttgatttgatagttcactaagattaatcttataaagattatctttccttttagcagcaaaaagttgggtaccatttttgtgttagacaacacacccatcttcgctagaggaaaaatcaagtccactatcacataattgacttatgctaagtagatcctatttaagccctttaacaaacagtacattatcaatggaaggatagggattagtacttatctttcctatccctactatcttccccttctgatttcctctgaaagtgactattccaccatgcatgggagtcaagcattggaacatacactnttatcttattatgtggcatgagcaacctctatccaggtaccatgattggtgttttc

SEQ ID NO: 3595 - DNA, 427 bp, Glycine max
cgaagcctcagtatttaaagccagaccatgtaagtttcattggtgttttaactgcttgcaaatatataggagcagtatgaaaagcaagggactatttttctctgatgatgaataactatgagattgagccatccataaaacactacacttgcatggttgaagtgctacgtctagctgcgctactataagaagcagaacaactaataaagggtatgcctctaaaggctgattttattatatgggggtctttgctttcatcttgtaagaagcatgggaatgtagaaattgcgaaacgagctgcacaaagagtctgtgagttaaatccaagtgatgccagcggttatttacttatgtctaatgttcaggctgcatccaaccaatttgaagaggcaatggagcaaagaattctgatgagagaaagattggc

SEQ ID NO: 3596 - DNA, 428 bp, Glycine max
  unsure at all n locations
tctggtgggacatcttgacttgctatccaatctgacattcaccacttattctgccttcttctattntcagagtgtgaatgcctctaacagcaccttagtcaatgattatcttcatgcctcttaagtgcagatgtccaaatctttgatgccatattctgacttcatcttctttggaggatggacatgtggaggagtagcttgtttcttgaggtgtccataggtaacagttggcctttgatctgctgcccttcattagaacttcactcttctcatttgtcaccaagcattctgactntgtgaagtttacattgaatccttcatcacacagctgactgatgctgatcaagattgcagtcagtcccttcaccagcagtactttgtccagactangaagtccatcatgaactagccttcccattccaatgatc

SEQ ID NO: 3597 - DNA, 372 bp, Glycine max
gtggtgaagctccttcttacttgttttattccctagtggatggcgcctcccctcttctcttctcctttgccttctgctgcatctccatggtgaataatcaccattgaaggacctcattggagctcaaagatccagccttcatagaatcttcacaagcaagcttccatcagctgtcttactggtatatcctcaccctctaaatttatccgatgcatacatgtggatgggctaataccaccaatgtccaccagggtccaacctatagccttcttatgcttcttgagaactgataacaacttctcctcttgctcatcaacaagggaggcagatataattactggaaaacttttgtatcatccaagaagcatattt

SEQ ID NO: 3598 - DNA, 366 bp, Glycine max
agatttcctgcatgtctgtctgtgtttagaattcgtacatccaacatccctatcctatgaacagcagcaacagataaactataagttccatgatcacttgcatcaaaatcatgaggaatgaactgctgcagtgatgcaatcttgcttatttgctgtgtgttatgatgcatactaccattgaccctgtcattaatattaaaaatagaatgtgtgacctttacaagggcagtagagggcacattggctaaatgatcatggtcaagaaggtaagctgcaacttctcttatacctgtctccccaaccctcactgaacgtttcaatcctggttgtccaagggctttgccaacaaaacctttaggattgttt

SEQ ID NO: 3599 - DNA, 341 bp, Glycine max
ggatcctcatagacgtctgaaaccccatcaatccttgttcttggaaaacgtctatcctgccgactgtgatgactttgacaagttggaaaatccaaactgacctcatagactcctaatataagatttgatctagcatatttcatggatggcattttacgccaagattttgtcaagggactaaatgcaagcacccctttgtgtgtattgaatgagctcctatccactttcccaaagttagtcaagctagaacatcctccaacaatgaagatatcattctgtataccagcaacagagaacatgaacctttctctgagaaatgatcatctttctgtccattgatc

SEQ ID NO: 3600 - DNA, 335 bp, Glycine max
  unsure at all n locations
acatcttgacttgctntcagagctaacattcaccacatattctgccttcttctattttcagattgggaatgcctctaacagcacctttgtcaatgagtttcttcatgcctcttaagtgcagatgtccaaatctttgatgccatattctgacttcatcttctttgaaggatagacatgtggaggagtaactggtttcttgaggtgttcatacgtaacagatgtcctttgatctgctgcccttcattagaacttcactcttctcatttgtcaccaaacattctgactttgcgaaagttacattgaatccttcatcacacaactgactgatgctgatc

SEQ ID NO: 3601 - DNA, 322 bp, Glycine max
  unsure at all n locations
ctacttgtagacatagacttgcttgaaagctttcttcacttctccttaagaaaccttacaaaggcaaaagctgctctcacagctgcaagaacagctgcaaatgctatttatgttcctccagctcaacaaggtgccatagatctacagagtgggattcttcacgcagaggagaaggattacaaaactgcatatagttatttctttgaagctttgagtctttaatgctcttgatgaccccaaggctgtatttagcctgaaatacatgtngntatgcaagattatggtgagtcaagctgatgatgtggctggaaacatatcttct

SEQ ID NO: 3602 - DNA, 303 bp, Glycine max
  unsure at all n locations
tgttgatatcgagtgtacattgtttttcttccatgtttcatttgtacgtagcttgtcttcttcacagagggcatggacgatggcccttaataccatatccactcaaattctcatatgttagaaagtcattaatggtacaaaataccattgcatgtaacttgaatgtctcattctgattctcatcaaacacgttaacccttttattccanaacttccttaagtcttcaatcaagggacttaaataaacatcaatgtaattntctaactgtcttggccctgatatcatcatagagaacatcatgt

SEQ ID NO: 3603 - DNA, 311 bp, Glycine max
ttgtttcttgcaattccaagacactagagagctttctaataggtggcatgtctaacttgtgctttttctatctaatttgcaacctgcaaaattagaatatgaaaagcctgttagatttaaggaagtatccttgggataccttaaacctacattggttgtgtccttaaggtacttaatgatctttttgatagatgttaagtgagattccttatgattggtctggaccttgcacataagtaaacactccacttgtttaagtagaaaagtgatccaatcatacctctatatcttgactcatccactggattttc

SEQ ID NO: 3604 - DNA, 407 bp, Glycine max
  unsure at all n locations
aacataagcacttacactttgaatgaaagctggagttgctgcacatgatgtccaacgttatgtcaaagaataagatcgggctgcacaatgcacaaggcaagataaagtgtcaaatgaagaattgaagctgtaggattcacgatgtcggatacaatgtccaggacatcctgcctgaaaatactggaattgctaaaagcattgaagctgcaggatccacgatgtcggatacaatgtccaggacatcctgcccganaatactgcagttgctaaaagcattgaagttgcaggatccacgatgtcggatacgatgtccaggacatcttgcccgaaaatactggacatataaatctgttatatctntaacagattattgtgcagttagcaagagattagatgatctatcttta

SEQ ID NO: 3605 - DNA, 272 bp, Glycine max
ggcgagtctacattgattatacgaagctgaaccatgtgaccaaaaaggatcattttcccctgccattcatcgaacaaatgcttgagcgcttggcaggtaaatctcattacttttttcttgatggcttttctggctatttacaaaatcatattgcttctgacgaataaaaaaagaccacattcacctggccctttcgcacttttgcgtatagaagaatcccttatgtctatgcaacgcctcctgtactttccagcggtgtatgccttacattt

SEQ ID NO: 3606 - DNA, 442 bp, Glycine max
ctgagctacagatatgctggaagcagggaataatatacccgaacctgttgctgctttcaagtatctgagaatcctataagctgcttgttgatgagctgaagaaggatgagctacaaattgacttaaatgttgcaccgcatatgtgatatcaggccttgtgtttatgaggtaaatgacgcgaccaatgagcctacagtacgatgaagttgctgtatcatcaagtggagttccagattgttggtgtagtcttacagcatagtcaatgggagttgagacaggtttgcttcctaacatgcctgcattacgcaagatatcaagaacatattttctttgaaaaatattgatcccttgtttacttcaagtccaagaaaaaaatgttaaagtaccaagatctttgattttaacaacttgatccagaagctgagttatggacttaatttct

SEQ ID NO: 3607 - DNA, 416 bp, Glycine max
  unsure at all n locations
catgatggttgaatcaagatgattcaaggagttntgatgataatttagatgatgacaaaaagtccaagagaatgagttcaagattgaatcaagaacacttcaagaataaagaggaaatttgatttcaagaatcaagtttcaagatttaagtttcaagaatcaagaataatcaagttgaagattcaagaatcaagataagtactaaaaagtttttcaaaacattgagtagcacatgaatttttcacaaaaccttttaccaaagagtttttactctctagtaatcgattaccagtttattgtaatcgattaccagtagcaaagtttgttttcaaaaagctttcaactgaatttacaacattccaattgatttcaaaatggtgtaatcgattacaatgatttagtaatcgattactagt

SEQ ID NO: 3608 - DNA, 404 bp, Glycine max
aaagttaattatttctctttattattcaatcaaaattatatcattagtaaatcaaccaagtgggtgaacataaatgattagtgtactggatttaagattgaattaatcgagtaatatccgagtttaaccctcagcgaaaataattactagatatttaagtccaaaataatatcattagcaaaaacacacaattagaatttttttaagatatttagtaagcacatcttatacttgatcaaacaagtaataacttaaggctaagcattggaagtaacactaaataaaattaaattggatgtgtcttaagaatattaattaattcttaaaaatcacattaaaaaaaaaaaagaaagacattcataatatatttttaatagaaacttaacttttattcccttccctcc

SEQ ID NO: 3609 - DNA, 439 bp, Glycine max
  unsure at all n locations
gcatgcaagcttcatgatacacgtattgtnnttatatgccaatagagannnaagaagaataccagtggtactcataataaaaaaaaggtatggagaataaagaaacttataacacacacaaatataatatttgtagtgtctgttgacacctccacactttggggagtctagattgatgtaattttctgtttgatattgaatctataatctataatatttgattatcattaatgaaggatatnttttgcaagtgtcaagttantactattcattgtataatacatttatacactgttgtcttcttttatattcatttcttatacacattcttctttaacataattattaacattattattttagaaatcctataaaacatattttttagataaagctatttataataatttaaataatctccattcataataattatttt

SEQ ID NO: 3610 - DNA, 416 bp, Glycine max
  unsure at all n locations
ttttatttctggagttcgtttaaagctcgacctgtatctttgtctctgctgtataagaccaggctaccaatcaagatattttttcttcactgaaccatgaacacttatttaggatttgatttacatgttaaacagttgctacttcttatttattccttcaatttctgagtgtatttttatattaagaatatacactgatttaggagcaccaaattgttgtattattgtatttctatacactggttattgattttatttgttgtggntaatgatttttattttattaacaaatatcagcaataatattttagttttttaaatgcctatcatttaaaaacttataggtattttaatatttntttatattcagtaaactcttacgagcttgcgagttaagtttgcggagtctctacgag

SEQ ID NO: 3611 - DNA, 411 bp, Glycine max
  unsure at all n locations
ngaaggtgtgtaacccaccattttccatagtagaatactggtaatgtgtctactatcattgtcatcattnttttttctccgtcattgaggtgccacttgagctgccaggtctctccacctttgggcatatccttttgaaagatttgtgccccctttntgcacatgttctgtagttgcatcctatctgaagacattatactgacactgcctaacgaaggtaaccactaggtccttccaagaatggactcgggaaggttccaagttagtgtaccaggtaacaactaccccagtaagactttcttggaaggaatgtatcagcaattcctcatcttttgcatatgcccccatcttccgacaatacatctttagattgttcttggggcaagtagtccccttgtacttgtcaaagtc

SEQ ID NO: 3612 - DNA, 442 bp, Glycine max
acaggaccactttcatattcttcccttgcattggcataatgttcaattactgtcaaggcttttggagcatctataacttgttcaactatattttgtgcaacatttcggttgataagctgcatcaaatctctctttttcctctgtattctttcagcacgaaagtattttttggttttcaattgcttggcaactgtagtttgtatctctcctttgacaatcttcttccgtatcgcatccagagaagcccccttctcaagctcttctaacaattcttttcttgcttcctcaaattccatctaattcaattaagcagtgagtgccaaaaagtattgttagagaaaatgaaatatgatcgacaatctaagtaattaatatttaatactcagcagaaaaaagaagaaatcagaacagatgttataaagttacaagttggtgttcccga

SEQ ID NO: 3613 - DNA, 430 bp, Glycine max
  unsure at all n locations
tggcctcaacaaacttcttattcccagaaggaaattcaatttataggcctcatatttgtaatggagaggcaatagacttaaacatttgggaagccatagaagtaggactntatgtacccaccatggtggcttgaaatgcaacaatagaaaaacctagagaagaatggactgaagatgaaagaagattagtgcggtacaatttataggctaaaaacatcattacttctgccctacgaatggataaatattttagggtttcaaattgtaggagtgctaaggatatgtgggacactctacaagttacacatgaaggcacaactgatgttaaacgatctaggataaatactttaacttatgagtatgaatcgttaggatgaagacaaatgatagtttcaagatatgcaaaaagattccacatatagtaattatc

SEQ ID NO: 3614 - DNA, 427 bp, Glycine max
  unsure at all n locations
tgccgcatgcattcttcacaaaaccttatcagggtcacgtgaaggatatataggcatggacagaattcatgtaacatcaagaggaacaaaacgatcatgaataagagtctcatttcatgtggccgctgaagaatgaataagagaacttactgctaaatccgcacgcccatcaatatgaggagaaacaatatatgaattttgtgaatcttgaagccatggctcagtccanatttttatctttgtgccatctaccactttccatctaatgccatctttgactaaagcttgtgaagtgtgaatactatatgtcaagtataacttgggttatgtcccaaagaggaacccaagaactccccattatggtaatattttgccttgaaaacttgtgaaacaacagcatcctggtcagaagctagcttccatcctt

SEQ ID NO: 3615 - DNA, 394 bp, Glycine max
  unsure at all n locations
tctatggattgatacaagccttccgcaatgcgaattaaaatttcatgaggtcatttcttcattcagctctgaagagaatgtcgtggatctctgtatataccacaaggtcagcgggagtaagatttgtttccttgtattatacgtaaatgatattctgcttgcaactaatgataaaggtatgctatatgaagtgaaacaatttctctccaagaactttgatatgaacgatatgggagaggcatcttatgtcataggcataaagatccatagagaaagatctcgaggaattttaggcttgtctcaagaaacctatatcaacaaagttntagagagagttaacatgaaagattgttcaccaagtgtagctcccattgtgaagggtgacaaactcgct

SEQ ID NO: 3616 - DNA, 459 bp, Glycine max
  unsure at all n locations
gacaagactatacgaggtatcttccttgggtataacaatatctctaagggctaccgtgtctacaacttgcaaactaagaaactcgtcatcagtcgagatgttgaagttgatgaatatgcttcttggaattgggatgaagaaaaagttgagaagaacgttcttatacccgctcaactacctcaagaagaagctgaggaagaagacccacgtgaaccaccttcacctgcaccacaacaacaagatcaagaactatcatcaccagagtctacttcaagacgagtaagatctttggtggacatatatgaaacctgtaacttggccatacttgaacctggaagctntgaagaagcattaaagcacgaagtatgggtcaaggccatggaagaagagatacagatgatcgagacaaacaacatatgggagtttgtgaatcgtccccatgggaaagatatcattggg

SEQ ID NO: 3617 - DNA, 399 bp, Glycine max
agcttacaaggttgtctgcggtgttagttttggtgtacttgaaggcaagatttgggtggagcgataaaagctttactaaattggtggtgttattgaagaaaatgcttcctgaacaagacacattgccgaaaaatcactacgaggcacaaaagattttatgtcctataggaatagagtatcggaagatccatgcatgccctaatgatttcatattatataaaaatcagtttgcagaaatgcgttagtgtcccacttgtggggtatcatgatacaaagtccagcatgatgaattcagtgatgatgcaagcaaacagaatagtcatcccacaaaggtctgctcgtatcttccaatcataccaatgtttaagcgattgtttgctaatatacataatgaaaaaa

SEQ ID NO: 3618 - DNA, 400 bp, Glycine max
  unsure at all n locations
aagatggcctcagcanattccttgtttccagaagggaattctataaatagacctccaatctttaatggagagggttaccactactggaaaacccgaatgcaatattttatcgaggcaatagatctaaatatctgggaagccattgaaatagggccttatatacccaccacagtagaaagagtttcaatagatggtagttcatcaagtgaaagcataaccatagaaaaacctaaagatagatggtctgaagaggatagaaaacgtgtacaatacaacctaaaagccaaaaacataataacatctgccctaggaatggatgaatatttcagagtttcaaattgcaagagtgctaacgaaatgtgggacactcttcgattaacacatgaaggaactacagatg

SEQ ID NO: 3619 - DNA, 225 bp, Glycine max
  unsure at all n locations
cagcttagccttgttcctcccaaccttacatgtttcatcaaacttgtttctaaacacccactntgctccaacaacagattttcctttggggagttctacaagcttccatacatcgttattctaaaactggtgtagctcttcttccattgctttgacccagtattaattagacatgatatcatctatgtgtttttgctcaatctcagatagtagtgttgtgttctt

SEQ ID NO: 3620 - DNA, 395 bp, Glycine max
  unsure at all n locations
ggagggagaataaaacaatccanaatcaattgtgctctttcaagtcacgaagaattctttgtgcggcttttagatgaggagaggtaggagcctccataaagcgacacacaactcccaccgcatatagaatatccggccttgtattggttagataccttaaactccccacaagactctagaagatcgtggagtctaccttctctccttcatcaaactttgataacttcaagccaccttccataggtgtgatcacgggattgcaatcaagcatattaaatttcttcaacacttcttttgtgtacctttcttgtgagacaaagataccattctccgtttgcttcacttccattcccaagtaatatgacatgagttccatatctgtcatatcaaattca

SEQ ID NO: 3621 - DNA, 333 bp, Glycine max
  unsure at all n locations
tctttgagtcgatctgccgcatgcaagcttgttgcaattcttctagacttggagttataacatgcagtcctcttgaacccttacctcccactctntcgtcatgccgggactcaggaaacccaacaggttntgccttttcaatgtactctgaacaaaactcaatagcttcttttgcaatatacctttcaataatagatgcttcaagacagtctagattctttgcatacccttttatgattttcatgtatcactcaaccaggtatatccaccacaaataaatgggaccacaacatctaatttccctcaccagatgaacaattaagtgcggaacca

SEQ ID NO: 3622 - DNA, 338 bp, Glycine max
  unsure at all n locations
gcaccaaccaccaacactccagaatcagcatatgatgtattcggaagcttcatcagtgcgagctcgacagtagccgagctgacagaaaccgatccagacgaaatgttagtctcagttctaacccgcttaccaaccgagatcgcctgcttgaacaaaccactaattttcttatcagaaccaggcactccctgtccagctntcacaacctgcttaacctgagcaagaatttgaccttccccaagaacaagtgagtcatgccctgccgccacttcaaagagatgctgcatgacatccgcgttatacagcaaaacttggtgctcacaaagctcatgtattga

SEQ ID NO: 3623 - DNA, 327 bp, Glycine max
gattccttcttgagcttggagctgcatggaatttctaatattctgactcacatatgctacatcatgagacatcacaccaaggcctttcagcagcttataacccaagtgcaagctagtctgcaagaataaaatatttagcaccagttttcaagcatcatgggagggaaagaattttttgacagtacctctgcattctccaaaatggcatccgttgcacctgtcttctttagatctaaaagatgctcgagatcaccagcttctggataaactgggatctgaggaatttcatcactaagtatactatttaaccacgagagaagagaacag

SEQ ID NO: 3624 - DNA, 462 bp, Glycine max
  unsure at all n locations
gaaacttccttgagaagcttctntgagaaaacttccttgagaagctagagcttagctacacatacccctctcataactaagctcacctccttgagaaacttccttaagaagattcctaaagaagctagagcttagctacacatacctctctaatagctaagctcacctccttgagatgggaagctagagcttagctatacacaccctataatagctaagctcacccccatgaaaaaaaacatgaaaatacaaaaaaaaaagtccttactacaaagactactcaaaatgccccaaaatacaaggctaaaaccctatactactagaatggccaaaatacaaagcccagacgaaggaaaaacctattctaatatntacaaagataagcgggctcatacttagcccatgggctcgaaatctaccctaaggctcatgagaactctaggggccttccttggatctcta

SEQ ID NO: 3625 - DNA, 430 bp, Glycine max
  unsure at all n locations
gcgaagtgggtggaattcctagagcaattcccttatgttatcaaacataaaaagggaaaaggtaatattgtagccgatgctctttctcggcgtcatgcattactttctatgcttgaaacaaaattgattggtcttgaatgtttgaaaagcatgtatgaaaatgatgaaacttttggagaaattnttaaaaattgtgaaaaattttcagaaaatggtttctttagacatgaaggctttcttttcaaagaaaacaaattgtgtgtccctaaatgttctactagaaatttgcttgtttgtgaagcaccatatgaggtttaatggggcattttggggtccaaaagactctataaacattacaagaacagttttattggcctcatatgaaaaaggatgtgcagaatatttgtgaacattgcattatatgtaaaaa

SEQ ID NO: 3626 - DNA, 432 bp, Glycine max
ctaagctcgccatcttccctgcaccaaccaccaacactccagaatcagcatatgaggaatccggaagcttcatcagtgcgagctccacagcagccgagctgacagaaaccgatccagacgaaatgttagtctcagttctaacccgcttcccaaccgagatcgcctgcttgaacaaaccactaattttcttatcaaaaccaggcactctctgtccagctttcacaacctgcttcacctgagcaagaatttgaccttccccaagaacaagtgagtcaagccctgccgccacttcaaagagatgctgcgtgacatccgcgttatacagcaaaacttggtgctcacaaagctcacgtattgaaatcccgctcacctaaacaaaaaaacacaaccgtgagttttctttctaaactaaaactagaacagaacatgggt

SEQ ID NO: 3627 - DNA, 418 bp, Glycine max
  unsure at all n locations
tgtcattccttcttgagcttggagctccatggaatctctaataagctgactcanaaatgctacatcatcagacatcacaccaaggcctttcagcagcttacaacccaggtgcaagctagtctggaagaataaaatatttagcaccagcttccaagcatcaagggagggaaagaattctttgacagtacctctgcattttccacaatggcatccgttgcaccttgctttcttcagatctaanagatgcttgagatcaccagctctggcatagattgggatctgaggaatttcatcactaagtatactattaaaccaagagagaagagaacagaaatataggaagatcccaaacacacaccgttacaaaattttattagtcaacgtcacccctaatataaacctaacatgtacatgtcct

SEQ ID NO: 3628 - DNA, 314 bp, Glycine max
  unsure at all n locations
cttgagcaattcanatggtaataactgttcactcggatattctatcatgcacataatatatcgagacgctcgaaatttaacatcggaagcttccgagcaattcaaatggtcataacttctaactcggaggtccgattgaggcgcataatatatcgagacgctcgatattgaacaatggcagctcttgagcaattcaaatggtaataacttttcactctgaggtccaattgacgcgcataatatatcgagacgctcgaaattgtacaatggaagctcctgagcaattcaattggccataacttctaacgtcggag

SEQ ID NO: 3629 - DNA, 385 bp, Glycine max
agctttaaggaggaggagataactaatgcagtgtgtgcttgcggaggagacaaaagcccagggtctgatgggctaaatttttgtttcattaagcatttctggagcatcctgaaacctgaattccttaggtttttctcagagtttcatgtcaatgcaaccttccctaagggcctaaattcatcattcattgctcttatccccaaaatcaaagatccccaactcctttctgactttagaccaatatccttaattggatgtgtttataaaatcattgctaaagtcctagctaatagggtcagcaaggttatgaatcacctcttagatgaaaggcaatcagcctttggtaagggcagacagatgcttcatgcagttttaattgctaatg

SEQ ID NO: 3630 - DNA, 390 bp, Glycine max
  unsure at all n locations
cgcatgaattacattctcccnctttctcaagcaaattcttaattcttcttgacatcatcaaaatcttcatcatcaataatcttaagagggataggcttaaaatacagaagaagcaacaacaatcaatttaacaatgttctttaaacatgcaagacacaattgattgcaaaaaattaaataagataagggaagagagaatgcaaacacagttttatactggttcggccacatcccgtgcctacgtccagtactcaagcaacccacttgagatttccactatctttgtaaaatccattacaaagtctgaaccacacagggacaacccatcccttgtgttcaggaatcctntacaacaagagactcacagtcccttaaccaatctcattgaat

SEQ ID NO: 3631 - DNA, 367 bp, Glycine max
taagctccttcaactgcacaaggctcttaatatttgaagagtattcttgtggaaccttcacccgacgaagacactgacaaaaacttatcttctccttcttggacaaagtatggcaggctgggggcaagtaaatattcttcccatcagaccttggatgcaactgtgatcttatacccatatcagctagatcttgacgggtattcaagccatccttcgtcttgccttgaatgtttaggagcgtcccaatcacactgtcacaaacatttttctgcacatgcataacatcaatacaatgtctaacgtcaagatcacaccagtacagaagatcaaagaaaatatacctcttcttgcatatgtgactctgact

SEQ ID NO: 3632 - DNA, 263 bp, Glycine max
gtgtggaccctctagtgcaatcctccattcttctcttttttcggagccctaagaatgtcattgcctagcgctgttcatgtgtcctccaccttcgagtctggagccccgcgaatgtcattgcctagcactgttcgacaattctccattctccacttttattcggagccccatgaatgacattgcctagcgctgttcatgtgtcctccacccgcgagtctggagacccgctaacgtgattgcctagcgctgactgccaattctcc

SEQ ID NO: 3633 - DNA, 311 bp, Glycine max
  unsure at all n locations
gataagagccctgtttcactttaactgctggaacattgggtgtaccttgcacctgagtatcttcagtatggaaaagccactgataagactgatgttttcagctatggggtggttgtgcttgaggtggcttgtgggaggaggccaattgaaagagaagggtctaagatgttgaatctgattgattgggnttggggccttcactctgaaggaaaagtgattgaggcagctgataaaaggttgaatggggatgttgaggaggaggagatgaggaaattgttgattttggggttgagttgtgctaatcctgatag

SEQ ID NO: 3634 - DNA, 278 bp, Glycine max
  unsure at all n locations
cgcatgccagctgggactgagcattgatgaagatgctggtgaattatatgctgacatgcctcctnttgaggacgctgatgcagatgctgagggtaccaagatggaagaagctgatctaaatctgacttaaatgcctgttacgttcttagaaacaatgattggagaaacagtctttctactatggtctatgttcttcgaattttcgaaattttggaacgttggctagttacgtgccgcatgttgtacttctttattggatatttgcgtccttccctgcc

SEQ ID NO: 3635 - DNA, 373 bp, Glycine max
  unsure at all n locations
ccaatgcctacaagattaaatcctaagctatcagccagatactatgttccttattgggtagttaaanaaattggagcagtggcattgcagttgcaattacccgacgctgctcgaatccaccctggttttgacatatccgaattgaaactcgcagtgggagaacatcagatcgaggcagaattgccaaaggaactacaagctgaagaacaagggatacaaccggaacaagtactggtaacaagaatgtttggtccagcaggagcagaaattccacaagtattcatcaagtggaaaggacgacatgctgaaggagcaacctgtgaggacagatcaaatatgatgcaacaattccctgctttcaaccttgaggaca

SEQ ID NO: 3636 - DNA, 353 bp, Glycine max
agaggttaatgaaacaatgagatgtttttctctatgagaggttggatcaaatggtgaatttagatccttatgcagaagaaaggatgagaagagggaatgatggtgttcctagacaaaaccgaattgatggtattaaactcaacatttctgcctttaaaggaaagaatgatccggacgcctacttggtgtgggagatgaaaatagagaatcttttctcatgcaacatctatgaggaggaccaaaaggtgaagcttgctgccacggatgattcggactatgctctagcgtggtggaacaagctatagaaagagagagcatgaaatgaaaagccaatggttgaacatgggcggaga

SEQ ID NO: 3637 - DNA, 422 bp, Glycine max
gcgaagtgggtggaattcctagagcaattcccttatgtttatcaaatataaaaaggcaaaaggtaatatagtagccgatgctctttctcggcgtcatgcattactttctatgcttgaaacaaaattggttggtcttgaatgtttgaaaagcatgtatgaaaatgatgaaacttttggagaaatgtttaaaaattgtgaaaattcttcagaaaatggtttctttagacatgaaggctttcttttcaaagaaaacaaattgtgtgtgcctaaatgttctactagaaatttgcttgtttgtgaagcacatgaaggaggtttaatggggcatttcggggtccaaaagactctagaaacattacaagaaccattttattggcctcatatgaaaaaagatgtgcagaacatttgtgaacattgcattg

SEQ ID NO: 3638 - DNA, 173 bp, Glycine max
  unsure at all n locations
gaaaacgaanaccctcgagaaattcttatggttataactcgccacacggaaggtcgattaacgcgcagactatatcgagacgctcgaaattgagcaacgaatgctctcgagaaatctatatggccataacttgtcacacggatgtccgatttaggggcataatatattgagat

SEQ ID NO: 3639 - DNA, 426 bp, Glycine max
  unsure at all n locations
gacaagactatacgaggtatcttccttngtatagcaatatctccaagggctaccgtgtctacaacttgcaaactaagaaactcgtcatcagtcgagatgttgaagtttatgagtatgcttcttggaattgggatgaagaaaaagtggagaagaatgttcttatacctgctcaactacctcaagaagaagctgaggaagaagacccaggtgaaccaccttcaccttcaccacaacaacaagatcaagaactatcatcaccagagtctactccaagacgagtaagatctttggtggacatatatgaaacctgtaacttggccatacttgaacttggaagctttgaagaagcgtcaaagcacgaagtatgggtcaaggcaatggaagaagagatacagatgatcgagaaaaacaacacatgggagttag

SEQ ID NO: 3640 - DNA, 196 bp, Glycine max
agcttgtaggtcttgaatcttcttcatcaatggagtcatctacttcttgaagatcaattgcagcggaatggaaatggaagaaagatgattggagacgccactttaaggagaagatgagtcaagaagaagctcaccaccataggaaagcatgaataagagcttgaaggtacgagaaaatgagtggaaggagagggac

SEQ ID NO: 3641 - DNA, 385 bp, Glycine max
  unsure at all n locations
catgcaagctttgatctaccaccaccaccgccaccatcatcttagttntctattatttttaatagtattagcattttgatttctagccatgtatttgttggaccttgtggcctcaataatcttaagagggataggcttataatacagaagaagcaccaacaatcaatttaacaatgttctttaaacatgcaagacacaattgattgcaacaaaataaataagataagggaagagagaatgcaaacacagttttatactggttcggccacaacccgtgcctacgtccagtactcaagcaacccacttgagatttccactatctttgtaaaatcctttacaaagtctgaaccacacagggacaacccatcccttgtgtcagatgctt

SEQ ID NO: 3642 - DNA, 410 bp, Glycine max
  unsure at all n locations
actaagctatgctgcaaacattataatagacccnctcagcagcaaaaccatcaacagcagaataattatgacctttcaagcaatagatacaatccaagttggaggaatcatccaaatctgagatgggcaagtcctccacaacaacaacagcctatccctcccttccagaatgctgctgctccaagcaggccatatattcctcctccaatgcagcagcagcagcaacaacaacaacaaagacaacaagcagctgaggcccctcctcaaccttcagaatatgcaatttcagcaagagacaagagcctncattcagagtctgacaaatcagatggggcagatggctactcagttgaaccaagctcagtcccaaaatttgacaaatggcttcataaactgtgcagaatctgaaa

SEQ ID NO: 3643 - DNA, 412 bp, Glycine max
ttataagatatttggtatttttagtatagacaattatgctcaacttaggtaggattattgggcatgataaatctatccttttaaatatttaacataactctacacttagtacttgaatttgagaccactagctaagataaaataattttgcgccaattaatcaacatgttagcttttatcccatgtaatttgctaattacttacatatatgtgcgaaacatgataaagactaaataacttagataatacaatagtagatcatcaatgagtatgcattacagagatataatatatgatggagaaatagttctggtaaccaatagaaattgtaaaattcttcgctttaactgtgtattatacaataataagtgttaaaaacccctcatggtatcgtgggttcattgacaatgac

SEQ ID NO: 3644 - DNA, 332 bp, Glycine max
  unsure at all n locations
agcttcatatttncaccagatgacaagcagaatttccttggctgggagaagctgcagaatattgctcttggtatagctaaagggattgggtatcttcaccaaggttgtaaccatcccattattcactttgacatcaatcctcacaatgtgttacttgatgacaacttcactccaaaaatttctgattttggcttagcaaaattgtgttccaagaatcctagtttggtgtccatgacagctgctaggggaaccttgggatacattgcacctgaagttctctccagaaactttgggaatgtgtcttataagtctgatatttatagctacggaat

SEQ ID NO: 3645 - DNA, 417 bp, Glycine max
  unsure at all n locations
attgaaggatgttgtggaaaattattgtctntntgatttnagaagctttactgtttttttatcagtaattacaaaaatattatcttatttttttacctcatgtcatgatttgaagaaatatgtttgctacaaagtactgatactttaatttgcttcatgcatctatatctgataccaatatattgatatatttcactggtacatatatgtgaagtgaccaattctttaaaaaaaattatgatcaaatatagtgacatgtaacatagaagtaagtataatataaaaatatacaaagtattgtttcttgatgaaccaaatatgacaantggtatgtgtatagataatttcaagacagacatgagatcgatcattgatagtaccattcttaattgtgaacaataggaaaaaatgatctac

SEQ ID NO: 3646 - DNA, 255 bp, Glycine max
agcttgacaggttcatgcgcatgttctgctactggtggaggcacttgaatctggttgcccaacctcaaggagacggcactcacattttttggattctgcatagcccgcgaacgcaatttgtcagaattttgggactgagcttgattcatatgagtagccatctgtcctatttgatttgtcagactctgaacggaggctattgtcttttgttgaaattgcatattctacatggtcatttgcctcactaacttttct

SEQ ID NO: 3647 - DNA, 486 bp, Glycine max
  unsure at all n locations
cttgatgcaacattaggagaggttaatgaaacaacgagatgatgcgctccatgagaggttggatcaaatggagaatagagatcataatgaagaagaaaggaggagaagagggaatgatggtgttcctagacaaaaccaaattgatggtattaaactcaacattcctccatttaaaggaaagaatgatctggaggcctacttggagtgggagatgaaaatagagcatgttttctcatgcaacaactatgaggaggaccaaaaggtgaagcttgccgccacggagttttccgactatgctcttgtgtggtggaacaagctacaaaaggagagagcaagaaatgaagagccaatggttgatacatggacggagatgaaaaagatcatgaggaagcggtatgtgccggctagttactcaagggacttgaaattcaagctccaaaaactaacccaaggcaacaagggggtngaggagtatttcaaggaaat

SEQ ID NO: 3648 - DNA, 485 bp, Glycine max
  unsure at all n locations
gcctcttcacgtctagaatatgaatgaagcatatagatccaaataccctcaggtgctttgctgatggcttcttctcgttgcaagcttcaattggagtcttgtcttttacagacttagttggacatctgttgagtatgtaaacaactgtgtagactgcttcagctaagaatgtgttagatagtctcttctctttgagcatcgatctagccattttcgtaactgtgcgattctttctctcggacactccattntgttgaggagaatatgcaactgtaagttgccgctcaatgccttcatccttacaaaatctttcaaactcgcgagaggtgtactctatgccgcgattacttgttagtacttttatacgttntccactgtgattctcagcaagggccttgaactttctgaatacttcgaagacgtctgatctttcttttataanatatacccatgtcattctagagaagtcatcaatgaagagtatg

SEQ ID NO: 3649 - DNA, 408 bp, Glycine max
  unsure at all n locations
agcttctacagtttcttggtttgaccattgtctctgtcatatcatctttaatggnctttgcatgcttagtcatgatgcaatcctaccccgcaagggcattggatacaagactctcagtagattgggcctgagatccaagggaaggccctacggttctcatgagccttacggttgatattgagcccatgggctaagtatgagcccgcttaggccttgtattttaccttatgattgagagtgttgtgttgggaaccttagatgcggccatccagacactcttaagattcgcctaatatacattacttgcttactttcgtcgcttattacttgtaccttccattgtcacaccgcctagatagcttgcatattaccaagtagttgttaccttatctttcacacactctttag

SEQ ID NO: 3650 - DNA, 453 bp, Glycine max
ctttctattggattcgtcatatcttcatctaatgttagatcatctgttccaacttcagaattatcgtcccgtccaattcttggtgttcctaggtcagatggctcatatgcagtatcactaccataatctgaggcaacagatgaactgccagcgaataatgataaactcgactggagaggtgattgcacagaataaactgtgttattggaatcggcgtctgtttcacaattctgctggcttgcatcttggaatgctaagtgattaaatgaggtataaaatatcataatttgcgagagctaacaatcgattagcacaaaacagaccatactgacatgtttgaggaaactaagtgcaagttgcaaaagataatcacatacaagatctagcagctgcttctagttcaagaaatgacgccacggcagcacatcgtgatatatcaatgtcagataatag

SEQ ID NO: 3651 - DNA, 457 bp, Glycine max
  unsure at all n locations
tgtgtcacaattcattgtgacagtcaaagtgtcattcacttagcttatcaccaaatgtaccatgagaggacaaagcacatagatgtgaaactacacttcattagagatgcgattgaatctaagaaggtgaaggtggagaaggtttcaacagaagaaaacccggctgatatgttcacaaagtccctctctagtgtcaagttcaagcactgcttggacttgataaattntgaagatgcctaaagcagattggtagaagtgcagctctaaatcacaaggtagacactcgctgatttagagtcaaagtggagatttgtggtgtgtgactcacaatcacatatgacacaagtgaaaagactttaaagtagtgttgtcataactgttttaagttattataactaaactgggtttggcaccaaagcataactagagtgtacatatatattctcgatcatgtaat

SEQ ID NO: 3652 - DNA, 480 bp, Glycine max
ccatgatgatgaagccaagcaatttgatgatgccatatgcccatgtgattgattcaagattgattcatgaattcaagatcaagcatgaagaatccaatccaagattaaagagaagatatcacgaagcaacaagtcaagacttcatataggataagttgtaaaagattctttcaaaaatcaaatagcagagttttgttttacaaaagaattttctaaagttactagagtgattactctctgataatcgattaccaattgatagtaatcgattactagtgactagactggttttcaaaatgttctcaaatgatatgtaacgttccacaatgattttcaaatagtataatcgattacactatattagtgatcgattacaagtgaatctgaacgttggaattcacatccaattgtgaagagtcacaactcttcataaaatacatcggataatcaattataccatggcggtaatcagataccagt

SEQ ID NO: 3653 - DNA, 378 bp, Glycine max
ctaagcttaatggcctagtgaggatggagaggtgcaagtaaggaatcaagtgtagttggatatttccattggaaagtacaatgataaggtgctctgtgatgttgttcctatggaggccagccacttactcttgtggagatcatggcaatttgataagagggctaatcatgatgggttcaccaataagatctctttcacacatcaaggaacaaagatagtgctcaaaccattgagtccacaagaagtgtgtgaggatcacagaacaatgagagagaaaattcttcaagagcagagagatcaagaaaaagagagcgaaacacttgagagttcacaaagtgatgaaaaaaagagggacacaccagagaggaataagatgag

SEQ ID NO: 3654 - DNA, 426 bp, Glycine max
agcttgtaaaggtatgtatataataagtgttcaagattgaatgaatgaattaattgaaaagcaaaccacagcctcgcttttatagactcttcatgtctggccaagaggaccatttataagagctacaacttttagaataacttaaaaccaatttgaaaaagtcaaaacctttttgaagagttacatctttcgatttattcagaaacattcactggtaattgagtaccaaaatagtgtattcgattacacaaggcttttatgtgaaaggatgtgactcttcacatttgaatttgaatttcacattcaagggactggattcgattaccaaacattgtaatgataccgtttttgaaataattgcaccgtgcaattcatttgaaacttttcaaacatttgcactggaatcgatacaacattgtatcatac

SEQ ID NO: 3655 - DNA, 383 bp, Glycine max
agcttctggctgttcttaaatatattcacaaagaaaggttagaacaaagaaagtttctaactatcaagttttttgttctttccatttttcttttaaacaattaagcttcaacaatgtcatgagttaagtgtgtaactgcatcaatgtgcatgggacaggtacttgacgggtttcctatatttcacgggcattaatttcgttttgacgtttgttgctgctattctctgtgtgtgttttgcacccacagcagcaagacctggaattcctgaaatcaaagcttatcttaatggtgttgatacttccaacatgattggtgctacaacattgattggcaaggtaacattaattatttgattgtatgtaacactgtctctgttccttca

SEQ ID NO: 3656 - DNA, 323 bp, Glycine max
agctcctgtaaaatatcaagataacgagcataatattgctctttttccttcttggaaggcaccaaagggtattgttagtgtttagctctactgagctctacaagattggctaagattttgttaaaacatatgcacttatacaatgaatggaagctggagttgctgcacatgatgtccaacgttatgtcaaggaataagatcgggctgcacaatgcacaaggcaagatgaaatgtcaaatgaagaattgaagctgcataattcacgatgtcggatacaatgtcctgacatcctgcccgagaatactggagttgctgtacaatgc

SEQ ID NO: 3657 - DNA, 403 bp, Glycine max
  unsure at all n locations
agctctacattactcctcatgcttntcaccatgtattataacgatcgatttcttcgttctgccacaccattctgattcggagaaccaggcatagtgtattgcgcaacaatcccatgttcttgaagaaatttcgtaaatgaacctcgggcttgtccatcctctgtggatctaccatagtactccccacctctatctgatctcacgatcttaatttattttccacattgtttctcaacttcagccttataaactttaaaggcatctaaagcttcattcttagaatgaagtaagtagagatacatatatcgtgaactatcatctataaaggttatgaagtatttcggactatatgcatccatgtcctgacaacatatgtctgcatgcatgatgatttctaataaat

SEQ ID NO: 3658 - DNA, 487 bp, Glycine max
  unsure at all n locations
cgtgttacgaacgataagaattcgaagattcttcatcttctcaaatacagtatcaatacaattaatttcttttctatgaagggggtcgagcattattccttcaatttcgctacttccctttaaatcaattataactggcattaattaagtattcataatttcaacaaaaactaaaatgcttaaggatgataaaaatcaagaaacaaagttgacaacaatattcttacattatcatcttctaatacttgaagaacatcttcatggtgccataatctgctgcgttcgccaattttattggatgctttctccttaactatctctctacccatgtctngtattagatcatgcatncacaggcaatcatagtcaacagttaaaagtgatttattaactaatgttgtaataccatctcctgagctgaaatcagatgcatctnagtacagttntacataatccaatcgttgccctttgaaaaacatgcaacatc

SEQ ID NO: 3659 - DNA, 352 bp, Glycine max
  unsure at all n locations
agcttctcgggggacatcttgacttgctntccaatctgacattcaccatatattctaccttcttctattttcagattgggaatgcctctaacagcacctttgtcaatgattttcttcatgcctcttaagtgcagatgtccaaatctttgatgccatattctgacttcatcttctttggaggatagacatgtggaggagtaactggtttcttgaggtgtccatacgtagcagttgtcctttgatctgctgcccttcattagaacttcacacttctcatttgtcactaagcattctgactatgcgaagattacattgaatccttcatcacacagctgactgatgctgatcaagt

SEQ ID NO: 3660 - DNA, 466 bp, Glycine max
  unsure at all n locations
tctggtgggacatcttgacttgctttccaatctgacattcatcacaaattctgccttcttctattttcagattgggaatgcctctaacagcacttttgtcaaggattttcttcatgcctcttaagtgcagatgtccaaacctttgatgccatattctgacttcatcttctttggaggatagacatgtggaggagtagctggtttcttggggtgtccataggtaacaattgtcctttgatctgctgcccttcattagaacttcactcttctcatttgtcaccaagcattctgactntgtgaagtttacattgaatccttcatcaaacagctgactgatgctgatcaagtttgcagtcagtcccttcaccagcagtactttgttcagactaggaagtccatcatgaactagctntcccattccaatgatctttcctttagagccatctccaaatgtcacataactagt

SEQ ID NO: 3661 - DNA, 304 bp, Glycine max
  unsure at all n locations
agcttctggtgggacatcttgactcgctttccaatctgacattcaccacagattctgccttcttctattttcagattgngaatgcctctaacagcacctttgtcaatgattttcttcatgcctcttaagtgcagatgtccaaatctttgatgccatattctgacttcatcttctttggaggatagacatgtggaggagtaactggtttcttgaggtgtccataggtaacagatgtcctttgatctgctgcccttcattagaactccactcttctcatttgtcaccaagcattctgactttgtga

SEQ ID NO: 3662 - DNA, 359 bp, Glycine max
  unsure at all n locations
agcttctattctttgtacaagaatgaagctctgataccacttgntagacaagtggcctcagatatcttaagaagggggttgaattaagatatcacaaactattccctaattaaaaattctaatttgatgttaacccaaatcctaagattccttttaaaatgaattcctaaataattattcaaattaaacttactgaatagaagcaataagcaataataaataaaagagtttaagggaagagaaagtgcaaactcagttttatactagttcggccacacccttgtgcatacgtccagttcccatgcaacccgcttgagagttccactcaatcgcaaaaaccctttacaagttctgaacca

SEQ ID NO: 3663 - DNA, 380 bp, Glycine max
  unsure at all n locations
ctaagcttanaagcatagcctcataagaattggatagaagactccattaagattgcgctatagatgcaagagaagaccctagggttctcatgtgccttacggtagatcttgcgtccatgggctaagtatgagcccacttatctttgtacatattaaattaacgtttcattatttttgggccttgtatttacggctccatagtgtacggagggtaccctactattgtacgatttttcaacccttgtattttaaaacacctaaactagtttttgtattaagggtagttttataatttcatatgcattaagcgtactatttgatgtgtgatgggagataaatttaattgaattgcgagaagcccactcaaattacattttgga

SEQ ID NO: 3664 - DNA, 429 bp, Glycine max
  unsure at all n locations
tgccgcatgcaagcttctggtgggacatcttgactngctttcttatctgacattcaccacagattcttgccttcttctattttcaagatgggaatgcctctaacagcacctttgtcaatgatattcttcatgcctcttaagtgcagatgtccaaatctttgatgccatattctgacttcatcttctctggagaatagacatgtggaggagtaactggtttcttgaggtgtccatangtaacagttgtcctttgatctactgcccttcattaggacttcactcttctcatttgtcaccaagcattctgactttgtgaagtttacattgaatccttcatcacacagctgactgatgctgatcaagtttgcagtcagtccctacaacagcagtactttgtccaactatgaaatcatcatggactatgctttc

SEQ ID NO: 3665 - DNA, 372 bp, Glycine max
tgaaatgaacaacgagctctcgagaatcattggttatttttgtcacacggaagtccgattcaggcgcataatataccgagacgctcaaaattgaacaacggaagctctcgagaaattcaaatggtcataatttgtcacacggaagtccgattcaggcgcataatatatcgagacgctcgaaattgaacaacggaggctctcgagaaattcaaatggtcataacttttgaaacggaagttcaattcaggcgcataatatgtcgagaagcatgaaattgaacaacagaagctctcgagaaattcaaatggtcataacttgtcacacgaaagttcgattcacacgcataatatactgagacgctcgaaattgaac

SEQ ID NO: 3666 - DNA, 457 bp, Glycine max
  unsure at all n locations
tccaataaccaaggtagtggagagaatgaagaattcaattatattgagaaacagaaagaggaagcatctaatgctgcgcgtcggaggccaacgcgagaaacttgaaatggttgaatctttattttaaagtggcgccctgtttagtatcatcatcaccacagataaattttgggcttagtttcattataggtgcactctgttttcagtattttcttttttcttccttttaagaaaaggaaaagattatttgcttcaagggtgtagatcttctcctgtttttggagactcgagtgtttgagctagttgaagttgtacaattatttttctattaatggattctgtttttaacgcagattaatgcctagctacctttncataattaatcgaaaatccctattctaatacctactataatgcaatagaataatgantaattttcgccatttttattactgcg

SEQ ID NO: 3667 - DNA, 428 bp, Glycine max
  unsure at all n locations
agctntatatataaattaaaaaattattaattatccacaagtttagaacaatataattacatttgtgtaatttatctttttcttatataattgatattatctcttcttttactttatagagatgtcaaaaaacttaataaattaaaagtggacaactaataataattagtgtctttctcaattgaggaggggtcaaaatactctntccaataactatctatgtatcaatctcagtgtgtgttaattttattaatcaaatcgctgaattaaaagtttttattaaataaatgaggtttataattactccgttaaataattaaatttaatgtataatgtatttcttaaaaaagataagttaaagttgattatagaactacataaatacaaatgttgaatttatttaaattggaatgtatacgattgttgag

SEQ ID NO: 3668 - DNA, 238 bp, Glycine max
  unsure at all n locations
tgaggatttaaacgacaataacttntactcggatgtttgattaagncccgcaatatatcgagacgctctaaattgaatgttgaagctctgaccaaattcacacgacgataaatttttactcggatgtctgattgagtcccgtaatatatcgagactctcgaaattcaatgttgaagatctaagcaaattcaaacgacaataactttttactccgatgtntcattgagtcccgtaatat

SEQ ID NO: 3669 - DNA, 247 bp, Glycine max
  unsure at all n locations
agcttcaacattcaatttcgagggtctcgatatattacgggactcaatcggacatccgagtaaaaatgtattgtcgcttgaatctgctcatagcttccgtattcaatntcaagcgtctcgatatattacaggactcaatcagacatccgagtaaaaagttattgtcgtttgaatttgctcagagcatcaagattctatttggagcgtggcgatatattatgggactcaattcgacattcgagaaaaa

SEQ ID NO: 3670 - DNA, 353 bp, Glycine max
agcttggatagcaaagcagcttcagaagagtttatcttgtctcccttcataatgagttccacaggggtgataatttccacagtacccttattaatcttggtagggatgtcaagcacctgaaattaaatatgaacaccatatatattatcaacgggtaattccaattaagttcttaattcgttccatgaacaagaatgcagaaattaacctgaaagatagagagctgagagggatccagctctgtgttgcctgtgggaacaacaacatcaataggtgcaactaaacctacacgagcatgagctgtcacctataacaacatttataagtgagtatgttaactggcataaagggtg

SEQ ID NO: 3671 - DNA, 398 bp, Glycine max
taatattcaaatgaatcaaattgaaaaaattcacacacattacatttatttatagcctaagtgtcacacacatgaatttctattcaaatttcacttgaatttgaaattgaatttgtggagccaaaattcactaatcatgattagtcaattttggctatggttcagcccactaatccaagatcaagtccaagattcttcactaagtgtgcttacgtgtcatgaggcatgtaaagcatgaaggacgtgcacaaagtgtgactatatgatgtggcaatggggtgtagcaaacaaattctcacctccccctctaaaatataattggattgggcttctcccaattaattaaacttatttctcaacacacacatcacatattcacttagtgcatgtgaaattac

SEQ ID NO: 3672 - DNA, 425 bp, Glycine max
  unsure at all n locations
agcttgtcaagcagtgtggcttgatacttttatacatgaactgaagatcaaagaagaaggtccagctgagctatatgtagataacaaatatgccatcaagttagccaaacatccaattgcacatggaagatcaaagcacattgaaaccaaatttcatttcataagagaccaagttgcgaacgggaaattcaagttgaagttctgcagatcaaaagatcagctggccgatatatttaccaagtccttgaaatctgaaaccttcaaaaaacagagaagcatgctgaatattgttgatagcacgaaactagcttaaggaggtgtgttaaaatttaagaataaataagctaggtattgaatgatatagatattgccacgtgtaataagtactctcctatatgctgaaccatatngagtattaactatgt

SEQ ID NO: 3673 - DNA, 458 bp, Glycine max
  unsure at all n locations
cttggacgcttactctggatacaaccagatcatgatgctttctctatacgangagaaaatgacatgtatcacttgagatgtcgacttttgctacagggtcatngcctttcacctaaaaaaacgtangggcacctatcatactagtgaaatgatgggatcgagtcttttgacccacaaatcgacgaaacatcgagctatatgtggaagacatggttgtcaagtctcaaagcatagcctagcatatggcggacttggaagaaatctttggggaactccacacatatgacatacgcctcaaccttgaaaaatttactttcgaggtaggaggagggaagttccttggcttcatgatcaactcattggggatngatgccaacccccacaaatgcactaccatactatatatgcataaccctacaaatgtccaagaagttcataagttgaatgataagctagca

SEQ ID NO: 3674 - DNA, 431 bp, Glycine max
  unsure at all n locations
ccttaatttaaaaatatctctgactattatgcatatatatcatacacatgcaagaattaagtgtaagtaaattagaatttgatggtcatgcactgacagcgtaaaataattctgtactctcaaccaatgataaatcattattgacatgactttttagataggtattataaaaatcaacagacttacaatanatcgtagttagtgattgaataacaatgtaaaactattttacaagtttagtgcatcacctattttctcaataaattaaattgtatgtttaaaaattaaaagtatttgtgtgaagttataatagaaagttagcgcaatcctgtatattaatagcccttgtaataacttgatgcattatattaataattaccccctctatcccatcatcattgtaagaaaaaaatctgtccaccatgattaat

SEQ ID NO: 3675 - DNA, 449 bp, Glycine max
  unsure at all n locations
taagcttgtcggtgtacctgaagatgctattaggctcagcctgtcttcattctctttatctanggaggccaagagatggctgcattcattctagggcaacagtttaaagactagggataaggttgttgagaagtttctaaaaaaatatttcccagagtctaaaactgccaagggaaaagctgcaatttcttcattccattagtttcccgatgaatctttgagtgaggcattagaaaaattccataccttgctgcngaaaactcccactcatggtttttcagagcctatacagctgaacatcttcattgatgggttacgaccgctgtcaaagcanttactccacacttctgcaggaggaaaaattaagttgaagacacctgaagaagccattgacttaattgaaaatatggtttctagtgaccacacaattttgcatgagagagttcata

SEQ ID NO: 3676 - DNA, 334 bp, Glycine max
  unsure at all n locations
taatatgcatatggctgaaacagtgaatattcgtcaaagttgcttaacttggtatttcatgatctgggtgggagacttttcacgttcctataaaatttccatttctattataaaatggtaacctcttctgcagcttgatgagtggtgggagcagccaacatcgacagnttgtgactgggtaacagtggatgggcaaaatgtaactgcctggcataatcatgtgaaacaagttcttgcattttgtgacaaggagctattgtgattagaattgtaaagcacacggagtgagcaaacatttgtgaagtctcttggtcattttgtcattttagatttt

SEQ ID NO: 3677 - DNA, 401 bp, Glycine max
tatgcttgtggaccttgtggcctcaataatcttattatggataggcttagaatgcagaataagcaacaacaatcaatttaacaatgttctttaaacatgcaagacacaattgattgctacaaaataaataagataagggaagagaaaatgcaaacacaattttatactggtttggccagttcccgtgcttacgtgcagtactcaagcaacccacttgagatttccactatctttgtaaaatccattacaaagtttgaatcacacagggacagcccatcccttgtgttcaggaatcctttacaacaagagactcacagtctcttaaccaatctcattgaataagaagaatggaagaagaattctctcttcaagagaagaatattacaataaagatcatgtag

SEQ ID NO: 3678 - DNA, 345 bp, Glycine max
aagccgaatggagaaggaggaaaggtgattagagatgccacttcaaggagaagatgagtcaagaacaagttcaccgccatatgaagatatggatataagagcttacaggtaggacaagatgagtggagggagagggagagacagggcacgaaatttatgcctcaaatgacgtatgaaatgtgaagtgtaatttctcaaatgatcaaagttaaaaatatgcacacacaaggcctctatttatagtttaagtgtcatacaaaagtggaggaaaatttgaatttctattcaaatttcacttgaatatgaatctgtggagccaaatgtggagccaaaatttcactaatt

SEQ ID NO: 3679 - DNA, 435 bp, Glycine max
  unsure at all n locations
agcttcacattcacaaaaatggtaatcgattataacacaaggtaatcaattaaaacaacaagtttttaaaatagataacacgtatcgaccaatggtaatcgattaaaacataaagaatttaaaactggaaacatatcacaagcaatggtaatcaattaaaacatggcgtaattgattaaaacaaaaagttttgaaaaacttaccaagcaaatatcatacagaaatcaaacataaatcaattaaaacaaagagtaatcaattaaaacagaaagaaatcacgaaatgactaagaaaaacatgtgatcttcaaccaaactaagtatgcacatgaatcactaagctaaaacacagcanataatgacaaatgatatgaatgacaatgtgaaacacacttatgcaaataagatgtcattctatgctagatgcatccaatat

SEQ ID NO: 3680 - DNA, 352 bp, Glycine max
tgtaagctacatttacaaccatacattggctttgttcaccatgaggaaattcacacaaaaaattgaattagtgagacatggagttacaagatttgctaccactttcttaactgtgcaaagattgcataagcaaaaggccaatcttagaaggatgtttacttcagatgaatggttgaagtctaaggcagctaaagagcccaaggggaagcaagcaacagatgttgctcttatgccatcattttggaatgatgttgtttatgctttaaaggctatagggcctcttgtaagtgtgttgaggctggtggataatgaaaaaaaacctgcaatgggcttcatttatgaagcaatggat

SEQ ID NO: 3681 - DNA, 315 bp, Glycine max
  unsure at all n locations
actaagcttgatgcacatatggagatgttaatgaaacaacgagatgatgctctncatgagaggatggatcaaatggagaatagagatcataatgaagaacaatggacgagaacagggaatgatggtgttgctagacaaaaccgaattgatggtattaaactcaccattcctccatttaaaggaaagaatgatctggaggcctactcggagtgggagatgaaaatatagcatgatttctcctgccacaactattaagacgaccacaatgtgaagcttgctgccacggagttttccgactatgctattgtgtggcgg

SEQ ID NO: 3682 - DNA, 265 bp, Glycine max
gatggagcttaacctagtcacacttattaagaactagctcttttcttcctctattgcctctagttgaatacacctttgttgggatctctatttggttcgtaaccctctcatgcaagttctttacaaactctgacgtagattctccttctttatgtataaaacaagtgtctactgggaggggaatgaggtctaacggtgttatgggattaaactcataaacaatctcaaaaggcgactgcttggtggttctatgaacccccctatt

SEQ ID NO: 3683 - DNA, 400 bp, Glycine max
  unsure at all n locations
cctatgttggttatagctcggagaacgcctcaccttangaccaaaagtggtacaacaaaccactgagaaagttaagttaattgaagaaaggatgagaactgctcacagtacgcagaaaagttatcatgataagaggaggaaagatctggaattccaggttggtgatcatgtattcttgagagtcactccgtggacttgggctggtccagcattgaaatcccgaaaactaacaccgcgctctattggtccttttcaaattcttaagacagttcggcctctggcataccaaattgcattacccccgtctctttctaatcttcacaatgtctctcatgtgtctcaagtccgtaagtatatccgcgatccatccnatgtgattgaattggatgatgtacaagtg

SEQ ID NO: 3684 - DNA, 365 bp, Glycine max
  unsure at all n locations
agcttganggttagtgacagtgattggactggagatgaagatgatcggaaaagtactagtggatttgcgtctctcatgggggaacacaaccttcacttggatgtcaaaaaattagtcgatagtcactctttcaacttgtgaggcagaatacatagcaacgacttcatacatttgtcatgcagtctggcttaggaatttgttaaaaaagttgggcatgtcacaagaatagccgaccaagatctttgttgatagtaaatcagccattgttcttgcaaagactccagtgttccatgatcgaagcatacatattgatacatgttaccactacataacggagtgcatagcangataggatgtacatgcat

SEQ ID NO: 3685 - DNA, 311 bp, Glycine max
  unsure at all n locations
tgaatcggacatccgtgtganaagttatgcacattcgaatttcactagagctctcgctgctaatttcgagcgtcactatatgtgatgcgccccaattggacattngagtcaaatgttatgaccatttgaatttctcaagagcttccgctgtctaattctgagcgtctcgctatgtgatttcgctgaatccgacatcngtgcgaaaagttatgaccatctgaatttctcaagagcttcccatgttcaatntccaacctctccatctattatgcgcccgaatcggacatccgtgtgaaaagttatgaccattt

SEQ ID NO: 3686 - DNA, 354 bp, Glycine max
agcttataatatatcgatacgctcgaaatttaacatcggaaactgtcgagaaattcaaatggccataacttttcacacggatgtccgattcgggcgcataatatgttgagaggctcgaaattgaacaacggaagctcttgagaaattcaaatggtcataacttttcacattgaggtctgattcaagattatactatatcgatacgctcgaaattaaacatcggaaactctcgagaaattcaaatggtcataacttttcacacggatgtccgattcgagcgcataagatgtctagaggctcgaaattgatcaacggaaactctcgagaaattcaaatggtcataaactttcacac

SEQ ID NO: 3687 - DNA, 365 bp, Glycine max
agcttgaaggctaactggatgcgtcggtcaacttggtaacccagctggccttgaatcaaaaatctgtgcctatcgcaggggtttgtggtttgtgctcctctgctgaccaccatacagacctttgccctttcatgcagcaacctggagcaattgaccagcctgaagcttatgctgcaaatatttacaatagacctccttaacctcagcagcgaaatcaaccacagcatagcaattatgacctttccagcaacagatacaaccctggatggaggaatcaccctaacctcagatggtccagccctcagcacaacaacagcagcctgcttcttccttccaaaatgctgctggcccaaacagaccataca

SEQ ID NO: 3688 - DNA, 209 bp, Glycine max
  unsure at all n locations
tgaganaggttatgaccatttgaatctctcgagagctctccctgttcaatttcgtgcagctcgatatgtgatacaccagaatcggacattcgagtgaaaagttatgaccatatgaatgtcttcatagctttcgttgttcaatctcgtgcatgttgatatgtgaagcagctgaatcggacatccgagttaaaacttatgaccattttaat

SEQ ID NO: 3689 - DNA, 428 bp, Glycine max
  unsure at all n locations
agcttgaaggtgcgtaccccaccatttntcatagtaaaacactggtaatgtgtctactattattgtgatcatctctttctccatcattggaggtgccacttgagctgccaggtctctccacctttgggcgtattctttgaaagattcgtgcccctttctgcacatgttctgtggttgcatcctatccggagccatatcataattgtactgatactgcccaatgaaggcaaccattaggtctttccaagaatggactcgggaaggttccaagttagtgtaccaggtaacaactaccccagtaagactttcttggaagaaatgtatcagcagtttctcatcttttgcatatgcccccatcttccgacaatacatctttagatggttcttggggcaagtagtccccttatacttgtcaaagtctagcacct

SEQ ID NO: 3690 - DNA, 424 bp, Glycine max
agcttgaaggagtttattgcatcagggaacaatttcactttaaaagtgggtcctaattggattcctaattttcaacttacctatttggatgtgacatcatggcagataggtcccaactttccatcgtggattcaatcacaaaacaaacttcaatatattggactgtctaacacggggattttagattctattcccacttggttctgggaaccacactctcaggttttgcatttaaacctctctcataatcatatccatggtgagcttgtgactacattacacaatccaatatctatcccaactgttgatctaagcacaaatcacttatgtggtaaattaccctatcctctcaatgatgtgtatgagttagaactttcaaacaattcattctctgaatccatgcaagaaattttattgtacaatc

SEQ ID NO: 3691 - DNA, 344 bp, Glycine max
agctttcttaagaagattcctaaagatactagagcttagctacacatacctctctaatagctaagctcacctccttcagatgagaagctagaacttaactacacacccactataatagctaagctcacccccatgacaaaaaaacatgaaaatacaaaaaaaaaaagtccttactacaaagactactcaaaatgccccgaaatacaaggctaaaaccctatactactagaatggccaaaatacaaggcccaaacgaaggaaaaacctattctaatatttacaaagataagcgggctcatacttagcccatgggctcgaaatctaccctaaggctcatgagaacc

SEQ ID NO: 3692 - DNA, 461 bp, Glycine max
  unsure at all n locations
tccatcatataggccattcgcttgtttcatggaaaaccacgaagaacactatagtctcacgttcctcttcttacgctgaatatcaagcacttgcttccacaacttgtgaattacaatgtctctcttatcttctaagagatctatggattcccctttccaagtcctccgtactttactgtgatatcatagcgctcttcacattgctaccaatccagtctttcatgaacacaccaaacacttggacattgattgtcatctagtccgtgaaaagtcccaagttggactcatgttactactcccagttccttcttcaaatcaacttgcggatatattcacaaaggctcttccttctcaatccttcagcaccaatctttccaagctgcagttacaaaacattnttgcacctccagcttgtggcgggctaatagagaagacatataatcctaccttaaataccacat

SEQ ID NO: 3693 - DNA, 416 bp, Glycine max
agcttgggcaagatgaccaatgcaccatggatagtggccctaagccagaggatatgtgcatgcccaccaaagtgtgcctctttggcatgtaagagtaaagttgtagacatgggcctggcccggtagaattgggcactgggttatgtatgctggcccatcagcccaacttgttctcaattgtctaatcccatgcctgttcaattttatttaatttaaaagtgtgtaaataaataaaaataacttgtgaataaaagcactcagtgcctacatttgacagatgaggaagatgtgagagggtatatgtgatttataacagttcaaatcagtttcatatatagttggtaataacttgtagtcctacatactctttttcgtgtaaggatttaatcttttataattgaattactgtgaaatat

SEQ ID NO: 3694 - DNA, 418 bp, Glycine max
agcttgaggggctgctatttttgctgtttccgtgagcaatggggttcttgagtgaggggggggcgtaatctctcgaactacgaagatgttgtccatcgactttctagtcttaatgaaagcagaatgagtttccccaataatagtctaaagcactgccgctatgcggttagccagaatcatatatacaatcttgcataacaaattacagcacgatatgggtctaagatggataacctgagaggactggtcatgcttaagaagaagcgcaagaatatcatggttgagctgctctagaagttttccagcctctaagatatcatcaccaatgagattcccacccttcttgaggaataaaacattgaaaccatccggcccaggagctttattattatccatcacagacataacgttcccaacc

SEQ ID NO: 3695 - DNA, 431 bp, Glycine max
agcttgtatgcaacaacaccaatcttgtcttccattataaatgaaccatagtacttaggggccaactttacattggatatggcttgcactgaaacttggtgataagcatgtaattttacataaaccaagtcaccaatatgaaaactcctatcagatctgcccttatctacaagttgcttcattctgtcctgggtccttttcatgtggaatttaagtaactttaacatttcatcacgtttctgcaaactcctattaaccaaagcaatcttcaattcacttatgagataaggtaaatcaacaagaggagcttggccatacacaatctcatagggacttgctttaatagtgctgtggtaagtggaattgtaccaccattcagcatgaggcaaccacttggaccatgtgctggagagtcactacacatgcacctg

SEQ ID NO: 3696 - DNA, 334 bp, Glycine max
  unsure at all n locations
agctngaaaggaaaagcatgagtggaagtcgtcacttcattaggggtaacttagtcacttggatatgcaaaaagcaatgccctattgcattatccactactgaagtagaatatatttcagctactagttgatgctctcaattattatggatcaagaagcaactagagaggactacaacatccatgagagtaacattcttatctattttgataaaaaaaaaaaagctactatcagtctttctaaaaatcctacattgcatttaagggaaaacatatagaaattaaatattatgttataagaaaccatgttcaaaatcaactttgctatatattta

SEQ ID NO: 3697 - DNA, 449 bp, Glycine max
tgtcaaataaatcactgcatattgtgcagtccctatcatccttctgaggaatgtacaagagagtaggcttgcaaacaaggttccaatttggataaaagtgtaaaactacttattaattagaattttatgaatcattgtttggaatattgaagaaaaaagacaacctgacaaccagctgccctgaaggaactaaaatcatggcattcaacaagaactctgcatgctctctgcatggatatcatcaataacttgaatagctgcaagattgagaatctagtaagtataaggagctgttaactaacttgcatagctggaagactaagctcctcacgtacatgccatgctcgatctttctcgaaggttgacaaacgctctggcccagaaagcaaccgatagaagtatctgaatagtagttccaaataactatcaattactgcaaatggtcataa

SEQ ID NO: 3698 - DNA, 266 bp, Glycine max
agcttcgattcatgcgcataatatatcgaggctctcgaaagtgagcaacggaagctctcgagaaatttaaatggtcatagcttttcactcagatgtccgattcatgtgcataatatatcgagacgctcaaaatctaacaatggaagctctggagcaattcaaatgggcgtaacttttcactcggagatccgattcatgcgcataatatatcgagacgcttcaatattcaacaacggaagctctcgagaaattcgaatgggcataac

SEQ ID NO: 3699 - DNA, 412 bp, Glycine max
  unsure at all n locations
actaagcttcttatgtctccaaatggatcagaaaatgaatctcatctttggtattgccagttcggtcacttaggctacaacggattgaggatactttnttataagatggtaaatgggttgccttcaatcaagatttcgaagaagatatgcataacatgtttaactggccagcaacacagagactttatgcctaagaaaagtttatggagagcatcaaacaagctaccacttgtgcatgcaaacatatgcacgcctattaaaccacaatcaaacagcaacaagaggtacatcctaagttctattgatgatctcattcgtaaaacttgaatttatttcttacatgaaaaatcataagtttttctcatgtttagaaattctaaaactcgtgttgaanaggagactgatgcatata

SEQ ID NO: 3700 - DNA, 427 bp, Glycine max
gatccttaagtcacctgcagctgcagcttagattttatacgggccttcctctcttgcaggggttcacggtcatcatggtcgttgtcgatcgtttctctaaggctgcgcatttcgctgctctccccacacaccattctgcctataaggtggccgtgttgtttctcgacaccgcttgcaagttgcgcgggtttccccgtagcctattttcagaccgagatcccatttttatcagccatttctggcgtgacctattcaaacttagtggcaccaagctcagaatgagcaccgcataccacccgcaaaccgacgggcagacagaggtgctcaatcagacgctcgaacagtacttacgcgccttcgtccatcaccaaccttcacggtggtttcgattcttatccctggccgaatggtcttataacaccaccat

SEQ ID NO: 3701 - DNA, 412 bp, Glycine max
  unsure at all n locations
ctcactttcatttttntggtctttggttattgcttgtctctctgtttccttgcttgtgagttgccatatangaaattggaaaggaggattggtgccatatcttgaagaatttgagtcaagaagcaaggggccaaccaccttaagagatattggactaagaagcactccaaattgagtgaaacactaaagagagaatagccaccacaattgaggacttttttctttgtaattntgtaattggcaatttgctttgctttcaaattttgtaacaaaaggcctttcattggaagtaagttgggagcctccgctacgtcaccctacttccatttgtgtgtaataattctaggcaattctcccttaggatagtgagtgttttgttgggaaccttaaatgaggtcatccaaacactcct

SEQ ID NO: 3702 - DNA, 363 bp, Glycine max
  unsure at all n locations
agcttctaaactntatacaagaatgaagctctgataccacttgttagacaagtggcctcagatatcttaagaagggggggttgaattaagatattccaaactacttccccaattaaaaatctatttcactttttattcaagttataaattcccttaataatgaacttcttagatgttgattcaaataaaacaatttgaatatgaatataaagcaataataaacaaaggagattaagggaagagaaagtgcaaactcacatttatactggttcggccacacccttgtgcctacgtncaatccccaagcaacccgcttgagagttccactatcttgtaaattccttttacaagttctaaacacac

SEQ ID NO: 3703 - DNA, 468 bp, Glycine max
  unsure at all n locations
ntactatgaagagaatatccaaggaanataccttcatctgacttatcatcaaattctnctaagttatcttttccattattgaatacaaaacatttacaaacaaagatatgaagatgtgagatgtttggttttctgcgagtgaacaattaatatggagttctctttaaaatgggtcttattaaagccctatttaaaatgtagcatgcagtgttaaccgcttcagcccaaaagtattttggaagaggagtatcatttaataaagttctagcaatctcttccaatgatctatctttcctttcaacaacaccattttgttgaggggctcttggtgcagaaaagttatgcttaatcccatgcttatcacacaataattcacattctctattttcaaactcacccccatgatcactcctaatagatataatcttgagaatnttcttattttgaatgattnttgcaagtttctaa

SEQ ID NO: 3704 - DNA, 380 bp, Glycine max
agcttgtccgtcattgtttctaatttgaagtactgggtttgctacatttagtggggttttgagtggtgaatttgacattgaatgtctggtgaaacaggatccttttagcccgtaacagaacagtgaaagttgcagtttggatttgtactttcaactaataaatgtcgaggggatctgatggatcacaaaaaaagcgtttagttgctgcgatctgtgttgtggcaatttttcttggctttctgtatgtgtatggcggatccatctttggttctcagaatagtggttcatctgctcttgaatatggcagatcattgaaaagacttggctcgtcatatttgggtgcagaggatgacactgatggcaagcaagatgaatcttca

SEQ ID NO: 3705 - DNA, 420 bp, Glycine max
agcttcagatctaaattgtgcgcgtctagatatattacgggactcgttcagacatctgagtaaaaagttattgtcgctagaatttgatacgagcttccattttcaatttggagcgtctctcgataaattgcaacactctgtcgggcatccgagaaaaaagttatcgtcgtttgatattttaaagagtttccattttcaatttgaagcttctcgatatattacgggactcaaccagacatccgtgtataaagttattgtcatttcaatttgctcagagcttctagtctcaattttgagcgtctcaatatattacccgatacaatcggacatgcgagaaaaaagttattgtcgtttgaatttcctacgagcttccgttttcaatttggagtgtctcgatatattacgggactcaactggaca

SEQ ID NO: 3706 - DNA, 303 bp, Glycine max
caatttgagcgtcttgatatattatgtccccgtatcggacatccgtttgaaaacttatgaccattcgaatttctcgagagcttccgctgctcaatactgagcgtctagatgagttatgtccccggatctgacattcgtgcgaaaagttacgaccattcgaatttctcgagagctttcgctgctcaatttccagcgtcttgatatattatgtcctccaatcgtacattcttctcaaaagttatgaccattctaatttctcgagagcttctgttgttcaatttccagcgtcttgatctattatgt

SEQ ID NO: 3707 - DNA, 262 bp, Glycine max
  unsure at all n locations
agcttaaacattcaatttcgagagtctcgttatattacgggactcaatcagacatccgagtaaaaagttattgtcgtatgaattggcttaaagcataaacattcaactttgagcctctcgatatattacgggactcaatcagacatccgagtaaaaaattattgtcgtttgaatttgctcagaggttcaaaattcaatttcgagcgtctcgatatattncgggactcaatcagacatccgagtataaaagtattggtctttg

SEQ ID NO: 3708 - DNA, 406 bp, Glycine max
tcgattacacacatactatagtcgattaccaaaggagtcttttagaatacattctcaacagtcacatctttttatttcgcttttaaatggccatcacaggcttgcctatatgtgacttgagacaccaattttgatcagagttctgaagaacaaaaaggtcttatcctcttaacaagcaaaactgttttatcctcttaaaaattccttggccaaaacacttgtgattcaataacgaattatttgagtgctcaaattgttcaatctatctctttcaagagagattttttcttctcttctttattctgaaaagggattaagagaccgacggtctcttgtcggaaagaatctaaacacaaaggaacgattgtccttgtgtgtttataacttgtaaaacgaatgtacaaga

SEQ ID NO: 3709 - DNA, 427 bp, Glycine max
  unsure at all n locations
agcttttaaaatacactctcttcccttcaaaatctcctcatattatctctctctctctaaaatcacaaattacaaaatccccttccattctctctctaaaaccatcatgtcctccactgcgcctcctgtcctccccatctccaacccccaaaccactgcaagaaccaccagtgcaggcggcggcgccatcaaggctccggcgaacaacctgaccttctgtgccttcatcaacaacctttccacctccctccaccacggcctcgaccaatgtcgcccctggtcggagctcgcagaccgctccacgttctcgaaacccgagtcctccaaagccacccttcgtgtccgcaaaaacttctcctactttcacaccaactactancgtgtcgttcactcatcctcgcagtctcttctctactgngaatgtatg

SEQ ID NO: 3710 - DNA, 392 bp, Glycine max
gcttatgccaagaggagatggaccttctctagtctcggagaggatcaataacatgcctataggtttaacctcctataagagtatggagtcagcaacaccacttttaacatttctaatttaatttcttttgcaggtggagctgatattgaggaggatgaaccaatagatttgaggtaaaatcgtcttcaagggggaggggatgatacaatactccctaggaaggaactattcaccaaagccatgagcaagagactccaagaggattgggctagagttgctgaagaaggccctatgattctcatgaaccccagggtagaattttgagccaatgggccaaggttgggtccacttatatttgtacatattagatttggatttcattatttttgggc

SEQ ID NO: 3711 - DNA, 344 bp, Glycine max
agctctcccttttcataaaagaaaaacgtatctgaggtgaataaatatgaaaaacatattcttatatcgatttattacgctacaaaaagattatttactaacattaaaggtttgtcttttggtaaatttacattgacatagacttttactagtggaaattaaaattaaattgttagtataactattgttagtagtcttttaagagaaatattgttagtaagtctacattaatattaagtgtccttataaacatatattttactctcttacatacaactatctatttttttctacctctctatatttttctatatattacatactatatctattattcttttctc

SEQ ID NO: 3712 - DNA, 427 bp, Glycine max
  unsure at all n locations
acatcttgacttgctttccaatctgacattcaccacagattctgccttatgctattttcagatggggaatgcctctaacagcacctttgtcaatgattttcttcatgcctcttaagtgcagatgtccaaatctttgatgccatatattgacttcatcttctttggagactagacatgtggaggagtaactggtttcttgaggtgtccatangtaacagttgtcctttgatctgctgcccttcattaggacttcactcttctcatttgtcaccaagcattctgactttgtgaagtttacattgagtccttcatcacacaactgactgatgctgatcaagttcgcagtcagtcccttcaccagcagtactttgttcagactaggaagtccttcatggactagctttcccattccagtgatcctttcttt

SEQ ID NO: 3713 - DNA, 418 bp, Glycine max
agctatgccataaacagcgttcacaaaagtcaagtttctccaccttatcttcatttagcacgttctattttcccagttcaatcaaccccctctcactcacatgtcctaaccttctgtgccatagttcagtctttgacaaccttttgacagaaactgcaacagctgatccaatcatcacttctccaatcagagaatacaagccattcttttgcatccctttcatgaatattatggagcactttagaacctttagaactccattctcctctttgaacacatagccttgtttgtcaaactcactcagagaaatcaaatttctcttcaaatctgggataagccttacattcttgatgactctcttagcaccatcatgaagcttgaaccttacagacccaattctagtgatcttacaagactt

SEQ ID NO: 3714 - DNA, 326 bp, Glycine max
ctgccgcaagagtctagtggatatgctcttctgctgaccaccatacagactgttgcccttccatgcaacaacctggagcaattgagtagcctgaagcttatgctgcaaacatttacaatagacctcctcaacctcagcagcataatcaatcacagctgaacaattatgacctctccagctacagatacaatccctggatggaggaatcaccctaatctcagatggtctaaccctcaacaacaacaacagcagcctgctccttccttcagaatgatgctggcccaagcagaccataccatcctccaccaattcaacaactgcaacag

SEQ ID NO: 3715 - DNA, 345 bp, Glycine max
  unsure at all n locations
tgaatagttcgttcagtctgaccatctgtttgaggatgataagctgaactaagcttcagctttgtccccaaggcttcatgtagacttgtccaaaatcgcgaagtgaaccttggatccctgtcagatacaatactagaaggaattccatgcaaccttactacttccttgatatacaactccactagctnttccattctatacctcatattcactgcgataaaatgagcagaattggtgagtcgatctactatgacccacacggcatcatgcncacgactagtctngggtaaactagatacaaaatccatagatatgctctcccatttccattccggaatctccaat

SEQ ID NO: 3716 - DNA, 439 bp, Glycine max
agcttatcaccatttgcacctttctcatcaactaatttgtcactgagaggtgacagagacttgaataatccaagtaactaagcaagtgtgtcgtaatctccagaaccagttcctccatcatggacgatcccattcatcaacaccaccagccctggagtgggactgggcccaagcattttagtgcggccgccgttgaggtagggcacgacggcggcaccagaattggaggtgcaatcgcagtggtgaagggagaaaaaggatcttatgaaagagaaaagtgtgaaaaggaaacaaagcttatggtttcgagagagagaaagagggtactgagaagtgagcttgcgagggtcttatgtaaaaacctgaacatcggtttgttgtttgagctttcacaacatcgatttttaaaaaaccaatgttaaaatcattttgttaacat

SEQ ID NO: 3717 - DNA, 301 bp, Glycine max
catcatcaatagtctcagacgggacaggctctttcttatcagctgattttgactgagttattaaagatggaacgtaccaaacttaaatttagtttggcttaccaccctaaagctgatggccaaactcagggtggcaatagatgcatagacatttatttgcaatgtttaaaagttcacagcgtaagcaatggccaactgtctcaggtgggctgagtattggtataacaccaataatcatggcaccactgcatgtacctggcttctttttaccttaatttataatacagacgattcattcttt

SEQ ID NO: 3718 - DNA, 436 bp, Glycine max
agcttgtctctcaacactacaaagctattcacctttaatccttttgttaaaatatctgccagctgcatttcagtgctgcaatacctcaaatccagctgcttcttgctcaccttttccctcagaaaatgaaatctagtctcaatatgttttgatcttccatgtgctactggattcatggccaaactgatagtagatttgttgtctacatacaatctaactggcctctgaatttccaccttcaattcttcaagcaaggagtccaaccacaaggcttgacatgcagcatagcaagctgctatgtactctgcctcacatgaggataaagccaccacttgctgtttcttggaacaccagcttattgatgtacccagaaacttgaaaagatagcctgtagcgcttttcctttccaccttgtctccgcaccaatcagaatctg

SEQ ID NO: 3719 - DNA, 434 bp, Glycine max
agctttaaactgtatggctgctcatcatcaatagtctcagacagggacaggctctttcttatcagctgattttggactgagttattcaagatggaaggtaccaaactcaaatttagtttggcttaccaccctcaagctgatggccaaactaaggttgtcaatagatgcatagagatgtatttgcaatgtttaacaagttcaaagcgtaagcaatggccaactgtctcagttgggctgagtattggtataacaccaataatcatggcaccactgcatgtacctggcttctttttcccttaatttataatacagacgattcattcttttccattcttttttccccctttcattctatacgttcttgagtaatttggttacagatctaacccagtctagaaaggggtgggtcctaacatccttctatactatttaga

SEQ ID NO: 3720 - DNA, 473 bp, Glycine max
  unsure at all n locations
tttccagaccatacttcttcgggcaactgataattcatatgaactgatggtcctctattgatgagatatgctactgtgtttattgctcttgctcagaatgctctatgcaagccaaattggatccgcatacaccttactctctcgttcaaggttctattcatcctttctgtaacaccgctttgctcacgtgttcctggtattgacttgatcattctgatcccatgttcttgacagaagtctttaaactcctgactatcatactccccgccattgtcagatttcagactnttaacctttagacctgtctgattntcaacttctggttntcaccttgtaaacacagaagacacatcagaattattgttaagacacataacacatacctctctggtagagtcattgataaaggtgacataatagtgtgagtttccaacagatttcactggggttgggaccaaacatctgtgtgcacc

SEQ ID NO: 3721 - DNA, 437 bp, Glycine max
  unsure at all n locations
agctcngggaaactaagtgctatgttgtgctggtgtggagtgctataatgtggcagtttttcttcttgggagcaataggagttatcttttgtgcctcgtctttgttgtccggtattataattgctgcttttcttccagtagcggaaggtttggctgttattgtatacaaagagagttttcatgcacagaaaggggttgctttggtgctctctctttgggggtttgtatcctaattctatggagagataaaacaagacaagaaaaagaacaagagtcgttgtcaagaaacagagctgcctcaaagtcttcctcccaatgcatgattgcaagtaaagtttatttcactatcttggcttgtgttgaattgtcaatattgaaggctagctttggccccagatagaggaaaaccacataaaggcaaagtcatttctcaccct

SEQ ID NO: 3722 - DNA, 437 bp, Glycine max
  unsure at all n locations
agcttgtaatcgattacacacatactgtaatcgattaccagaggagattntcagatcatattcttagcagtcacatcttttcattnggttcttgaatggccatcaaaggcctatatatatgtgacttgagacacgaatntgctaagagttttcagaacaaaatggtcttatcctcttaaaaggcaaaatcgttttatcctcttacaaattccttggccaaaacacttgtgattcaataaggaattatttgagtgctcaaattgttcaatctatctctttcaagagagatttcttcttctcttcttctttattctgaaaagggattaagagaccgagggtctcttgttgtaaagaaatctgaacacaaaggaagggttgtccttgtgtgattcagatcttgtaataggcttttacaagatagtggaactctcaagcag

SEQ ID NO: 3723 - DNA, 419 bp, Glycine max
  unsure at all n locations
agcnttgatgcaacatttggagaggttaatgaaactacgagatgaaaatagaacatgttttctcatgcaacgactatgaggaggaccaaaaggtgaagcttgctgccacggagtttttcgactatgctcttgtgtggtggaacaagctacaaaaggagagagcaagaaatgaagagccaatggttgatacatggacagagatgaaaaagatcatgatgaagcggtatgtgccggctagttactcaagggacttgaaattcaagctccaaaaactaacccaaggcaacaagggggttgaggagtattttaaggaaatggatgtgctcatgattcaagcaaagattgaagaagatgaggaggtaactatggctcgatttcttaatcggttgactaatgatatccgcgatattgctgagctg

SEQ ID NO: 3724 - DNA, 369 bp, Glycine max
  unsure at all n locations
ctgtaagacctgcaacttctctattgatcatgctggttaggaaaggaagttgcaactaagtgagctagatgagatatgtttagaagcctatgagaattccaaattctacaaggagaagaccaagaagtgccatgacagcttgatagctaagaaggacttcatggctggacagaaattattattgtataactctacgctcggactcatgactggtaagtcgaggtcaaagtggattggtccttttgcggtgactaaagtttttccttatggtacaattgagatcaanagtgaatccacatataagagcttcaaggtcaatggacaccggctgaaaccattcctcacacatccctccttggtggatgtagt

SEQ ID NO: 3725 - DNA, 438 bp, Glycine max
  unsure at all n locations
agcttccacactagtatcctttaattntagggtatatttttttatacgtgtatatgaagaaaaatgaaagatatcaataattgtatgctatatcataccgtttaatttttttttatgtacaaatgattaaaaaatgatttttttagaataggttttgaaaagatatttgattcgatatcgttagtttgttatgttattgattttaaatttaatttaaatctttattatctttggaattaggggtgcaccaaaaagaaaaaattaaagaagaatacaaaaaacaatctttttaaagaagataattaggggtgtattagattaagatttcaaaagatttttttaaaaaaatattgtggtattcaattaaaaattgtaaataatataaataagttgtatgatatttaattaaagtttttaagattttgtatagaagacaac

SEQ ID NO: 3726 - DNA, 420 bp, Glycine max
  unsure at all n locations
agcttgaccaagtatatgctatttagntgaactgatcaatttttttaacaataactgcacacagttttaggtttgtgacttttctgtttcatganagtagacatacaaaagggcataatgatattttttttggagtcttatttaccttgttcttgtctggccaaagtttcatttacaatgaagagaacagtattcttttcaatagttcttcaacagaagatttcagcagcaatgataattccaaatctctttacaggttggttctcagagcacaacaatgaagatgactcgtgttcctattcatggaggactatcttggaaagcgtttaatgaagaaacaaccactactgatgatagttcgttcactgtgactggcttgttggagcagataaatgcaaccagagatttatctgattactt

SEQ ID NO: 3727 - DNA, 433 bp, Glycine max
  unsure at all n locations
tctatttcaacagatgaagatgaatctgtggccatatcatggactcttctaatgacaatagcatcacttcttgcactgaattgttgggagttggaagccatcttcttaatcagattcctagcctcaacatgagtcatatcaccaagagctccaccattggcagcatcaatcatactcctctccatgttgctaagtccctcatagaaatatngtaggaggagttgctcagaaatctggtggtaaggacaacttgcacacaatttcttgaatctttcccagtactcatacaagctctctccactaagttgcctgatgcctgaaatgtcttttctgatggcagtggtcctagatgtacggaagaatttctccaagaacactctcttaatgtcatcccagctggtaatggacctaggagcaatgtagtacaaccaat

SEQ ID NO: 3728 - DNA, 440 bp, Glycine max
  unsure at all n locations
agcttaagacaactctntatggacttaaacaagctccaagacaagggtatgagagacttaccaacttccttcttgaacaaaagtttaaggaaaagttgataaaacacttttcattaaaaagtcctctcataacattttacttgtgctagtttatgtggatgacatcatttttggttctactaacaaatctctgtgaagattttgtgcacaagatgcaaggngagtttgaaatgtcaatgataggggagttaaattactttgttggtttccaagtgaagaaaatggaccatggaacatttcttcgtcaaacaaactgcaagaaacttctcaaaaagtttgagatggataaaagcaaggattctgcaactcctatggctactaattactaccttagtgcagatgaaaagggaaagacaattgatcttagttccttactttac

SEQ ID NO: 3729 - DNA, 474 bp, Glycine max
  unsure at all n locations
tatcttgaataacgttctatatggcttcaaatttttttatgtacgctnttggtattgtgccgctgaagttgttggaagagacataaaaatgactaaactgngaaatccatgcttggtctttaaactggcaatgggaccgtacaactttgtggctcgcaaaaccaatactttcagttcttgtagagtttgaagccaatggggaaagacatcctttattngattggttccaagatctaataccttcagactagtgcaattggacaaagattctggcaaaaaaccttctaattggttgccattgagatccagagtactgagccgacagntatttgcanaggtacttggcanagtgccatgaagctcgatcagttgtagatccaaaacttcaagggatgatgagttagcacggcatcgtggaatgattccagtcaacttgttgtgagacaagttgagaacattaattgaacttgcatt

SEQ ID NO: 3730 - DNA, 430 bp, Glycine max
  unsure at all n locations
agctntgaatgctctattcaatggagttgacaagaatatcttcagactgatcaacacatgcacagtggccaaagaagcatgggagatcctgaaaaccactcatgaaggaacctccaaagtgaagatgtccagattgcaactcttggctacaaaattcgaaaatctgaagatgaaggaggaagaatgtattcatgacttccacatgaacattcttgaaattgccaatgcttgcactgccttgggagagagaatgacagatgaaaagctggtgagaaagatcctcaaatccttgcctaagagatttgacatgaaagtcactgcaatagaggaggcccaagacatttgcaacatgagagtagatgaactcattggttcccttcaaacctttgagctaggactctcggatagggctgacaagaagagcaagaac

SEQ ID NO: 3731 - DNA, 427 bp, Glycine max
agcttttggaaggatcaaaaagtgctcttatgaatcctctcgtgcttatgccaccagtacctggaaggcctctcattttgtacatgacaatcttggacgagtcaatggggtgtatgctggggcaacatgacgaatccgggaagaaagagcgcgctgtttactacctaagtaagaagttcacgacctgtgagatgaattactccttgctcgaaagaacgtgttgtgctttagtatgggcatcccatcgcctaaggcagtacatgctgagccatactacctggttgatatccaaaatggacccggttaagtacatctttgaaaagccagctctcacgggacgaatcgcccggtggcaagtcctgctatccgagtttgatatagtctacgtcacccacaaggcgataaaaggaagcgccttagcagatta

SEQ ID NO: 3732 - DNA, 438 bp, Glycine max
cgacatggtttgcaggaaagagcacttccttggatgaaccttctcttgtcatctgggttttcaccattgacatttagtaactttacagaatcccaggctgagtgtttggtgcagaggactcctagcaaggggttccatgttgagaagaggcagtcttcccttgttctttgctggcaaaggaaggatctcatctcagtttcaacttggagatgctaagcagagccattctgcacctttgaacgaccaattaattctatattcgaaggtgctacataacttaccgcttctattgatctttcttgcttgaatttgccttggctatggttctatgctaattgtctgtgtttaggaattattattctcatgtaaggaagtgaacatattaattagcaatggcaacttatgagccctgatatgaagtgtattattataaacatg

SEQ ID NO: 3733 - DNA, 431 bp, Glycine max
  unsure at all n locations
agctnttcttagacatttttaaatggctgcaaacaatagaatatgccaacatatgctaaattcatgaaggatttgcttacaaacaatagaataattatggatgatgaaacattggagctagaggcaggttgtagtgcaattattcataaatccattctatagaaatctcgagatcctagtagtttcacaattcctgtgactattagaagattattaataggaaaggcagttctttatttaggtgcaagtatcaacctaatgcccttgtccatgatcaagcggataggagaagtagacattagaccaacaaggatgactttgcagtttgctaacagaactatcaagcatccttatggcattattgaagatgtattggtaaaagttgacaaatttctctttctagtcaactttatggtgatggatatgaagac

SEQ ID NO: 3734 - DNA, 411 bp, Glycine max
  unsure at all n locations
tcgncttcttctttagtccagtcttcttctggcttcaattcatcagtgggctttccttctgtgtccagcatcttgggatgttcccagcctttgatgacagctttccaggttctgctatccagtgatttgagaaaggccaccatccttgctttccagtattcatagttggtcccatcccagaatggtggtctgttcactggtccgccttctttctccatgttcatcagaatntatctccctagatctcactcagtgatttcgagtgcctgctctgataccaattgaaattctgatactgnggacagatgtcgtacaggatgtcacgacatcacgcttcagaacatgcagatngtctttgactgtatgaacacgatanacaagtaaataacacaagagaattgtaacccagtt

SEQ ID NO: 3735 - DNA, 441 bp, Glycine max
agcttgccttggcccttgatatatttgagggactcatggtcactatgaatgactaattccttgggataaaggtagtgttgccatgttttcaaagcccgtactaaggcatacaactccttatcataagttgaatagttaagggtaggaccacttaacttttcactaaaataagcaggaggatggcctgtttgcctcagcgcagccccaatcccaacatttgaagcatcacactcaatttcaaaagatttttgaaagtttggcaacgcaagtataggggcattagttagcttttgcttaagaacattgaaagcttcttcttgtttctctccccatttgaaaccagcatttttcttgagcacttcattgagaggtgctgccaatgtgctaacactcttcacaaatcgtctataaaaacttgctaagccatgaaaactcctcacc

SEQ ID NO: 3736 - DNA, 430 bp, Glycine max
  unsure at all n locations
agctntaaaagaatggctaagattttgttaaaacatattcacttagacaatgaaggaaagctggagttgctgcacatgatgtccaacgttatgtcaaagaataagatcgggctgcacaatgcacaaggcaagataaagtgtcaaatgaagaattgaagctgcaggattcacgatgtcggatacaatgtccaggacatcctgcctgaaaatactggaattgctaaaagcattgaagctgcaagatccacgatgtcggatacaatgtccaggacatcctgcccgaaaatactggagttgctaaaagcattgaagttgcaggatccacgatgtctgatacgatgtccaggacatcttgcccgaacatactggacatataaatctgttatatctttaacagattattgtgcagttagcaagagattagatgatc

SEQ ID NO: 3737 - DNA, 422 bp, Glycine max
  unsure at all n locations
ttcgaggatttcataaaacagagcataaccaaaggtgtcatacaactagcacctatgcatagtgagtgagattcagatgttactcgagtgacttgaagtcttaaactctatctccgacgtcaaaccacacacaaccttttgataggtgtatactatacagcccgtgcgttaaacgtgatgcacgtctattccggtatagtgaacgctctagaaatttgtgcccaacatctcatatgaagcggnccccacttccacattcacatangtgagtctatcaagagtactcctgtagcctacgtattacactcaacataaagtatagatctcatgaagaattaagaattgttctcataactgatactcaggttacttcaggaatcatgctactttcacgtataacagcatgtgcatctcatatcact

SEQ ID NO: 3738 - DNA, 449 bp, Glycine max
  unsure at all n locations
taactaatcaaatgggacagttggctacacagttaaatcaacaacagtcccagaattctgatagattaccttctcaatctgtccagaatcccaaaaatgtgagtgccattacattgaggtcaggaaagtagtgtcaaggaccttaacctgtagcatcttcatcatctgccaatgaacctgcccaacctcactctactccagaaaaagatgatgacaaaaatttaaagagtaagttacctaacaatntctatgcaggtgaatctaaagagaagcaacatatccctcttccattccctccaagagaaatttccaacanataaatggaagaggcaaagaaggagatcttggaaacatttagaaaagtagaggtaaacatacctctgctggatgcaatatagaaaattccaagatatgctaaattcttgaaggagttgtgcctaataagcgga

SEQ ID NO: 3739 - DNA, 440 bp, Glycine max
  unsure at all n locations
agctntattcaagacaaagaaattaaagatattcatgatggatgatcaagacagtctctagagtcttaggaagagtatattaaataggaagggaattcctaattgaagtagcaaaaggtttgaccaagaaatttaagttaaaaagtctttctcaagagatttactctctgataatcgattaccagtggccaaaaatgatttacaacaactattaaaatttgaattcaaaatttgcactgtgtaatcgattacacatatatggtaatcgattaccagcagttattgaacgttctaattcaaattttaaagcttgtaatcgattacacacatactgtaatcgattaccagaggagattctcacgacatattcttaacagtcacatcttttcattcggttcttacatggctatcacaggcctatatatatgtgacttgagaca

SEQ ID NO: 3740 - DNA, 435 bp, Glycine max
agctttattcaagacaaagcaattaaagatattcatgatggatgatcaagacagtctatatagtcttagaaagggtatattaaatacgaagggaatttcaattgaagtagcaaaaggtttggccaacaaaattaagttaaaaagtcttttacaagaaatttactctctggtaatcggtggtaatcgattaccagtggccaaaactgatttacaacagctattaaaattcgaattcaaaatttgccctgtgtaatcgattacacatatatggtaatcgattaccaacagtttctgaacgttttaattcaaattttaaagcttgtaatcgattacacatatactgtaatcgattaccagagcagattttcagaaaatattctcaacagtcacatctttctatgtggttcttgaatggctatcaaaggcctatatata

SEQ ID NO: 3741 - DNA, 436 bp, Glycine max
  unsure at all n locations
gttatcgtcatgtgaatttcctcagagcttctgttttcaatttcgagcgtctcgatatattacgggactcaatcaaacatccgaataaaaaagttattggcgtttgaatatgctcagagtntctgctttcaatctcaagtgtcttgatatattatgggactcaatcggacattcgaataaaaatctcttgtcatctgaatatgctcagagcttctattcttaatctcgattgtgtcgatatattacgagacccaatcgaacatccaaatgaaaagttatagtcgtttgaatttgctcagaagctttgttttcaatttcgagtagctcgatatattatacgtatcaatcggacatccaagtagaaaagtattatgcgttgaacttgcttagagcatatacttttcaatttcgagtgtcttagaatattaacggactc

SEQ ID NO: 3742 - DNA, 407 bp, Glycine max
agcttgaaggcaaactggatgcattggttaacatggtaacccagctggccttgaatcacaaatctgtacctgtcgcaagggtttgtggtttgagctcctctgctgaccaccatacagacctttgcccttccatgcagcaacctgtagcaattgagcagcctgaagcttatgctgcaaatatttacaatagacctcctcaacctcagcagcaaaatcaaccacagcagagcaattatgaccttctcagcaacagacacaaccctggatggaggaatcaccctaacctcagatgttccagccctcagcaacaacaacagcagactgctccttccttacaaaatgctgttggcccaagcagaccatacattccttcaccaatccaacaacagcaacaaccccagaaacaa

SEQ ID NO: 3743 - DNA, 432 bp, Glycine max
agcttatgctgcaaacatctacaacagacctcctcatcctcagctgcaaaatcagccacaacagaataattataacctctccagaaataggtacaattccgaatggaggaatcatcccaaccttagatggtcgaatccttcacaacaacagcagcaacaacaacaaccttattttcaaaatgatgctggcccaagcagaccatacgttcctccaccaatccaacagcaacaacaacaacagccccagaaacaacaaacagttgaggcccctccgcaacctctccttgaagaacttgtgaggcaaatgactatgcaaaacatgcagtttcaacaagagaccagagcctccattcagagcttaactaatcaaatgggacagttggctacacagttaaatcaacaatagtcccagaattctgatggattaccttc

SEQ ID NO: 3744 - DNA, 464 bp, Glycine max
  unsure at all n locations
agcttggctaactctatgggagatggggctatggttatgggtccagcaccgggtaccaagtcaatggaaaacttgatctctctctcaggtggtaaattggatatatcctcaggaaactctctgacaatagggaggtcacacatggaaaccttagtctctacttctaggttagacaagatcatgtacacttgagaatcttcttttaaagatgtcaacacttggttggtagagataaacatttcatccttactcattctagaatcatcaaacatgacagttttatcaaaacagtttaacaagacatggttggaagataaccagtccatacccaanataacatcaatttggctcacaggcaaagaaatcaaatcaattaagaatgttctaccaaaaatttcacacgacaactcacacatacattaaaaagaataagatgatntcatatctatcttaagcccctactt

SEQ ID NO: 3745 - DNA, 387 bp, Glycine max
tccttaagaagattcctaaagaagctagagcttagctacacatacctctctaatagctaagctcacctccttgagatgagaagctagagcttagctacacaccccctataatagctaagctcacccccatgacaaaaaacatgaaaataataaaaaaaaagtccttattacaaagacaactcaaaatgccccgaaatacaaggctaaaaccctatactactagaatggccaaaatacaaggcctagacgaaggaaaaacctattctaatatttacaaagataagcgggctcatacttagcccatgggctcgaaatctaccctaaggctcatgagaaccctagggcctttccttggatctctagcccaatctacttggagtcttctag

SEQ ID NO: 3746 - DNA, 404 bp, Glycine max
  unsure at all n locations
atggacctctcaagtgcttganagaatcaatgacaatgcttactaagatgagctgcccggtgagtatcatgttagttccaccttccatgtctctgatttatctctttatgatacagatggagaatccgatttgaggacaaatacttctcaagatggagagaatgatgaggacatgaccaacagcaatggcgaggatccacttgaaggacttggaggacctatgacaagggctagagcaaggaaagccaaggaagctcttcaacaagtgctgtccatactatttgaatacaagcccaagtttcaaggagaaaagtccaaggttgtgagttgtatcatggcccacatggaggactaaatgacaccactttatttcaatgttagagtgtntagtttgtctaaataat

SEQ ID NO: 3747 - DNA, 348 bp, Glycine max
  unsure at all n locations
gctatncaaatactcaaatggtcataactnatcatatctgttgtccgattgtggcgcggagtatatcgagacgctcgaaaccacacaccgaatactctcgagaaattcaaatggtcttaacttttcaaatagaagtccgattcacacgcataatatatcgagaagcttgaaattgaacaacggaagctctccagaaactcaaatggtcataaattgtcacaccgaagtactattcaagcgcataatacatcgagacgctggaaattgaacaacgaatgctctcgagaaatgcaaatgatcataacttttcatacagaagtgcgattctggcgcataatatatcgagaa

SEQ ID NO: 3748 - DNA, 337 bp, Glycine max
  unsure at all n locations
ntgccacanacacacttctgggtctgtttcttcctcgttntttatcacaagattgccactgtccaaaagcactactacaggattctgtgcttgtttgtgagagttgttggtgtaccagacaagatacgcattttgggtgagaacaagattgcctgtgttgttgagtgttatgatacccgaggaatcattgatggggttggccttattagcaacccaaacaactgtctggattgggatgttcttgtaccaaatacccacataacgtttatgggaataacctggtgatgtgccatcattttcttctattttctaaaccctttttgcaccattntaatta

SEQ ID NO: 3749 - DNA, 372 bp, Glycine max
  unsure at all n locations
agcttacattggtgtattganatctaacgctgatgaacgacatctattaatcaaatatgctgatgagttgcagcttctcacaaacagtctttggcagtcctgcacttagaagcatgcacctcactctttacacaatggttctattcatactttctgccaaaccatactgctgtggagtgtgacggactgtgttgcgccttttgatgcctattttactgcgacactcattgaactgctctgacacacactctatgccattgccaggtcttacaacttgaaatgctgataccaatgacagatgtcccaccggatgtcacgacatcacgcttgagaacatgcagatgatgtntgatccgatgaacagattaaaca

SEQ ID NO: 3750 - DNA, 462 bp, Glycine max
  unsure at all n locations
cttatagaacatatcataaaagaactatgactattgaagaatctattcatgtttcctttgatgagtctaatgctatttctccaagaaaggatattttagatgatgttgcagaatctttagaacaaatgcatattcatggacaagattctaaaggaaaagggaaaggaagcaatgaagattctccagaagaagccaaatcaaatgatgaactntcaaaataatggaaagcttcaaaagatcaccctctagacaacattattggtgatatctgagaaggggtaacaactagacattctcttaaagatttatgcaataatatggctnttgtgtctatcggtgaacctaanaatataaatgaagccataatagatgatcattggatagttgctatgcaagaagaactaaatcagtttgaaagaaacaatgtgtgggaactagtagagaaactttgaaactacccca

SEQ ID NO: 3751 - DNA, 431 bp, Glycine max
catcagttgttggatgaaatgatttctagaggagttaaaccagactcttggagttataatgcaatacaagcttaccattgtgatcattgtgaggtcaataaagccctgaggttaatgtttagaatggaaaaagatatctgtcttcctgatcgccatacatataacatggtgctcaaattgctgattaggataggaaggtttgataaggtaactgaagtttgggagaacatggtggacaaaaagttttatccttctgtctcaacatattctgtcatgatccatggtttttgtaagaagaagggaaagctagaggaggcatgtaagtattttgaaatgatgattgatgaacgaataccaccatatgttactactgttgagatgctgaggaatcggcttttgggtttacggtttatagatcacattgaaatact

SEQ ID NO: 3752 - DNA, 417 bp, Glycine max
agctcgcgcctactttgttactgagcaacatgccatggctattcactcacaagtaattaaaagagggtttcaggaagatactgttctttgtaatgccttgatgcatgcttatgcgaggtgtggctccttagctttgtcggaacaagtattcaatgaaatgggctgccatgatatggtttcttggaattcaatgctcaagtcttatgccatacatggtcaagctaaagatgcactggagctcttccacaaatgaatgtctgtcctgattctgcaacctttgtcgcgcttctctcagcttgcagtcatgttggacttgttgacgaacgagtgaaattgtttaactctatgtctgatgatcatggtgtctgttctcaactagatcactacttctgcatggttgacctttatggacgagct

SEQ ID NO: 3753 - DNA, 394 bp, Glycine max
  unsure at all n locations
gtcacctgcggcatgcaagctttctccactaagtttcctgatgcctgaaatgtcttttctgatggcagtggtcctatatgcagggaagaatttctccaagaacactctcttaaggtcatcccagctgaaaatagatctgggagcaaggtagtatagccaatcttttgccactccttccagagaatgaggaaaagcctttagaaagatatgatcttcttggacatcagagggctctatggtggaacaaacaatatggaactccttaagatgtttatgaggatcttcacctgcaagaccatgaaacttgggtagcaaatgtattactccagtcttgagaacatatggataaataggacaaaataagacaataatacttaaaaaacaaaaaanactt

SEQ ID NO: 3754 - DNA, 439 bp, Glycine max
  unsure at all n locations
agctctgtccgcananatcactcacaaccattctaatgtccaatgccttaaacagtcttctttgcttttatcggttaacatggaccgttcaaaaccataaaatcaacatgtaactttaccacttttgcaagaactacgtaggtctgaattcctcatcgcaattgaggatacgtaggagcaaaagccccacttttgttgaccatcccaagagatcgttaatggtccaatgccttaacgtttctctcctttcaaaaacaagagatcgttaatggtccaatgccttaacgtttctctcctttcaaaatcaaaagatcgtttaatggtccaaacgccttagatgacctttgttcggttaaaattgatcttgtggaanaagatcacaacaacttaaccaacgtttagttctgaaagaactacatangtctgatttcctcatcgc

SEQ ID NO: 3755 - DNA, 430 bp, Glycine max
agcttgtccatccacgatgtctccaatagaaaggtccacccctaaccatttgctcacacgaacatgaaattggacatcaccataatcaaatccatgtgtcccacactcaaagataagcttacaaaataattataattaaaacaatttaagaaacatcaattaactatgacataaactctatcatctttagatcatggtatttgaaagtaaataaaaccaataacatccagctcacataagccaaacatctcatattcaactatcatgaaacaattcaagaatcaacatcatgcatcaactatcaagcattatcaacatgagttcatcaatcatcatcaacatgaacaccaaacatcaacaccaacgacagactctacttcatggatatttacaccacatgaagggaataaccaagtacattccttaacat

SEQ ID NO: 3756 - DNA, 432 bp, Glycine max
cgtaatcgattacacatatactgtaattgattaccagagcagattttcagaaaatattctcaacagtcacatctttttatgtggttcttgaatggctatcataggcctatatatatgtgacttgagacacgaatttgctaagagtttttcagaacaaaaaggtcttattctcttataaagcaaaatcgttttatcctcttacaaattccttggccaaattacttgtgattcaataaggaattatttgagtgctcaaattgttcaatctatctctttcaagagagatttcttcttttcttcttcttcattctaaaaagggattaagagaccgagggtctcttgttgtgaaagaattctaaacacaaaggaagggttgtccttgtgtgtttagaacttgtaaaaggaatttacaagatagtggaactctcaagc

SEQ ID NO: 3757 - DNA, 384 bp, Glycine max
  unsure at all n locations
cggctatgactatatacatacacccaatgcgagatatatgcctattatcatttacagattgacgatgacttgttttangaataaggatcatgaaggaagcattgctgcctataggaaaccttccatcaaagtcgagttcatccacaatatctctttgattcacgtttcaaaacccttcaacaagccttaataaaattgaaattaaatccatcgggtgtcgggcatttgcctccaccacaattccaaacagcctctctaatctcttggtcagaaatagaggaagtgatcccctctgttngattcaactatctcagatttattagagggtgcactataacgatcagcaccaatctgtacttctttctcgtctaccagctcaatatc

SEQ ID NO: 3758 - DNA, 444 bp, Glycine max
  unsure at all n locations
taacanaaggcatgcgaagtgggtggaattcctagagcaattcccttatgtttatcaaatataaaaaggcaaaaggtaatatagtagccgatgctctttctcggcgtcatgcattactttctatgcttgaaacaaaattggttggtcttgaatgtttgaaaagcatgtatgaaaatgatgaaacttttggagaaatttttaaaaattgtgaaaatttttcagaaaatggtttctttagacatgaaggctttcttttcaaagaaaacaaattgtgtgtgcctaaatgttctactagaaatttgcttgtttgtgaagcacatgaaggaggtttaatggggcattttggggtccaaaagactctagaaacattacaagaaccattttattggcctcatatgaaaaaggatgtgcagaaattttgtgaacattgcattgtatgtaaaa

SEQ ID NO: 3759 - DNA, 386 bp, Glycine max
  unsure at all n locations
agcttganattgacaaacgaacaccctcgagaaattctaatggtcataacttgtcacacggaagttcgattaacgcgcagactatatcgagacgctcgaaattgagcaacgaatgctctcgagaaattcatatggccataacttgtcacacggatgtccgattcaggcgcataatatatcgagatactcgaaatctaacaacggatgctctcgaaaaattcaaatggtcataacttgtcacacggaagtccgattcaggcgcataatatatcgagacgctcgaaattgaacaacgaatgctatcgagaaattcaaatggacataacttgtcacacgaaagtccgattaacgcgcataatatatcgagaaatctatatgcgcataac

SEQ ID NO: 3760 - DNA, 505 bp, Glycine max
atctctgagtcacctgcggcatgcaagcttcaacatcagaccacttccagggtgctggatctacttcacatggacttgatggggcctatgcaagttgaaagccttggaggaaagaggtatgcctatgttgttgtggatgatttctccagatttacctgggtcaactttatcagagagaaaacagacacctttgaagtattcaaagagttgagtctaagacttcaaagagaaaaagactgtgtcatcaagagaattacgagtgaccatggcagagagtttgaaaacagcaagtttactgaattctgcacatctgaaggcatcactcatgagttctctgcagccatcacacctcaacaaaatggcatagttgaaaggaaaaatagaactttgcaagaagctgctagggtcatgcttcatgccaaagaacttccctataatctctgggctgaagccatgaacacagcatgctatatccacaacagagtcacacttagaagggggactc

SEQ ID NO: 3761 - DNA, 449 bp, Glycine max
tattaactttgttgtttagaggagaagatatctgaaatgagtatcaaaatactttataataaaaatattaaaaaatactatatgaatgaatcttaatcaagtaattcacatattatatcatgtaaaacattaaaacatatagatattcacttatatcaaagcaatcaaacacaagtattgaagaataatgattatagatattattaaaatatttgaatgaaaatttcatgctaataagataaactcaatcaagaacacatactcaaaatttcaaacaatcaaaacaaacaaatgaaaaattgttagttatcataatcaaattgattgaagaaattttttaataagagaatagttttgatattacctttctcatgattaaggtgtctaaatcttcaaagatgaggatcttactttttctctatgtttatcattcttgagaaatgttctca

SEQ ID NO: 3762 - DNA, 233 bp, Glycine max
tgcttgtttgtgagagatgttggtgtaccacacaagatacgcattttgggtgagaacaagattgcctgtgttgttgagtgttatgatacccgaggaatcattgatgggggtgggcttattagcaacccaaacaactgtctggattgggatgttcttgtaccaaatacccacataacgtttatgggaataacctggtgatgtgccatcattttcttctattatctaaacccttt

SEQ ID NO: 3763 - DNA, 308 bp, Glycine max
  unsure at all n locations
ctgcagcttcccatcgcaccacttccagggtgctggatctactgcacatggacttgttggagcgtatgcaagttgaaagcctgggaggatagaggtatgcctatgttgttgcggatgatttctacagatatacctgtgtctactttatgagagagagcgcatactcctttgaagcattcaaatagccgagtatattacttcaatgagaaaaagactgccgaatacagacaatgcngcgtgaccaccgcaaacagttagatgaccgcacgttgagtgtatgctgcccatatgacagcctctctcatgag

SEQ ID NO: 3764 - DNA, 436 bp, Glycine max
tgctgtgaaaattattagccttcgctccaacctactcagtggttatcttcctgctgacattggttctcttccttctcttcagtatctctacctccaacataataacctttctggtgatatacctgcctcattgtctctccaactcgttgtactcgatttgtcatataattccttcaccggtgttattccgacgacatttcaaaatttgtcggaattaactagtttgaatctccagaacaactcgctatccggacagatacctaatctcaatgtcaatctgctcaagcttttgaatttaagctacaaccaattgaatggctcaattcctaaagctcttcagatttttccaaattcttcctttgaaggaaactctctcttatgtggaccacctctaaagccatgctctgtggttccccctacaccttctccttcctcg

SEQ ID NO: 3765 - DNA, 410 bp, Glycine max
  unsure at all n locations
agctnggcagcaatatagctcaatacattacatgttatagaaacccttatacctaaaacaccaccagcaacttactacaccaaatccttgcaatttttttccctatcttcctaatagcaggggtctcttacatgccacataaacctccaaaacaaacgaaacctatcaataaaaattaaaaaaaaaaaagaagaacaaactagcctccaaatccggagagggttcttccttgtctcttgagagcataaaccacatccattgccgtgacggtctttctcctaacgtgctcagtgtaggtaacggcgtcacgaatcacgttctacacaaagatcttgagcacgccacgtgtctcctagtagatgagaccactgatacgcttcacaccacccctgcgagccaaacgccgaatc

SEQ ID NO: 3766 - DNA, 429 bp, Glycine max
  unsure at all n locations
agctctgagccaattcatacgacaataactntntattggatgtctgattgagtcctgtcatatatcgagacgctcgaaattgaatgttgaatctctgagccaatccaaacgacaataactttttactcggatgtctgattgagtcccgtaatataacgagactctcaaaattgaatgttgaagctctgagctaattcaaacgacaataacttttaactcggatgtctgattgagtcctgtcatacatcgagacgctcgaaattgaatggtgaagctctgagccaattcaaacgacaataactttttactcggatgtctgattgactctcgtcacatatcgagacgctcgaaattgaatgttgaagctctgagccaattcacacgacaataactttttactcggatgtctgattgagtcccgtcatatat

SEQ ID NO: 3767 - DNA, 444 bp, Glycine max
  unsure at all n locations
nggagaggatgctntaatggaggaaaagaaagagagaagaggggagcacgaaattgaaggaataaaagagggagaaaagtgtaactttgaagtgtgtttcatactactagaatgaccaaaatacaagacctaaaagaaggaaaaacctattctaatatttacaaagaagagtggatccaaccttgacccttgggctaaaaaatctaccctaaggttcgtgagaaccctanggccttcctttggatctctggcctaatctacttggagtcttctatccaatgtccttgtgggataggattgcatcagccacccncttatgcatcattntttaaggagacctttcggatgtctggttggntctttntttttctctcatatccatggatgtcattgatgattaagttcttatataactgggtaagtcacccnccttatgcatcattt

SEQ ID NO: 3768 - DNA, 415 bp, Glycine max
  unsure at all n locations
acgcttgcaagagtttctacatccagccctatctgatataaaacatcttatgccttgaatttctaactcgacacgcaaccaattggcaaatcttattagaggaggtttacgaccatgtagtcctataaagacatcacaactctttagtctataagaagaaagtgatctacaacctggggttgatgatgttcttttgtttctgcctctcttgcttctcttctctttcagcccagaataaccatcatcataaggatggcaataaccagacacagtgctactagagatgccgactgaggaagatatgcgatcaaggttctgcaaatcacctgcattacagccagctggagatgcagccacctcagagaaggagcatccaacattcacaatagactntggttctggaatccctgaaatg

SEQ ID NO: 3769 - DNA, 456 bp, Glycine max
  unsure at all n locations
agctnttaaaatatataataaaagaactattattattgaagaatcaattcatgttgctgttgatgagactaactcagtctaagaaaggatatacttgatgacattacagatactttagaagatacacatattcatgaagaagtccacacaaacaaagaagaatgaaatagcaaagattctcaatccaaagaaaatcaaataaatgtggatcttccaagggagtggagaacttcaaggtgtcaccctcttgacaatatcatagttgacatctcacaaggggtaataactcaacactctcttatagatgcatgcaataacatggcttttgtctctttaattgaacctaaaaacataaataaagccataattgatgaatatctggatattactatgcacgaagaattaaatcaatttgcaagaaatcaagtatgggaattacgtgatagacttaatgat

SEQ ID NO: 3770 - DNA, 437 bp, Glycine max
tatcctgatgagggtgctccatatgttctcaagactggactaatacatttgctgcccaagtttcatggtcttgcaggtgaagatcctcataagcatcttaaggatttccatattgtttcttccaccatgaagccccctgatgtccaggaagatcatatctttctaaaggctttttctcgttctctgaagggagtggcaaaagattgactatactaccttgctcccaggtccattttcagctgggatgaccttaagagggtgttcttggaaaaattcttcccttcatctaggaccactgccatcagaaaagacatttcatgcatcaggcaacttagtggagagagcttgtatgagtactggtaaagattcaagaaatggtggtgcagctgtcctcaccaccagatttctaagcaactccttctgcagtatttcaatga

SEQ ID NO: 3771 - DNA, 407 bp, Glycine max
  unsure at all n locations
gggatcaactcatattactttntagtattttactttgttcaaaaaattagacaagcgctaaatattgaaatgtctgatatttatgaaccacaagcagacattgttacagcttctttgtcaacatgtaattggactntgcaactatccaatcaatcatagttataaattagtaatcatatcacaaattatagatgaaaattacttatccattcatttaaagattaaccattggttaaaagaanaacttatacgatatcaattaattacatatataatatctatatctagaactataatgatctaattgtctaattgacacgattacaaacgtctcgtttaatatctttccgtcaagaataccttagcttatgttatatatatttcgcaacgacttcgttgacattaat

SEQ ID NO: 3772 - DNA, 447 bp, Glycine max
agcttaacaattcaaggtgaacaagatctgcttgcctcagccattttatttattgtacaatcttgtatttggaaatctataattgacaacatctgcttgcctggattgctaatctagtgctggccttgcatcaatgtctccgggtgcaagaaattcaaggatattcgcccttgaaaaaatgattgctacttcttctacaacattgctgtcaatggcatctcatttgtcacaggcagaagagcgggaacgggttttcagtggcaagggacgttggaaccaactccgttcccttcctgaagccaagaatttgatgaatcatttgttcaatctggcatcttcctccaggtagagtagctttatctgcaaacaaaatttatggtccatgttgtgatgaatgactgaatctttgtctatgcctttctatatttcacgtgttcattgcgagat

SEQ ID NO: 3773 - DNA, 429 bp, Glycine max
  unsure at all n locations
ctanaagaatggctaagaatttgttaaaacataagcacttagacaatgaaggaaagctggagttgctgcacatgatgtccaacgttatgtcaaagaataagatcgggctgcacaatgcacaaggcaagataaagtgtcaaatgaagaattgaagctgcaggattcacgatgtcggatacaatgtccaggacatcctgcccgaaaatactggagttgctgaaagcattgaagttgcaggatccacgatgtcggatacaatgtccaggacatcctgcccgaaaatactggagttgctgaaagcattgaagttgcaggatccgcgatgtcggatacgatgtccaggacatctggcccgaaaatactggacatataaatctgttatatctttaacagattattgtgcagttagcaagagattagatgatctat

SEQ ID NO: 3774 - DNA, 265 bp, Glycine max
  unsure at all n locations
nttagccaatacacacgacagacaactttgtgctcggatatctgattgagtccagtaatataacgagacgctcgaaattgaatgttgaagctcttagcgaattcaaacatcattaagtgtttactcggatgtgtgatgctgtcccgtcatatatcgagacgctcgaaattgaatgttgaaactctgagccgattagaacgacaataactttttactcagatgtctgatagagtcccgtcatatatcgagacgcttcgaattgaat

SEQ ID NO: 3775 - DNA, 355 bp, Glycine max
agctcttgcggggacatcttgacttgctttccaatctgacattcaccacagattctgccttcttgtattctcagattgggaatgcctctaacagcacctttgtcaatgattttcttcatgcctcttaagtgcagatgtccaaatctttgatgccatattttgacttcatcttctttggaggatagacatgtggaggagtaactggcttcttgacgtgtccataggtaacagttgtcctttgatctgctgcccttcattagaacttcactcttctcatttgtcacgaagcattctgactttgtgaagattacattgaatccttcatcacacaactgactgatgctgatcaagtttg

SEQ ID NO: 3776 - DNA, 259 bp, Glycine max
gaataaaaaatctgcacatgttacaagagtttgtggtctatgttcttctgcagatcatcatacagatctttgtccttctttgcatcaatctggagtcaatgagaaacctgaagcttatgctgcaaacatttataatagacctcctcagcagcaaaaccaacaacagcaaaataattatgacttttcaagcaatagatacaatccagattggaggaatcatccaaatctgaaatggacaagtgtcataccctaatttcgt

SEQ ID NO: 3777 - DNA, 430 bp, Glycine max
tcaacattcaatgtcgagcgtctcgatatgttacgggactcaatcacacatccgagtaaaaagttattgtcgtttgagttggctcagagcgtcaacattcaatttcaaacgtctcgatatatgacgggactcaatcagacatccgagtaaaaagttattgtcgtttgaattggctgagagcttcaacattcaatttcgagcgtctcgatatgttacgggactcaatcagacatccgagtaaaaagatattgtcgtttgaattggctcagagcttcaacattcaatttcgagcgtctcgatatgtgacgggactgaatcagacatccgagtaaagagttattgtcgcttgaattggctcagagcttcaaccttcaatttcgagcgtctcgatatatgacgggactcaatcagacatcccgagtaaaagata

SEQ ID NO: 3778 - DNA, 435 bp, Glycine max
  unsure at all n locations
agctntgagcaaattcaaacgacaataacgttttactcgaatgtctgcatgaatcccgtaatatatcgagacgctcgaaattgaatgttgaagctctgagcaaattcaaacgacaatgacgttttactcggatgtctgattgagtcccgtcatatatcgagacgctcgaaattgactgttgaagctctgagaaaattcaaacgactataactttatactcggatgtctaattgagtcccgtaatataacgagacactcgaagatgaatgtcgaatctctgagccaattcagacgacaataactttttactcggatgtctgattgagtctcgtaatataacgagacgctcgaacatgaatgttgaagctctgagccaattcaaacgacaataactgtttactcggatgtctgattgagtcccgtaatatatccaca

SEQ ID NO: 3779 - DNA, 410 bp, Glycine max
  unsure at all n locations
gggactngatcttggattagtgggctgaaccataactgaaattttgtaatcataattagtgaaattttggctccacaaattgaatttcaaatttccctccaattttatgtgacacttatgctataaatagaggccatgtgtatgcattttttcaactttaatcgtttgaaaattacacttcaaagttcaaagctcatttgaggaacaacattttgtgctccttctctccttctccctcccctcatcttctcctatcttcaaggtcttatccatgactttttcatcaatgtggtaattgatgccctctctaggagacacacattgttttgctccctaggagctcaaattttaggatttgataacatttgggacttgtatgctgtagatgaacattnttctcccattcatga

SEQ ID NO: 3780 - DNA, 444 bp, Glycine max
  unsure at all n locations
tgttttccaacattcaggaataatggaatgtgatgttgcaaattttaattntccttgtaataaatcagtaaagtaaaaatgttaaattattcattctttcattgtaataaagaattgaaccttggaataattttttgttatataattaaactgactaaaaataactagcccaggtcttaacctttccagcattcctcatagttgcaattctttttttcttaaaaaccattttgcttctttcttaaaaatataacttctgctggattgcttangcactttcttgcatataagtagagcttaatatctttttctaggaattgtaaaattgtctagtaattgccatttttcctttggcagattgagaagcttagtgatacacagtgccagcctgaatcacagcttaagttcataacagaggcctcggtacaggtaaatgaagcttat

SEQ ID NO: 3781 - DNA, 451 bp, Glycine max
agcttcccttgctcctctctgacttcgctgaccagcttcatgacctcacccttttgatcttcaagaacttccaaaacctctcccttgtcgtgcagaagtgaaatcacagtgtacattttcatccccatcgctcttgctaacaagctcattcttatgggcaaacggaagtagatgttcctcaaccatggattatgactaagaacttcttgtgctggagtgcgacaacagtctattgccacccagaattgtcccttttcgtttattcttacgttgtctggaaaccccggaaggtcagctaatagttccacacttccacttttaggaccctctgtccaaagcttcattagcctgtcatcgtgtcattttggaatgaatgtgttacgttatacatattacatatagagcacatattgtatatattcttatctaattacaatatattttttcaccc

SEQ ID NO: 3782 - DNA, 425 bp, Glycine max
  unsure at all n locations
agcttattccttatttttaattntttttctttacaaatttaggttaattacaatggtaggaaaatttaaaatgtaacaagaaaattattttataaataataaaaataaatcttatatttatgtttctttctacttttcatattgaacaaattggtttggccgaaacaaagaaacatttttttttatttataaagagatttttagtaaaaaaaattcaaataacttctattttattttttaagttttatgtttagttctaaattttaaagttacttttaaatcctatgtgtcttatcttctaatctatcatatttggatcttatctttattagatattaatattttttgtctctattaaatatnttcttgtacttaaataacattttatttttatcatatatggctatttgtatttgaggtttctc

SEQ ID NO: 3783 - DNA, 414 bp, Glycine max
  unsure at all n locations
tcgcactttgatatggagacacatgaacagcgctatgccatgacattcattgtgcttccaaccaagggtgaatatgggagaatggctttgagggtcccacttangccatcatgaaacttaacttccaacttcaaaatgggagacacatgaacaggccctaagcaaatcatgtggcttcggaacagaacgagaatggaggatngcctttgaggtcctctcttangcaatcatggaacacagcttcaaactcgaaagtggaggacacatgaacagccctaagcaataacattcatgtggctccggaacaggatgagaatggaggattgccttgagggtcctctcttangcaatcatggaacacagctccaaactcgaaagtggaggacacatgaacagccctaagcaaattcatgt

SEQ ID NO: 3784 - DNA, 363 bp, Glycine max
agctttaatcgattacaatgttttggtaatcgattaccagtgactctgaacgttgaaattcaaattcatatgcgaagagtcacatcctttcacataaaagccttgtgtaatcgattactcgatttgcgaatcgattaccagtgactgtttctgaaaaaatcataagatgtaactcttcaaaaaggttttgactttttcaaattggatttaagtttttctaaaggatataactcttctaaatggtcttcttgaccagacatgaagagtctataaaagcaaggctttgatttggattatcaattaattcaattctttcaatcttgaatacttttccaatcaatctcttacaatcctttactagcc

SEQ ID NO: 3785 - DNA, 461 bp, Glycine max
tatatctggtcgagtgcaggtctgagcatacataatactcctaacaactgatacatacagaattgcttccatttgcttccgttccagatcatttttaggacattgtgcgagactaaatttgtctcctttctgaattggaacgggagatgctgagcacttttccatcctaaatctctctagtactttattgatatatgctttttgagacaagcctaacaatccttgtgatctatttcggaatatttctatccctatcacatagcttgcctcacccatatccttcatttcaaagttactagaaagaaacttcttagtctcatgaagaagaccaagatcattagttgcaagcaatatatcatcaacatacaggactagaaacataaccttacttccactgaccttcagatatacacaccgatcaatagtgttttccttagatccaaaggaaacaatggtatcat

SEQ ID NO: 3786 - DNA, 454 bp, Glycine max
gaagcttggagccaaaatttcactaattatgattattgaattttagttatggttcagcccactaatccaagatcaattgcaagattctccactaagtgtgcttaggtgtcatgaggcatgtaaagcatgaaggacatgcacaaaatgtgattatatgatgtgacaatggggtgtagtaagcaaatgctcacctcctcctctaaaatttaattggattgggcttcaaccaattcaattaaatttatttccaactacacacatcaaatattcacttagtgcatgtgaaattacaaaactacccctaatacaaaaactagtctaggtgccctaaaatacaatggctgaaaatcctatatttccagcgtaccctacctacattatggagccctaaatacaaggccaaaaaataatgaaaccttaatctaatatgtacaaagataagtgggctcatact

SEQ ID NO: 3787 - DNA, 450 bp, Glycine max
agcttccttgagataattcctaaagaagctagagcttagctacacacacctctctaatagctaagctcacctccttgagatgagaagctagagcttagctacacaccccctataatagctaagctcacccccatgacaaaatacatgaaaatacagaaaagtccctactacaaagactactcaaaatgcctcgaaatacaaggctaaaaccctatactactagaatggccgaaatacaaggcctaaacaaaggtaaaatctattctaatatttacaaagataagcaggctcatacttagcccatgggctcgaaatctaccttaaggctcatgagaaccctagggccttcccttggatctctggcccaatctacttggagtcttctatccaatgcccttgcgggatatgattgtatcattcctccctccttctcattctctctatttggtc

SEQ ID NO: 3788 - DNA, 441 bp, Glycine max
  unsure at all n locations
tgaaggtgtgtagcccaccatcttttcatagtagtatattggtaatgcgtctactattattggcatcattgattttctctgtcattgaggtgctacttgagctgccaagtctctccacctttgggcgtatcctttgaaagatctgtgccctctttttgcacatgttctgtagttgcatcctatccgaagccattatactgacactgcctaacgaaggcaaccactaggtccttccaagaatggactcgggaaggttccaagttagtgtaccaggtaacagctaccccagtaagactctcttggaaggaatgtatcagcaattcctcatcttttgcgtatgcccccatcttccgaaaatacatctttagatgggtcttggcgcaagtagtccccttgtactcgtcaaagtccagcaccttgaacttgggangggtgatgata

SEQ ID NO: 3789 - DNA, 419 bp, Glycine max
  unsure at all n locations
tcacanaaaattcaaaaccaatagcaacaaccatccaaaaattgttacaaacaaaaatacaatcatgcaacaacatcgcaataggaaaaaatcagtgaacgcttaaacaaaatcactgaacaccttcaaagggaacataccacttacctggaagacgattaccttacgaccggaacaaaataggaaccaccaccaatggaagaagtgaatggtagaagaacaccggaacaacaacaatcacgaccaaatgaccagaacaggaacacgaaccgaaacacgaacgaacgaccgtaacacgcgcgtaggcaaaaaaagaagaacaagcggataagaggaagatgaagaggaaatagcaccatatgaaatgtgagaagcanatgcactgtacgaatgactaactntaggattntatagtaata

SEQ ID NO: 3790 - DNA, 313 bp, Glycine max
  unsure at all n locations
agctntgactaaaccaatggcatgctacactgtataagactaaactctattatcaaaattgtaactgttttctctatcctagggagttatgccacggaccaagggtacaggtggcttggttttctttattttatccaccaatatagcttgagtagttagaactgcaccagcaacagaaactgcactttgaagagcacaccttgcaacacgactaggatccgctactccagcattcaaaagatcttcatatgtgcctgtcattgcattatatccaattctccaatcatgtgttctaatcttctggacaacaatg

SEQ ID NO: 3791 - DNA, 444 bp, Glycine max
  unsure at all n locations
agctntccattctcttggaagttcatcattggatttgacttcttccggaggatcttcattgtttcctttatcatttcctttggaatcttgttcatgaatattcatatgttctaaagaatctgcaatatcatctagcatattctttcttgacagaatagcattagattcatcaaaggtaacatgaatggattcctcgatattcatagntcttttattatatatcctatatgctttgctttgtaatgaatatccaagaaaaataccttcatcagattttgcatcgaattttcctagattatctttaccattattaagcacaaagcacttgcaaccaaaaacatgtagatgagaaatattaggttttctaccattatataactcatatggggttctctnntaaatgggtcttatcaaggccctattcatgatgtaacatgcagtatt

SEQ ID NO: 3792 - DNA, 353 bp, Glycine max
  unsure at all n locations
tctatactntatacaagaatgaagctctgataccacttgttatacaagtggcctcagatatcttaagaagggggggggggggtgaattaagatattccaaactacttccccaattaaaaatctatttcactctctattcaagttataaattcccttaacaatgaacttcctaaatattaatccaaataacaacaatttgaatctgaatataaaccaataataaacaaacgagtttattggaagacaaagtgcaaactcacatttatactggttcggccacaccctggtgcctacatccagtccctaagtaacccgcttgagagttcactatcttgtaaattccttttcaagtt

SEQ ID NO: 3793 - DNA, 454 bp, Glycine max
  unsure at all n locations
tgtcaggttcaactntaattaagcgcttggggcatcctatggactgagcgaaaaggctcaggacatcaaacactacgcatcttttaaagcacaaagcgaggatcagaacctcaaccctatgttcatttaaaatactgcgatgagaaaattatagaggacaggaacccttgggggaaaccaagaagaacatacaaaagataaaaacatgcagcaacttctttaattgccccagatcttaagcgtagtatcgcttgacaacgtcggagttcatgggtgaaggtagctcctcgtcatccatgttggcgagcaccagggcccctccttagaaagccctttttacaacgaaaggcccttcgcagttcgaggcccactttcctctattgtcctttagagcttgggagactttcttcagcaccaagtccccttcgctgaacctgcgcgagcataccttctt

SEQ ID NO: 3794 - DNA, 456 bp, Glycine max
ctttagtaaataaataaatatagagcacataataggctgagtaccctaggtataaataactatgttaagtgaggtgtctcctcttggcctcattttcgtttttccccttctcttctcaaaactctttctttgtaccgcagcccaccaaacctgtctgagaaaaacgacgatctcagactcatttaccgttggatcgtcgtgaaattttagcagcacgttcgtaacccaattccgagcattctcactactgggaattgcaaaaacatgtcagagctaagagaaatacccttcgcaccgtagctttctcttttcccgcagaaacccaaaacagtctcagtaaaactatgatcccagtttctttaaccggtggattttcataaaatttgggtatgttgttcgaaattcaattgcgcacactttcaccgttgggtttcgcgagataatattcgtggaggg

SEQ ID NO: 3795 - DNA, 447 bp, Glycine max
  unsure at all n locations
agctngaaggtaaactagatgccttggttaacctggtaacccaactggccatgaataaaaaatctgcacctgtcgccagactctgtggtttatgctcctctaccgaccaccacacagacctttgcccttctgtgcaacaatctgaagcaattgaacagcttgaagcttatgctgcaaacatctacaacagaacaattatgacctctctagcaacaggtacaatcccgggtggaggaatcatcccaaccttagatggtcgaatccttcacaacaacagcaacaacaaccttattttcaaaatgctgttggcccaagcagaccatgcgttcctccactaatctagcagcaacaacagcaacagcaacagccccaaaaataacaaatagttgaggcccctccgcaaccttcccttgaagaacttgtgaggaaaatggctatgcaaaacat

SEQ ID NO: 3796 - DNA, 458 bp, Glycine max
tcatcctcctctttgtgacaatcactggcttcttctcatcattgttttcagcatcatttcccaaagggtactcttcagtgacactactactagactttgttgtttgctttccgaatgaatgctcggattgaggcacaatattgttctttggtgcaacacttgttgtcccaatggacttgtttctcacacttgtcatgcttctcaaccttcctttccctaagtgatgctcgcaaagagagtaacccaccaaggtttgttgaaaacacctccatcctcttccgtttacacgactgcaccttgaaccttccattagtgcactaccccttaccctcttcttaccaacgtttgcttgttcgggtttcgtttcctttgttgccgcctcttcttggttctctacctcttcttcattgctatcgtcttgcctcgaactcttgttcatcttcctcttcattctcttc

SEQ ID NO: 3797 - DNA, 456 bp, Glycine max
  unsure at all n locations
ntgtgcgtaggaatttccagttatgtgcagganaagtttaatatgtctatgatgggagaaatgactttcttccttggacttcaagtcaagcaaatgaatcatggaaccttcctatgtcaaataaagtactatacaaaattgattaagaaattcagtgtggagaagtgcaaagaaacatcaacaccaatggcaacatccacttatcttgacttagacaaaaaaggtaaattggtagacgagtcaaagtacagacatatgattggttcacttctttatttgactacaagtcgacccaatattatgcatagtgtttgcttgtctgcaagatatcaagcaaatcccaaggaatccaatttaacttctatcaaagggattattaagtaacttaagggcacaaccaatgttggtttgtggtatcccaagggtacctctntgagnttaattcacttttctaat

SEQ ID NO: 3798 - DNA, 433 bp, Glycine max
agcttagatggagaagaagacagagcgcgagcttcataggtctcaccatattttttaaaatataagttcaacattggttttttaaaaaacaccgatgttaacatcagttttctggaaaaaaaaaaaaacaatgttaacatatcaaacgttaacatcggttttctaaaaacccgatgttaataaacatatgttaacatcggttattaaaaaaccgatgttaactaataaatgttaacatcggttctccaatgaccgatgttaatgaacttcgttaacatcgatttttcacaaaaccgatgttaacatatacacggtatttacaattatgtcaccgcgcatatgttaacatcggtttttttaacaaccgatgttaacacaccgatgttgaatccgctttttgtagtagtgatagctgcccttataagattatagt

SEQ ID NO: 3799 - DNA, 459 bp, Glycine max
  unsure at all n locations
tataaactntgttacctgacattntgctctgttctcatctaaacgagttaaagcatgaanaatttttgcaggaatgttaggagcattcttcaagcatattaatgcactgcatttaaatacacatgaacgtttgcataaacaggcacaacatgcaatttcaagtttactcataaaaagccaagcttactttgtattgcaagggtttcccactactataactttgacattgcgggatgcaacggcatttaaagctcttccctgttgtacaaaaggtataatgtcattataattaacttcactttagcagaaagcaataagtatggtttaaatttcattatcattttacctgcgctgcataaatctgcccatttatgtctaacaagtctgctcgttccattccaggtcctcgaggctttgcacctattagcaaagcccattctgcatcttggaacacttcat

SEQ ID NO: 3800 - DNA, 442 bp, Glycine max
  unsure at all n locations
agcttgtaatcgattacacacatactgtaatcgattaccagaagagtttttcagaaaacattctcaacagtcacatctttgtgtgtggttcttgaatggctatcataggcctatatatatgtgacttgagacacgaatttgacaagagtttttcagaacaaaaaaggtcttatcctcttataaagagaaatcgttttatcctcttacaaattccttgggcaaattacttgtgattcaataaggtattatttgagtgctcaaattgttcaatctatctcttgcaagagagatttcttcttctcttgttcttcattctgaanagggattaagagaccgagggtctcttgttgtgaaagaattctaaacacaaaggaaggattgtccttgtgtgtttagaacttgtaaaaggaatttacaagatagtggaactctcaagcgggtt

SEQ ID NO: 3801 - DNA, 456 bp, Glycine max
  unsure at all n locations
tattacggacctatgaatactcaagcttgagaatttcaaatgagaataactttntactcagatgtcttattgagtcccgtaatatatatcaagacgctcgaaattgaggaaagaagctctgagcaaattcaaatgacaataactttttactcggatgtcagattgaattcggtaatatatcgagacactcgaaattgtgatccgaggcgctgagaaacttcaaacgacattaactttatacacggatgtccaattgagtcccgtaatatatctagatgctcccaattgaaaacggaagctcatagaaaattcaaacaacaataaaattatcaaatgatgtccaactgagtcccgtaatatatcgagccgcaacgaattgaaaacggaagatcgtaccaaattcaaacgacaataactntttactcggatgtctgattgagtccccgtatatatcga

SEQ ID NO: 3802 - DNA, 437 bp, Glycine max
  unsure at all n locations
agcttccgttntcaatttcgaccgtctcgatatattaccggactcatccggacatccgtgtataaagttattttcatttcaatttgctcagagcttctagtctcaattttgagcgtctcgatatattacccgattcaatcggacatccgagtaaaaagttattgtcgtttgaatttgatacgagcttccattttcaatttggatcatctctcgataaattacgacactctggtgcgcatgcgaataaaaagatattgtcgttagacttttctaagagtttccatttgcaatctggagcgtctgcatatattacggcactcaaccacacatccgtgtatactgttagtgacattcaaatgttctcagagcttctagtctcaatttggagcgtctcgatatattacccgattcaatcggacatccgagtaaaaagatat

SEQ ID NO: 3803 - DNA, 438 bp, Glycine max
  unsure at all n locations
tagcccataaggttntccaaaagtggctatggaacttagcatctctatctgacacaatggtcctaggcaaaccatagagtctcacaacttccctaaagaagagttctgagatgtgagaaacatcatctaccttgtgtcatggtataaagtgtgtcatcttgctaaacctatccaccaccacaaagatagagtctacacctctttgggttctaggaagcccaaggacaaagtctatactaatgtctacccacggtgcaaatgggatgggtaagggtgtgtatagccaatgaggcatcaccttagacttggcttgtaaacaagtcacacacctagtgcaatgcttatggacatctctcttcatatgggattgttaacaacgagtgctcttttgatgtcaccttttgtggcacaatgattctccttcttaacaatcttctt

SEQ ID NO: 3804 - DNA, 448 bp, Glycine max
  unsure at all n locations
tcgatgccaccactgccttattgngaaaatgttggtggtgattctgagtgtgtttctactttggaggtaggttactgctaaatacttttttattttttattttaatttggatgtgtatcatttgatcactattatttacttttgagatatgtgtggtttttttactatagggacatgaaaatgaagtgaagtgtgtgtcttggaacgcggctgggacgttgcttgcaacttgtagtagagataagtctgtttggatatgggaagtgctgcccgggaatgagtttgagtgtgtgtcagtgctgcaaggacacacgcaggatgtgaaaatggtgaagtggcatcccacagaggatatcttgttttcatgttgctacgataatagtgttaaggtattgttgccaatgctaaaagagtatctcnctctttaatttcatttttgttcatttat

SEQ ID NO: 3805 - DNA, 455 bp, Glycine max
  unsure at all n locations
agcttgcctaattaagctaaaattgagagaaaatgattattaagcacacaaaatagaagtactaagtatttattacctatacttaacaaaaaatacttataacactacaaaataacaataaattggaagagtttgatacaatttacacaagttttatacataaaagttagtcgtattcatcgactaacagttgtcgggaggtttgcgtggaacatatgcaaattcctagcatcatatgcaccaccttgtgaagttgagggcatctgccttgagtgtcggccaattttagccactgcatactaccttggttgccaaagagcgacccccagtatgcaggtcgcagtttcctttatgcaacttccacatgacgtagtctacttgttggttgttcaggcacttaagcaagggtgttgtcatccttattntgaatagttcaccatcaaggatgacatagt

SEQ ID NO: 3806 - DNA, 369 bp, Glycine max
agcttgaaggcaaactggatgcgttggtcaacttggtaacccagctggccttgaatcagaaatctatacctgtcgcaagggtttgtggatggtgctcctatgctgaccaccatacagacctttgtccttccatgcaacaaacctggagcaattgagcagcctgaagcttatgcatgaaatatttacaatagacctcctcaacctcagcagcaaaatcgaccacagcagagcaattatgacctttccagcaacagatacaaccctggatggaagaatcaccctaacctcagatggtccagccctcagcaacaacaacagcagcctgctccttccttccaaaatgttgctggcccaagcagaccatacatt

SEQ ID NO: 3807 - DNA, 450 bp, Glycine max
  unsure at all n locations
cgcanagttnttctctgatggcgatgggaccaacactggtgaagcttctgaagctacagaatgcagatggctagtggctttccatgcaggcacgagagggcacagcaaccctgcatttgaatgattttttagtgaaaatcgttgctgaaacagagctggtcttttcagacgttcgtaacaagttccaacatgtggggaaaggttggagttggatctcaagtgaagctggccagcaagcttttgttctattgtcgggtaccgttgtttatcaaccatcattgcttgagtagctgagtacttagaattactataaactgcaacagaataaattatgtttagctatttatggacttaaatgaaatcaaggcctaggttatttgagttcaagagtaacactgaattccaaattacatttaagaagctaattcacagcttctgtttatttctaac

SEQ ID NO: 3808 - DNA, 333 bp, Glycine max
agctactgttctggaggtggcgatcaaagacaatgatgttgttgcggatgactccgtacggagagagatgtttgatattaatgaactcccagaacgtgtgcctccagatagccctttggctccacatcggttcaggctgtaagatacgaggggtggctcagcctaaggacagtatacgttggcgcgttgcacgggaactcaggcagaccaggcatttcttgatgcatggccttctgatgcagcatctgttgtgcctcgacctgttgcaaacatcagatcaaaggtttaccttatccctactctctggtgtgtgacggtcaatgatattgacgc

SEQ ID NO: 3809 - DNA, 393 bp, Glycine max
  unsure at all n locations
tntatcttttgcatatacatgtaccaattgaatcatagctatttattttcactagacattgggtgccatccagggaaaccttttcaaatttaaaccatcttaaataatctgaattacagtatatgcatctaattgacgttgtttgcttgcaaactaacttagtaccatggaggaaccaactttgggagaacagcctctgcttatgttataacaggctattatgatcaagccccacttgatgaatatggcaagtgcacaaaattattattttaacacctcatctcatttgatgtttataaatgttgcacactttcttattaggtttgctagggaacccaagtgggacatctcaagcgttacatgaagtaataagtcttgctctacacattatac

SEQ ID NO: 3810 - DNA, 346 bp, Glycine max
agctcgaactattatacttattctaactttagatctcactagtaaccggaccattcaacatgtggatgttgacaatgcatttttaaatggattgctggagaaggattattatgacgacacagccccgggctttaaattagaaaaaaaaaaatctgctcttggttgtaagcttcagaaagctatttatgacttgaaacagactgctcaggcttggtaagagaggcctactaaaaccctcattgggtttggatttgttcagagtaaatgcgatccatctctcttagttctcaagactattgctggctgactttatgagctcatctacgtagatgacattatcttaaca

SEQ ID NO: 3811 - DNA, 356 bp, Glycine max
agcttgcgaaatgtgttgtacaatcgttcaaatgaaggtgcacaaatagcatggatattaacaagggttgtagccaagtccctagcattattcagccaccccccaaaaccaatcccttcgatcaaaaaagtgtaagtaggttcatttggcagacaccctttgtccaccatcgcagccaacacttcagtagcatcactaactctacccactctgcacaacccaagaagaacaatgttgtaactaacaacactgggcttacactcactactctccatctgcatgttcaccaacaactcaatggcctcatgcaccatcccatccctgcacaaacaagatataagcgaattatacgcgat

SEQ ID NO: 3812 - DNA, 452 bp, Glycine max
  unsure at all n locations
ctggagtttccaagtgccaattcgtcttcttcttttgtccagtcttcttctggcttcaattcattagtgggctttccttctgtgtccagcatcttgggatgttcccagcctttgatgacagctttccaggttctgctatccagtgatttgaggaaggccaccatccttgctttccagtattcatagttggttccatccacaatgggtggtctgttcactggtcctccttctttctccatgttcatcagaatttatctccctagatctcactcagtgatttacagtgcccgctctgataccaattgaaattctgatactgaggccagatgtcgtaccggatgtcacgacatcacgcttcagaacatgcagattatatttgactgtatgaacagattaaacaagtnaataacacaagagaattgtaacccagttcggtgcaacgtcacctacat

SEQ ID NO: 3813 - DNA, 454 bp, Glycine max
  unsure at all n locations
tgcttcaaggtggaggcaattgagcgagaagttgaccttggaagtacttgtcaatgcgactgtaccatgctctcagtgcttgttntagtccataaaaagccttctttaacttgagaactttgtcttcttctaatgtcacctttaatgccaacggatgttcgatgtacacttcttgcacgaggactccattcacgaaggtagacttcacgtccatttgatgaattctccactagtgttgagttgccagagagattattagtacgatggtctccaggcgagcgaccagagcaaacacctcaacataattgataattgtgaaatttgaggtcatctgatagtccattttggctaagaatgattgtaatttctttactgtattgtttttttaataaaataataaagaaattaatatctttgcagttcttgattaacagaagttaaaagaacaatattt

SEQ ID NO: 3814 - DNA, 450 bp, Glycine max
  unsure at all n locations
agcttgtaagagcttggtcacttcctttntcaccacatctataatgacggggttgagtcgtcgctgtggctacctcactggcttagctgcatcctctaaaagtatcctatgcatgcaggtagatgggctaataccaggaatgtctgctaaagtccatccaatggccttcttgtgcttcttgagcaccggcaacaacttctcctcttgctcaacatcaagggaagcagagatgatcactggaaatttgatgcaatcctaccccgcaagggcattggatagaagactccaagtagattgggccagagatccaagggaaggccctagggttctcatgagccttaaggtagattttgagcccatgggctaagtatgagcccgcttatctttgtaattattagaataggttttttccttcgtttaagccttggtatttggccattctagtagtat

SEQ ID NO: 3815 - DNA, 451 bp, Glycine max
  unsure at all n locations
agcttctccaagacatttaagaaagcaaattacataatcttattctcggtgttgtttaatcacattcttatctcaagtacaatttggagtagctcttggatcttccagagttacgaaaacatatcattaatatttattgatatttgatgatattttctaaattttatcaaaaaaagttagtaatatttttgcttagtgttagaccaaaaaatgttcttaaagatcaggtagtgaaagttcaacccaaaaaatatacttagaaaatatgagcataatgccactaaaaataacattnttttaaactatacttgacacttgtcatcagtaatttgattattgtcaaaatacttatactatttgattcatcaataatatctttgacccatttattagaaaaatctcatttattaatatgagtatttaataataattaatgttatactccatttct

SEQ ID NO: 3816 - DNA, 428 bp, Glycine max
  unsure at all n locations
ntgagcaaattcaaacgacaataactttntactcggatgtctgattgagtcccgtaatatatcgagacgctcgaaatggaataccgaagctctgagcaaattcaaacgacaataactttttactcggatgtcagattgagtcccgtaatatatcgagacgctcgaaatggaataccgaagctctgaacaaattcaaacgacaataaatttttactcggatgtctgattgagtcccgtaatatatcgagacgctcgaaattgaataccgaagctctgagcaaattcaaacgagaatcactttttactcggatgtctgattgaatcccgtaatatatcgagacgctcgaaattgaatatcgaagctctgagcaaattcaaacgacaataactttttactcggatgtctgattgagtcccgtaatatatcg

SEQ ID NO: 3817 - DNA, 425 bp, Glycine max
agcttctacatgtcaattactagcgtttcgagatattacgggactcaatcggacatccgagtaacaagttattgtacttggaattagctcaaggctactgtataccatttcgagcgtctagatatattacgggactcaatcggacatcagagtaaaaagttattgtagtttgaatttgctcagagcttcggtattccatttcgagcatctagatatattacgggactcaatcagacatccgagaaaaaagttattggagtttgaatatgctcagggcttcagtattccatttcgagcgtctcgatgtattacgggactcaatcagacatccgagtaaaaagttattgtcgtgtgaatttgctcagagcttctacattcgatttcgagctttacgatatattacgggactcaatcagacatccgag

SEQ ID NO: 3818 - DNA, 438 bp, Glycine max
  unsure at all n locations
agcttgtcatgattgtaaggtctaaggaaagatataacaggagcaaccaaaggctntaaggaagttataatctagatttttgttgaaagggacagtatatggaacattaaaattcagagaggcagcaggcaatctatttatcaagtatactgctgtagtgcaagcaaaatcctataacattttggtgatgagtgtgaggacagatcaatctctgagtaataccttggtttgctaaaaaattggttagaggtctgaactgccctccccagtctgtttgaactcttttaattttggaatcaaactgaagttcagccattagcttgaactggtggaaaacagtgaaggtttctgaattattttaagcaaatagatccatgtaatagtaaaaaccatattttgaaggaatgtatgcaggactccatagatcactatgtatta

SEQ ID NO: 3819 - DNA, 343 bp, Glycine max
  unsure at all n locations
tgagcaacttcaaacaacaataactttntactcggatgtctgactgagtcccgtaacatatcgagacgctcgaaattgattatcgaagctctgagcaaattcaaacgacaataacttgttactcggatgtcagattgagtcccgtaatatatcgagacgctcaaaatggaataccgaagctctgagcaaattcaaacgacaataacttttttctcgaatgtctgattcagtcccgtaatatatcgaaacgctacaaattgaataccgaagctctgagcaaattcaaacgacaataactctttactcggatgtctgattgagtcccgcaatatatcgagacgct

SEQ ID NO: 3820 - DNA, 380 bp, Glycine max
  unsure at all n locations
agcttcaacagttgaatttgagcgatttgatatattacgatacttaatcggacatccgagtaaaaagttattgtcgttagaatttgctcagagcttcggtattccattacaagcatctcgatatattacgggactcaatcagacatccaagtaaaaagttattgacgtttgaatttgctcagagcttcgagaatcaatttcgagcttcttgatatattacgggactcagtcagacatccgagtaaaaagttattgtcgatcgaatttgctcagagcttcggtcttcaattacgagcgtctcgacatattacgggactcgatcacacatncgagtaaacaagtgagtgtcgtttgaattgagctcagagcttcaacattca

SEQ ID NO: 3821 - DNA, 450 bp, Glycine max
  unsure at all n locations
tcacttcacttcttcaagtggtgcaggatatgcttccagaggaaaacacttttccaaaaagttactattaggcaaagaagatactatgtccgatgggtatgaagtaccagaagattcatgcatgccctaatgattgcataatgtacataaatgagtttgaagaaatgcacaactacccctggtgtggggtatcacggtacaaagtgaaggatgatgacgagtgtagcaatgatgaaagcaccaagaaaggccccctaacaaaggtgttatggtatctttcgatcattcaaaggctcaagtgtttgtttgctaatgcagatgacacaaaagaccttacatggcatgcagatgggagaaattgtgatggaatgctccgccatctggattattcctcttagtggaagaagattaatagtctgtattcanaattacgcaaagaggcaagaaatc

SEQ ID NO: 3822 - DNA, 448 bp, Glycine max
  unsure at all n locations
agctntagtaacacccattggccaatctgaaattccccatcataccttcttaagaactccttccaaaaattgctcacgaaaacaggatccctgtcactaattatgacaactagtgctctatgtagtttgcaaatctggtccatgaaatattgagcaagtgttgccgctatatatggctgtgaaagggccacaaaatggacatacttgctcattcgatcaataacaacccacatggtgtccttgcaattggatttgtgagggccctcaataaaacccgttgttatactttcccaaatccgactaggaattggaagagggtgcaaagtctaggggtggcaattgtatcatacttacaccatgcacatgtatcacaatgttcaatgaaatcctgaacatctttaatcatccttttccaccaaaatagggatctcaatctctaatatgttgc

SEQ ID NO: 3823 - DNA, 456 bp, Glycine max
cgacaagtcagtctgtttaagtaataataataataataattataataataatatataattattattattattattattaaatacctattattactataaaaaaaaagcttgttaagctttgtgttttaacgacatgaattcaatatgattctatttatcaattatttttggatttgtacattacttatacgaaattttataagtttctttttttagttaatatttcactaagttttaaaataattaattgatcaaagatatctttaagcaaacttttaaatagacttgaagacaaagtcgaacttttatgtaagtcaagccgagcctttgaaaaaaagcctatggcaggtaatgagttaagatcaagccttgggtattcaacttaagtcaagttcaagtctaataaaggttggcttgactcggcttattttcacccctagttatgatttaatttca

SEQ ID NO: 3824 - DNA, 414 bp, Glycine max
  unsure at all n locations
ntcattntcaattacgagcgtctcacaatcctacgggacacatttggacatccgagtgaaaagttattgtcgtttgaatttgtttagagcgtatgttttcaattacgagcgttttgatatcccacgggacacaatcggaaatccgagttaaaaattattgtcgtttgatttttctaaaagctttcattttcaattacgagcgtctcaaaatcctacgggacacaatcgaacatccgagtcaaaagctattgtcgtttgaatttgctcagagcttcagttttcaattacgagcgtctggatatattacaagactcaatcagacatccgagttaaaagttattgtcgttcgacttttcatagagctttcgttttcaattacagcgtctcgatatattacgagactatatcggacat

SEQ ID NO: 3825 - DNA, 428 bp, Glycine max
  unsure at all n locations
tgacaggttcaggtgcacgtgctgctactagtggagggacttcaatttgcttgccagacctcaaggtgatggcactcacattcttcggattctgcatagtttgtgaaggcaatttgtcagaattttgggactgagcttggttcaactgagtatccatctgtcccttttgatttgtcaaactctgaatggaggctctngtctcttgctaaaattgcatattctggatggtcattttccccactaactcctctaaggaaggttgagaaggggcctcagttgcttgttgtctttgttgttgttgctgctgttgcattggaggaggaacatatggcctgcttagactagcagcattctggaagagagggacaggctcgttgtgctgctgttgttgttgtggaggatttgcccatctcacacttggatgattc

SEQ ID NO: 3826 - DNA, 453 bp, Glycine max
  unsure at all n locations
tccatcattntctaagttaccagagtatttactctctggtaatcgattaccagtttcatgtaatcgaataccagtgaccaaatttgatttcaaaatgtttttaactgatttgcaatgttccaaaatatttttcaaatagtgtaatcgattacctgtgtatctgaacgttggaattcaaatccaattgtgaagagtcacaacttttcataaaatgcattgtgtaatcgattacatgactatggtaatcgattaccagtgataacttttgaataaaaggtcaaaagttgtaactcttgacatgattttctcaaggttataactcttccaatggttttcttgatcagacatgaagagtctataaaagtaagaccttgacttgcattcaatagaactttntacaactctttgacaattttttagaacttctaagaattcctttctactcatctcact

SEQ ID NO: 3827 - DNA, 445 bp, Glycine max
taataagtccatctatggattgaaacaagcctcccgtttatggtatttaaaatttcatgaggtcatttcttcatttagctctgaagagaatgtcatggatcactgtatataccagaaggtcagtgggagtaagatttgtttccttgtattatatgtagatgacattctgcttgcgactaatgataagggtatgctatatgaggtgaaacaatttctctcaaagaactttgatatgaacgatatgggagaggcatcttatttcataggcataaagatccatagagaaagatctcgaggcattttaggcttgtctcaagatacctatatcaacgaagttttagagagatttaatatgacagattgttaccaagtgtagctcccattgtgaagggtgacaaatctgctttgagtcaatgctccaaaaatgattctgagcgggaacaca

SEQ ID NO: 3828 - DNA, 458 bp, Glycine max
  unsure at all n locations
tgagttcttgagctattcctctcagccaaagagcttcctttatagcctctatcagtgcaatatactctccctctgtagtggataaagccaccaccttttgcaggcttactttctagctgatagttgtaccgaatgcattaaagttatatctagtgagtgatttcctagtgtcaaggcagccaacataatcaaagtccacaagcccttctatggcagctgaactgtaactgttcttatcagctctgccataagccagaccctttccaagtgaacctttgatgtatctcagaatccacttcaaggattgccaatgcaccttccttggatttgacatgaatatactcaccaaactcactgagtatgctatatcacgtagagtatacaccatggcatacatcanagagcctattgcatttgcataaggaattntagccataaattccttgtctctttctgag

SEQ ID NO: 3829 - DNA, 452 bp, Glycine max
  unsure at all n locations
tgtcttgtacacaccaagaaaaatcaataaatagatgacagggaataacaattttataaattaattntatcatgatttattcattctgtttttgtagcccacatcattaatattataagagttataggtggaaaaacattagttaattttacattgaaaaattgaaatgataattatttcaaaataatcttttttttacttgataattattatgggattgaggaactactctcttttatttaataatgttagttttttaaaatattttttcacctatttattagtcttaggttgtttcacctatttttaaaaattattctaaataaagaataataattntataaaactaaccttattaaacaaacgaaagaaagtactccctctatctatactaatcctcacgtaagaagaacaaatttgttctaaaataattcttattctagattttaatg

SEQ ID NO: 3830 - DNA, 446 bp, Glycine max
  unsure at all n locations
nggacaaaatntcccatgctactatgaataactccaccacatgaagcaacacctgccacttgagcagaattggccctagtgtaaaacagctaaaatttgaactttgggtctaccaatatttattattaattttttaaagtaaaaaatatcacacatgttaattaaaagaccttacatattattattttctttaaagtaaaaaaatatattttaatttttattctaggtctcattttctattggaccgacacttcagttgagattaaaaatttcactaggagaatagctccaagtatttgtattgtagcatcactaacaacatcgtgtccattggttgcagcacacaggtattcacaactattcttcatgtccggaattagtgattcgatcaaaatactaatcaacatatgcggagatataaggtgggatagatgaataagatcact

SEQ ID NO: 3831 - DNA, 432 bp, Glycine max
  unsure at all n locations
agctntcaattgccatgatagcaaagtaaccccaaagcactgaggttggtatcttcttcaagagaggcatagcagcaacacaagctgcaaccatcaatgcctgcagcagattgctgaggcgctgttctttaacttcaactggcaaaaggtcatcaacatccttatctacatcgaaaacagcctcgtcaacaggggaatcaatgtatccatgacttgaagccagttggatggtggattccttcagctcctttagcccctgcttgaagaacaatatataggataaaggagagagagataacaaatttcaagtcaaattggaaatcataggattatacttaccagggcaggtggtatttggcgggctaatggagtctgcatttggtcatatgcttcttgcatatttcggtataattgacacaggttcatattttt

SEQ ID NO: 3832 - DNA, 429 bp, Glycine max
  unsure at all n locations
tctttgaggcttaaattcaccagttgggctttcattcactatgatagatatggatgccgatgaaagggaccccttgacccagccaatccacctttcatgaaaccccattcttcttatcatataaaagaagaattgcccagacacccagtcataccctttctcaaaattcactttaaacaccaaacaagggcttttagatctnctaggctnctcaacaacctcataagcaatcaatactccatgaagcagctgtctgcccttgacaaaggctgattgcctttcatctaaaaggtgattcataaccttgctcagcctattagatagaactttagcaatgactcttgtaacacagcctatgacggatattggtctgaaatcactaatgaatcgagggtccttaatcttacggataacggcaatgaatgatga

SEQ ID NO: 3833 - DNA, 385 bp, Glycine max
  unsure at all n locations
tgtcaaaaagggaagcaagttaaaaactctnttcaattataaaacgttgtttctacttcaaaaccctttgaactacttcacatagacttatttggtgcctctagaactatgagtttgggtggtaattactatggcttagttatagtagatgattactcaagattcacatggactttgtttttgaaaaccaaagatgaagcttttgatggtttttgcaaacttgccaaggtcattcaaaatgaaaaaaggtcttaacattgtttcacttagaaggtatcatggaggtgaatttcaaaatgagtctcttgaaatgttttgtgaagaaaatggaattcaccacaacttttctaccctaagaacacctcaacagaatggtgtcatggag

SEQ ID NO: 3834 - DNA, 405 bp, Glycine max
  unsure at all n locations
tgaccccaatttgatcaaaggtaaagctaacttgtattatacctattgcatcaagtggcctcagaataattaaaaatggggggttgaattaattattcctaaacctttactaattaaaaaattactcttctaaggattttactatgttgttaagtgaataaagagtagaagagaaacttaaccaaaactaaaagtggaaattaaatgcacagtggaaattaaaagagtagggaagaaggagacaaacacacaagagtttttatactggttcggcaacaacccgtgcctacatccagtccccaagcgacctgtggtccttgagatttcttttcaaaccttgtaaaaatctttntacaagcaaaaatccataagggatgtacccttccttgttctcttgaacaacct

SEQ ID NO: 3835 - DNA, 429 bp, Glycine max
  unsure at all n locations
agctttgctgcattaagggnnnattttatttatatatatncactaaaagagtnggaatatagatgtaaaataatcaaatatttaatttagatgtcaataaacaagaatattattgtatcggatattacttatattagatttgattttcttaaataacagtttaaatttgagtattgtggataaaaaaatataattcaaatgagagatctcattaaagataatgactcaaatacttcaacaaaaattaatcatagataaaacttattagtacttcacaccaatgtttaatgttttggtgataaaaaaaataaaatactattgaaaaaaaaggaattagtctttctatttaatagattctatatgattatatccaataataaagaatatattttctcacataatagtaataaagaatatatcgaaaagaaa

SEQ ID NO: 3836 - DNA, 404 bp, Glycine max
tatgctgcagacatttataatagaccccctcagcagttattaccttcaacagcagaataattatgatcttttaagctacagatacaatctaggttggagaaatcatccaaattcgagatgggcaagtcctccacaacaagaatagcatgtccctcccttccagaatgttgctagtccaagcaagccatatgttcctcctccaatagtgaggcaaatgaccatccataatatgcaatttcagcaagagacaagagcctccattcagagtctgacaaatcatatggggcagatggctactcagttgaaccaagctcagtcccaaaattcagacaaattgttttcacaaactatgcagaatccgaaaaatgtgagtgccatcaccttgaggtctggcaagcaaattg

SEQ ID NO: 3837 - DNA, 375 bp, Glycine max
  unsure at all n locations
ttttccaacccttaaggacaaaataacgaccgctctagtgctagttttgcctaacccgagagaaccctttgaggtgtattgtgatgcatcaaagatgggtttaggttgagtgttgatgcaaaatggcccaagtagtggcctatgcttctaggcaactcaagactcatgagaggaattatcccacccatgatttggagttggttgctgtagttntttcccttaagatgtggaggcattacctgtttggctccaaatttgaggtgtttagtgatcataagagccttaagtacttgtttagtcagaaagagttgaacatacatcanaggagatggttagatgatgcaatcctaccccccccccccaagggcattggat

SEQ ID NO: 3838 - DNA, 393 bp, Glycine max
ataacttcaaatagatcattagcagaaaagaataataattgttcacacttcacaggaaacaaaagctatgaaaaggactgaaaatttaaacagcagaatgagtttgtacctgtacaaacttggcaaagccagacccaagaggggatccaatgtacagagccattgaagctccatttagcaaggatgcgtatactagccatggccccatcatccgtccaagattagtgggccagcacactacatcacctttacgaacgtccatgtggcaccatgcatctgcagcagcttttagagagtaatattggtccatggaattgcctttggatcacctataccaccaaatgaggtacattatattagcttttggctagcttcatatggtgagtgaagtct

SEQ ID NO: 3839 - DNA, 422 bp, Glycine max
agcttaataaatctatatatgggggataactagcttcccgtcagtggtaccttaagtttcatgggataatttcttcatttggttttgaggaaaaccccatggatcaatgcatattccacaaggtcagtgggagtaaaatatgtttccttgttttatatgtagatgatattttacttgcagccaatgatcggggtttgctacatgaggtgaaacaatttctctctaagaattttgacatgaaggatatgggtgatgcatcttatgtcatcgacattaagattcatagagatagatctcgatgtattttgggtctatcacaggaaacctatatcaacaaaattgtagagagatttcaaatgatagattgttcaccaagtgttgctcccattgtgaagggtgataggtttaatttgaaccaatgt

SEQ ID NO: 3840 - DNA, 421 bp, Glycine max
  unsure at all n locations
ngtaatgattataaaattaaatgtgctaagaagaaanatcgtttatacgtaaacacgacattgaagtaacttgggatgagtataaaatttgtgaacaaaccactttggctaaggaaatattgtacatgttatgatttatcatagaaaagctctcaaagatgttaggtacacctcaggtttttattataagaaattagagaaattgtattttatactatcacttatttctgataataagaataaaaaatagtataaatgtataccgtaagatatagacatgaatggacaccgcattaatatcttttatcaaatagatatctatttgattatttcaaaaatattattattgtaaattttagtaaagtaactaataataataattaggaatctcatatttctaaattaatgtctaattctacat

SEQ ID NO: 3841 - DNA, 416 bp, Glycine max
  unsure at all n locations
tcttagtctcagctgatgaagatgaattctnggctacttangctctcctctaatgacaatagcatcacttctggcactaaattgctgggagtttgaagccatcttctcaatcaaatttctggcttcagcaggggtcatgtctccaagggctccaccactggcagcatctatcatacttctctccatgttactgagtccttcacaaaaatattggaggcgaagctgcttagaaatctggtggtgagggcaattggcacatagtttcttaaatctctcccagtattcatataagctttctccactcagttgcctaatgcctgaaatatcttttctgatggtcgtggtcttggaagcagggaaatttttttctaagaatactttcttgaggtcatcccagctcgtgatggaccttggag

SEQ ID NO: 3842 - DNA, 415 bp, Glycine max
tctatagaaggttcatttctaattgctcttcttttgtatcacctctcaatgagctggtgaagaagaatgtggcatttacctggggtgaaaaacaagagcaagcctttgctttgctcaaagaaaagcttactaaggcacctgttctagctcttcttgatatttctaaaattgttgagctagaatgtgatgcctctggagtgggagttggagctgtattgttacaaggtgggcaccctattttttattttagtgaaaaacttcatagtgccacccttaactaccccacctatgataaagagctttatgccttaataagagccctcctgacttgggaacattaccttgtttccaaggaatttgtcattcatagtgatcatcaatcacttaagtacactagagggcaaagaaatttaaa

SEQ ID NO: 3843 - DNA, 396 bp, Glycine max
  unsure at all n locations
nttcctctaatttgctttgatagaatttccaagggttatatagaaagaaaagagattaaagccttcattttgtactgtcttcatgcgattcacttttctctctccatgaatattattttgcaaattacaacggtgaatgtgtgcgaaattgagttgcgaactaagtgtctatatttcacaatgatccaacgattaacgagttcgggatcctagttttactagacaagttttgagtctctacgaaaaaagagaaaactacgatgtgaatgacttttctcttagctttgacattttttcacaatttccaacggtgagaatgctcggattaagttgcgaacctggtgctgaaatatcacgacgatccaacggttaacgagttcgagatcatcattttac

SEQ ID NO: 3844 - DNA, 424 bp, Glycine max
  unsure at all n locations
agcttaattgactattntattaatcattgtctaataaaacctgaattttaggtagcatatatcatataattgattatttaactgcatgccttgagtaggaatttttgttgttgttctggtgtaggattatagcagcaaagtgtattttatgaagcaaaccgtgggtaatgcttgtggtacaatagggttgcttcatgcacttgggaacataacctccgaagtcaagcttggtatgtttccaacaatcacgcagcctcagttaaagttnttagtatatcaatcattaaatctcattcagttgtgttgcttttgttcttaccagttgaagggtcattctttgataagttttttaaatctactgcaagcatggatccattgcaggttatttgtttcttcctagccaaacctcctctcttttctttct

SEQ ID NO: 3845 - DNA, 414 bp, Glycine max
tggttcccaatgctctattcagactctctcataatctgtatgtaaacctagaatctctattagacactatgctagatggcacaccatgtaatctaacaatctcactaatatacaaggaggtcaacttctccaaggaaaatatgatattaatgggaataaagtgagcaaacttggtcagtctatcaacaataacccagatagaatctaaatctctaggggtcctatgtagtcctccaacaaaatccatggaaatactgtcgcactttcactggggtatctccaagggttgtaacttccctaaaggcatctgatgttctatcttagccttttgacagactaaacatgcatacataaactcactaacctctgtcttcatgttgggccaccaaaacattatcttcagatctttataca

SEQ ID NO: 3846 - DNA, 422 bp, Glycine max
  unsure at all n locations
acctgcatgctgcagcttttatagacttcagagntttganccgttgagagatcccaattagttgttgtctaatagctttggcacttgacacgaggttgctattgtacgaagagagagtgggggccacaaacactttagttagtagtgtttatggtagggtcgatggtctagggtctaaggtttaaggtgtatgttttacttattttaaggtttaggggttagttagtttatggtttagattttacgtgattagggtttatgcatgctatttaaatgaggattgagtgttataggttttcccattataggaattanggttttgttagcattgggtttaaggcttacttatttttggggttagggtttatggattttatggttagcgtttacttattttatgaattaaagtttaacatattcta

SEQ ID NO: 3847 - DNA, 421 bp, Glycine max
agctttaaacttatacaaatattagctctgataccacttgttggacaagtggcctcagatatcttaagaagggggggttgaattaagatataacagactattccccaattaaaaattctacttttaatttaacccaacaacctatgattccttttaaacaagaactccaagataataatgcaaattaatcttactaaatagaaataataagcaataaacaataaaggagtttaagggaaaagaaaatgcaaactcagatttatactggttcggcgacacccttgtgcctacatccagtccccaagcaacccgcttgagagttccactatcttgcaaaatccctttacaagttctgaaccacacaaggacaacccttcctttgtgttcaaatttctttacaacaagagaccctcggtctctt

SEQ ID NO: 3848 - DNA, 416 bp, Glycine max
  unsure at all n locations
tcaacattcaattntgagcgtctcgatatatgatgtgtctctttcacacatccgagtaaaaagttattgtcgctttaattggctcagaggttcaacattcaatttcgagcgtttcgctatattacgggactcaatctaacatccgagtaaaaagttattgtcgcttgaattggctcagggcttcaacattcaattttgagcgtctcgatatatgacgagactcaatcagacatccgcgtaaaaagctattgtcgtttgaattggctcagaggttcaacattcaattttgagcgtctcgatatgttacgggactcaatcagacctccgagtaaaaagctattgtcgtcttgaattgctcagagattcaacatttaaattcgagcgtctcgatatactatgggactcaatcagacatt

SEQ ID NO: 3849 - DNA, 419 bp, Glycine max
  unsure at all n locations
agctntgaatgcactattcaatggttttgacaagaacatcttcagactgatcaacacttgcacagtggccaaagatgcatgggagatcctgaaaatcactcatgaaggaacctccaaagtgaagatttccagattgcaactcttggctacaaaattcgaaaatctgaagatgaaggaggaagagtgtattcatgacttccacatgaacattcttgaaattgccaatgcctgcactgccttgggagagaggataacagatgaaaagctggtgagaaagatcctcagatccttgcctaagagatttgacatgaaagtcactgcaatagaggaggcccaagacatttgcaacatgagagtagatgaactcattggttctcttcanacctttgagctaggactctcggatagggctgaaaaga

SEQ ID NO: 3850 - DNA, 333 bp, Glycine max
tcccgatcacatagcttgcctcacccatatctttcatttcaaaggtgctagagagaaactgcttagtctcatgaagaagaccaggatcattagcaagatatcatcaacatacataattagatagaggaccttacttccactgaccttcaaatatatgcaccgatcaacattgttttacttaaatgcgaaggaaacaatggtttcattgaacttgagataccataggcgggagacttgcttaagactatatattgatttcttataatgtgcacattttgtatttctttgcttgaactaagagtcccattggttggtgcatatgaacattcttct

SEQ ID NO: 3851 - DNA, 420 bp, Glycine max
  unsure at all n locations
taagctccttcaactgcacaaggctcttattattcgtttatagtatcctnggagaacacttgcacccgacgacttaccactgagcaaaaactctattcttctctctcttttggaccaaagtaatggcaagtctgtggggcacagtaatattttctttcccatcaagacctntggatgcaacttgtgatcgtatccccatatcagctagaccttgacgggtattcaagcaatcctttgtcttgccttgaatgttaaggagcgtcccaatcacactgtcacaaacatttttctccacatgcattacatcaatacaatgtattacgtctagatcagaccagtgctaaagattaaagtaaatggacctcttattccatatgcactcttactttattcttcttttgggtctttccaaatccattt

SEQ ID NO: 3852 - DNA, 428 bp, Glycine max
agcttcttatccaaggcaattcttgttgttgaagctccttcttccttggcttattccctagtggatggtgcctcccctatcctcttctcctttgccttccgctgcatctccatggtgaaaaatcaccattgaaggacctcattgaagctcaaagatccagcctccatagaagctccacaagcaagcttccatcatgaatgaagtgatttctaatgttagtgtgtttagtcctctcatgatggacttgatccttggcaaaacaaaatgcatttagacagtggcaaaaaatgatagccttttttttgtggaaacccaagattgctaattagacccttcagccaagttcattcctttactggttcttccaacgccatgtactctacctttgtaatggatacagccaccatgggttgaagtgtagtcttcca

SEQ ID NO: 3853 - DNA, 394 bp, Glycine max
  unsure at all n locations
ntggagtttccagtgccattcggcncttcatagttcagacntcttctggcttcaatgcatcagtgggctttccttctgtgtccagcatcttgggatgttcccagcctttgatgacagctttccaggttctgctatccagtgatttgagaaaggccaccatccttgctttccagtattcatagttggtcccatccagaattggtggtctgttcactggtccgccttctttctccatgttcatcagaatctatctccctagatctcactcagtgatttcgagtgcctgctctgataccaattgaaattctgatactggggacagatgtcgtacaggatgtcacgacatcacgcttcagaacatgcagattgtctttgactgtttgaacagatttaa

SEQ ID NO: 3854 - DNA, 422 bp, Glycine max
  unsure at all n locations
agcttcttagtttcatatgatgcatttgggtttgnagctacctcatgcactcctctaatgactatggcatcatttctggcgctaaactgctgggagttggaggccatcttctcaattaaatttctggcttcagcaggagtcatgtctccaagggctccaccactggcagcatctatcatacttctctccatattactgagtccttcataaaaatattggagaagaagctgttctgaaatctgatggtgggggaaactggcacatagtttcttaaatctctcccagtactcatacaggctctctccactgagttgtctaatacctgagatatccttcctgatggctgtggtcctggaagcagggaaaattttttctaagaatactctcttaaggtcatcccagctcgtgatggatcttggagc

SEQ ID NO: 3855 - DNA, 394 bp, Glycine max
  unsure at all n locations
cggatgtgcgattgagtcccggaatatatcgagaggctccaaatngaaaacggaagctcatatcaaattcaaaggacaataactttttactcggatgtccaatagagtcccgtaatataatgaaacactccaaattgaaaatggaagctcgtatcaaattcaaacgacaataactttttactcagatctccaatagagtcccgtaatatatcacgacgctccaaattgaaattggaagctcgtatcaaattcaaacgacatttacttttaacttggatgtccgattgagtcccgtaatatatcgcgatgctccgaaatgaaagcagaagctctaagcaaattcaaacaacaataactttttattcggatgtccgaataagtcccgtaatatatc

SEQ ID NO: 3856 - DNA, 421 bp, Glycine max
tcatggcaaagtatgtatggtagaacttcattattgttatttattatatacaaataagcttgttgcaattcttctagacttagagtgataacatgcagtcctcttgatcccttatctctcactgtctcgttatgccgagactccgaaaccacaacaagttttatcttttccatgtactcgaaacaaaactcagtagcttctttcgcaatgtacttttcaacaataaatgcttcaagacggcgtagattctttgtatacccttttaagatcttcatgtatcgctcaaccgggtacatccaccgcaaataaatgggaccacaacatttaatttccctcaccaaatgaacaattaagtgaaccgtgatgtcgaaaaatgaaggaggaaaatacatctccaactgacacaagataatagtagtct

SEQ ID NO: 3857 - DNA, 409 bp, Glycine max
  unsure at all n locations
ntgaagaagcgtcaaagcaggaagtatgggtcaaggctattgatttgagatacagatgatcgagaaaagcaacacatgggagttagtaaatcgtccccatggaaaagatatcattagggttaagtgggtctataagacaaagctcaaccctgatggcaccatacagaaacacaatgcgaggctagtagctaagggttactcacagcaacccgaaattgactacaatgagacatttgcaccagtagcttgtcttgataccataagagctctaatagctcttgcgtcacaaaaaggatggagtatccatcaactagatgtcaaatcagccttccttaacggcgtacttgaagaagagatctatgtggagcaaccacaaagattcgtgtctgaaggcaaagaaaacaaagtg

SEQ ID NO: 3858 - DNA, 414 bp, Glycine max
  unsure at all n locations
actatgcagagaatatcctttttanatttccttatcngacttagcatcaaattttcctaagttatcttttccattattcaatacaaaacatttacaactaaagatatgaagatgtgagatgtttggttntctgccattgaacaattcatatggagttttctttaagatgggtcttattaaagccctatttaaaatgtagcatgcagtgttaacggcttcagcccaaaatttttttggaagaggtgtatcatttaataaagttctagcaatctcttccaaagatctattttttctttcaacaacaccattttgttgaggggttcttggtgcagaanaattatgctcaatcccatgcttattacaaaataattcaaattctttattttcaaactcacccccatgatcactcctaat

SEQ ID NO: 3859 - DNA, 331 bp, Glycine max
taacccagctggccttgaatcagatatctgtacctgtcgcaagggtttgcggattgtgctcctctgctgaccaccatacagacctttgccctttcatgcagcaacctggagcaattgagcagcctgaagcttatgctgcaaatatttacaatagacctcctcaacctcaacagcaaaatcaaccacagcagaacaattatgacctttccagcaatagatacaaccctggatggaggaatcaccctaacctcaaatggtccagccctcagcaacaacaacagcagcctgctccttccttccaaaatgttgttggcccaagcagaccatacat

SEQ ID NO: 3860 - DNA, 411 bp, Glycine max
  unsure at all n locations
agctntaagcgttgtccattgtcgttctctttcttctcaaagntctcttctctagggtccaccaattctactgctccgagaggtctgacttctttgattatgaacggccctgaccatttggactttagcttacctgggaatagccttagccttgagttaaaaagtagtacatattgccctggctggaattctttcctttgtagcttcttgtcatgatatgccttcatcttttgcttgtagattctggatgactcataggaattcagtctcatttcttccaattccagtaactgtagcttcctcttttctctgcatgcactatcatcgaaattaagcaatttgagagcccaatatgctttgtgctccaactccactggtaagtgacatgcctttccatatactagctgaaat

SEQ ID NO: 3861 - DNA, 386 bp, Glycine max
taacaaaaggcatgcgaaatgggtggaattcctagttttctatccttatgttatcaaacataaaaagggaaaaggtcatattgtagccgatgctctttctcggcgtcatgcattactttctatgcttgaaacaaaattgattggtcttgaatgtctgaaaagcatgtatgaaaatgatgaaacttttggagaaatttttaaaaattgtgaaaaattttcagaaaatggtttctttagacatgaaggctttcttttcaaagaaaacaaattgtgtgtgcctaaatgttctactagaaattttcttgtttgtgaagcacatgaaagaggtttaatggggcattttggggtccaaaagactctataaacattacaagaacatttttatt

SEQ ID NO: 3862 - DNA, 418 bp, Glycine max
  unsure at all n locations
agctttggaaagcgtnngtttttattttctcgctaagccaaaagggggctccactcattcaaaggcaacaatctaaaaacctgagaagaagttgttgaaaagtttctaaagaaatacttcccagagtccaagactgcagaagggaaagctgcactctcttcatttcatcagattcctgatgaatttctgagtgaagcattggagagattcagaggcttgttaagaagaactcccactcatgggttttccgagccaatccaattgaatatgtttatagatgggctgagaccacaaaccaagcaactgttagatgcttctacaaggggaaagataaaattgaagaccccggaagaagctacagagctgattgagaacatgtcagccaatgatcatgccattctacgagacagacacccat

SEQ ID NO: 3863 - DNA, 411 bp, Glycine max
ctaaactttgtacaagaatgaagctctgtataccacttgttagacaagtggcctcagatatcttaagaaggggggggttgaattaagatattccaaacttttctcctaattaaaaatctatcttactttttacttaagttatgaattcccttaatgacaatcttcttaaatattaattcaaatgaagcaacttgaatataaatataaagcaataataaataaaggagattaagggaagagaaaatgcaaactcagttttatactggttcggccacacccttgtgcctacgtccagtccccaagcaacccgcttgagagttccactaacttgtaaattccttttacaagttctaaacacacaaggacaacccttcctttgtgtttagagattctttacaacaagaaacttac

SEQ ID NO: 3864 - DNA, 422 bp, Glycine max
tgaaggtaaactagatgccttggttaacttggtaacttatctgaccatgaatcaaaaatctgcacctgtcgccagactctgtgatttatgctcctctgtcgaccactacatagacctttgcccttctgtgcaacaatctgaagcaattgaacagcctaaagcttatgctgcaaacatctacaacagacctcctcaacctcagcagcaaaatcagccacaacgaaacaattatgacctctccagcaacaggtacaatctcgggtggaggaatcatcctaaccttagatggtcgaatccttcacaacagcagcaacaacaacaacagccttattttcagaatgctgctggtccaagcaaaccatacgttcctccaccaatccaacagcaacaacagcaacagccccagaaacaacaaacagttg

SEQ ID NO: 3865 - DNA, 393 bp, Glycine max
tgccgccacggagttttccgactatgctcttgtgttttgtatcaagctacaaaaggagagagcaagaaatgaagagccaatggttgatacatggacggagatgaaaaagatcatgaggaagcggtatgtgccggctagttactcaagggacttgaaattcaagctccaaaaactaacccaaggcaacaagggggttgaggagtatttcaaggaaatggatgtgctcatgattcaagcaaatattgaagaagatgaggaggtaactatggctcgatttcttaatggtttgactaatgatatccgtgatattgttgagctgcaggagtttgttgaaatggatgatttgcttcacaaagcaatccaagtggagcaacaattaaaaaggaagggagt

SEQ ID NO: 3866 - DNA, 424 bp, Glycine max
gtgagcaaattcaaacgacaataactttgtactcggaattctgattgagtcccgtaatatatcgagacgctcgaaatggaataccgaagctctgagcaaattcaaacgacaataactttttactcggatgtcagattgagtcccgtaatatatcgagacgctcgaaatggaataccgaagctctgaacaaattcaaacgacaataaatttttactcggatgtctgattgagtcccgtaatatatcgagacgctcgaaattgaataccgaagctctgagcaaattcaaacgacaatcactttttactcggatgtctgattgaatcccgtaatatatcgagacgctcgaaattgaatatcgaagctctgagcaaattcaaacgacaatatacttttactccgatgtctgattgagtcccggaatat

SEQ ID NO: 3867 - DNA, 424 bp, Glycine max
agcttctacattcaaattcgagcctttttatatattacgggactcaatcggacatccgagtaaaaagttattgtagtttgaatttgctcaaggcttcggtattccatttcgagcgtctcgatatattacgggactcaatcggacatcagagtaaaaagttattgtcgtttgaatttgctcagagcttcggtattccatttcgagcatctcgatatattacgggactcaatcagacatcggagtaaaaagttattgtagtttgaatttgctcagggcttcggtattccatttcgagcgtctcgatgtattacgggactcaatcagacatccgagtaaaaagttattgtcgtttggaattgctcagagcttctacattaatttcgagcttttcgatatattacgggactcaatcagacatccgagt

SEQ ID NO: 3868 - DNA, 400 bp, Glycine max
  unsure at all n locations
tttaaaanaatgaagataaaaataaaatagtgagtatattattaatttctaaattatttaatacaaaatattcaaaatataaaataaaagtttcttgcccgtacaacaattttatttaacatattaaaataattattaaaataaaagtttcactatttttctcatattaaaataattattttaacatattaaaataattactaatatactgaagaaagagtaatagagccacacttcaaatcatttatgtatgttcataatctatttaaggcaaaaatttataataaatcttttcttttgtgggactcaatcctaaattatttaaaatataaaaaaagataacatgttattcaattgacactactagaaaaagctgttttttcttttattaattaattaa

SEQ ID NO: 3869 - DNA, 336 bp, Glycine max
taaagttattggagggagaataaaacaaatcattttcttttgtaccctccaagtaacgaagaattctttttgcggcttttatatgagtagaggtaggagccttcataaagcgacacacaactctcaccgcatatagaatatcgggccttgtattggttagatacctcaaactccccacaagactcttgaagatcgtggggtctaccttctctccttcatcaaactttgataacttcaagccaccttccataggtgtgttcacgggattgcaatcaagcatattaaatttcttcaacacttattttgtgtagctttcttgtgagacaaagattccat

SEQ ID NO: 3870 - DNA, 365 bp, Glycine max
agctataatagcaatctttctttttgttgacaagtttcagtagtccagctgtcttgatgaggtacatgatctccttgcaatccaaggcatttcttcccagttctctttctaaagcaagccttcgttgatatacaaatttccacctttcaacattgccaatggagtggaaagaaatgttgtccaatggagcatcagggacatttccaggcacctttttccctgatttcttggcccgcttgatgtcgagaacatctggctcgacattatcatcagaatcagatgaggaaatttctttcctcttcttggacgggattgcaactatgctccatctggatgcggtaagagtgagtggagtgctcttcttc

SEQ ID NO: 3871 - DNA, 393 bp, Glycine max
  unsure at all n locations
agctttttattggaancttgtatttatgacaacactctgatttctgaaatttttgggataaaaatggttattgactagtcccttttccatgacttaaccaaattacccagtgacggtgtaccatttgaaggtacagtgaatgacgactggaaatttgatttctctgcccatgatgcccgccagttggtttgcaccaacaatgcggatatgaccggacgtcttcttgccgggtcattggcttttgaaagccgcatccttcactatttaattgtacgtattttgcttccacggtcttccaaccttgcccaggtttctgaggaagatctaattatcatgtgggcctttcatacagggcgtcaacttgactgggcacacttagtcagatatcgcatg

SEQ ID NO: 3872 - DNA, 392 bp, Glycine max
  unsure at all n locations
gctggactcgttgtgcagtgatttccttggcaatntgatgctcagaaacatcaatatctattactccatcagagggtctgcccagacatttgttgatcacagccggtgagaatctaatacactttcctctgacaaacactctttgataatcatcactctttctgtttgatatgtcagagggaatgttgacaatgaattccctgactaagccttcatagcactctcccaacttgctgacagtcttcagcagtccagcagccttgatgagatccacgatctccttgcaatccatggcagctcttcccagatctctttccaaagcaagtctacgttgatacacatatttccacttttcaacattgccaatggagtggaaagagatgttgtccaat

SEQ ID NO: 3873 - DNA, 437 bp, Glycine max
agcttcttcacatagtccgcctttgcttgaccttctttatgcttaaaaacagaaacattaggcataggcaaaagatcaagaggagttagtgggttaaaaccataaacaacttcaaaaggagaacaattagtggtgctatgaacagctctattgtaagcaaattcaacatggggtaaacaagcttcccaagtttttaagttcttcctcaaaactgtcctaagcaaagttcccaaagtcctattaacaacttccgtttgcccatcggtttgtgggtgacaagtggttgaaaataacaatttagtgcccaacttgctccacaaagtcctccaaaaatggcttacgaacttagagtccctatcactaacaatgctccttggcataccatggagtctcacaatctccttgaaaaacaaatcagccacatgggaagcatcatc

SEQ ID NO: 3874 - DNA, 322 bp, Glycine max
ctatgctcttgtgtggcggaacaatctacaaaatgttagagcaagaaatgaagagccaatggttgatacatggacggagatgaacaatatcatgaggaagcggtatgtgccggctagttactcaatggacttgaaattcaagtctcaaatactaacccaaagcaacaatggggttgaggagtatttcaaggaaatggatgtgctcatgattcatgcatatattgaagaagatgatgaggttactatggctcgatttcttaatggctcgactaatgatatccgtgatattgttgagcttgacgagtttgttgaaatggatgat

SEQ ID NO: 3875 - DNA, 454 bp, Glycine max
  unsure at all n locations
ngccgccacggagttntccgactatgctcttgtgtggtggaacaagctacaaaaggagagagcaagaaatgaagagccaatggttgatacatggacggagatgaaaaagatcatgaggaagcggtatgtgccggctagttactcaagggacttgaaattcaagctccaaaaactaacccaaggcaacaagggggttgaggagtatttcaaggaaatggatgtgctcatgattcaagcaaatattgaagaagatgaggaggtaactatggctcgatttcttaatggtttgactaatgatatccgtgatattgttgagctgcaggagtttgttgaaatggatgatttgcttcacaaagcaatccaagtggagcaacaattaaaaaggaagggagtggctaagaggagttntaccaactttggttcttctagttggaaagacaaaggtaagaaagat

SEQ ID NO: 3876 - DNA, 465 bp, Glycine max
  unsure at all n locations
cttcctacgaaaactgtctatgctccacatagttagggccactagacgcattctgcatctctcangcattgaacatatgttatcccctagtaaattctagggtagagtgtttagttttctactaaccctgattggaaaagaaaacaaaggataagcattatggtttcctaaaactaagtatatttataaaacactatattacgaaatggagcattccaaatgctttttttaaacacaatctgtttatccaatgctcaaatgctcaagattaggattaggggtgttcatactcggtttgattcggttattcattaaaaagtcatctaaaccaaacttataaacaatatgcgattcaatttggttcaattttcattaaaaatataatctgaatcaatccaaaccaatattgtacggtttgatttttgcaatgtttactaaaacattatttcattaaatgntatatac

SEQ ID NO: 3877 - DNA, 446 bp, Glycine max
  unsure at all n locations
agcttgcttctcctgaatatcaaattcattttaggaaaaagaattggacaaattangattatttagtagggcactaactgaaattaaattgaatttgattttaggaatgtaaccaacattatgcaagactaaggtgttggttaagcaaactgaaccaatggcaagaatgggtataatgtcactattaggaagagttacagttttatcaaaaacaagctgatgagatctaaaattatgaagagagcaagtaatatgaatgcttgcactagaatctaaaagtcaacaatcatgaagaaaattggaagtggaagtagaaagaatcataccacttgaggaagaaacactgtgaggaatgacaacattggtagcatgactttgtaaaagattcatcaattgactatattgttgagcagtaagttgaaactatgaacccaagtcaacagaag

SEQ ID NO: 3878 - DNA, 468 bp, Glycine max
  unsure at all n locations
tggacaatggcacggaaatcttgctaaaatcctagataaatctcttgtaaaacttggatgtcgcagaanagaacgtacttcccgcacagatgcgtcgtaaggaagagaagtaataacatcgatctttgccttatcgacctcaatacctctactagagactgaatgccctaagactatacctccatggaccataaaatgacatttttcaaagttaagaacaaggttagtctcagcatcggtcaagaactctacagaggttatccaaacatgcatcanaggaagaaccataaacaatgaaatcatccataaacaccttcatacaactctataataaatcagaaaagatactcaccatgcacctttggaaggtgccaggagcgttgcatatgccanagggcatcctggtgtaggcaaatgggataaatgatctcggcaactagtagcttcataacctctttcttcatcaca

SEQ ID NO: 3879 - DNA, 440 bp, Glycine max
tcatgatgatgaactaagcaattatgatgatgcctaaagcccaagtgattgattcaatattgattcaagacttcaagatcaagcatcaagaatccaatccaagattcaagattcaggagaagaaatcaagaagcaacaagtcaagacttcatattggataagtattaaaagaatttttcaaaaaccaaatagcacagttttgttttacgaaagaattttctctaattctctaaagttacagagtgattactctctggtaatcgattaccagttaacagtaatcgattaccagtgaccagattggttttcaaaatgctttcaaatgatttgtgacgttccaaaatgattttcaaatagtgtaatcaattacactatattagtaatcgattacaagtgaatctgaacgttggaattcatatccaattgtgaagagtcacaac

SEQ ID NO: 3880 - DNA, 450 bp, Glycine max
tgcttgtccacctgagggttccaatcttgctcgtagaatataacctataaaatgccatgcaatagtaaattctcaaaatatgttttaaacagagtacacttactctaattgttgtgatacattccataattagcacagaatttattttgtaattagtacagatttgattagtacagattttgttccattgtattttgatttgtactgattttgtttcattgtatgtctttccttaattaagtcgctagcagcttataaataagtcatgtattcactctgtgaaatacagaattataataatatttatattattatctttcaagtataatacttgcaggtgataacataaacttacaataatttaacccacctgttaaagaaatggaagtgctattccagcggattttatgattaacttaataagctacttctcattctcccataattaat

SEQ ID NO: 3881 - DNA, 442 bp, Glycine max
  unsure at all n locations
nggtcgtgtattgagcactagatatgagggaaccccaactgcctacatactaattggcaattgacttttcttgtggctttgctgaaagcatattatataacttttatgtttcgtaatgcatgatgtatcaaactatatatgatgtatcaaactagtttataaagtacattatcatatgactgaaaagctgcttataatgaatatttttatgcatggccacttgtttataaatatacataataccaaagaaagaaacaccacgtgcatcatgcttcttcttgcttataatcaatattgatttgcagatattgggagaatgagaaggtgcggttagattacaggccagtgcacatgaatacgttggatgatgaggtggaatcattccctcctaaagctcgtgtttattagtattcttgtaaattattactatggatgatctata

SEQ ID NO: 3882 - DNA, 417 bp, Glycine max
  unsure at all n locations
agctntataaattcatcattgttaatattctctacacaaaaacttaaatgatgttaatttaacaagtatttgctcaaaaaggaaaaattataatagaaaaattacaaattcctctataattgaacccccaaaatatactcataattagcatttataaggtggattgtgattttagaagatgtaaagcctttttgttcaacaacaaagttatcatttgaagtataagcttaacaaaattgataatagatttttgtaagacaaattcatatgatagaaatagattttgcaaaacaaaataagtttttcaaaaattaaattaaattcaaaccctaagccaatttaaaacagaagattaaccagaagaatataagacacaaagatttatattggtttgtgcctaccactaagaatacattc

SEQ ID NO: 3883 - DNA, 425 bp, Glycine max
  unsure at all n locations
agctntactgcctgagaattgcggtgtcctagcctattgtgcaaatgtatagagttaggcacagtgttattacaagcaacagaagaaacagtgtttatacaagctggagaagacagctgagaagaattgaagattgggaaactgatacgatccatcaggtccaacatctccttgtagaaggatcatattggaatcctgngatttaacaaagcaatgattagcatggaattcaaagaaaacatgattatctttggcaaatntacttacactaatcagattcttggtgatttgaggaacaagaagcatgcttttaagaataagtttgacattaggactgaaaggagaaacaaaattggagtgaccagacgctgagatattcagacctttgtcattaccatgaagatctgatcttcaaaacgagaagt

SEQ ID NO: 3884 - DNA, 422 bp, Glycine max
  unsure at all n locations
agctntacaagcccttcgaccttggcttggttagctttcacctcctcttcactaaatgtagcattgcctttggtgaaaaattggacatgtaccttcctaatggatcctccatttgagccttccaccaatttgctttcaaatgaaaccttctccaatgtgtcagacaaggcagtgcccccgattatgctgaagttatatacataggctgcctcatcaattgcatcaactctgtgcagcacatactttgttttgtcacctgcatatgcacccattaattcatctaattaaaatcatgactaatttcattaatttgtactatgtattataattaaggttttaaatattggtcgcaatagtattattgcgatttatcagtttgttgatattgcaataaagtacagacaaatatgactgatgcaatc

SEQ ID NO: 3885 - DNA, 408 bp, Glycine max
tcaacattcaatttgagcggtttgatatattacgatactcaatcagacatccgagtaaagagttattgtcgtttgaatttgctcagagcttcgacattcaagtccgagcgtctcgatatattacgggactcaatcagacatctgagtaaaaagttattgtcgtttgaatttgctcagagctttggtattccatttcgagcgtctcgacatattacgggactcaatcagacatccgagtaaaaaagtgattgtcgtttgaatttgctcatagcttcaacattgaattctgagcgttttgatatattacgagactcaatcggacatccgagtaaaaagttattgtcgtttgaatttgctcagagcttcgacattcaagttcgagcgtctcgatatattacgggactcaat

SEQ ID NO: 3886 - DNA, 383 bp, Glycine max
  unsure at all n locations
agctntgagcaaattcaaacgacaataagtttttactcggatgtctgattgagtcccgaagtatatcgagacgctagaaattgaataccgaagctctgagaaaattcaaacgataataactttttactcagatgtctgattgagtcccgtaatatgtcgagacgctcgaaattgaataccgaagctctgagcaaattcaaacgacaataactntttactcggatgtctgactgactcccgtaacatattgagacgctcgaaattgattatcgaagctctgagcaaattcaaacgacaataactttttactcggatgtctgattgaatcccgtaatatatcgagatgctcgaaatggaataccgaagctctgagccaattccaa

SEQ ID NO: 3887 - DNA, 435 bp, Glycine max
  unsure at all n locations
tatacagcctangatgtggttntgtgactaaattcaatttagacacaagtcttgcacttgccacattggtacaactccctccatcaatgatcaccatgcaaactttgccattgatcaatcatctagtgtggaaaatgttttctctttgagtttcctccaaagacttcaattgatggccaagtaaccgcctaatcatcaacaattcttcctctagtgttttctccacttccttctcatcatcctcactctcttctcccttttcaacttcggactcactaatgtactctccatctctaagaaatcatggctttcttgttagggcattcatatgcataatgtcccaagccttggcactgaaaacacttcacatcccaactcttttttgaagactgttcttggaattttggaggagttttcgatggtataggtgttgca

SEQ ID NO: 3888 - DNA, 367 bp, Glycine max
  unsure at all n locations
agcttcgcggngtcgtgcgcacatgcatgcgaaaacctaatcaaaaaagctttatattttttaaaaaatgaacaaaggcggttttctatttacacccgttgtacaaataagtcctacaaagacgggtctcgaagaccgccgtaattatcttaccactatttacaaaaatgtcactgagggacattctaagacggttcctgcaaactgccttagaatgtgcgtcctaaaaacagctccttttagtagtggccatgtcctatctggctgcatcatgcaaagcaagaatctgagtgtctcactagagagatctcaacacctttagggtaccacaagtcgacatgtaaggttcctctaagatacttcatag

SEQ ID NO: 3889 - DNA, 453 bp, Glycine max
  unsure at all n locations
ggtaatagtcatctacatatgggtcattactatgagtcacagcatgttgcattctgagaatgctttctattgcatcacttgtcatatacttggaacgaaactgaaatgaaccactgtcactctcttggctaccggcatcagaaccatgtaaggaaaaacgaagactatgtttacctttatgaagtgattttgatctatgatctctaccatcggcgattccatgcatatgttcatatttgctaattacagatgagccagaggaagggtggggattgaataaatgggactggaagccagataagtagcctgcagatcgctgaccaggatgatgcagtctatgctgctgctgttgtaatcgagccatcaagtgatgagataccgatccattatgaaggtgtaattgttgctgtaacatattattaacgagatntgaatgatctccatgatacaacc

SEQ ID NO: 3890 - DNA, 452 bp, Glycine max
  unsure at all n locations
tgcctagcccctngatatattcgagggactcatggtcactatgaatgacaaaggccttgtgataaaggtagtgacgccatgtcatcaaagcccgcactaaggcatacaactccttatgataagttgaatagctaacggtaggaccacttaactcttcactaaaataagcaattggatggccttcttgcatcaacacagccccaatcccaacatttgaagcatcacactcaatttcaaaagatttttgaaagtttggcaacgcaagtatgggggcattagttagctcttgcttaagaacattgaaagcttgttcttgtttctctccccatttgaaaccaacattcttcttgagcacttcattgagaggtgctgtcaaatgtgctaaaatccttcacacatcgtctataacaacttgataagccatgagaactcctcacctcggtcacagactt

SEQ ID NO: 3891 - DNA, 437 bp, Glycine max
  unsure at all n locations
agcttganattgatcaacagatgctctcgagaaattcaaatggtcataattggttacacggaagtccgattcatgcgcataatatgccgagacgctcaaaaatgagcaacggaagctctcgagaaattcaaatggtcataacatatcacacggaggtccgattccggcggatagtatatcgagaagctcggaattgcacgacgaaagctctcgagaaattcaaatggtcataacttttaaaacggaagtaagattcaggtgcataatatatccagaaagttgaaattgaacaacggaagctgtcgatatattcaaatggtcataacttatcacacggaagatcgattcaggcgcataatatatcgagacgctcgaaactgaacaacggaagctctcgagaaattcanatggtaataacttttcaaacggaagtctga

SEQ ID NO: 3892 - DNA, 450 bp, Glycine max
  unsure at all n locations
ggcgccaatctaacaacttcctttaggcttcatctagttaaatactaacacatattaggatagcagttattgtctcaataattctataaactacaactaagcaataagaagagtgtgcttgatatatataattaattttaacgtgtccaaccaaatataaagtagtccaagcttcggttggacatgtattcatagatcaacattttttcttcttctatgcagcaacctacaagctntacaagattagggtgccgaagtttgacaattagtgccacttcatttttgaactcatccaacccttgtccttgtaacatcccaatttttgtaatctatattaaaaaggagtgttatttataaataaatagagttttagaaaaatgatgagattctataaataaataaataaggcgatataattattaattaagataatgatttgagagagaataa

SEQ ID NO: 3893 - DNA, 463 bp, Glycine max
  unsure at all n locations
tctaaactntatacaagaatgaagctctgataccactttntagacaagtggcctcagaaatcttaagaaggggggttgaattaagatattgcaaactattcccccaattaaaattctatttcactttcaatgcaagttacaaattcccttaaaaataaactcttaaataatgattcaaatagaacaatctgaatataaatataaagcaataataaataaaagattttaagggaagagaaagtgcaaactcggatttatactggttcggccacacctttgtgcctacgtttagtccccaagcaacccgcttgagagttccactatcttgtaaaatccttttacaagttctgaacacacaaggacaatccttcctttgtgttcataattcttttacaacaagagaccctcggtctctcaatcccctttgagaatttagaaagaagagaagaatgaatctctcttg

SEQ ID NO: 3894 - DNA, 439 bp, Glycine max
  unsure at all n locations
tataaaactaagcttaaggcaatccttctcagttgatgtccacttctacatctattccatatgctgagtttcctacttcaaatgctactgtcaataatacttctaatattgcttcaaattctgatgttacctcttccagtagtgctaatctttggcatgctangttaggtcatcctaatgagcatgtaatgaaaattattctcgaatagtgtaatatttctcaactgaataaaaacatcacagagttttgttcctcttattgtatgggtaaagctcataggttaccctctcacggctcaacttctgtttattcacctttagaattcattttcactgacctatggngaccctcccatgttacctcttatgttggctatacatattatgtttccttcattgatgctttctctangtataaatggatatttcctataaagtc

SEQ ID NO: 3895 - DNA, 448 bp, Glycine max
  unsure at all n locations
gggtcttaattataaaaagatagatgcttgtccaaaacactgcatgtnngtattgggagatgatgaanaaagtttggatgcttgtaagcattgtggtacatctagatggaaacccaacaagaagaagaaaatagctgcaaaggttntacgttactttccattgaaaccaagattgcaaagattgttcacatgtcgtaagactgcaaaagatatgagatggcatgttttggaagacaataaagatgggttgtaaggcatccaagagatggagaggcatggaagacantttgattaatccatcctgagttttcttcagatcctcgaaatgttcgtttaggccttgctactgatggttntaatcctgctaggaccttgagttctacctatagcatctggtcnagtttcttaattccatataatcttccaccttggatatgtatgaaccaca

SEQ ID NO: 3896 - DNA, 434 bp, Glycine max
agcttggttaatgggaaggccagatatgggtggagtgacaaaagttatagtttgcttcttaaagtagtgcacgatatgcttctagaggaaaacaagttgcctaaaagttactatcaggccgagaagatactgtatagacatgaatttcaagaaatgcccaagtgccctaggtgtggggtatcacgatacaaagtgaaggatgatgcggagtatattagtcatgaaaactcaaacaagggccccccagtgaaggtgttgttgtatcttcccataattccaaggtttaagcatatgtttgctaatagagacgatgtaaaagaccttacatggcatgcagatggaagaaactgcgatggaatgctccatcatccggctgattcctcccactggaagaagattgatcgtttgtatccagatttcggcatagacgcaag

SEQ ID NO: 3897 - DNA, 432 bp, Glycine max
  unsure at all n locations
agcttgccttccaagaatgatattgcggntatcatgtacacaagtggtagtacaggtctgccaaaggtttgtttcttcgtcaagttttgttaaaggtgtccctttctgtgtgtctgtgaatgtataatctcttattcatatttgcgatttgatgcaaagtgcttttgtccacagtcatgcttgtgaataatgattttgggtgataaaatatcaacaagaaccatatcaagacattgtattaatataatgaaaattttcttgtctgcaacattgagaaccaataggatctccctcagctcagttctatgattccctttgatttgacagggtgttatgattactcatggaaacattgtagcaacaacagcagcagttatgacaattattccaaatcttggtagcaaggatgtgtacatggcctacttgcccctt

SEQ ID NO: 3898 - DNA, 416 bp, Glycine max
tccattgttcaatttcgagtgtctcgatatattatgcgcctgaatcggacctccgaatgaaaagttatgaaccattgaatttctcgagagctacctttgttcaatttcgtgcgtctcgatatattatgcgcctgaatcggacctccgagtgaaaagttatgaaccattgaatttctcgagagcttccgatgttcaatttcgagcgtcttgatatactatgcgactgaatctaacctccgagtgaaaagttatgaccatttgaatttctcaagagcttccgttgttcaattttgagcgtctctaactgtgatgcgcctaaatcagacattcgagttgaaaagtatgaccatttgatttctcgagagctttcgatgttcaattttgagcgtctcgatatattatgcgcctgaatctga

SEQ ID NO: 3899 - DNA, 448 bp, Glycine max
  unsure at all n locations
agcttcagtggcttagtgaagatgaagaggtaaaagtgactcaacaggttgaggtgtgtctcaccattgggagatataatgacaaggtgctgtgtgatgtggtcccaatggaagcgacccatgtgctgttaggaagatcgtggcagtatgataccaaggcagtgcatgatggcttcaccaacaacatctctttcaagcaagctgacaagaagattgttctcaaaccgttatctcctcaagaggtttgtgaggatcagataaaaatgagagaaaagaaaaagagtgagacacttgagaggaaaaagagtgagacacttgagaaggaaaagtgaggaaagaaaaagagtgaaacacttgagagggaaaagagagaaaacaaaaagagtgaaacacttgagggcaaacagctntatttagcaacaaaaagggaggtgaggagggtgctttg

SEQ ID NO: 3900 - DNA, 319 bp, Glycine max
  unsure at all n locations
agcttccagatccatttcaggctgcgctagcatcagcactggcattatctgttggcgttttggcgccaccgatagctgctgtgtttataaggaatcacaagattagaatgggagttgttgctgctgcggttagcttggcattgttggtgtttggaggagtaggggcagttcttggaaaaactccggtgacaaggtcttgtcctatggttctggttggaggttgcatggctatggacataacattnggcctcaccaaattgatcggctctgttgatctatgaatgtgattgtttactagtcattcaagtacactcccata

SEQ ID NO: 3901 - DNA, 442 bp, Glycine max
  unsure at all n locations
tgttaaccatttcaagcaactgcatgagagtgagcacacganaatgatgaaccagatagagtctgctagggggagcaggagggtgaagttggtggccaagtattctatgaaaatggaaaagtataagaaggctgcaagtgatattctcactcccaaagtggggtacggtttggcggatgagctcaaacgggctggtttttgggttcgaacagtgtcggataagccacaagctgcagatcaagcactgcanagccacattgtggatatcatggatcatangcgggttgagtgtgtggtccttgtgtctgatgattcctgatttgttgatgtgataaacgaagcaaagatgcgatgtctgaagacgggtgtcattggggatattgatgaacgtttcttgaagaggactgctgatactgcattntcttgggaggaaattctgatg

SEQ ID NO: 3902 - DNA, 446 bp, Glycine max
  unsure at all n locations
agcttctcccataagttaaaattagctttcttaggagttaaataagagattttatatatattagtttatggataaactaattttaacttatgagggaagattaatccattttatctttctattttgttattttataagtgctcattgcgaagcttacccaaacagagccatatctaaaatctaatgcattctctttgacatgtntaatctcaacttctggctcacttgcgtttctcaatttttgcagtgtagctcatccatacctgcttgccgataatcgccattaccctttttatctttggaggaaagttatcatggctcactggccaattaaatatcttttagtcccagtttatatatgctcatggctctctatgatccacatgttgggttagtacatagacatactatgcattcgtgtttgattcaactgcttgtgggattat

SEQ ID NO: 3903 - DNA, 439 bp, Glycine max
ttctttgagcaaagcaaaggcttgctcttgtttttcatcccaggtaaatgccacattcttcttcaccaactcattgagaggtgatgcaattgtagagaaagtatgaacgaaccttctatagaagcttgctaacccatggaagctcctaatatctcctacactatttggggtgggccattcttggatggccttgattttctcagggtccacttggatcccatttctaccaactacaaaacctaagaaaactatattatctacacaaaagttgcatttctctatatttgcatagagggtgtttttcctaaggattgaaagaacttgcctgagatgtcctaagtgatcatctaggctcctactgtacactaaaatatcatcaaaataaacaactacaaatctacctatgaaatcccttaaaacattatgcataagcctcata

SEQ ID NO: 3904 - DNA, 380 bp, Glycine max
  unsure at all n locations
ntacaagagattctaacaatgtcgtgaaatccctgtttatgcacctctngccagcatttttctccagatcccatattctcatgacctcattcttcaagtccagttgggcattaagagagatgagatgattggaacccttgccatctttggtgtccaacctctccttagattacttagggcacaaaccgcatcccttggaagtcctgcttttatgtacaaattggccgcaatagaataagtattccagtccatgacaatgtttggctgagtctccatctctttcaatactctttccactccaccaaaatcagacctcacaccataagaaattatacagatcctggtactgaagttgtctggcaagacttgtgtttgtttca

SEQ ID NO: 3905 - DNA, 438 bp, Glycine max
  unsure at all n locations
cttccctaattaanaattctaatttgattntaacccanaacccatgattcctttcaaaatgaattcctaaataattatgcaaattaaacttactgaatagaagcaataagcaataataaataaaagagtttaaggaaagagaaaacgcaaactcagatttatactagttcgaccacacccttgtccttacgtccagtccccaagcaacccacttgagagttccactatcttgcaaaagccctctacaagttctgaaccacacaaggacaacccttcctttgtgttcagattactttacaacaagagaccctcggtctcttaatcccttttcagaaataagatgaagagaagaagaaatctctcttgaaagagatagattgaacaatggaacactcaaaataattccttattgaattgaagtgtattggcaaggaattt

SEQ ID NO: 3906 - DNA, 422 bp, Glycine max
  unsure at all n locations
caatcactacgcatagctccaaactcgaaggtggaggacacatgaacgaaaacacaattcatggggctccgaaaaaggggttgagaatggagaattacactaagcaatcactactcatagctccaaacttgaatgtggaggacacatgaacgataacgcaattcatggggctccgacaagaatgagaatggagaattgcactacgcaatcactacgcatagctccaaacgcgaaggtggaggacacatgaatgaaaacgcaattcatggggctccgaaaagattgagaatggagaattgcactaagcaatcactacgcatagctncatactcgaaggtggaggacacatgaatgaaaacgcaattcatgcggcttcgaaaagattcgaatggagaattgactaagcaatcactacgcatagc

SEQ ID NO: 3907 - DNA, 286 bp, Glycine max
cgacaatcactcttttactctgacgtctgattgagtcctcgaatatgtctagacgctcgaacttgaataccgaagctctgagcacattcgaacgacaataactttttactcggatgtctgactgaatcccgtaatatatcaagacgctcgaaattgattatcaaagctttgagcaaattcaatcgacatataacttctactcggatgtccgattgaatcccgtatatattgagatgctcgaaatcgaatactcaacctctgatcaaattccaacgacaattacttt

SEQ ID NO: 3908 - DNA, 412 bp, Glycine max
tcagcttgatcttctcaatataggacatgcgtgatggccgttgacactataaccacttatagtgccatatgttggatagtcattaatggtacaaaaaaccattgcacgcaacctaaaggtatgctggagattcccatcccacacatctaccccatcttcccacaatgtggtcaagtcttcgatcaacggagtcagatacacgcctatattgatgacgacatgaccaagagcatgggcaatgatccacttgtaggacttggatgacctatgacaatggctagagcaaggaaagccaaggaagctcttcaaaaagtgttgtccatactatctgaatacaagcccaagtttcaaggagaaaagaccaaggttgtgagttgattatggcccatatggaggaggactaaatgactcc

SEQ ID NO: 3909 - DNA, 382 bp, Glycine max
  unsure at all n locations
ctgttgaattacctttctagttggaaagtcagacgctatagaacctaagataaccagtttggttgacaccattactcttgtgtttaaaacatttgtattttgcacagatgaaaattgaaccttcttttctctaggtcaagtatctntaatgccatggttggaattgcactaagtgcttcctttgttaagctagtttcgtggtatgacaatgagtgaggatacactaatgtgtgcantttgtgtatgtagagtgcaaaaatntctgttcatgcaaacctttaattgataactttgaatggtttttgttgcagcaaccgagtattggaccttatagagcacatggcattggttggagctcanaatggaacaccattagtgtatg

SEQ ID NO: 3910 - DNA, 450 bp, Glycine max
  unsure at all n locations
caagctctatcctatcttgcaattncctttgaactatttccaccttcacttctccttgtatactctttaccatcattggaggctttctttcataaactacctcaaatggcgtaatgcctattgaatcttgataggtggtattgaaccaagattcagcccacggaagccaaatgacccatccctttggctaatccatgataaagcacctcaagtatgtttccaggcaccgattagtgacttcgatttgacaatcagtttgaggatgataggttgtgctcatcttgagtgttgtaccttgtagtttgaagaattctttccagaacagactcataaacaatggatcacaatcactcacaatagaattgggtaccccatgaagcctaatcacctctcttacaaatatttcagctatgtcttgtattgngtaagggtgtcttaatggaatgaaat

SEQ ID NO: 3911 - DNA, 419 bp, Glycine max
agcttgtgaaatcaatggaatctaagattccgtttgacccaagtcgttcaattctgttcttagaaatgtgacctaaacgcttatgccataatgctcatgagtttgtattatcaattctacgcttagtaccacgtaattgcgcattaaaggattcaacatacgaaactacagtattaagtaaatatagattatcataagccaagagtgaaccagttccaacaatacctgaattgaaagacaacctaaacacattgtttccaaatgaacacaaataacccaatttgtctgaataagaaactgaaaccaaattccgtctaaatgacagcacaacaaaagtgtctttcaaatccaaataaaaattagtacataataataatctaaagttccctatagcttccacttccaccgatttaccatct

SEQ ID NO: 3912 - DNA, 439 bp, Glycine max
agcttcaaccaaggggagatggaccatttcaagtgcttgaaagaatcaatgacaatgcttacaaagttgagctgcccgatgagtataatgttagttccaccttcaatgtctctgatttatctctttttgatgcagatggagaatccgatttgaggacaaatccttctcaagagggagagaatgatgaggacatgaccaagagcaagggcaaggatccacttgaaggacttggaggacctatgacaagggctagagcaaggaaagccaaggaagttcttcaacaagtgctgtccatactatttgaatacaagcccaagtttcaaggagaaaagtccaaggttgtgagttgtatcatggcccaaatggaggaggactaaatgacaccactttgtctcaattttagagtgcttagtttgtctaaataatggcccaatccttg

SEQ ID NO: 3913 - DNA, 447 bp, Glycine max
  unsure at all n locations
gacactatgaaactcagcttacacaggcaagtgtttcgtcttaattccaaatcacagatatgtcataaattgattntgcaagtcatttcccatcaaatcaaagataatgtgcataatcatcatgggtcaatgggactttccaaggtcgaactttgtaggaaattggttttggttgctctggtctttcccccttcttttttgtgtgagtaggagagcaggtacaaagatttggctagtaacttanacgggcgatcacttcctatcccctcatgtcttaaccaagttactattgttccccctccttcttaatgtttacaacaactctgtacatggttcagacattgtttgttctaaagaacttgtttttccttttctattttccttttgctcttttctattttgtttgatagattttntttggttcccttttctttctttctttctttc

SEQ ID NO: 3914 - DNA, 435 bp, Glycine max
agcttgtaagaagtatagcaatatgggagaatgtttttggttgattgataaggacttagtgatgcaatcctaccccgcaagggcattggctagaagactccaagtagattgggctagagatccaaggaaaggccctagggttctcatgagccttagggtagatttcgagcccatgggctaagtatgagcccgcttatctttgtaaatattagaataggtttttccttcgtctaggccttgtattttggccattctagtagtatagggttttagccttgtatttcggggcattttgagttgtctttgtaataaggacttttttttttattttcatgttttttgtcatgggggtgagcttagctattatagggggtgtgtagctaagctctagcttctcatctcaaggaggtgagcttagctattagagaggtatgc

SEQ ID NO: 3915 - DNA, 403 bp, Glycine max
  unsure at all n locations
ttcaaatgacaataactgttgactcggatgtccgattgagtcattttataatttgagacgctcaaaagtgaatgcaagagctcttaccaaattcaaatgccaatatacttttactcggacgtgcgattgagtcccgtaatatatgtagatgctcaaaattgaaaacagaagctctgagcaaattcaaacgacaatagctntggactcggatatncgatagagtcatttaataattcgagacgctcaaaattgaatacagaagctgtaatcaaattcaaatgacaataactttagactcgaatgtccgattgagtcattttataatttgagacgctcaaaattgaatgcagacactctaaccatattcagatgacaataacttttgactcggatgtccgattga

SEQ ID NO: 3916 - DNA, 425 bp, Glycine max
  unsure at all n locations
agcttgcttcagtataataggaagcaccaatataaatatgttgatgcctactattgatatatagcattgaccatacatgaaactagcgagagagaatacaaactgttgataatagtacactccataggtagtgatgctgtgtaaaccactacaacaagaaagcactttaaattatagtattacgtagaaatttctatggttgtgttgatcatgctcgccctcactttanattggcaattggattgtgccacattgaagcttttcacagttctgccatcactggtggtgacttgaaaagagagggattgcccattgaggtatgagtttctctgtcaattttgcccccaatttcttgacatgggtttccaccctggtttggaccctttgatggacactgaattcatatcaccagcttcacccacatt

SEQ ID NO: 3917 - DNA, 461 bp, Glycine max
  unsure at all n locations
tgcttctacatggagttcatcatccattgccctaacccaacaaacatctttatcttgggaataacatgtagaatagttgttccagataaagtagtagtaagagaaacgtgtccaaaacaggcggcagatcatgagcgagaagggacaaagtaggattgttcctgacataaactttacctggttagcaaggaagatgcagacaagtcagttcaagcacgcagcananatgcacaaatgctcaaggttagaaaaggcagaggctaatgatttttaggtaatgatgcaatcctccctatgaagggaccaatcactagaaccatgagcaagaggctccaagaagatttgactagagctgctgaagaaggccctanggttctcatgaaccttannggtagattctgagcccatgggccaaggttgggtccatntatctttgtacatattagactangatgtcatta

SEQ ID NO: 3918 - DNA, 435 bp, Glycine max
  unsure at all n locations
tcgcacttgataatggagacacatgaacagcgctaggcaacgacattcatggcgctccgaacaaaggtggagtatggaggattgccttgagggtccgcacttangcaatcatgaaactaagctccaaactcgaaagtggaggacacatgaacaaccctaagcaataatattcatgtggctccgaaaaaggatgagaatggaggattgccttgagggtcctctcttaggcaatcatggaacacagctccaaactcgaaaacggaggacacatgaatganaccgcaattcattcacgtggctccggaacaggatgagaatggaggattgccttgagggtcctctcttatgcaatcatggaacacagctccaatcatggaacacagctccaaactcgagaacggaggacacatgaatgacaacgcaattcattcacgt

SEQ ID NO: 3919 - DNA, 394 bp, Glycine max
  unsure at all n locations
cgtaagatggacttgaggaaggttactctacctgtcattgtcaacatataagcctaccacgagctctagttactattgactttatcgaggataaaatcaaatgtatgattagtaaatttcttgtcaagaattgaaatccgggtacttatctaagtcctcgatttacttaaatccacttggcaccactatatcctacttgacttgccagctagcattattatataaaaagatgcgggagttttcatcactctctttagctccagaactatcacaaaacaatntaagggtcaacttgatggcatctatctaatccgtcgaggcttctacaaatagcagaatatcattcgcagagacaaggtatgaaattatgagccccctttgtttaactggatgg

SEQ ID NO: 3920 - DNA, 400 bp, Glycine max
  unsure at all n locations
tgtaggcctaggatcttcttcatcaatggattcctttgctttttagaagatgaatggcagtggaatggagaaggaagagagagaggagatgccacttcaaggagaagatgagtctagaagaagctcaccaccatagaaggccatggctaagagcttggaggaagaagaagatgaatgaagggagaggaagagaagagcacgaaattttatgctctaaaagagctctgaaatctgaagtttaattttcaaatgatcaaagttgcaaaaaatgcacacacatgacctctatttatagcctaagtgtcacacaaaattggaggaaaatttgaatttcaattcaaatttcacttgaatttgaaattgaatttgtggagccaaattntcactaattatgattagt

SEQ ID NO: 3921 - DNA, 385 bp, Glycine max
agcttcatttctttttcactcatgtgtccaagtctttgatgccacacggttgaattattgacaacctcagtaattgttatcatatcctcatctgcaattatgtaaagagatcattgcttctttccatgagccacaacgagattgccttttgttaccttccaagctccatctccaaaagcggtgtaatgccccccatcatccaactgccctatagatattaaatttctctttaaggcaagaatatgtctgacattatgcaatgtccatagggatccactggaagtcttgatgtcaatatcacctcttccgacaatgtcaagagaatttccatctacaagggaaacttctccaaatcttctagacatatagttagacaataaatctt

SEQ ID NO: 3922 - DNA, 424 bp, Glycine max
  unsure at all n locations
gattcttaagttacctgccgcatgcaagcttggcatccatacctaatgaggattttatgtgttcttaanactggtctctattatttgcttccaaagtttcatggccttgcaggtgaagacncgcacaaacatttgaaagaatttcacattgtctgctccaccatgaaacccccagatgtccaagaggatcacatatttctgaaggcttttcctcattcattacagggagtggcaaaggactggttgtattaccttgctccaggtccatcacgagctgggatgaccttaagagagtattcttagaaaaaattntccctgccttcaggaccacacccatcaggaaggatatcttacgtattacacaactcactggagagagcctgtatgagtactgggagagacttaagaaactatgtgccagctt

SEQ ID NO: 3923 - DNA, 418 bp, Glycine max
tcaacattcaatttcgtgcgtctcgatatgttacgggactttatcttacatccgagtaaaaagttatggtcgtttgtattggctcagagcttcaactttcaatttcaagcgtctcgatatgttacgggactcaatcagacatccgagtaaaaagttatggtcgtttgaattggctgagagctgtaacattcaatttcgagcgtctcgatatgttacgggactcaatcagacatccgagtaaaaagttatggacgtttgaattggctcagagcttcaacattcaatttcgagcgtctcgatatgttacgggactcaatcagacatccgagtaaaaagttatggtcgattgaattaggtcagagattcaacattcaatttcgagcgtcttgatatgttacgggactcaatcatacatccg

SEQ ID NO: 3924 - DNA, 413 bp, Glycine max
agctatgatttcctttgttccggaaacctttcttttctcatgtgcacccaaactcaatctccgggttcgaagacaaccttctttcttcctttgttggcttgtttagcatagcttttatttttcctctcaatttgatctttgactctctcatgaagcttcttcacatagtcccgctttgcttgaccttctttatgcttaaaaacagaaacattaggcataggcaaaagatcaagaagagttagtgggttaaaaccataaacaacttcaaaaggagaacaattagtggtgctatgaacagctctatcgaagcaaattcaacatggggtaaacaagcttcccaagtttttaagttcttcctcaaaactgtcctaagcaaagttcccaaagtcctattaacacacttccgttgccat

SEQ ID NO: 3925 - DNA, 464 bp, Glycine max
  unsure at all n locations
tgtctccttgcaaggaacttcctatggnggggtgttcaatggcatatattaatcccttgggtgaaatgggaagtagtgtctctctctaaggaggatgggggtctaggaatcaaagatatttctaaattcaatacagctctgatgggtagatggatatgggctttatcttctaatcataatcagctgtgggttagaatcttattgtctaaatatggtggatggtcagatcttagcagtgggagggataaatcttggcagtctcattggtggagggacctccgaaagttatatcatcagcctgaattcagtattatccagcagcagatggtttggaaggtgggaggaggggaaaanataaaattctggacagataattggttggnggaagaatataatcttgaacagcaattcactcagctattcctgataatgagcagcaaacaatacatattaacatgggaatc

SEQ ID NO: 3926 - DNA, 451 bp, Glycine max
  unsure at all n locations
gtcacctgcggcatgcaagcttctagacaatggttntgtaagttctccattaccttcttagtcatgggttccatcagtccaagcatgattacttcctattcaccattggttcaaggaattccttaatcattctactaatgtatgtagatgacatcatcctgtctggaccaaattctacctctgtgcaggctattcagacccaattgcaatctatgtttcaattgaagatccttggccctttgaaatatttccttggcttagaaatagctaaatccagcagaggtatctcactcgcctagaaaaaatacattggcatgcaaaccttccaatcttncaatggatcccaacttgaagctcaatcttcatgatggagacttacntcctgatccctcaatgtataagagggntaattggtagaaatggttatctgaccatttcacgtnctgatata

SEQ ID NO: 3927 - DNA, 435 bp, Glycine max
  unsure at all n locations
agcgtagatatggacctgggtgttgcctatttttatcatatcttctgtaatactcatcacctctatcatatctaataatnttcacatttatgtctaattgcccttttacttcattgtagtaaatttctaaggcattcattgcctaagaaatctcaggcagtaagtagacataaccataacgtgaataatcatcaataatggtgataaagtatcattcctttctgaaagaactaacatcaaaaggtccacaaatatcagcatccacaatttcaagaagctgagtgcttcttgtagctcttttctttgtatgttnntgttagtntcccttaatacaacccacacaaatatttagatccataaaatctagataaggaagaatttcattctttattaatcttctcatcctttctctagaaatgtgacctaaacgtttat

SEQ ID NO: 3928 - DNA, 368 bp, Glycine max
  unsure at all n locations
agctntgtgtattttcgtggagcttacagactatgtcgaggaataatacgactaccttgtatgctgtatggtgggcaaaaagagcaccaaaatgagcccccttggataatcggtctacgaccactaatatcaccgtgaaaccgtgggatgatggcagtcctatgatgaaatcgagggacaaatcttcccatatgcgggaaggtatgggaagaggttatagcagactgacaacctctttgtttcatatttaatctgttggcacatgggacattgcacgacgtaccagcggacatctttctgtatatgtggccaatcaaaattctgtcgtaaacgatgaagtgtctttgatacctctgtgtgaccgtcga

SEQ ID NO: 3929 - DNA, 417 bp, Glycine max
ctcagcttttatttagctgatgaaataattcgggctcttttgcactcgtctaatgacaatagcatcatttctagcactaaattgttgggagttggaagtcatcttctcaattaaattcttggcttcagtaggggtcatgtctcctagggctccaccactggcagcatctatcatgcttctctccatgttaccaagtccttcataaaaatattggagaaaaagctgctccgaaatctggtggtgagggcaactggcacatagtttttttgaatctctcccagtattcatataggctctctccactgagtttcctaatgcttgaaatatcctttctgatggtcgtggtcctagaagcaggaaagaatttttctaagaatactctcttgaggtcatcccagctggtgatggaccgtggag

SEQ ID NO: 3930 - DNA, 416 bp, Glycine max
tagggatggaacacttacttgttggtgatgaataaaagctcatatacggaatcaaaaaatgcgaaaaaggatgaccctagggctgcaaactcgtcaatcccgtgggtatggcttttgaaagggggggaaaagaagtttttgaatgcaaaaacgccccccctttcgtcattcttataatttggtgcaggggtggctctatctgatcctgacactggttaaggaatgatcaagatgaagaagaacataactcatggcttttacttggtaaaggggagatcaggtcatgccatggaagactatcttgttgctcaattcaagctagttgacgacaatgaattgggtttatttgcaatatttgatggccactcacgctacagtgtacctgattactcgatgtctcattagcttgataatat

SEQ ID NO: 3931 - DNA, 301 bp, Glycine max
tcggacatccgtgtgaaaagttatgacgatctgaatttctcaagatcttccgttgttcaatttcgagcttctcgacatattatgcacccgaatcggatatccttgtgaaaagttatgactatttgaattttccgagaatttccgatgtttaatttcgagcgtatcgatatattataagcttgaatcggacatccgtgtgaaaatttatgaccatttgaatttctcaagagcttccgctgttcaatttcgagcttctcgatatgtgatttgcctgaatctgacatccgcgtgaaaagtatac

SEQ ID NO: 3932 - DNA, 293 bp, Glycine max
gctatgcttaacaagccaacaaagggagaaagaaggttgtcttccaacccggagattgggtttgggtgcacatgagaaaagaaaggtttccggaacaaaggaaatcaaagcttccaccaaggggagatggaccatttcaagtgcttgaaagaatcaatgacaatgcttacaaagttgagctgtccggtgagtataatgttagctccaccctcaatgtctctgatttatctctttttgatgcagatggagaatccgatttgaggacaaatccttctaagagggagagaatgatg

SEQ ID NO: 3933 - DNA, 415 bp, Glycine max
  unsure at all n locations
tcaagaaaatgaactntgttagataaattgtctatgtttctgttttgtggagtactcgtgttcaaaagttttcagtcagatatttctcagagacctgattctcattgtttcataactctcaattttctgggttttctattctgactgtcttttgatatgattgtgttgcttgcaggaaaaagttttgggctcatctgatcctgattctggtaaaggaaagagcaagatgaagaagaacataactcatggctttcacttggtaaaggggagatcaggtcatgccatggaagactatcttgttgctcaattcaagcaagttgacgacaatgaattgngtttatttgtcaatattgatggccactcangtcacagtgtacctgattacttgaagtctcatttgttngataatatcttg

SEQ ID NO: 3934 - DNA, 358 bp, Glycine max
  unsure at all n locations
tgccgcatgcaagcttctctaaaaacccttaatctctctatgtatacattcataggntnttgtctgttaatcctatgagcaaatcgaggcttcagctgcttgatgtttcttccatgctcattgcttcgtaagcttttgcttttaactcttacaatggtttcctctccttaatctattgaagcatcacagattcacagctgcgttcttttctaatatgtaggaagtatgaggaagttaatccacccggtgttgacaaattctatagcatcactaataacacttatgaaaaggcagaggtaagtaaatatgtcggtccgttattcttctttttttgcttcgctattttccacttacttgg

SEQ ID NO: 3935 - DNA, 444 bp, Glycine max
  unsure at all n locations
tgccgcatgcaagcttgtccaaaatgcanacaataataattgttttaacggatatccaattgagtattgtaatatatcgagacgcttgtaatggaaaacagaagctcgtagaaaatgcaaatcgcaataacttttaactcggatgatcgattgagtccccgaatatatcgagacactcgaaattgaaagcagaagctctgagcaaattcaaacgacaataacttttgactcggatatccgattgagtcatttaataattcgagacgctcaaaattgaatacagaagctctatgcaaattcaaatgacaantaactttgactcggatgtccgattgagtcattttataatttgagacgctcanaattgaatgcaggagctcttaccaaattcaaatgacaataactntntactcggatgtccgcatgagtcccgtaatatatcta

SEQ ID NO: 3936 - DNA, 418 bp, Glycine max
  unsure at all n locations
tacttgcggagattcctttatgggaaagaccgataccagctatgttgattcattgtgatagtactgcgactattgaataaattgagaatcgttattacaatggtaagaaatgacagatacgtcgtaagcacaacatttttagagaattactctcaacaggagctgttagagtggatcacgtacgcactgatgataatttagcagatcctttgaccaaaggattagctagagagaaattcaataacacttctaaaagaatgagactattgcccttactatgatgatcattcataatggtagcccgacctaaatgattggagatcccaagaactatggtcaatgggtaataaccaagtacaaagtgatatgagatgaacatngctgtataagtgaaagcagcatgattcctgaagtaaca

SEQ ID NO: 3937 - DNA, 449 bp, Glycine max
  unsure at all n locations
atggcgggaatggaatggaatgtgttattggggtgtcgcaactgcattcatggacagaagggaaagatggaacagacctgaagtagaattagtggagatcatgcatttaatctgggtagctgaagctggatcaaaatctgcctgaacgtncgcgtggaggttgatggattcgcccaagtacgaaaaatgcatcgtgaaggaggcgtaattggtgataacaggccccaaagtccgaagccactctacgcccaagacgacctcggctccgctcaggggtagtacccttagcgtcactataaacgtatgtccttgtatacagagctgtgtattggcacatagctgattgcactccattactgaaccattacctaccatcactctaagaggcatggngtcttcaacggccaagttcatgaattatcaacgcgaggctgaatgataatatgagt

SEQ ID NO: 3938 - DNA, 454 bp, Glycine max
taaacatgagagcttgcttgaggggtcagaattctatttgactaattgtcacctttgaggaacctgattagctacattaattaagtttttcttcttaatcacgttttttttcatttgaaaaactctaacataagaatttactcgaggagtccaaacctagttccacttgaaatagttggttcgaaagtttttcattcaaaaagtaaaaatgaatgtttccttgtactaaacaaacccttaatcttcccccaaaatttcaacatgaattcacatatcagtaaatataatacatgcataccagatagaggtcaagatagtcaagttgcaattcctgtaatggtttatccaatggctttggcacatcttctggtgcatgatctgaacaccctaaaatatagccaacaaatcataggatcctttcattcagcaccaaacttgtccaaacacatacaat

SEQ ID NO: 3939 - DNA, 331 bp, Glycine max
  unsure at all n locations
ttaatctctctatgttatacattcatacgnttttgtgtgttaatcctatgagcaattcgacgcttcagttgctcgatggttcttccatgctcattgcttcgtaagcttatgcttttaacttttacaacggcgtcctctacttaatctattgaagcatcacagattcacagctgcgttcttttctaatatgtacgaagtatgatgaagttaatccacccggtgttgacaacatctatagcatcactaataacacttatgaagaggcagaggtaagaaaatatgttgctncgttattcttctttttatgcttcgatattttccacttacttgg

SEQ ID NO: 3940 - DNA, 266 bp, Glycine max
  unsure at all n locations
agcttggtcttattcgtgcatttgtgcgcaattcataattgccggnacaccacttcaaaacagtgtgtcacaaaggcggaatagaactttaatggatatggctaagagtatgttaatcaattaaactttatctgtatccttgcggatgtataccttgaaaactgccacgtagttgttgaacagggttcctagtaaggtagttccaaaaacaccttttgaactatggacaaataggatacctagtataccgcacctgcatgtttggg

SEQ ID NO: 3941 - DNA, 331 bp, Glycine max
tcggtattctatttcgagcgtctcgacatattacgtgactctttccgacatccgagtaaaaagttattgtcgattgaatttgctcataactaccgcattcaattgcgagtgtctcgacatattacggtactcaatcgcacatccgagtaaaaagttattgtcgtctgaatttgctcagagcttccgtattcaatttcgagcgtctcgagatattacgtgactcaatccgacatccgagtcaaaaggtattgtcgttagaatttgctcagagcttcggtattctatttcaagcgcctcgagatattacgtgactcaatccgacatccgagtc

SEQ ID NO: 3942 - DNA, 388 bp, Glycine max
tttgtgcaagaaccagtccatccaatggaatgatgactgtcaagtggcattcggaaggatcaagcaatgccttatgaatcctcctgtccttttgccgttggtgcccgggagacctcttatcctatacatgacggtgttggatgaatcgatggggtgtatgctggggcagcatgacgattccagaaagagggaacgagttgtctactacttgagcaaaaagttccccgcctgtgagatgaattactctctgcttgaaaagacgtgttatgtcttggtatgggtagcccattgtctaaggcagtacatcctaagccacaccacttggttggtatccaagatggacccagtcaagtacattttcgagaaacccactctcaccagatggact

SEQ ID NO: 3943 - DNA, 437 bp, Glycine max
  unsure at all n locations
ngactactntggactgaacatattctcggatgaaataatgatcaatgtctatatgctnggatcgttcatgatgagcagggtttgaagcaagacttatagcagatttattatcacaaaatagtatcacaaagggcacatcaacttcatagtaaagaagtaatttgcttaaccaaacaatttcactagtaacagaagacaaggcatgatattcagcttcaatggatgattttcaaacaatgggttgtttcttataatgccaagaaagaaggttgtttcccataaagacacaaaagccagaagtggatcttctggtatcaacacagttggcccaatcagcatcaacaaaggcagtgaggttgagagagttctgagcanggaaaaacaaaccttgtccaggagcaaatttgatatactgtagaagatgataaacaacatgt

SEQ ID NO: 3944 - DNA, 402 bp, Glycine max
  unsure at all n locations
nntgatttccttgttccggagacctttcttttctcatgtgcacccaaacccaatctccgggttcgaagacaaccttctttctccctttgttggcttgtttagcatagcttttatttttcctctcaatttgatctttgactctctcatgaagcttcttcacatagtccgcctttgcttgaccttctttatgcttaaaaacagaaacattatgcataggcaaaagatcaagaggagttagtgggttaaaaccataaacaacttcaaaaggagaacaattagtggtgctatgaacagctctattgtaagcaaattcaacatggggtaaacaagcttcccaagtttttaagttcttcctcaaaactgtcctaagcaaagttcccaaagtcctattaacaacttccg

SEQ ID NO: 3945 - DNA, 384 bp, Glycine max
  unsure at all n locations
agcttacaatannatgatacgctcgaattattatcggaaactctcgagaaatttaaatgggcataacttttcccacggatgtccgattcgggtgcataatatgtcgagagccttcaaattcaacaacagaagctcttgagaaattcaaatggtcataacttttcaaatgtatgtctgattcacgcttataatatatcgatacgctcgaaattaaacatcgaaaactctcgagaaattcaaatggtcataacttttcacacgaatgtccgattcgggcgcataatatgtcgagaggctcgaaattgaacaacagaagctcttgagaaattcaaatggtcataacttttaacacggatgttcgattcacgcttattatatatcgat

SEQ ID NO: 3946 - DNA, 460 bp, Glycine max
  unsure at all n locations
tacggacactttaatctaagctataatgttcttaagaaatagctaactaatgccctcatacttgcgttgccaaactttcaaaaatcttttgaaattgagtgtgatgcttcaaatgttgggattggggctgtgttgatgcaagaaggccatccaattgcttattttattgaaaagttaagtggtcctacccttaactattcaacttatgataatgagttgtatgccttagtacgggctttgaaaacatggcaacactacctttatcccaaggaatntgtcattcatagtgaccatgagtccctcaaatatatcaaggggcaaggaaagcttaacaaaaggcatgctaagtgtgtggaattcctatagcaattcccttatgttatcaaacataaaaagggaacaggtaatattgtagccgatgctctttctcngcgtcatgcattactttctatgcttgaac

SEQ ID NO: 3947 - DNA, 237 bp, Glycine max
agcttctagatgatttatgtctgcgaatcggtcatcctgcgagatgttatgaccatctgtagttctcgagtgctcacgctgtaaattgtcagcggctccacattttatgttctccaataaacatcagagcgagctgtcatgaccattctgatttgctgagagcttccgtatttcaatttccagcgtctagatgacttatgtcacccactcctacatctcattgaaatgccttgacca

SEQ ID NO: 3948 - DNA, 453 bp, Glycine max
  unsure at all n locations
tgacaaataattntcttaggtagtgtgcaataccccaattattagcttcctgtaaagcactaataaattcttgatcactacctaggaagccttttgcaaaacatgcttccctaaatgtatgatataccagaccgttgactgttctaatgtcactgtaagactgtgcacctttggcagtggatagcatcattctaaggtaaaacagttcaccagctgaaggtgggacccacatgagtctgcctattgtattcccttgttttcttggttgccaacatcttttgcgggcaacataaacaaatcttgagatatattgatgatatgtaagatcccatccataagaatatattntgttagaatgcatccaagctgtgaacatggattcttttattggtgtttttgatagaacttcacctacttgtngatcatctgtccagtaaacatgtntgttgattt

SEQ ID NO: 3949 - DNA, 371 bp, Glycine max
gactaagtgctcaccaacactagatattaatcccttatttggtatcatgtaaacctgttcttctagatcaccattcatgaacgccattttttcatccatgtgatgcagctcaagatcaaaatgagctactaatgccaaaattactcgaagagagtctttcttagatacaggggaaaaggtctctctgtaatcgattccttctctttgagtgaatcctttagcaacaagtcttgccgtatgtctctcaatgtggccttctgagtctgtctttgtttagaagacccatctacatccgatggcgtggacaccagcatgcaactcaacgagatctcaaactcggttagatgccatagaatccatctcatccctca

SEQ ID NO: 3950 - DNA, 392 bp, Glycine max
  unsure at all n locations
tcaaaccacagcaacacanaatctaggtatccaaaacccctcaatttaatggattttcaaggtttgagaagtgaaattgagaatgagctaaatttgaagcaaactctcacctcacacaagtctataacatcaatttaaacttgttcaaactggatttacgcctaaaatttcaccgaatcaaaatttgactcctcaacacccaaatttaccctagaaatgactctttgttcactttggtcatttgtttttctctctagcacagcccanactttctcattgaaattctgataccaggggacagatgtcgtaccggatgtcacgacatcacgcttcagaacatgcagattatatgtgtccgtatgaccagattaaacaagttaataacacaagag

SEQ ID NO: 3951 - DNA, 417 bp, Glycine max
  unsure at all n locations
atacggacacttaaaactaagcttaagttgctnggatagcaacttgtttcgggccagcaaatcgtcctgtgatgaaagctccagcaggcttcttttggttgggatgtgtgctctatcacacaagattgcatggtcactagcagccatattctcaatcaattccatggcttcttcaggggtcttcaattttatttttccccctgtagaagcatctaaaagctgcttggattgtggccttaccccgtcaatgaaaatattgagctggatcggttctgaaaatccatgagtaggcgtctttcttagttacccacgaaatctttccaaagcctcactcaagggctcgtctggaaattgatgaaagaatgagatggcagcttttcctttagtagtcttggactctgggaagtatttcttcaa

SEQ ID NO: 3952 - DNA, 465 bp, Glycine max
  unsure at all n locations
agcttgagagggttatggaacgaacgatagattgtcttatccaaaatanactgtatgtagatagctgaagtcttctttttggctcaaaacgatcaattgctgtgataagtcccttaactcctgcctgacaaagatcttgaaacctcgggccacttgcaaaatcttgaaaatatttgttgatcacgaacaatacaagccggagattgtgctgcaaacgatatcaccatgatttcttaatctcagtataactattactcattccaaagaatagcaacaaacacagcaacaattaatccattcatatccaaagagacagagaaagagtagtaaaaggaatggagatgtaacatatcactgatcttcgaaggcttcttataagcaaatctaanataagagttgaacattccatgatacctttatgaagttgtttctcgcagctcgaccaacctctatagcttttcttac

SEQ ID NO: 3953 - DNA, 378 bp, Glycine max
  unsure at all n locations
tgtgcattcaatatcctgataagggtgttccatatgttctcaagactgtactaatacatttgctgcccaagtttcatggtcttgcaggtgaagatccttataagcatcttaaggagttccgtattgtttgttccaccatgaagccccctgatgtccaagaagatcatatctttctaaaggcttttcctcattctctggagggagtggcaaaagattggctatactaccttgctcctaggtctattttcaactgngatgaccttaatagggtgttcttggagaaattcttccctgcatctaggaccactgccatcagaaaagacattntatgcatcangcaacttagtggagaaaacttgtatgagtactgngaaagat

SEQ ID NO: 3954 - DNA, 417 bp, Glycine max
  unsure at all n locations
cctgccgcatcaagcttctaaactttatacaagaatgaagctcttataccacttgttggacaagtttcctcaaatatcttaagaagggggggggggttgaattaagatatcacaaactatttccccaattaaaattttatttcactttctattcaagttataaattcccttaataatgaacttcttaaatactgattctaatggaacaatttgaatatgaatataagacaatcataaataaacgagtttaaggcaagagaaaatgcaaactcatatttatactggttccggcacacccttgtgcctacctccagtcccaagcaacccgcttgagagttccactatcttgtaaacacctattacaagatctgaaccacacaacgacaaccctctcttttnttcacatttctttacaac

SEQ ID NO: 3955 - DNA, 478 bp, Glycine max
  unsure at all n locations
cactatgaatactaaccttataccgatatgggctcaaaacggcagcaggtatcttcattttctgagtaagcggtctccatggtttgttcatcaattcagtgggctgaacaaaatcatcctctctttcattgacaaaaccaccttcctttggccatatagcattgccatagccataggtgccctttgttcaaagagccacctatcatgatcaaaatctccagtttggctcctcaccagtgctgacttcgttgacttcatcatggacaatctcctctacattctagacattccacttggtggaggaagtagaaggggatgcccactatctatagccacttcatctagctctgtgttctgatatgggtccgcgcatcctgggcatataccacctnctggtcttactgcatttatataacaatctctgcatatcttaaaatgacactcacatggaaaaatatcatcacacagttcatcgctc

SEQ ID NO: 3956 - DNA, 393 bp, Glycine max
  unsure at all n locations
caaaatagtgatatttatattactcaattgtaagactatatttgagttctattcaactcgaccatcaacacattggtaaatattttacttaaatgggttcagtagatgtttagtcttctaatatttcaaaacttagattttaatccttgaataagagcttaactagtcaagtctcaacttcttttttgttaaaattntagtctttcaacaaaagcttgaccagatccttaaactttntaaaaattatattctaaatgattaaatagaagtttaaatctcattattttatttatttatctatctaataagaggttagaagttaaaaattaaaatcttaaaaaccttgatgaatactttgtgttcatagaatacagacctttaacaaaaaagaaa

SEQ ID NO: 3957 - DNA, 419 bp, Glycine max
actaagcttgaggtccactagatgccttagttaacctggtgacccatctggccatgaataaaaaatctgcacttgtcgccagactctgtggtttatgctcatttgtcgaccaccacacagacctttgcccttctatgcaacaatctgaagcaattgaacagcctgaagcttatgctgcaaacatctacaacagaccttctcaacctcagcagcaaaatcaaccacaatagaacaattatgacctctccagcaacaggtacaatcatgggtggaggaatcatcctaaccttatatggtcgaatccttcacaacagccgcaacaacaaccttattttcaaaatgttgctggcccaagcagaccatacgttcgtccaccaatccagcagcgacaacagcaacagccgcagaaacagcaaaca

SEQ ID NO: 3958 - DNA, 395 bp, Glycine max
tatgtattcaatttcgagcgtctcgaaatattattcgactcaattggacatccgagtaaaaagctattgacgttagaattttctcacaccttctggattctatttcgagcgactcgatatattacgtgactttatcgaacatgcaagtaaaaagttattggcgctagaatttgctcagagcttctgtattcaatttcgagcgtctcaatatataacgcgaccctattggacatccaagtaaaaagttattgtcgatagaatttgctcacagcttctgtattctatttcgagtgtgtcagtacattatgggactcactcaaatatacgagttgaaaggtgtcatcatttgaatatcctcatagcttcctgactgcatttcgagtgtctcgatgatg

SEQ ID NO: 3959 - DNA, 467 bp, Glycine max
  unsure at all n locations
tctaagcttgatctaacaatggtttatgagtttattgtccaatgtatagagatgtcagactttataaaagctctaatatgaaataacctattcccacccataatgggtataggtaatccatgatctcaaaccaaccgaaattgacccaattagtttggttcaaatatttttagcttaggtcaaacccaacacaacccaatcctgcctgttcaatttacaagccaagtaagatgttttgtttttttaactcgtgacccaacccgtaacatataattaaattcattatatatataattaaattattaaacacaaaacactatatactttttctaacataatgtattaaattaaatcaattatactcttttctgtttcagttgttctttttattgttatcttgatnttgttttctcatgctaatacaatattttatttctatctaaaataaaaatattgtattagcattg

SEQ ID NO: 3960 - DNA, 451 bp, Glycine max
  unsure at all n locations
tgtgctgcaaacatttataatagacccnctcagcagcaattccaacaacatcagactaattatgatctttcaagcaacatatacaatccaggttgcaggaatcatccaaatctgagatgggcaagtcctccacaacaaaaacaacctgtccctcctttccagaatgctgctagtccaaacaagccatatgttcctcctccaatgcagcaacaacagcaacaacaacaaagacaactagaacctgaggctcctcctcaatcttccttagaagagttagtgaggcaaatgaccatccaaaatatgcaattttagcaagagacaagagcctccattcagattctgaanaatcagatggngcagatggctactcagttgaaccaagctcagtcccaaaattctgacaaatggccttcacaaactatgcagaatctgaaaaatgtgagtgtcatca

SEQ ID NO: 3961 - DNA, 408 bp, Glycine max
tctacactctatacaagactgaagctctgatacttcttgttatacaagcggcctcagatatcttaagagggggggttgtattatgatatcacaaactattccctaattgaaaattctattgtgattataacccaaatcccatgattccttttagaatgagttgctagataattattcaaattatacttactgaatagaaccgataagcaatgataaataacagagtttaacggaagaagaagtgcatactgagttttatactggttcggacgcacccttatgcctacgtccagtctccaaacgacccggttgagagttccaccaactcgcaaaaaattctttacatgttgtgaaccacacaaggacaacccttcctttgtgtcagattgattacaacaggagaccctc

SEQ ID NO: 3962 - DNA, 400 bp, Glycine max
  unsure at all n locations
tctanactntatacaagaatgaagctctgatacttcttgttatacaagtggcctgagatatcttaagatggggggttgaattaagatatcacaaactattccctaattaaaaatactattttgattatagcccgaatcccaagattgcttgtacaatgaattactagataattattcaaattagacttactgaatagaaccagtacgcgataataaataaaagagtttaagggaagaagaagtgcaaactcattttatactggttcggtcgcacccttatgcttacgtccagtccccaagcaacccgcttgagagtgccaccaacttgcataagatactttacatgttctgaaccacacaaggacaacccttcctttgtgatcagattgatttacaacaa

SEQ ID NO: 3963 - DNA, 416 bp, Glycine max
acattgtttgaatgacaactattgtagttggacagctatcacatagtttgtccaccttggtatgctttatgttcctattgggtataggtttggtatgctttatgttcctattggctatagctttggtgctagaatattcaatttggaggtcacaagaggaggatcttcatatggtgttggagtttttgctggagaaggtacaagacaagccagtgaaatggagctggagcttgcagagtatcatggccagtatacatgaaattagcgcataaaagctagattggattctgtgactacaaattcatttagcgcttctagctaggtcagcattctagtctggttcaagcttttgacctctagatcaaacttcttaatgcactcaaacaaaccattggtgacctcacaatcaaactcca

SEQ ID NO: 3964 - DNA, 435 bp, Glycine max
agcttaagctctttcaactgcacaaggctcttaatatttgaagagtatccttgtggaaccttcacccgatgaagacactgacaaaaacttatcttctcctttttggacaaagtatggtaggctaggggcaagtaaattttcttcccatcagaccttggatgcaactgtgatcgtatgcccatatcagctagatcttgacgggtattcaagccatccttcgtcttgccttgaatgttaagaagcgtcccaattacactgccacaaacatttttctgcagatgcataacatcaatacaatgtgtaacgtcaagataagaccagtacggaagatcaaagaaaatggacctcttcttccatatgcaactcttacttttatccttcctttgggtcatcccaaatacagtattcaggtgttgaacccgctcatatacctgc

SEQ ID NO: 3965 - DNA, 344 bp, Glycine max
agcttcaacattcaatttcgagcatctcgatgtattacgggactcagtcagacatccgagtaaaaagttattgtcgtttgaattagctcagagcttcaaaattcaatttcgatcgtcttgatatattacgggactcaatcagacatctgagtaaaaagttattgtcgtttgaatttgctgagagcttcaacattccatttcgatcgtcttaatatattacgggactcaatcagacatccgagtaaaaagttattgtcgtttgaattagctctgaggttcagaattcaatttcgagcgtctcaatatattacgggactcaatcagacatccgagaaaaaaatatt

SEQ ID NO: 3966 - DNA, 316 bp, Glycine max
tatcctgacgacggtttttcatatgcactcaagactggactaatacatttgctgtccacgtatcatggtctctcatgcgaagaccctcataataatcttaaggagtttcatactgtgtgtttcaccatgaagccccctgatgcccaggaagatcatatctctctaaaggctcttcctcattctcttgagggagtggcaaaagattggttgcactaccttgcttccaggtccattcttcgctgggatgaccttaatagggtgtttttggagaaattcttccctacatctacgtaccactgttcttataaaagacttt

SEQ ID NO: 3967 - DNA, 397 bp, Glycine max
agcttgagggaaaacttgatgccttggtcatcttactaactcagctcgccatgaatcagaaatctgcacctgttgcaagagtctgtggtctatgttcttctacagatcaccatacagatctttatccttctttgcagcaatctgtagtccatgagcaacctgaagcttatgttgcaaacatttataatagaccccctcagcagcaaaatcaacaacagcagaataattatgacctttcgagcaacaaatacaatccaggttggaggacaatcatccaaatctgagatgggcaagtcctccacaacaacaacagcctgtccatcctttttataatgctgctggtccaagcaagccatatgttcctccttcatgtagcagtagcagcaacaacaacaat

SEQ ID NO: 3968 - DNA, 417 bp, Glycine max
  unsure at all n locations
tgatagganaaacacacttgggaaattcactagtatcttggaattacaagacacaagcttgtgtagcactatccactacaacagcaaaatacattgtagttggaagttgttgtgctaaaagtctctagatgaaacaacaacttgaagactttggggtaacccttgatcccattcctctaaaatgtgacaacataagtgctattaatctgtctaacaatccggtcatgcattctagaactaaacatatagagattagacatcattttctaagagatcatgtatcaaaaggtgattggtgcattgagtttgttgatagtgaacatcaactagctgacatctttattaaacctctttctggagataggttcttctctattagaaatgagctacgtatcctacatggatcgagtatcgaaa

SEQ ID NO: 3969 - DNA, 410 bp, Glycine max
catgcaagcttgcaacagacttcatcaaatgctaatctatatcctcgcatataaatcgctaagcggtttggcaatcacttgaaatgtctattatgaatcgcctattaaaaccatcatgttactagacaagctatctcacgtcctaatgacactttacgtggcaggaggtgagttatttcaacgacattaatctaagatttgcctacctgaatctcccttacaataattttatgccccaacacagtgccttcatgaaccataaaatgacatattttctagttaagcaccaagttggactctacacatctctgcaacaccctttgcaaattccatggatcgcactctatagaagagccatagagatacaaatcatccataaaacattcaatacacttcttcaccatatctaa

SEQ ID NO: 3970 - DNA, 107 bp, Glycine max
agcttcaacatcagaccacgaccagcgtgctggatctacttcacatggacttgatggggcctatgctagttgaaagccttggaggaaagaggtatgcttatgtgtgt

SEQ ID NO: 3971 - DNA, 317 bp, Glycine max
ctttagatcatcacttactccaagcaatacacactgtttgtttttgtcatccacccttgtccctttctgatcacgtacatggacatgacttccgcacccaaatactttaatgatatctactttaggtttgattccactccacatctcttctggagtttcatctttcactgtcaatgtcagacctcttgtgagaacatgaactgcccattttcgcatcttctggccacaaaacctctggcacttgtttgtcacaaagcatgcacccgaccatatttataatggttcgatctttacactccgctacgccgttttgctgt

SEQ ID NO: 3972 - DNA, 388 bp, Glycine max
agtcttgatgcaacatatggagaggttaatgttacaacgagatgatgcgctccatgagaggttggatcaaatggagaatagagatcataatgaagaagaaaggaggagaagagggaatgatggtgttcctagacaaaaccgaattgatggtattaaactcaacattcctccatttaaaggaaagaatgatccggaggcctacttggagtgggagatgaaaatagagcatgttttctcatgccacaactatgaggaggaccagaaggtgaagcttgccgccacggagttttccgactatgctcttgtgtggtggaacaagctacaaaaggagagagcaagaaatgaagagccaatggttgatacatggacggagatgaaaaagatcatg

SEQ ID NO: 3973 - DNA, 432 bp, Glycine max
agcttcttggcagttgtggttggaattctgttctttcttttgaccagcttttctgatccagggacaataaacactgagaatgttgctcactatatttctgcttatccctatgataatattatttattcagagaaagaatgctccacttgcaaaattccaaagtgagtttgctactgttgctgaattttgttgaaatattggttaaatctatctataaaactgtcttaatttttttatgcagacctgctaggtcaaaacactgcagcatttgtgatcgctgtgttgctcgatttgatcatcactgtggatggatggttagcaatctttgaaattctccctctttataagattgcttgcattgttctcatttaatatacatcatgtgtttttttggagttgtgctgaaagttgttttactcacagaacaattgc

SEQ ID NO: 3974 - DNA, 401 bp, Glycine max
tgtagggttacagtctcatgactgtcacgtgcttatgcaacaattgttagtcgtggctatacgagacatcttgccaaacaaagtcaggttagcgataactcgcctgtgcttttttttacatgctatatgtagcaaagacattgatcctgccaagtttgatgagttggaaaatgaggccgcaattatattgtgccacttggagatgtatttatcccctgctttctttgacatcatgattcacttgattgtgcatctggtcacagaaatcaaatgttgtggtcctgtttatctactgtggatgtacccgattgaccgatacatgaagatcttaacagggaatacaaagaatctatattgtccagaagcatctattgttgagaggtacattgtagaagaagcca

SEQ ID NO: 3975 - DNA, 421 bp, Glycine max
  unsure at all n locations
tgtattctgatatggtttgattcacgaaagaagaaatatatgtagtttaaaattgcttctaaatttggtgctaatggtgcaatgttattttggtcaccagatgaacacctatctctcaatggatggtgtcctctatcgcaagccacactttgaacagcttttcaaggaatctggcaatttcagcaagaactttcaaacaagtaagatgtaaccatcctttgttcatcactttgtttactaattttattcaaccgcaatctcattgagtacaaattcatatgcacctgtcactttctattgacttggctaacatgttatgttgttttcatgaccataattgcggcacagcaaagtcttctgataaacaaaatgagacggtatgnttacgatccagnctaaacacatatgttgcattttgagt

SEQ ID NO: 3976 - DNA, 339 bp, Glycine max
  unsure at all n locations
tagtcataaagccctcttctagtaatagacttaagctgaggagattacttttcatacctggtacaaagagtacatcactgatgcaagaatgacctctatcctttgttttgataaggaccttcccaattcctttagcactcaaagttctatcatcagcaaatttgacttgactcttcacagattgatcaaggttgagaaaccactctcttcttcctgtcatatgagttgagcaacctgtgtctatgtacgaacatttatcacttgccccttcaatntgantanntaccattaacagtacctgttcagtgtcatcatcttcttcctgagccaattatgcat

SEQ ID NO: 3977 - DNA, 421 bp, Glycine max
tgcttctacattataggtcatgaaaatgatggttatgctacaattgaaattcttgcccacctactcattaatgaatatgatgatccaatcaatgctatagtcaaatcaacattcccagacttagaccagcaccacaataatcctcaattcttcaaatctagggcaatactagcttcaacaaatgaaacagtagaacagatcaatgattatgtactatccttcattccacgtaattatctcattagttatttaattgacatttctttagtcaaaaatatgcccactgaaattggaattctgcaaaccatatgtgaccacatggaatatctacgctctgattccgttgaccacatccagttggccaacttattgtatcaagcttaaaattagaagtactataatgctcttaacgaacctcgac

SEQ ID NO: 3978 - DNA, 433 bp, Glycine max
agcttcaacaacaacctggaactgatcctttatcagcccacagcagcttagaacccaaccaataatgctgcaaggtcgacacaaattccccttttcagtgaaccagtttttttgcccagtcctccctgcagcagcaacaattagcaaaccaaaacaccaaataaccaaccattgacgaataaacatttcactgcttcaaatttctatctaacaaattcaaaagcccgagctgcaatttctatactctaaacaaaactgtaacctcaatttaaaatcaaatgcactctcaaccgtaaatgcaacaatcagcaaacctaaacgccaaatcaccaacgaacaaacatttcaccgtttcaaatttcaatctgcaacagcaaatagcaattgcagccacaacactacaatttcaaaagcctcactgtaattgctataa

SEQ ID NO: 3979 - DNA, 451 bp, Glycine max
  unsure at all n locations
tgtaatcgattacacatatactgtaatcgattaccagagcagattttcagaanatattctcaacagtcacatctttttatgtggttcttgaatggctatcaaaggcctatatatatgtgacttgagacacgaatttgcgaagagtttttcagaacaaaaaggtcttatcctcttaaaaagcaaaatcgttttatcctcttacaaattccttggccaaattacttgtgattcaataaggaattatttgagtgctcaaattgttcaatctatctctttcaagagagatttcttcttctcttcttcttcattctgaaaagggattaagagaccgagggtctccttgtaaagaattctaaacacaaaggaaggattgtccttgtgtgtctagaacttgtcaaaggagtntacaagatagtggaactctcaagccggttgcttggggactggacgt

SEQ ID NO: 3980 - DNA, 367 bp, Glycine max
  unsure at all n locations
ttacgtgacactatgaatctaagcttaatttttgaaagttttagctttcgcaattaaagtaatatttgagaacaaaaaanaacaatcaaaaataaaaattgttaccttaacttcctcttnctctatttctaattatccaagttttttacttatccatgcataggttttttactgaagggtattattataagtatttatataactatttttttaattaaaattagagttttactctggtgaagtgtgtaatatttattgtctttattgtgcgagttactaaatgaaactctaattttagtttataaacattataaaaaacatttaaggtgctactcttacgttntataaaaagataaatagaatagat

SEQ ID NO: 3981 - DNA, 374 bp, Glycine max
tcaaagtccaccccaagaaggacattagaggattctatgttgccatggattaaggatgaaacttgatggatgtaagcaagtccttgtgctacatgttctgctattttcaagcatgatgtccaatgcaatggttttgccctcgctgatcttgaacctgggcataataatcatcatcaaacatcaattgggcaataactgatagcatgtttgacgtggccgtgaggtgagtcaaaattaattttaatttcatggtagatgtgaaacacattattttggaaaaatcatggtgacaacgattcttttttatcagatgatgctgattatgaggtaactaccatgattttaatggtatacaaacatgctatggaactgat

SEQ ID NO: 3982 - DNA, 456 bp, Glycine max
agcttcaacatcataccacttccagggtgctggaactacttcacatggacttgatggggcctatgcaagttgaaagccttggaggaaagaggtatgcctatgttgctgtggatgatttctccacatttacctgcgtctactttatcacacaaaaatcacacaccttcgaagtattcaaggagttgagtctaagacttccaagagaaaaagactgcgtcatcaagagaatcaggagtgaccatggcagagagtttgaaaacagcaagtttactgaatactgcacatctgaaggcatcattcatgagttctctgcagccattacaccacaacataatggcatagttgaaaggaagaacatgactttgcaagaggctgctatggtcatgcttcatgccaaagaacttccctataatctctgggctgaagccatgaacacagcatgctacatccacaaca

SEQ ID NO: 3983 - DNA, 435 bp, Glycine max
tattggagatgtgctacaggaaatatgtccaaacagtggacaaatcatttagcaatggtagaactatggtataataccaagtttcatacaaccacccaaatgacactttttgaggcctcatatgggtatggacctacaagtcctaatttaatagacaagggagaaactctaattgaggcagtagattacactgtgaagacaagagagcagattggaagaatgttgcaagacaaactcagtaaagctcaagagagaatgaagatgtatgcagacaagaagaggatagacaaagagtttaattctggagatcttgtgtacttgaagattcaaccatgcaagcaacactccttggcaaatacatactttcacaagctattggtgaggtattatggtccctacaaggttattgacaggatatggaaggtagcatacaaa

SEQ ID NO: 3984 - DNA, 452 bp, Glycine max
  unsure at all n locations
agcttaaggattcttagggaactactagagacatcactatcactgccaaactacacacatcagcctgcttagaggtaagggatgagtttatcgcaattgaggttaaaatgaacatatgtagtgatgtagatccatgtgcagcttgtaggccttggatcttcttcatcaatgaagttttttgcttcttgaagatcaataaaaggggaatagagaaggaagaaagacgattagagatgtcacttcaaggagaagatgagtcaagaacaagctcaccatcaaaagaagccatggataagagcttgaaggtaggatgagatgagtggagggagaaggagagaacgagcatgaaattntatacctcanatgaggtctgaactttgaagtgtaaatctaaaatgatcaaagttgaaaaaagtgcacacacaaggcctctanttatagcctaagtgaca

SEQ ID NO: 3985 - DNA, 447 bp, Glycine max
  unsure at all n locations
agacttaacatcagaccactttcagggtgctttaactacttcacatggacttgatggggcctatgcaagttgaaagccttggaggaaagaggtatgcctatgttgttgtggatgatttcttcagatttacctgggtctactttatcagagaaaaatcacacacctttgaagtgttcaaggagttgagtctaagacttcaaagagagaaagactgtgtcatctaaagaatcatgagtgaccatggcacagagtctgaaaacagcgagtttactgaatactgcacatctgaaggcatcattcatgagttctctgcagccattacaccacaacataatggcataagtgaaaggaaaaacatgactctgcaagaggctgctagggtcatgcttcatgccanagaactttcctataatctctgggctgaagccatgaacacagcatgctaca

SEQ ID NO: 3986 - DNA, 446 bp, Glycine max
agctttgatgcaacatttggagaggttaatgatacaacgagatgatgcgctccatgagaggttggatcaaatggagaatagagatcataatgaagaagaaaggaggagaagagggaatgatggtgttcctagacaaaaccgaattgatggtattaaactcaacattcctccatttaaaggaaagaatgatccggaggcctacttggagtgggagatgaaaatagagcatgttttctcatgcaacaactatgaggaggaccacaaggtgaagcttgccgccacagagttttccgactatgctcttgtgtggtggaacaagctacaaaaggagagagcaagaaatgaagagccaatggttgatacatggacggagatgaataagatcatgaggaagcggtatgtgccggctagttactcaacggacttgaaattcaagctccaaaaac

SEQ ID NO: 3987 - DNA, 440 bp, Glycine max
  unsure at all n locations
tcacagtccaccccaagaaggacattagaggattttaggttgccatggattaaggatgaaacttgacggatgtaagcaagtccttgtgctacatcttctgctattttcaagcatgatgtccaatgcaatggttttgccctcgctgatcttgaacctgtgcataataatcatcatcaaacatcaattgggcaataactgatagcatgtttgaggtggccgtgaggtgagtcaaaattaattttgatttcatggtagatgtgaaacacattattttggaaaaatcatggtgacaatgattcttttttatcagatgatgctgatattgaggtaatcaccatgatttttaatggtatncaaacatgctatggaactgattggtcccccacacaccaagaagttaggtcttttgcatagaatactatagaattgaaattttgaat

SEQ ID NO: 3988 - DNA, 459 bp, Glycine max
  unsure at all n locations
agcttcaacatcagaccacttccagggtgctggaactacttcacatggacttgatggggcctatgcaagttgaaagccttggaggaaagaggtatgcctatgttgttgtggatgatttctccagatttacctgngtctactttatcagagaaaaatcagacacctttgaagtattcaaggagttgagtctaagacttcaaagagaaaaagactgtgtcatcaagagaatcaggagtgaccatggcagagagtttgaaaacagcaagtttactgaatactgcacatctgaaggcatcattcatgagttctctgcagccattacaccacaacaaaatggcatagttgaaaggaaaaacaggactntgcaagaggctgctagggtcatgcttcatgccaaagaacttccctataatctctgggctgaagccatgaacacagcatgctacatccacaacagag

SEQ ID NO: 3989 - DNA, 439 bp, Glycine max
  unsure at all n locations
agcttcaatgtacacatacaactaaataacaattctcaaccaagatgagatacatctacctacttcagnttgtaaagcatcacgaactgctgcaagtaagctatcacgagacgtgcttgcataaacctacaattcatgccacatgcgtgagaaaatttaaaacataataaattataactaaatagcacaacaaaatcttacatggatggggcatccatcactaaattcaattgcaaacatctgtggctcttcagcaaaccgaacaagagcagttactgaagataacggacgaacagtaacagcctgcaaacatctagtaaaaattctcaacacttgacataacacttctcattatgagtaagactcagctttcatagacatatanatgcattaataagagagtggttgcattaacaacacgtaaagccaacataaaact

SEQ ID NO: 3990 - DNA, 415 bp, Glycine max
  unsure at all n locations
atgcttaaaacagaaacattatgcataggcaaaagatcaagaggagttagtgggttaaaaccataaacaactttcaaaggagaacaattagtggtgctatgaacagctctattgtaagcaaattcaacatggggtaaacaagcttcccaagtttttaagttattcctcaaaactgtcctaagcaaagttccaaaagtcctattaacaacttctcgttgcccattcggttgtgggtgacaagtggttgaaaataacaatttagtgcccaacttgctccacatagtcctccaaaaatgcaaatcatcaagcctaggtataggatgcctatatttaatggtgatgttattaagggctctacaatcagaacacatgcgccatgtcccatcctttttanggaccanaatcactgggacag

SEQ ID NO: 3991 - DNA, 429 bp, Glycine max
tttctttgagcaaagcaaaggcttgctctagtttttcaccccaggtaaatgccacattcttcttcaccaaatcattgagaggtgatgcaattgtagagaaattaggaacgaaccttctatagaagcttgctaacccatggaagctcctaatatctcccacactttttggggtgggctattcttggatggccttgattttctcagggtccacttggaccccatttctaccaactacaaaacctaagaaaactatattatctacacaaaaggtacacttctctatatttgcatagagggtgtttttcctaaggattgaaagaacttgcctgagatgtcctaagtgatcatctaggctcctactgtacactaaaatatcatcaaaataaacaactacaaatatacctatgaaatcccttaagacatgatgca

SEQ ID NO: 3992 - DNA, 461 bp, Glycine max
  unsure at all n locations
agcttcaaccaaggggagatggaccatntatttgcttgaaagaatcaatgacaatgcttacaaagttgagcttcccggtgagtataatgttagttccaccttcaatgtctctgacttatctctttttgatacagatagagaatccgatttgaggacaaatccttctcaagagggagagaatgatgaggacatgaccaagagcaagggcaaggatccacttgaaggacttggaggacctatgacaagggctagagcaaggaaagccaaggaagctcttcaacaagtgttgtccatactatttgaatacaagcccaagtttcaaggagaaaagtccaaggttgtgagttgtatcatggcccacatggaggaggactaaagggcgccacttcgtctcaattatagagtgtttagttggtctaaataatggcccaatccatgtaaagttggctgaccaaaaatat

SEQ ID NO: 3993 - DNA, 435 bp, Glycine max
  unsure at all n locations
agctngccttgccccttggatatattgaggttttcatggtcactatgaatgacaaattccttgngataaaggtagtgttgccatgttttcaaagcccgtactaaggcatacaactccttatcataagttgaatagttaagggtaggaccacttaacttttcactaaaataagcagttggatggccttcttgcatcaacacagccccaatcccaacatttgaagcatcacactcaatttcaaaagatttttgaaagtttggcaacgcaagtataggggcattagttagcttttgcttaagaacattgaaagcttcttcttgtttctctccccatttgaaaccagcattnttcttgagcacttcattgagaggtgctgccaatgtgctaaaaatcttcacaaatcgtctataaaaactngctaagccatgaaaactc

SEQ ID NO: 3994 - DNA, 427 bp, Glycine max
  unsure at all n locations
ngatcttntagttttntatctttaatctttaatccgcgaatgaactattcaagtttgtaattcgaactttaattatcttttaattcgttcctaaagatagatcgccaaatctgttgctaactgcacaataatctgttaaagatataacagatttatgtgtccagtatttcgggcaggatgtcctggacattgtatccgacatcgtggatcctgcacaatctattaaagatataacaaatttatgtgtccagtattttcgggcaggatgtcctggacattgtatccgacatcgtggatcctgcagcttcaattcttcatttgacattttatcttgccttgtgcattgtgcagcccgatctgattcttgacataatgttagacatcatgtgcagcaactccagcttntcttcaatgtctaagtgcttat

SEQ ID NO: 3995 - DNA, 448 bp, Glycine max
agctcgtgcaatcagtatcctgataaggatgttccatatgttctcaagactggactaatacatttgttgcccaagtttcatggtcttgcacgtgaagatcctcataagcatattaaggagttccatattgtctgttccaccatgaagccccctgatgtccacgaagatcatatctttctaaaggcttttcctcattctctggaaaaagattggttgtactaccttgctcccaggtccattaccagctgggatgaccttaagtgggtgttcttggagaaattcttccctgcatcaaggaccactgccatcagaaaagacatttcaggcatcatgcaacttagcggagagagcttgtatgagtactgagatagattcaagacattgtgtgctagctgtcctcaccactatatatctgagcaactgcttctgcaatatttctatgatggac

SEQ ID NO: 3996 - DNA, 467 bp, Glycine max
  unsure at all n locations
agctnttcactcggagatctgattcaggcgcataatatatcgagacgcttgaaaatgaacaacggaagctctcgagaaattccaatgctcattacctttaactcggaggtctgatttaggcgcctaatatatcaagacgctcgaaattgaacaacggaagctctctagaaattcaaatggtcataacttttcactccgaggttcgattcaagtgcatgatatatccagacgctcgaaattgaacaatagaagctctcgagaaattcaaatggtcataaccttaaactcggaggtccgatttaggcgcataatatatcgagacgctcgaaatttaacaatggaagctcttgggcaattacaatggtcataactttcatctcggaggtccgattcgagttactaatatatcgagacaatcgaaattgaacaatggatgctctcgagatatcaaatggcataactttaac

SEQ ID NO: 3997 - DNA, 451 bp, Glycine max
tcaagaataatggcctcagcaaacttcttattcccagaaggaaattcgataaataggctctctatttttaatggagagggttaccactactggaaaacccgaatgcaaattttcattgaagcaatagacttaaacatttgggaagccatagaagttggaccttatgtacccaccatggtggctagaaatacaacaatagagaaacctagagaagagtggtttgaagaagaaagaagattagtgcagtacaatttaaaggctaaaaacattattatttctgccctaggaatggatgaatattttagggtttcaaattgtaagagtgctacggatatgtgggacactctacaagttacacatgagggaacaactgatgtcaatgcaattttcccaacaggggcctcatcattcacagtcgggcccgccttctccttctcgcctatattcgcct

SEQ ID NO: 3998 - DNA, 421 bp, Glycine max
tagcacttggaacccagacccttcattgactagcttgtttatgctgggcagagggaatgcgtctttggggcacgccctattcaaatcaatgtagttggtgcacatttgtcatttgtcgttggcctttattaccatgatgacattggcgagccaagtagaatacctaacttctgttatgaagctatcattaaggagtttgtcgacttcttctttgatggctttacgtcgatattctctcatattccttttcttctgtgatattggattggcctggagacaaatagcaagtttgtggtagattatgctgggataaattctcggcatgtcagctgactaccaagcaaaacaatccgtattcctgtgtaacacgtcgatgatgcaccagtgctcatggcttgtgacgttcttattgagccgcgtg

SEQ ID NO: 3999 - DNA, 413 bp, Glycine max
  unsure at all n locations
ntgagaaaattcaaacgacaataactttttactcggatgtctgattgagtcccgaaatatatcgagacgctcgaaattgaataccgaagcgctgagcaaacttaaacgacaaaaactttttactcggatgtctgattgagtcccgtaatatatcgaaacgctcgaatgtgaatgtagaagctctgagcaaattcaaacaacaataactttttactcggatgtctgattgagtcccgtaatatatcgagacgctcgaaatggaataccgaagctctgagcaaattcaaacaataataactttttactcggatgtccgattgagctcccgaatatatcggaacgctcgaaattgaatgtagaagctctgagcaaattcaaacgacaataactttctacctcgatgtctgattgag

SEQ ID NO: 4000 - DNA, 401 bp, Glycine max
atccttaagtcacctgcggcatgcaagcttctacattcaatttcgagcttttcgatatattactggactcaatcggacatccgaggaaaaagttatcgtagtttgaattcgctcaaggcttcggcattccatttcgagcgtttcgatatattacgggactcaatccgacatcacagtgaaaagttattgctgtttgaatctggtcagagcttcggcattccattacgagcatctcgatatattacgggactcaatcagacatccgagtaaaaagttattgtagtcttaatgtgctcagggcttctgtattccatttcgagcgtctcgatgtattacgggactcaatcagacatccgagttaaaagctattgtcgtgtgaatctgctcagagctcctacatt

SEQ ID NO: 4001 - DNA, 463 bp, Glycine max
  unsure at all n locations
tactaagcttttaataanaatatgagataaattacatttttatttcgataaatagatatgaaattatttttaattnttttttttttgaaaaaggtcagtatccatatctctctaacattataaatagaagcatcaacttgaggcaacatgcattagacacatactaaaaaagtttaagtctaattttagacatgaagactagaaggagaatttatcctttagagtttcattcatcaaataattgatatagattggtttgtgaatatacttagagtcttcacactatatttgaagaaaaattttactacttaaagaatatatatccgggtatacaaatctatttttttctatgtattatcattggatatcttgaatacaaaataaatcctaattcttttatgtaaatattaggaacacttttatgtaactactaactatcatgcatgtataaatcaacactata

SEQ ID NO: 4002 - DNA, 398 bp, Glycine max
tcctgttgttgttgttgctgaaggaactcaagttaagacttttgaagagattcgatacaccgttcactatgtccaatgcgttgttgctgagctccaaagaagtgttgagaaccctagccatggtcttgccagcctcgttggtcgtgttctcgaacccatccaaacatgtctgttggtgagcgagagtaccggcgatccagaccttgagatcataggcgtaatcgttcaacttgtttagttcaaactcttccaacttgcgaacggattggtgcatgtcatcgacagcgtaacctagaactctcttgcagatgtccatgcgctgtttgttcatgtcgtcggtggcaagatcgtggtagagcgtacagtattttatatgctctgcgatctcttcggccgtg

SEQ ID NO: 4003 - DNA, 443 bp, Glycine max
  unsure at all n locations
tagcccttaagccagtgacatgttgaagccaagtaacagaatgaatcaaatcttcaatgccaaaacctgcagcaagttttgatggttttttaaccactgatactaaattttcttggtctttgcaattctcgccaaaggcagcccttgaagcaattgtgtaaattgatgtaagtactgcttcagtgaggttgatggnggatcctttctttgaatcaatccatttgacaagattgaagagctcatcttctctaattggctggaatgagttgacgcgttttaggcttaaaagctccaatgtgcatatttttcttagctggctccaataatttccatagccagcaaaagctatacttgtggaattgtaagacattatctcaatagctagaactctaggccttgtggcaaagttaatgtcatgggttctcatcactctcctagcacac

SEQ ID NO: 4004 - DNA, 439 bp, Glycine max
  unsure at all n locations
agcttgagtacactatgaacgcacaccctatcctgatacctcaagactccatcagttcccactctaaaactactctctctccctgcgactatggactctaactgggctgacaagaatgggtcaaacttctgaccctcacggatctcgctcaaaagttcgctggtgactctcaacatacccaacttaatgctactagaggtgatctcacatgccaaactcatgtctctaaactgctctaagaggcccaactctctaaccatcaaagcagacatttgaagggattttctacttaaggcgtcagctactacattggctntacctggatgatagctaagctcanaatcgtaatccttaaggaactctaaccatctcctctgcctcatgttaagctctttctgatcaaacacatatctaaggctcttatggtcactaaacacct

SEQ ID NO: 4005 - DNA, 405 bp, Glycine max
  unsure at all n locations
tgatgattgcctatgggcatataaaacaaccttcataacacccattggcctctccccgtttcaaatggtgtacggaaaagcatgccacctacaagggtagttagaaataaaagcttattgggccatgaagttcctcaactttgactctacaacatgtagagagaggaggaaggtaaagctacaggaacttaaagagatgcgcctcaacgcatatgaatcatccaagctctacaaagaaagaaccaattggtaccatgaaaaatgtagaagcaagcttcatgatgatgaatcaaatttgattcaagttgttttgatgataacaaagatgatgaaaaaaagcccaagagaatgatttcaagattgagtcaagaacaattcangagtcaagagaaatttgatatcaag

SEQ ID NO: 4006 - DNA, 423 bp, Glycine max
  unsure at all n locations
agctnttatatataggaggtgagttcctactatctctacactatcctcacctctcaatgcgctgttgaagaagaacgtggcattcacttggggtgacagacaagagcaagcctttgcttcgctcaaagaaaagctcacccatgcacctgttctagctcttcctgacttttctaaaactttagagctagaatgtggtgcctctggagtgggtgtgggagctatattgatgcaaggagggaacactattgctttatatagagaataccttcatggtgccaccctcaactaccccacctatgatatagagctgtatcccttaataagagccctgcatacttgagaacattaccttggtttcaaggaatctgacattcatagagatcatgaatcacttgattacattagatggcacagcaagttaaa

SEQ ID NO: 4007 - DNA, 449 bp, Glycine max
  unsure at all n locations
tggagggcgacaatctccaatcatacggaacagcaattattgcattagcttctatgccaaattcaatacaccacttaatccattctttccaaactgatgaaagaggtcctgccatttaaacatgtacatgatacatcagcaaaccataaagtacaaaaactacagcaaatacaggacaaaatcatatttgacaaattgacacggcataaagaaacacacctgttatataacctggatcaagttctgtaatgccagacagaccactatccggacgggacttgcaatcaggatgatctgtctggttgtaaggatccaacaccatgcacttaagccagcaattgacagcagaaagaagctgcaaaacattaattctcagtttctcacataccacactnttaactntntaaatcgcagctcattagagctaatttatacacagcaggagatat

SEQ ID NO: 4008 - DNA, 354 bp, Glycine max
  unsure at all n locations
tactaagcttgaatcgatacacatatactgtaatcgattaccagagcttatctttagaaaatattctcaacaatcacatctttttatgtggttcttgaatggctatcaaaggcctatatatatgtgacttgagacacgaatttgcgaagagtctttcagaacaaaaaggccttatcctcttaaaaagcaaaatcgttttattctcttacaaattccttgcccaaaacacttgtgattcaataaggaattatttgagtgctcaaattgnttaatctatctatttcaaaatagattncttcttttcttcttcttcattctgaaaagggatcaagagaccgccggtctcttgttgtg

SEQ ID NO: 4009 - DNA, 423 bp, Glycine max
  unsure at all n locations
tgtcaaagaatccaacctctcatggtagaagcaaacacatataaactaggtttcactatcttanggatcaagtgaacaaagagaaactaaaagtggagtactgctgcacatttgatcaacttgctaatattttaaccaaacccctcaaaggggagaagtttaaaatgttaagggatagaattggcttgatgaacttacgagatcagaattaagggagggtgtgaaagcttaattctgtttttgagtggtgtatatataattgtacattggatataagagagtaacagaattttaaaattctgttataagtgcctaccctaantgtgaaaggttgttactctgttttgcttgtataaaaagacatacatgcatcttaataatgaggattattcattctatcatgttctcagtctttagcgttat

SEQ ID NO: 4010 - DNA, 381 bp, Glycine max
ttcaattcttttggaagttcatcagttgatttggcttcttctggatgatcttcattgcttcctttccctttccctttggaatcttgtccatgaatatgcattatttctaaagattctgcaacatcatctaaaatatcctttctcggagaaatagcattagactcatcaaaggaaacatgaatagattcttcaatagtcatagctcttttattatgtattctataagctttactatgcaaggaatatccaaggaaaattccttcattagacttagcatcaaattttcctatgttttctttaccattgtttaatacaaagcatttgccaccaaaaacatgaagatgtgaaatgttgggttatctagcactaaacaattcatat

SEQ ID NO: 4011 - DNA, 386 bp, Glycine max
  unsure at all n locations
agcttgtaggccttggatcttcttcatcanaggagtcctttgcttcttgaatatcaatggcagcggaatggagaagaagaggagttgagaggagatgccacttcaaggagaagatgagtcaagaagaagctcaccaccatggcctctatttatagcctaagtgtcacacaaaattggaggggaaattgaatttctattcaaatttcacttgaatttgaaattgaatttgtggagccaaaatttcactaattatgattagtgaattntagctatggttcagcccactaatccaagatcaagtccaagattctccactaagtgtgcttaggtgtcatgaggcatgtaaagcatgaaggatgtgcacaaagtgtgactatatgatgtgg

SEQ ID NO: 4012 - DNA, 268 bp, Glycine max
  unsure at all n locations
tgtgctcattctggtatgtgtacattaactactgtattggcgctagngctcatactggatacggtgatgaagcttggaatatcttcaattcgatgcccctacgatatggcattcaacctttggtggatcattatgcttgcatggtgggcgtgcttaactgagctggtactctattataaacagcaaaattcgtgtctgagataccactcgaaccaagtgctcaagtttggggtgctctgctacaccgagcctttgtttatggtggtgt

SEQ ID NO: 4013 - DNA, 309 bp, Glycine max
tgcttgtacgccctggatcttcttcatcaattgattctttgcttcttgaatatcaatggcagcggtatggagaagaagaggagttgagaggagatgccacttcaaggagaatatgattcatgatagaatctaccacccttgcctctatttatagctctaatgtcacacaaaattggatggaaatttgaatttctattcaaatttcacttgatattgaaatcggatctgtggagccaaaatttcactaattatgattagtgaagtttagctatggttcagtccactaatccaagatcaagttcaagaatc

SEQ ID NO: 4014 - DNA, 447 bp, Glycine max
tctaagcttgctacccaaggaaccatcaagaaattacttgtgaatgagagccatgagggtgggctcatgggccactttgggatagacaagagccttgtcttactcaaagaaaagttctattggccccatatgaagaaagatgtgcataggctagtctagggtgatgcctcatgggctatacacacccttacccattccatctgcaccttgggtagacattagtatggactctgtccttgggctccttagaacccaaagaggtgtagactctaactctgtggtggtagataggtttagcaagatggcacactttataccatgccacaaggtggatgatgcttgctacatctcaaaactctatcttactggaagtgtgagactccaatggttgcctaagaccatcgtgtcaaatagagatgattagttccttgccccttctataaaaca

SEQ ID NO: 4015 - DNA, 412 bp, Glycine max
agcttatgttgcacacatctacaatagacctcctcaacctcagcatcaaaatcagccacaacaaaacaattaagacctctccagcaacaggtacaatcccgggtggaggaatcatcccaaccttagatggtcgaatccttcacaacaacaacaacaacaacaacagccttattttcaaaatgttgctggcccaagcagaccatacgttcctccaccaatacagcagcgacaacaacaacagcaatagccctataaacagcaaacagttgaggctcctgcgcaaccttaccttgaagaacttgcgaggcaaatgactatgcaaaacatgcagttttaacaagagaccagagcctccattgatagcttaactaatcaaatgggacaattggctacacagttgaatcaacaacag

SEQ ID NO: 4016 - DNA, 262 bp, Glycine max
  unsure at all n locations
ctcaactcttattaatgggagagaaatgttcatctagagcatacaagtccctaatattatcaaatcctaaaattagagctcctacggagcaaaacaatgtgtgtctcctagagagggcatcagctaccacatttgactttaccttgttgtatttgataacatatggaaattgctctaggtactctaccccactatgcatgccttttgcttaacttgctntgacctctaatgtacttaagtgattgatgatcactatgaatga

SEQ ID NO: 4017 - DNA, 443 bp, Glycine max
tgatgatatggttgttagacaagtggcctcagatatcttaagaagggggggttgaattaagatattccaaactacttccccaattaaaaatctatttgacttttttttaattgagttataaattcccttaacaatgaacttcttaaatattaattcaaataaaaaaatttgaatatgattataaagcaataataaataaaggagtttaagggaagagaaagtgcaaactcatatttatactggttcgaccacacccttgtgcctacgtccagtccccaaataacccgcttgagagttcgactatcttgtaaattccttttacaagttctaaacacacaaggacaatccttcctttgtggtttagaattctttacaacaagagaccctcggtctcttaatcccttagagaattagaaagagaagaagaatgaatctctcttgaa

SEQ ID NO: 4018 - DNA, 435 bp, Glycine max
  unsure at all n locations
tgtatnntgtggattcactttgatctcaactntaccatatggaaaaacattagtctgcacaaaaggaccaatccactttgacctcaacttaccactcatgagtccgagcctagagttatacaataaaactttntgtccaaccacaaagtccttcttagccatcaagctgtcatggaacttcttggtcttctccttgtagaatttggaattctcataggcttctaaacggatctcatttagctcacttagttgcaacttcctttcttctccagcctggtccatagagaagttgcaagtctttacagcccaatagactttgtgctctatctctacaagaagatggcatgccttgccaaaggcaacccgataaggagacattcctatgggtgctntgtaagcagtcctatgcgcccaaagagcatcatctagcctagt

SEQ ID NO: 4019 - DNA, 214 bp, Glycine max
  unsure at all n locations
ggaatcggacatccgtgtgagaatntatgaccatttgaatttctcaagagcttccgttgttcaatttcgagcttctcgatatgtgatttgcctgaatcggacatccgcgtgaaaagttataccacgcgaatttctccagagctttcgctggtcagttttgagcggctcgatatgtgatttgcctgaattggacatccgtgtgaaaagttatgac

SEQ ID NO: 4020 - DNA, 447 bp, Glycine max
  unsure at all n locations
gtgatcatcttggattgactatagaactaatctctaattttagactctgacatactgaacttgttnttacctccttcaagaatgcgtttcttaaaaatgaaatttgtgttatcctctaaaaacttaattagtatgtgttgttgattgagtcactttttttaaaaaaaaatactttcggctaaaactacttaaccagttatttttactttcaaattactctccttgttaatttttaaccgttgcattttagggaaaaaaaacttggttatgtttatctatcattcataaagaataatatcacattaattatttatttattaattatatattcttgcttatctcttaatcttaattaatttatatatgtatttatcgtgggataaaaagaaaaaagttaaataataagaaattctataactattttagtgaaatcaaaaaaattaatta

SEQ ID NO: 4021 - DNA, 426 bp, Glycine max
  unsure at all n locations
gtgcaacttaagcatggaaagaagatagtctacactaggcatcaaatatttctcaaagaatatcacccatatcgattgtaaaaagctcttaatggaagtccaaagtctggattttccctgatacccttatcgagaaatgaactttatgagcaggtgaaggacatacatactatctttggaaagacccaaaataaagatgcaaataagacaaacatatgaaagaagatgtcgatattttcaatcttccatactantctgtcctagatgttagacattgtattgatgtgatgcatgtggagaaaattttttgcgatagtttaatcaacacacttcttaacattaaaggcaagacaaaggataacttgaatgctcgtcaagaattcggtgacatgggtagtgagacatttaagatacttatttggagac

SEQ ID NO: 4022 - DNA, 444 bp, Glycine max
  unsure at all n locations
gctcgccaccacggagttgtccaactatgctcttgtgtggtggaacaagctacaaaatgagagagcaagaaatgaagagccaatggttgatacatggacagagatgaaaaagatcatgaggaagcgatatgtgccggctagttactcaagggacttgaaattcaagctccaaaaactaacccaaggcaacaagggggttgaggagtatttcaaggaaatggatgtggtcatgattcaagcaaagattgaagaagatgaggaggtaactatggctcgatttcttaatggtttgactaatgatatccgtgatattgttgagctacaggagtttattgaaatggatgatttgcttcacaaagcaatccaaggagagcaacaattaaaaaggaaaggagtggctaagaggagttntaccaactttggttcttctaattggaaagacaa

SEQ ID NO: 4023 - DNA, 425 bp, Glycine max
  unsure at all n locations
agcttnccaagttttaagttattcctcacaactgttttaagcaaagtttccaaagtcctattaacaacttccgtttgcccatcggtttgtgggtgacaagtggttgaaaataacaatttagtgcccaacttgctccacaaagtcctccaaaaatgcaaatcatcaagcctaggtataggatgcctatatttaatggtgatgttattaagggctctacaatcagaacacatgcgccatgtcccatcctttttanggaccaaaatcactgggacagcacaaggactcgtactatctcttacccaaccttngctaatgagttcatccacttgtctttgaatctctttggnttctcgtgaattacttctataggctggcctattggcaaagacgctccggaatgagatcaattgatgctcaattccctc

SEQ ID NO: 4024 - DNA, 419 bp, Glycine max
  unsure at all n locations
tgccaagtgtttntatggttcatttcanatattggagcatattggcaaagtggcttacaaactccaattaccggaagggtctcgaattcattctgtttttcacagctccgttctcaaaccattccacaaattgtctgaagattcgatttcccctgtggcattacttgaaacagaagttgacaaccaacctgtgatcacacctcttgctattattaatactcgttgagatcactctactgctgaaccccgcttgatggtactggttcaatggacaggcctgtcccctgatgatacctcatgggaagattgggctagtttgaaagctgattatcaccttgaggacaaggtgtttttagatggcataggggatgataggaaaggaaccatggcctaacatgatattactgtggatgttaatg

SEQ ID NO: 4025 - DNA, 409 bp, Glycine max
  unsure at all n locations
agcttcaccatgtcttgggcaactctaagaggctctctaatcaatttgaaggatgaaccactgggcttgtccacttcagttttttgtgaaagaaaaggttctaatgacagtggatttttgttccatcaccatattatcttatttttggtaggaaatagctgttgaaaatgataagaatcttgttgaaatcctagaaaacttgaatccaatagatgttgttaaatacatgaatttttcagtgcccccaagctggtgctatagctacattttcangcacaacacatgacaacttntgtggaaaatcaatcttagagttaagatatgaagcttatgttatgatggcaatatgttgtatcaaatcaatctgcacatctgctagcctatcttggaaaaattgatgccacaaata

SEQ ID NO: 4026 - DNA, 345 bp, Glycine max
ctatataatatattgtgaagataaataataaaacaagcatattttgaataggttcaaataaaacatacaatactaaaaatgaataatatactaaattacataaaacatgatccccttctttgaactgaaagagctttcttggcttgtcataataacttttatgtctgtcttgtgacattttgatctatccactaatcatcttaatcttatttgaagctttgttggctatctttggacctaagatcaaagggtttctagtaccataccatcataatgaggttcttcatcttcttccatatatacaaagccttgtatggagtcatttctattctagaatgaaaatta

SEQ ID NO: 4027 - DNA, 358 bp, Glycine max
tccgttggttcaatttgagagtctcgatatgtgatgcgcctgaatcggacatccgagtgaaaagttatgactatttgaatctcccgagagcttccgttgtccaatttctattgtctcgatatattatgcgcgctgaatcggacctcagtgtgaaaagttatgaccatttgaatatcacgagagctttcattgttcaatttcgagcgtctcgatatgtgatgctcctaaatcggacattcgagtgcaaagttatgacccatttgacttcttgagcgcttgcgttattctatgttgagcagcttgatatatgaagcacctgaatccggcatccgactgaaaagttatgaccatttgaatt

SEQ ID NO: 4028 - DNA, 369 bp, Glycine max
  unsure at all n locations
agctttccgctcggatgtccgattcangtgtatcttatattgagacactcgaaattgatcaatggaagctctcgagatattcaaatggtcataactcttaacaacgtggtctgattcaggcgcataaaataacaagacgtttgtaattgaacaacggaagctcgagagaaactcaaatggtcataacttttcacaccgaggtccgactcaggcgcgtcatatatcgtgatgttacgtattgaacaccggaagctctcgagaaattcaaatggtcataacttttcactcggatgtccaattcacgcacatcacatatctatacgttcgcaatggaacaaccgaagctcttgagaaattcaaatggtcata

SEQ ID NO: 4029 - DNA, 451 bp, Glycine max
  unsure at all n locations
ngccatnntgacgtaaatcattgttcacaatttattcctgatcaaaagttcataagtcctacattccttttggcaaatggaagtataaatatttcccactctacacatcttgtacattattcaaattctcatcactaactccacataaaaacaaatttatcactacataacagcaaattatctccaagttccattcttcaatgaatcattttgcaagatctttacctgattcctcatcaactttcttctgcattttcctctccttgcaatcagaaaagtaaatcatgcacgacagccatttcagggtatttaacacagcgaggagcccaatntgtacaaatatcccataccctcctttatagcatccaagggagacacatgacaaccttaaacaaagtcccaaagcaaagaatacaagcatcacaagtagtcctctcttctgattacctct

SEQ ID NO: 4030 - DNA, 394 bp, Glycine max
tttactcggatgtccgattgagtcctgttatatatcgagatgctccaaattgaaaatagtagctcctagcaaattcaaaccataataactttttactcggatgtccgattgtgtcccgtagtatatggtgagtgctcgaaattgaaaacataaggtctgagcaaattcaaacgacattaactttttactcagatgtccgattgagtcccgtaatatatcgagatgctccaaattgaaaatagaagctcctagcacattcaaaacataataactttctactcggatgtccgattgagtcccgtaatatatctagacgctcgatattgaaaatagaagctctgagcaaatccaaacgacattaactttttttctcgatgtacgattgtgtcactta

SEQ ID NO: 4031 - DNA, 430 bp, Glycine max
  unsure at all n locations
agctngactaggtcttcatgttgctccccatatctctaactatccnccatttaaacatgacttgttctcctcctttctttttcatttttcatagaaaatttgatagatttatagatataatatatttgctcttatatctatatcttacataatattttgattaaatataattaaattctaattatatgaatttatactcacaagttaaaacatcacactcacactaacaatttattaaaaaattcaaaaacaacaaattaaaaattatgaaaaacagaaaataattgatattaataattttatccaaatttaattctgaattaacataaacaataaaaatttgacagatttatacatatatatctgctcgtataggtatatcttaaaactaaaacacattacagatcttaatccaaataatcaatacact

SEQ ID NO: 4032 - DNA, 430 bp, Glycine max
ctcaagcttctcgatatgttatgcgtctgaatcggacatgcgagtgatatatcatgaccattttaatttcccgagagcttccgttgttcaatttctagcatctcgatacgctatgtgcctgaatcggacatgcgagtgaaaagatatgaccatttgaatttctcgagagcttgcgtagttaaatttctagcgtctcgatacgctatgcgcctacatcgaacatgcgagtgaaaagttatgaccattttaatttctcgagagattccgttggtcaatgtcgagcgtctcgatatgttatgtgcctgaatcggacatgcgcatgaaaagttatgaccattttaattgctcgagagcatctgctgttcagattgtagcgtctcgatactctatgcgcctgaatctgacatgcgagtgaaaagctattaccatt

SEQ ID NO: 4033 - DNA, 372 bp, Glycine max
  unsure at all n locations
gagaggctaatgaaatatctagatgacgcgctccatgagaggttgtattatatggagaatagagatcatcatgaagaagactggaggagaagagggaatgatggtgctcctacacaaaaccgaatcgatggtattaaactcaacattcctccatttcaaggaaagaatgatccggacgcctactcggagtgggagatgaaaatccagcatgtttctcatgcacaactatgacgatgaccatacagtgaagcttgctgccccggagttctccgactatgctcttgtgtggtggaacaagctacaaaaggagagagcaatatatgatgagcccatggttgatacactggacagagatgaanaagatcatgagga

SEQ ID NO: 4034 - DNA, 445 bp, Glycine max
  unsure at all n locations
cttggtactccaatgtatctccactagatntttttaactctaccagatggaagactggggtgatctcaaaaatctctgcatcgatacccaatggcccttttcttccttccttggaaccttccaacttgaacgaacccccatctttctttttcactttcagacgaagacggcctgcaaatttttccaacttggagatgatgattgaggctggcttgtcggatgtaaaccgctcttctttctttcgatcggtctcctcgaacaaaccagacaagtcaaaacctgaggaataggagatgatgtctaaagcatttaaattattacaaggctctgtagtttttgccggttcaataggatcttcattctcacaagctccaaatactccatcagcatcgagaggagccaggtcttcatcttcattctgagtaatggtaggcttctctaaccc

SEQ ID NO: 4035 - DNA, 322 bp, Glycine max
  unsure at all n locations
cggtacttaactcctcaacatggcagaaagtgaaatgaaataaaacaatgaacaaaccttttaatgtggctccatgtagagcttgtacgccttggaccttcttcattaatggtgtcctttgcttcatgaagatcaatggtcacggaatggagaaaaaggaaaggtgattggagatgcaacttcaaggagaatataagtcaagaacaagctcaccaccataagaagccatgaataagagcttgaatgttngagaagatgagtggaatgagagggagagaaatgaatgatattttgggagataagagggagaaatataaccact

SEQ ID NO: 4036 - DNA, 461 bp, Glycine max
caagcttacaacatctagatctaagtggaaattctcttcgcggagttatcccttctgatgtacggaatcttacaagcttacgacacttagagatctaatcttcaattcttttcgtggagaaatccattctaacgtagggatgcttacgaggcttgcaacatctagatctgagtggaaattctcttcttggagaaattccttctgaatgagggaagcttactgccttacgatatctagatctaagttataatgtggctattcatggagagatcccttatcactttaaagacctctcacaactgcaatatctttgtcttggagaacataatcgtttcggaccaatcaccttgcggcgtgggaatcttgctatctttcatactcttacacttgaaggcaattctgatcttacaattaacgatgcacagtggctatcttctctctcttttctaacactctgacct

SEQ ID NO: 4037 - DNA, 419 bp, Glycine max
cgagttaaccatattagattgcccccagtttaagtctctccatcttagaacttctaagtttaaaagtttcagacttgatggacctcttccaacgatttggccagaatcccatttcaaccttagccatgccatgcttaatttcagacttggaccaagctgtgctgacttcaaggctcaatatttcaaccaaacactgttgacaataaagaattgtgaagctctcactttatgtgagtggacttttcaggtatgttcttaatttctatcatttctcgtctactattgctcatttaatgcaattatatatctggccaatttacaacttgagcttaattttacgcgctaatagaaagacattacaataacttatcatacatgacacaacataatggaaatgggaatgcttgcacctctctata

SEQ ID NO: 4038 - DNA, 454 bp, Glycine max
cgacccttacaagtcagtttagtcaatggtaaagctaacttggagaaaacttctatgaatctccggtagtatcctgctaagcccagaaaactcttaatctcaacaacggatttaggactctcccactaaagaacgacttctatcttagagggatctacagctatacccccttgagatatcacatgccctaggaaactaactgtctctaaccaaaactcacacttggacaacttagcatagagttgtcggtccctaaaggtatgcaacacaattcttaaatgttcttcatgttcctctctagtcttggagtataccaaaatatcatctatgaatactaccacaaaactattaaggtaagggtgaaagactctattcatgtagtccataaacatacctggagcattagtcacaccaaagggcatgactagatactcatagtgaccataacgggtcc

SEQ ID NO: 4039 - DNA, 426 bp, Glycine max
cttgaagaaagaatgggaacgggtgaaatagatggaggatgttgttcctttctttctatcattaagggtacctcaatcagcatctacagcagaggattgcgtggtctaaatggccaaaacagtgaaggagcaactggggaaagatgatcctatgttttcggcggctgctgaagccatggaagagtgggtcaagctctggaagtcagttagatctgcttgaagctcccgaacttgaagactctcgtatgactggaggttattgccttattggcttctatatttctctattttatttaactaatttatatctgccttttcttcagactgtaagaactaagcttacattttacctgacacatttagactactggctgaataaaatgagtacttatcggccttgtgacaattgaataaatgctttgtctt

SEQ ID NO: 4040 - DNA, 452 bp, Glycine max
  unsure at all n locations
ttcttgaganaacttccttgagaagcttctttgaganaacttccttgagaagctagagcttagctacacacacccctctcataactaagctcacctccttgagaagcttccttaagaagattcctgaagaagctagagcttagctacacacacatctctaatagctaagctcacctccttgagatgagaagctagagcttagctacacaccccctataatagctaagctcacccccatgacaaaaaaagatgaaaatacaaaaaaaaaaagtccttactacaaagactactcaaaatgccccgaaatacaaggctaaaaccctatactactagaatggccaaaatacaaggcccaaacgaaggaaatacctattctaatatttacaaagatnagcgggctcatacttagcccatgggctcanaatataccctaaggctcatgagaaccctag

SEQ ID NO: 4041 - DNA, 446 bp, Glycine max
  unsure at all n locations
tgatatttagtgagttgaaaagtaacctcccttnttttattaactttaacacacatacatatatacacaatacaaggcttagagataagacagcttgatgggacattacaatgctgtcttctgaaacaagttaaacataaagctagaagcaagcatgtacacacataatttaacagattgaaatgggatgcataataattaattaggccaaacattgacatctatttttttatactatttatgttgtgtattggattagtgtagtactactagcacaaactcaaaccaataaggctattgtctactgttaagaactttgggagaactgcaccacaaaagctggccattttagttggagggctcaaggcctgattagaatcccatacttncaacctgggactctcaagtttcgtaccttccaagtggatcctaatatcccacaacgc

SEQ ID NO: 4042 - DNA, 365 bp, Glycine max
actcagcttatatatatcgatatgctcgaaattaaacatcggataacttttctcacggatgttcgattctggcgcataagatgtcgagaggctcgacattgaacaacggaagctcttgagaaatctaaacggtcataaacttacacacggaattccgatttagacaaatcacataacgacacgctcagaattgaacaacggaagctcttgagaaattcaaatggtcataacatttaactcgaatgtccaattatggcgcatcacatatagtgacactcgaaattgaacaatggaagctctcgtgaaattcataatggcataactttctacactgaagtccgattcatgctcataatatatcgata

SEQ ID NO: 4043 - DNA, 375 bp, Glycine max
  unsure at all n locations
ctcctccaactgcgcaaggctcgatacatanggagagtacacttgtggatccttcacccgagcaagactctgacaaagacttatcttgtcctttttggaaaaagcatggctagctggcggcaaggaaatatactctccatctgacctcggatgcacactatgatcgaatctcccatatcagcttgattatgacgggtgttcaagccatccttcgccttgccatgaatgttaaagagcatcccaatcacactgccacatacagttttatcctaacgcattacattcatacaatgtctaacgtctagatcataccatgcctgctgattaataacagaggacctcttcttccatatgccaccataactgttatactta

SEQ ID NO: 4044 - DNA, 438 bp, Glycine max
  unsure at all n locations
ggtgtatcactntccactgcagaaggcaagtatattgtagcaggaagttgttgtgctcaaagtctttggacgaagcaacaacttgaagactctggagtagaccttgatcacattcctctaacatgtgacaacacaagtgcgatcaatctaactaaaaatccggcatgcattcttggactaagcatagaaataaggcatcattttcatagagatcatgttttaaaaggtgattgttgaattgagttcatagatagtgagcatcaactagcatacatattcactaaactactttctagagataggttctttttcaatagaaatgaactaggcatcttacgtgcttctagaatagaatgacattttgtctagtgtatattatctattgcatattgcaatccatatctattgatatctctggataagtcttagtttggtgat

SEQ ID NO: 4045 - DNA, 447 bp, Glycine max
  unsure at all n locations
tgtacctttgaaacacatcaaatattcacttattagctacattggattgggcttctaccaattcaattaaatttattttcaaccacacacatcaaatattcacttagtgcatgtgaaattacaaaactacccctaatacaaaaaactagtctaggtgccctaaaatacaagggctgaaaaatcctatatttctaaggtactctacctacattatggagccctaaatacaaggcccaaaaataatgaaaccttaatctaatatttacaaagataagtgggctcatacttagcccatgggcccaaaatctatcctaagactcataagaaccctagggccttctcttgcatctctggcccaatctacttggagtcttctatccaatacccttgcggngtaggattgcatcaaaaggttacagagaacttacattgagaaatccttggtaa

SEQ ID NO: 4046 - DNA, 451 bp, Glycine max
  unsure at all n locations
tggcnttgaggacttgctccaatggctcatcatgtcttctattgaacctttcttcataggcttgaagagaatccatcaattggtctacggtcattgagtctaaatccttagactcttcaatagcacaagccacataatcaaatttagcgattaaggagcgaaggatcttttccaccacacgaacatcgttccatattttctccataacgcttcatttggttcacaatagctaataccttgttgtcaaaatctgagatagattcagattccttcatatgcaatgattcaaactctctatgtagagtttgtaggcacacctttnttaccttatcaacaccttcaagggaggttttcaaaatctcccatgcttctttggatgtggttgcatttgacaccaactcaaacatagcttcatccaaaccttgatgaatgaaagtaagtgcttgttgat

SEQ ID NO: 4047 - DNA, 474 bp, Glycine max
  unsure at all n locations
attcttgattctcgaaatcaaatctcctcttgaaccttgaagtgttcttgattcaatcttgaactcattcttgatctttgagctttttgtcatcatcaaaacttctttgaattaatcttgattcatcatgaagcttgcttctacatatacttccataagaatataattnttttgttattagataagaaaaataaaaatgaacatactatttcataatactggaatgtgtagaacacgtcaatatttgttgtgaattctcatacaatcttaatgttcttttttactacttttgtaaggcaagaggagaaatttaacaattataaattaaacttgactaatatgacaatttaaatgacatgtttatgctaagatgacccattcaatgaaacataatattataatcatcattaaaagagtaaaacttcttaagtgctatgtgtgccanatatgtttgaaaaaaaagaacatttatga

SEQ ID NO: 4048 - DNA, 412 bp, Glycine max
  unsure at all n locations
agcttgtacatgcctcttatcccttctatttgttggcaattnttcacactcctatgtctcaacaatagaatttcatatctaccatcatcatccaccctcttttcttagaaaaaacaacaaccttattgattgaaaacacatttattgagactcttattaggcatgtaatcatcaaccaacaaaagctcgttcctttttctacaatactattggatttggaccaagtttttttgttgtaacctctccatgatcgatatctccaccatgaattgttgtaacacttgcttctaatcgtggttcgcacatttcacagtaatttgagtgttattcagtaatgtgcttctacactctcacaaaccctccagaacctgacaacatctctttcctaaattccccngtcacttaacttaaa

SEQ ID NO: 4049 - DNA, 421 bp, Glycine max
  unsure at all n locations
ctgatggtgtcgagaagacatcacatgtgtgtcatcatcaacaatgcggagaatgtgaatgtatgtatacatgagtntgatgatgtcaaagaagaatctaacaaggctgcttcaaatgataagcatttgcttcaagaataattcaagattgcttcaacacacaaagccttgtttcaagattcactaaagaccaagccttgccttaaaacaaagtgctttcaatacatgcaaggctctggtaatcgattaccaggaagtgtaatcgattacccgaagacagggttgagaaatattctgtgaaaaaggttctgaatatgaattctcaacatgtaatcgattaccacatgtctgtaatcgattaccagcaacgaaactttggaaattcaaattcaaaagttataacccttcaaattataactgt

SEQ ID NO: 4050 - DNA, 396 bp, Glycine max
  unsure at all n locations
ccagtacaaaagatcaaatgatatcgaccttntcttctatatgtaagttttacttttttccttcttttgggtttttccaaatatagtatccatgtgttcaaccctctaaaaaaccagctgatcagttaacattatcggcacattttcatgctcttgactttcattaaaagctttcttcaattgctgataacggtgataaggtttcataaaacattgatgcatgttgttcttncatgtttaagttgtacgcagcttatgccttcttcacagatagggcatgcatgatggcccttaacactgtatccgctcaaattcccatatgatggaaagttattaatggtacaaaatagcattgtgcgcaaatcgaaagtctcatttcaaaaaccatcaaacact

SEQ ID NO: 4051 - DNA, 489 bp, Glycine max
  unsure at all n locations
tgtagaatggctagacatgatacatgtcanggcttggtttggttcaaggataaaagggatgccccacattatttccatgacacaaatgcaaaaaatgatgatttggaaattntatgcacaactggtcatgcatgcgcctatgcggacgctcaagtgtcaaatttttatggtcatgtgatgctagggctcangattcatttcctctattntaaatcaacccaatggtttcaaaatatgttcttttatcaatttgtgcattcctccaagtccatttcaaggatggccttcactttttcggggtctacctctatccctttctggcttacaatgaaaccaagcaatttccctgatttgaccccaaaggtacacttagcggggttcaaccttaattgatatttcttaagcctttcgaacaactntcgcaggttgacaaggtggttcttctcggatntagaattagcaattatgtncgtcacgtagacctcgatc

SEQ ID NO: 4052 - DNA, 183 bp, Glycine max
cgagcgtcacgatatgtgatgtgcctgaattggacatccgagtgaaaagttattagcatttaatatttttcagagcttccgttgttcaatttcgagcgtctcgatatgtgatgtgcctgaatttgacctccctgtgaaaatttctgaccatttgaatttctcgagagctcccgttgtcaattt

SEQ ID NO: 4053 - DNA, 345 bp, Glycine max
agcttgagattgaacaacggaagctctcgatattaaaaaatggtcataacttatcacacggacgtgcgattcatgcgcataaaatatctagacgctcgaaattgaacaacgaatgctcttgagaaaatcttatgtgcataacttgtcacacggatgtccgattcagctgcataatatatccagacggtcgaaattgaacatctgaagctctcgacaaagtccaatggtcataacttatgtcacggaagcccaactctggcccatcatgtttggacatgctctgaattgaacaccggaagctctcgagagattcaaatggtcctaactttgtacacggaagtacga

SEQ ID NO: 4054 - DNA, 350 bp, Glycine max
  unsure at all n locations
gtgtgaagtatgcaatcctgcataggattggcactgccaactgggtacccaccaatcatacttccactgttgccacaggtttgggtaaatttctgtatgctgttggaaccaagtccaaatttaattntggaaactatatttttgatcaaactattaagcattcagaatcttttgctgtcaaattacccattgccttcccaactgtattgtgtagcattatgttgagtcaacatcccaatatcttaaacaacattgactctgtgaagaagagagaatctcctctatccctgcattacaaactgtttgaggggacacatgtnccagacattgtctcgacatcanggaaagct

SEQ ID NO: 4055 - DNA, 379 bp, Glycine max
  unsure at all n locations
ctacaataatatatcaagacgatcgancatgaacaacataagctctcgagaaattcgaatggtcatgacttttcacacgaatgttcaattcggggacataactcatgtagacgctccaaattgaacagcggaagcattcgagaaatttgaatggtcataacttttcacacgaaagtccgattgggggacataactcatgtagacgctcgaaattgaaaaacgtaagctctcgaaaaattccaatggtcataacttttcactcggatgtccgattcgtggacataactcatctagacgcttgaaattgaacaatagaagctctcgagaaattcgaatgctcataaatttcactcggatgtccgattcggggcatagtata

SEQ ID NO: 4056 - DNA, 421 bp, Glycine max
agcttgaaccttgaatcttgattcttgattcttgaagtgttttttattcaatcttgatcatcttgatcatcttaaacatctttgaacatcttgaactcattctttgattatcatgaattgacctttgagctttttttcatcccctttgttatcatcaaaacatctttgaatcaatcttgattcatcatgaagctttgcttctacacaaaatccattgaaatattgtcccacttccactggggtatctccaagggttgtaacttccctgaaggtctctgatgttctatcttagccttctggcaaagtaaacatgcatacacaaactcactaacctctctcttcatgttgggccaccaaaacatcaccttcaaatcctgatacatcttggtagcaccagaatgtatgcttaagttattcctat

SEQ ID NO: 4057 - DNA, 421 bp, Glycine max
agcttcaacatcagaccacttccagggtgctggaactacttcacatggacttgatggggcctatgcaagttgaaagccttggaggaaagaggtatgcctatgttgttgtggatgatttctccagattcacctgggtcaactttatcagagaaaaatcagacacctttgaagtattcaaggagttgagtctaagacttcaaagagaaaaagactgtgtgatcaagagaatcaggagtgaccatggcagagagtttgaaaacagcaagtttactgaatactgcacatctgaaggcatcactcatgagttctctgcagccattacaccacagcaaaatggcatagttgaaaggaaaaacaggactttgcaagaggctgctagggtcatgcttcatgccaaagaacttccctataatctctgggc

SEQ ID NO: 4058 - DNA, 476 bp, Glycine max
  unsure at all n locations
atagagttcacttataataacagttttcactctaccattggcatgactccctatgaagctttgtatggtagaaggtgtaggacacccctatgttggttagagcccggagaaggcctcaccttatgaccagaagtggtacagcaaaccactaagaaagttaagttaatttatgaaaggatgagaactgctcagagtaggcagaccagttatcatgataagaggaagaaagatctggaattcgaggttggtgatcatgtattcttgagagtcactccatggactggggttggtcgagcattgaaatcccgaaaactcacacctcgcttaattggtcctttccaaattcttaagaaagttggccctgtggcataccanattgcactacncccgtctctttctaatcttcacaatgcctttcatgtgtctcaactccgtaagtatatccatgatccatcccatgtgattgaatggatgat

SEQ ID NO: 4059 - DNA, 410 bp, Glycine max
  unsure at all n locations
agctntatattctgccacattattggtataatcaaaacccagcctaccacgaacgatgtgaattgattcatcagagaaattaacattgccctaatttcttaccccagttcattggaattccatcaaataacataatccatttttctccatccccaggttctccgtattcaaataatgccattatgtcttcttctgggaactcaaattgcatctattcgtagtcttctataggatgatgagccaagtattctgctaggttgctaccttttacaactttntgggtgacgtaaacaataccatactctaatagtaacatntggcagcaatcaatttgaccggtgaaagtaggcttctcgaatatatactngattgaatccattttggagaccaagtggtgtgagacaacatat

SEQ ID NO: 4060 - DNA, 433 bp, Glycine max
agcttgtgaaatcaatgaaattcaagattccgtttgacacaagtcgttcaattctgttcttagaaatgtgacctaagcgcttatgccataatgttcttgagttagtattatcaattctacgcttagtaccacacagttctgcattaaaggattcaccataagaagctacagtatcaagtagatatagattatcattaaccaagagtgaaccagttccaacaatatctgaattaaaagtcaacctgaacacattgtttccaaatgaacataaataacccaatttgtccaaataagaaaccgaaaccaaattccatctatatgacggtacaacaaaagtgtctttcatatccaaataaaaactagtacataataataatctaaaatgccctatagcttccacctccaccgatttaccatctccaacaaagatcca

SEQ ID NO: 4061 - DNA, 238 bp, Glycine max
  unsure at all n locations
agaattctgggactgctgttgattcaattgngtagccaattgtcccatctgattggttaagctctgaatggaggctctggtctcttgctgaaactgcatgttctgcatagtcatttgcctcacaagttcttcgagggaaggttgtggaggggcctcaactgttggctgtttctggggttgttgctcgtgctggattggcggaggaatgtatggtctgcttgcgccagtaccattttgg

SEQ ID NO: 4062 - DNA, 463 bp, Glycine max
  unsure at all n locations
gacatcttgactggctntccaatctgacattcaccacagattctgccttcttctattttcagattgggaatgcctctaacagcacctttgtcaatgattntcttcatgcctcttaagtgcagatgtccaaatctttgatgccatattctgacttcatcttctttggaggatagacatgtggaggagtaactggtttcttgaggtgtccataagtaacagttgtcctttgatctgctgcccttcattagaacttcactcttctcatttgtcaccaagcattctgactctgtgaagtttacattgaatccttcatcacacaactgactgatgctgatcangtttgcagtcagtcccttcaccagcagtactttgttcagactangaagtncatcatgaactagctttcccattccaatgatctctcctttagagccatctccaaatgtcacatagctagtggagc

SEQ ID NO: 4063 - DNA, 443 bp, Glycine max
  unsure at all n locations
atagatcctctaatctacaaagtccatttncagtttctttcttcccatgtcaactacgcagcttgcagttaacataaatggtcttcccaagattaagggaatgtcattatcttcacagatatccattacaacaaagcctgctgggaagataaaatgttttactctgaccaaaacatcttcaattactccatatggtctggtgatagagcggtcagccaactgtaaagtcattctagtgggcatgatttccaactctcctagtcttctgcacatggagtgtggcataagattgatcttggctcccaagtcaatgagagcttttccactgtgacttacctattgncaaggaatggcacactccacggtctttgtgcttcgtggaatgattttgaataccacactgcaattaccctcacaactatattttcctagtgaatgtactt

SEQ ID NO: 4064 - DNA, 364 bp, Glycine max
  unsure at all n locations
aatcggacctcagtgtgaaaagttatgaccattcgaatntctctagagctttcgtggtggaattccgagcgtctagacatattatgtgcccgaatctgacctccgtgtgaaaagttatgaccataagaatatctcgagagcttccgctgttgaacttccagcgtctcaatatattgtgcgcctgaatcggagctccgtgcgaaaagctctgaccatttggatntctcgacagctatcttggtagaattccgagcgtctcgacatattatgtgcgcgaatttgacctccgtgtgaaaagttctgaccatatgaatatctcgagagcttccgctgatcagtttcgagcgtctcttcatattatgcg

SEQ ID NO: 4065 - DNA, 423 bp, Glycine max
  unsure at all n locations
tcacttaggctataaatagaggccatgtgtatgcattnttttaactntgatcacttgagaattacactgtanagttcatacctcttttgaggcacaaaattntgtgccccttctctccctctccctccactcatcttctcctaccttcaagctcttatccaaggcttcctatggtggtgagcttcttcttgactcatcttttccttgaagtggcatctccaatcatctntcttccttctttattctgctgtcattaaacttcatgcaccaaaggactccattgatgaagaagatccaaggcctacaagctgcaatggagctacatcatgtggtatcaagagcatcttcatctaggtgatgtgctcttgcttcctttatctttntgtttggtcaactcactttacattcttgttcttcatctta

SEQ ID NO: 4066 - DNA, 427 bp, Glycine max
  unsure at all n locations
tgatgaaagctncaataaactcttcttattatgaatgtgaactctatcatgcaaaattgtgtggtcactagcagtcatattttcaattaagttcatggcttcttcaggtgtcttcaacttaatttttcctcctacagaagtgtcgagtaactgctttgactgcggccataacccatcaatgaagatgttcagttgtataggctctgaaaaactatgagtgggagtttttctcagcaagctatggaatctttctaatacctcactcaaagattcatcgggaaattggtggaatgaagaaattacagctcttccctctgcagttntagactntgggaaatatttntttagaaacttctcaacaacttcatcccaggtctttaaattgtcgcccttgaatgaatgcaaccatctcttggccctcccaaat

SEQ ID NO: 4067 - DNA, 465 bp, Glycine max
  unsure at all n locations
agtatgtatggcanaacttcattactggtgttcaagacatacaagtgagcttgtaacacatgttctacacttggagtgatcacatgcagtcctcttgaacccttaccacccactcggtcatcatgccgagactcaggaagccaataggtttagccttctctaagtattctgaacaaaattcaatggcttcttctgtaatgtacctctcaacaatagatgcttctggatgatataaattctttgtatacccttttaagatcttcatgtatcgctcaaccgggtacatccaccgtagataaataggaccacaacatttgatttatctgaccagatgcacaatcaagtgaatcatgatgtcaaagaaagcacggggaaaatacatctncaactggcacagtataattgcagcctcattttcaactcatcacacttgacaggatcaatgactttgctacatatagcatg

SEQ ID NO: 4068 - DNA, 337 bp, Glycine max
  unsure at all n locations
agcttgtagggttaaagtctcacgattgtctcgtgctcatgcaacaattgttagccgtggctatacgagacatcttgccaaacaaagtcaggttcacgataactcgcctgtgcattttcttccatgctatatgtagcaaagtgattgatccagtaatgtttgatgagttggaaaatgaggccgcaattatactgtgccagttggagatgtattttccccctgctttctttgacatcatgattcacttgattgtgcatctggtcagagacatcaaatgctgtggtcctgtttatctacngtggatgtacccgggtgagcgatacatgaagatcttaaa

SEQ ID NO: 4069 - DNA, 313 bp, Glycine max
agcttatgaaattgggcctggagttggagctgtgatgatttttctgtgtgtcgcggcggcggtggaagttacggtggcatccgcacgcggcgcacgttagcgagcgcggttcattggggttggatgaagaagagggcatgaattcaccgcacccatcaagcgcgtgaccacctatgctggctgcatggtttttgaggcactctttgtagaaaaccgtcctggagggtggctgttgcggcggcgacacggtggttgggtggtggtggtggtgcttgagggaaccgtttgtggtggtgttgggttgtggaggggt

SEQ ID NO: 4070 - DNA, 398 bp, Glycine max
agcttatgcagcaaatatatacaatagaccttctcaacctcagcagcaaaatcaaccacagcagagcaattatgacctttccagcaacagatacaaccctggatggaggaatcaccctaacctcagatggtccagctttcagcaacaacaacagcagcctgttccttccttccaaaatgctgctggcccaagcagaccatacattcctccaccaatccaacaacagcaacaaccccagaaacaaccaacagttgaggcccctccacaaccttcccttgaagaacttgtgaggcaaatgactatgcagaacatgcagtttcagcaagagaccagagcctccattcagagcttaactaatcagatgggacaattggcaactcaattgaatcaacaacagt

SEQ ID NO: 4071 - DNA, 325 bp, Glycine max
  unsure at all n locations
agctattaaccttctnttatatgatagacttttaatgaagaagaagaagcatcaatcaatttaataatgttctttaaacgtgcaacacaaaattgattgctataaaataaataaataatggaagagagaatctcaaactcgatttatactggttctgccacttcccatgcctacgttcagtcctcaaacaatccacttgagattttccactatctttgtaaatcctttacatactgtgaacacaccttgggatccatcaccctttgttggacaagtggcttcaataacttaagatgggggggggggtgaattaaatcttcaaaat

SEQ ID NO: 4072 - DNA, 486 bp, Glycine max
  unsure at all n locations
ctgtatggtagaaggtgtaggacacccctatgttggtcaaagcccggagaaggcctcaccttangaccagaagtggtacaacaaaccactgagaaagttaagttaattcaggaaaggatgagaacggctcagagtaggcaggaaagttatcatgataagaggaggaaagatttggaattcgaggttggtgatcatgtattcttaagagtcactccgtggactgccgttggtcgagcattgaaatcctgaaaactcacacctcgctttattggtcctttccaaattcttaagacagttggccctgtggcataccaaattgcactaccccgtctctttctaatcttcaaaatgtctttcatgtgtctcaactccgtaagtatatccgtgatccatcccatgtgattgaattggatgatgtacaagtgaaagagaaattgacatatgaaacattgcctttgaggatcgaggataggcgaacaaaacacc

SEQ ID NO: 4073 - DNA, 329 bp, Glycine max
catgcaagcttaagaaagctatctatggacttaaatatgcaccaaggcaatggtatgtgagacttagcaacttccttcttgaacaaaattttgagagaggaaaagttgataaaacacttttcattaaagagtcttctcatgacattttacttgttcaagtttatgtggatgacatcatttttggttccactaacaaatctctttgtgagagatttatacattaaatgcagggggagtttgaaatgtcaatgatgggggaagtaaattactttcttggtctacaagtaaagcaaatggaccatggaatatttcttcattaaacaaaaaaa

SEQ ID NO: 4074 - DNA, 468 bp, Glycine max
gactagacaccttaagaccatcattcaagtgacactccaagcactaacgatataaaccaaggaggtcatgatgggagataaagaggaatcagactagatgaccccctttaagaatttcttaactcaggatgtgttaccaccaaacaaaaatgaagcccaacacctgaaaaggaaggccaattactacatcatccttgaccgagaactatacaaaagagggttgactgcacccttgcttaagttcctgaatagccagcaaacagactacgtcatgcaaaagttacatgaaggaatcttcaaccttcatacaggggggcgctccctggcaaccaaggtagtacgtgctagctactattggctaacactcaagactaacaccctcaacttcatgaggagatgcagaagatgccaggaattcacaaatgttctgcgcacactccccgtcaaccttcacaacttgagctcttc

SEQ ID NO: 4075 - DNA, 445 bp, Glycine max
  unsure at all n locations
gagcaaattcgaacgacaataactctctactcgcatgtctggttgagtcccgtaatatatcaggacgcactcatttgaatgttgaagctgagagcaaattcaaacgacaataactttttactcggatgtctgattgagtcccgtaatatatcgagacgctcgaaattgaatgttcaacctatgagccaattcaaacgacaataactttttactcggatgtctgagtgagtcccgtattatatcgagacgctcgaaattgaatgttgaacctatgagccaattcaaacgacaataactttttactcggatgtctgattgagtcccgtaatatatcgagacgctcgaaattgaatgttgaacctctgagccaattcaaacgacaataactnnttactcggatgtctgattgagtcacgtaatatatcgagacgctcgaaattgaatg

SEQ ID NO: 4076 - DNA, 436 bp, Glycine max
agcttaaacattcaatttcgagcgtctcgatatattacgggactcaatcagacatccgagtaaaaatttattgtcgtttgaattggctcacaggttcaacattcaattttgagcgtctcgatatattacgggactcaatcagacatccgagtaaaaagctattgtcgtttgaattagctcagagctttaacattcaatttcgagcgtctcgatatattacgggactcaatcagacatccgagtaaaaagatattgtcttttgaattggctcagaggttcaacattcaatttcgagcgtctcgatatattacgggactcagtcagacattcgagtaaaaagttattgccgtttgaattggctcagacgttcaacattcaaattcgagcgtctcgatatattacgggactcaatcagacatccgagtaaaaagtattg

SEQ ID NO: 4077 - DNA, 318 bp, Glycine max
  unsure at all n locations
tacttgtgaaagagagccataaaggtgggctcatgggctactttgggatagacaagacccttgtcttactcaaagaaaagttttattggccccatatgaagaaatatgttcataagcattacactaggtgtgtggcttgtttacaagccaagtctacggtgatgcctcatgggctatacacacgcttacccattccctctgaaccttggtaaacattantatggactttgtccttgggcttcctagaactcaaagaggtgtagacgctatccttgtggtggtggataggtttagcaagatnggcacatttataccatg

SEQ ID NO: 4078 - DNA, 303 bp, Glycine max
agcttgtttaccccatgttgagtttgcttactatagagttgttcatagcaccactaattgttctccttttgaagttgtttacggttttaacccactaactcctcttgatcttttgcctatgcataatgtttcggtttttaagcataaagaaggtcaagcaaaggcggactatgtgaagaagcttcatgagagagtcaaaaatcaaattgaaaggagaaataaaagctatgctaaacaagtcaacaaagggagaaagaaggttgtcttcgaacccggagattggagttgggtgcacatgaaaaa

SEQ ID NO: 4079 - DNA, 400 bp, Glycine max
agcttccctttctttggccaatgctggacctgtttggcagtgatttccttggcaatttgatgctcagaaacagcaatgtccaccactccatctgttggtctgcccaggtatttgttgattacaacaggggagaatctaacacattttcctctaacaaatactttttgatactcatcactctttctgtttgttatgtcagagggaatgttgacaataaattccctgactagactttcatagcaatctcccaacttggtgacagttttcagcagtccagcagccttgatgaggtccatgatctccttgcaatccaaggcatctcttcccagttctctttctacagcaagtctgcgttgatatacaaatttccacctttcaacattgccaatggagtggaatg

SEQ ID NO: 4080 - DNA, 395 bp, Glycine max
gcgggatgaactcaggcgagggactagcattcaccaatactgaggtagaggcggattttaagcatccctcaatccacctaatacatttggacccgaaacccattcttctcagcatatataacaggaaatcccatgacactgagtcgtaagccttctcgtagtcaactttgaatacgatgcatggtttctggcctttcctcgcttcatcaaccacctcatttgctatgaccgtgctgtgtagtaaatgccttcattgaaggcagattacctttcgtcatgattaaaggcatgaccttcttcaggcggttggccagtagctctgccactatcttgtaaatccatcctatgagtgaaataggtctgtaatcgctcagaatctgtggctctgacacctt

SEQ ID NO: 4081 - DNA, 391 bp, Glycine max
  unsure at all n locations
ctagatgcctaggttaacctgataacccaactgactatgaataaaaaatatgcacctgtcaccagactatctggtttatgctcctctgccgaccaccacacagaccttntcccttctatgcaacaatctgaagcaattgaacagcctgaagcttatgctacaaacatctacaacatacctcctcaacctcagcaacaaaatcagccacaacagtgcaattatgacctctccagcaacaggtacaatcctgggtggaggaatcatcccaaccttagatggtcgaatccttcacaacagcagcaacaacaaccttattttaaaatgctgctggccaagcagaccatacgttcctccaccaattcagagaacaacagcaacagccccaaaatag

SEQ ID NO: 4082 - DNA, 442 bp, Glycine max
  unsure at all n locations
agcttcagctgcttctgtatggcagcatataataattaaataaaagctatctgaatatcatggtaatcaaatgatgtttgattttctgaagcaaattggaacacttagccaggttaatgaattttgtctgatctgcctcctacctttggtcaccactggcatgtaattaaaaggacaacaatactgaaatatatgcacaggtactaagtcaaataattatgatttaggactaagcttgtgctttntgttttttacttaaattgaataacaggttcatgcctatgagaggtcaaaccgagtttacaattacaatttagatccatgtggtcctgtatatattacagttggggatggtggcaacagagagaagatggcaatcaaattcgcagacgagcctggtcattgtcccgatccattaagtactcctgatccttatatgggt

SEQ ID NO: 4083 - DNA, 459 bp, Glycine max
  unsure at all n locations
tgaacttagctacacacccnctataatagctaagctcaccctcatgacaaaatacatgaaaatacaaaaaaaaaagtccctactacaaagactactcaaaatgcctcgaaatacaaggctaaaaccctatactactggaatggccaaaatacaagacctaaacgaaggaaaaaacatattctaatatttacaaagataagcgggctcatacttagcccatgggctcaaaatctaccctaaggctcatgagaaccctagggccttcccttggatctctggcccaatctacttggagtcttctatccaatgcccttgcggcgtaggattgcatcattgcctctagtcatacactacattcaacatgcacaactagttgccttgtcatgtaaataaaggtgtacgtttgaactacagctaccctcacatgatatccaaatgaattgaaattntgtgatcaac

SEQ ID NO: 4084 - DNA, 430 bp, Glycine max
agcttgtgggatttgtgatagtgatttttttggagatgttgatgatagaaaaagtactaccggatttgtattttttatgggtgattgtgtttttacatggagttctaagaagcaaggcattgtgacactttctacttgtgaagccgagtatgtagctgcaacttcttgcacatgtcatgccatttggctaagaagattgttggaggaacttcagttgttgcaaaaggaaagcacaaagatctatgttgataatatatctgcacaagagcttgctaagaatccggtgttccatgaacaaagtaagcatatagatacaaggtatcatttcattatagagtgcattaccaagaaagaagtaaaattgactcatgtgaataatcaagatcaagttgcggatattctcaccaagcctctcaagttaaagattttc

SEQ ID NO: 4085 - DNA, 469 bp, Glycine max
  unsure at all n locations
tgtcattgtatataactatccaaaagatattgaagcattctatatgcggctcaatgatgacttaaagacagtggttgttatggatgtgcttgtacccaaggtatatgttctgtatattttgttttcatcatgattgtaatgcatggcataatagaagcatgcaaatgtaatttcaggttggaaaactaattggtggaagccaaagggaagaacattatgatgtcatctagacaaggttcatatatctgtttactctgtcttttcttaatttctttccttgtattgntttccatgttaatattgtatttaaattgcataataaacgaaatgggtttgcctgttaagctatatgagtggtaccttgatctaacgcggtatggaatagtgaaaatgccaaatcttgccttggatctaaacgatgattctctttgccactggcttggaaatattagacatatgatcctctcat

SEQ ID NO: 4086 - DNA, 421 bp, Glycine max
  unsure at all n locations
taaagaagctatagcttatctacacaccccctataatagctaagctcacccccatgacaaaatacatgaaaatacaaaaaaaaatccctactacaaagactactcaaaatgcctcgaaatacaaggctaaaaccctatacgactagaatggccaaaatacaaggcccaaaagaaggaaaaacctattctaatatttacaaagataagcgggctcatacttagcccatgggctcgaaatctacccaaaggctcatgagaaccctaggtccttcccttggatctctggctcaatctacttggattcttctatccaatgcccttgcggngtagaattgcatcattccctccaccttggaaaatatttgacctcanatcgtgaggttcttcatactctgggctccttccctcaacacctgtaaaa

SEQ ID NO: 4087 - DNA, 229 bp, Glycine max
  unsure at all n locations
agtgattgcttagtgcaattctccattctcttctctttatcggagccccgtgaattgcgtattcgctcatgtgtcctccaccttcgagtttggagccatgcgtactgattgcttaatgcaattctccattctgaaacttttcggagccccatgaattgcgtttattgtcatatgtactccagcttatagtttggagccatgcgtatagattgcttanagcaattatcca

SEQ ID NO: 4088 - DNA, 233 bp, Glycine max
tggggacatatgggtaccttgccccagaatatatcaaccatggtagggctagcaaggaattagacatttacagtctcggggttgtagctctcgaaatcgcatgtgggacgaggactcaacaaaacggggagtttcatgtacctctcgtgaactgggcgacggcaaaatatgtggaagggaatgctcaggatgtcgaagatgagagactaaacaaggagtatgatgcggatgaa

SEQ ID NO: 4089 - DNA, 372 bp, Glycine max
  unsure at all n locations
ngccaaagagcatgtttgcagctatatacaagttgctgaagctttgaatctctgacgtagaagttacttggaatgctacctgtcagagcattatcagactattaagcctagaacgaatttctccatgtaccttgtttccaaccaaattcacgtatgtcaagttagaaagatgactcaaagctgttgggattgatccagataaactgttattggccaaattcagaattctcaaagattcaagacatcacttagaggaacgtaagtctntttcaagcatgttgtttgatgctgcaaagtcttggagctcttcacaaccttcaatctcttcaagtatgtggccattaatgctatccattcgtacatcaagagata

SEQ ID NO: 4090 - DNA, 449 bp, Glycine max
  unsure at all n locations
tatagcccacagaagaagaagaagcatcatcagcaactntcacaatactgaaccaaccagacactctattgtggtaaccaacaagcttaacagcgagtcctctttctggtagaccctcaacgatagtccacttggaaggtgggtcccacttagaaggaattggacttgggggacaccctggtctgagtgtggatggaaacacaccgaactgaatgctcttgaaaagctggccttgggtgatgaaagcgactcctgctgatcgagatgcaatctttatcggtaacccctcagagagctcgttgccagaatgcaccacagtcagagggcaagtttcgtttcctgcttttgctacttgtattccaccccgcatttctcttatcactggcaacacgaaataattgacaccgtattgaagcttatcgccgtcagtgtcgtacacatgatcatca

SEQ ID NO: 4091 - DNA, 458 bp, Glycine max
  unsure at all n locations
catgcaagctttntcctcccagtcttgacaatgaaatttatgctcagatttgttaccaaagcattgaggccagatatgatgagtgaaagaagcactgctgctctgttagatgccaaacctgccaactgagcaatggtgggactataatacatcacagtgttgattgccacaaactgctggaagactaagagtccaacgccggcatataaacctcttctcacagctgaagttctcaagagtttgactatgtcgatcttctctgaagagtctgcttccttaattggcatgtcaactgattccatcagagcctggatttcaccttaaacttcgtgtggcggctttatcttctttacattcgatttcgcttactctctcttaccctgtgggaacagaagtggaccacagttattatatacaatttcacctgcaaatgacaattgactaatgatgatgaacta

SEQ ID NO: 4092 - DNA, 387 bp, Glycine max
attttcaatatatttatccaatttcttaattatgattgttaaatgaattataatcttattattttttatgttatttacacttttgaggtactttatttttattaaacgtttacaatttaataagttatttatttttattttcagggaatgctgcccaacataattttagaataatagaaacattttaaaagattaaaatgactcttctaaacttaaatatctaaattgaaatgaaaaagtaaaacgacatattaaaagtatatctatttttctaatatgatctttgtataatagtagcaataagaattcaacctcatgcgtgtacttcaattataccattatctagactttgttaaatctggattgaacagcgtttttcacttttta

SEQ ID NO: 4093 - DNA, 441 bp, Glycine max
  unsure at all n locations
tgtatggtagaaggtgtacgacacccctatgttggtcaaagcccggagaaggcctcaccttatgaccagaagtggtacaacaaaccactgagaaagttaagttaattcacgaaaggatgagaacggctcacagtacgcacgaaagttatcatgataagaggaggaaagatttggaattcgaggttggtgatcatgtattcttaagagtcactccctggactgtagttggtcgagcattgaaatcctgaaaactcacacctcgctttattggtcctttccaaattcttaagacagctggccctgtggcataccaaattgcactaccnccgctctttctaatcttcaaaatgtctttcatgtgtctcaactccgtaagtatatccgtgatccatcccatgtgantgaattggatgatgtacaagcgacagagaatttgacata

SEQ ID NO: 4094 - DNA, 402 bp, Glycine max
  unsure at all n locations
tctanactntatacaagaatgaagctctgataccacttgttagacaagtcgcctcagatatcttaagaaggggggttgaattaagatattccaaactacttccccaattaaaaatctatttcactttttattcaagttataaattcccttaacaatgaagttcttaaatattgattcaaataaaacaacttgaatatgaatatgaagcaataataaacaaaggagattaagggaagagacagtgcaaactcagatttatactggttcggccacacccttgtgcctacgtccagtccccaagcaacccgcttgagagtntcactatcttgtaaattccttttacaagttctaaacacacaacgataatccttcctttgtgtttagaattcctttacaacaaga

SEQ ID NO: 4095 - DNA, 449 bp, Glycine max
  unsure at all n locations
gctatgctgagacattataatagactccctcagcagcaaatctaacaacaatagaataattatgacctttcaagcaatagatacaatccaggttggaggaatcatccaaatccgagatggacaagtcctgcacaacaacaacagcctgtccctccttttgagaatgttgctggtccaagcaagccatatgtttctnccccaatgcagcagcagcaacaacaacaaagacaacaagcaactaaggcttctcctcaaccttccttagaagagttagtgacgcaaatgaccatccagaatatgcaatttcagtaagagacaatagccttcattcagagtctgacaaatcagatggggcagatggctactcagatgaaccaagctcagtcccagaattctgacagattaccttctcaatctgtccagaatcccaaaaatctgagtgtcattac

SEQ ID NO: 4096 - DNA, 432 bp, Glycine max
  unsure at all n locations
cgcaagcttgagcaacagcattattaatttgggagccccagtgtgattgagatcttccctcttcagataaatgtgaggtccttcaccattaggcctcttgtaatgctccgtcaacctttcagcaaaataaagaggactctcccggccaacataatcttttagaatcccagccagttctgtctgcaactcaaaatctaagaaaatttccattgtttttccttccaggaaactacatttcatggtttctgaatgtagttaacatacaaatatgagagatgtgctattatgtatgagagacagaaagttattctgaatctaattgagtgaagaataacatggagttccanattgtttagttctgtatgacactctgaaaataaaagactaaagacattctgaagaatgaaatgatacacatttctacagtcacaa

SEQ ID NO: 4097 - DNA, 415 bp, Glycine max
  unsure at all n locations
atccttaagtcacctgcggctgcagcttgcattttctcgatatacacaacaattgatcattgcctatgtangngagtgatgaccnaatacattttctaacacaaggtgatcctgagaaggaagatgttgtgatgtccctgtggcacgacaagttgaagatgcttcttgtgactgatggagagaagggttgcacatatttcaccaaggtactatccacccatgttttgaaaatagagcttgtttgactaaattgatttaatgaagatcttatgaaggaaactgagataatacctttgatcattaactggttggtaacgtttatgtaataactaatgatctttggcttgaggtttgctttaccattcaaggtggtttttattatcttatacacatatgagctgggatgtcttttatg

SEQ ID NO: 4098 - DNA, 426 bp, Glycine max
  unsure at all n locations
tgtagaataaactntgtaaggcctaagggatgctatcagtgtgtcatatcattctcagctgctggcatatggtacacagtctgaaatgtaatatccaggaacaaacttaccattacttttcaatggacatgtgaacttcacgcaaaacaaaataagacaaacagttctaacctttctgaaataaggaatatggtacaaggtttgaagtagagaattcatataacaggtagctccttggttcttaagcccaacatagccagtctccttcttggaatcataagctcagtaatcaacaatcctacgaacaagaacctcagcttcgactataagagtatcattcacaagataccctctactaggatcatacaattcatcaagaggcatgaaagatgtgaaacccccctcactttcgcgtgcattaaactg

SEQ ID NO: 4099 - DNA, 280 bp, Glycine max
agcttcaacatcataccacgaccagggtgctggtactacttcacatggacttgatggggcctatgcaagttgaaagccttggaggaaagaggtatgcttatgtttgtgtggatgatttcttcatatttacctgcgtcaactttatcagagagaaattagacacctctgtagtattcaaggagttgatgtcctaagcttctaagagaaaaagactgtgtgatctctagaatcaagagtgacgcatggccgagagtttgaaaacagcaaaattactgtatac

SEQ ID NO: 4100 - DNA, 474 bp, Glycine max
  unsure at all n locations
tgaaggtaaactanatgccttagtaacctttaacccatcttccttgaatcagaaatctgtacctgtcacaagagtctgtggtttatgctcctctgccgaccaccacatagacctttgtccttccatgcagcaacctggagcaattgagcagcctgaagcttatgctgcaaacaattacaatagacctcttcaacctcaacagcaaaatcaaccacagcacaataattatgacctctncagcaacagatacaatcccggatggaagaatcaccttaatctcagatggtctagcccttaacaacaacaacagcagcctgctccttncttccaaaatgttgctggcccaagcagaccatacattcctccacccaatcaacaacatcaacagccccagaaacagcanatagttgaggctcctctgcaaccttccctcanagaacttgtgggcanatgactatgcaaaacatgcagttt

SEQ ID NO: 4101 - DNA, 204 bp, Glycine max
  unsure at all n locations
agcttgtggacccatgccaagtgagtttcattacaanatggcaaagtggtgacaacatcatcataacaaaaaaaatctttcattcaatgataaacaagagaggtcaaaagggttggatgaccataaaagtttgtcttgaacagtcttatgaccaccttaagtgggagcttttgcaggaaacctctactgacattggttgcccta

SEQ ID NO: 4102 - DNA, 311 bp, Glycine max
cacacttccaatgaaaggcctttctgttacaaaatttgaaatcaatgaaggtaagtaaattgccaattacaaagttacaaaaaagtcctcaatttttggaggttgttctctctttggtgtttcactcaatttggagtgcttcttagtccaatagctcttaaggtggttggccccttgcttcttgactcaaattctccaattgatggcaccaatcctcatttccaattccctatatggcaactcacaaacagggaaacaaagagacaagcaataaccaaagaccagaaaatgaaatgaaagctaaaccaata

SEQ ID NO: 4103 - DNA, 196 bp, Glycine max
  unsure at all n locations
agctntgaagatcttggaagcaagatacgcacaatgagataatgaacgatgcggctttcaaaagccaatgaaccggcaagaagccttccggtcatattcgcttggttattttataccaaccggcgggcatcatgcacagagaagtccaatttccaatcatcattcagtgcccctctccatggtacaccttcactac

SEQ ID NO: 4104 - DNA, 455 bp, Glycine max
  unsure at all n locations
gctccaagaatcaagattcaagaataatcaagtntacagattcaatcaagttttaagaatcaagattcaagaataatcaagatcaagattcaagaataatcaagatcaagattcgagactcaagattcaagaaacaagagaagactcaatcaagataagtactaaaaaaagttgttcaaaacattgagtagcacaggaatntttcacaagatcttttaccaaagagttctactctctgataatcgattaccttctggtaatcgattaccagtagccagcattgttttcaaaactgatttacaaagttgtgattgattaccataatcaggtaatggattaccaatatcttaaaacgttagatttcaaatttcaagagtcacaactagtgataaaacattttcaaatcattttaaacttgtgtaatcgattaaacaatactcgaaatcgattccagt

SEQ ID NO: 4105 - DNA, 430 bp, Glycine max
  unsure at all n locations
agcttatgctccanattagtcttgcagttgttcttcaatatatttatcatggatgcatttcaatatgttagtcgttttagatatttactccatagtttagtcttttgtaaataatatactaacaacatatcaaacaacaataacctcaataaaattaaatatgtatttcattgttcataaaattttaaaacatgaataaccatgaatatcatcgaagctaaatagacagtgttattttataaagtatattatatatttcaatcatattagttttggctctcatttagtaagttctatacaattacaattatactatgtaagtatctatgataactattattgctattaatattcattttctctcttctatatatgtttatcgtcatcatcgagaattagggacaggatggagacgatgttattgaacaag

SEQ ID NO: 4106 - DNA, 451 bp, Glycine max
  unsure at all n locations
ctcttaggtccttccaccagtatgaatgcccnccttgaacacgatctgactgaaaatcagacttggctccatacttggaattgataatcctggcccaaggttgttgcagatgagaagttaaggcccatatccactttcccagcaaagctatattaaatttagagatatctttaatccctagacccccctcagacttgggcaggcatacagtctcccattntacccaagaaattttcctatggtcttagtcccccccccccccataggaagttcctttgaaggctaccagtttatttactaccctttgtggaatcttgaagaaggataataaataaattggtacaacattgagaacaaaattgattagagttatctttcctccctttgatatgnttttctgggcccacttagatagtttagactcatttcttttattaaaggctcccacaca

SEQ ID NO: 4107 - DNA, 436 bp, Glycine max
tttgcaagctggaatcatttatcctatctctgacagccaatgggtgagtcccgtccaggtagtcccgaagaagaccggcctcacagtgataaaaaatgagaaggaggagctaattcctactcgggtgcagaacagttggagagtctgcattgactataggaggctgaaccaggttaccaaaaaggaccattttcccctgccattcattgaccagatgcttgaacgcctggcaggtaaatcccactactgtttccttgatggtttttctggttatatgcaaattactattgctcctgaggatcaagaaaagaccacattcacctgccccttcggcacttttgcttataagaggatgcctttcggcctgtgcaatgcccctggtacctttcagcggtgcatgattagtattttcagtgaatttttagaaaattgcata

SEQ ID NO: 4108 - DNA, 459 bp, Glycine max
  unsure at all n locations
ctgagaagcatgtgatcctttggcatcatcaaaacattcagcttgatcctttgtctacaatcatcaaagtacaccatcacaaatttaccaatgaattctctcaaaacatggttcattaatctcataaaattgcttggtgcataagtcaaaccgaaaggcataaccaaccattcatataatccatgtttaagtttgaaagcggttttccattcatctccttctttaatccttatttgatagtaaccactnttcaaatcacatttggaaaagaacaagcaccatgcaattcatcaagcaaatcattaagtctaggtattggatacctatatttaatggtaatattgtgtgaagctctacaatcggagcacattcntcaagaaccatctgtttttggaaccaacaataccaggacagcacatggactcatgatatctcttacccatcccttaccaatgagtt

SEQ ID NO: 4109 - DNA, 443 bp, Glycine max
  unsure at all n locations
cagacaactnntattttcgtacgaggctttacaaattatactatgacatcagtttaagtcttccatttcttatttatagtttatgaacttatgaagaatatacaagtggtatgctaatcatatgtatgccattgattagatgaaactcaaaggaatttggtagattggcctaagcgattcaacattatttgtggcattgctcgaggacttctttatcttcatcaagactcaagattgaggattgtacatagagatttgaaaaccagcaatattttactggatgcaaatttagatcctaaaatatcagattttggcttagctcgaacattatggggagatcaagtcgaggcaaacacgaatagggtggctggaacatagtaagtctttatctacattaatgtggtttgttcgattattctcacttaattntctttaaaattgat

SEQ ID NO: 4110 - DNA, 406 bp, Glycine max
  unsure at all n locations
agcttgtgggaatttgtgatagtgattntgccggatatgttgatgatagaaaaagtactatcggatttgtattttttatgggtgattgtgtttttacatggagttctaagaagcaaggcattgtgacactttctacttgtgaagccgagtatgtagctgcaacttcttgcacatgtcatgccatttggctaagaagattgttggacgaacttcagttgttgcaaaaggaaagcacaaagatctatgttgataatagatctgcacaagagcttgccaagaatccggtgttccatgaacgaagtaagcatatagatgcaaggtatcatttcattagagagtgcattaccaagacagaagtagaattgactcatgtgaaaacttaagatcaagttgcggatattttacc

SEQ ID NO: 4111 - DNA, 361 bp, Glycine max
tgagactaggccgcgaagcatgatgtcaactagtgctttatcttgtgtcaacctatgatccctgtcggattgaatactggaaggaattacatgcaaccttaccacttgctgtgatgtcaactgtactagcttatgcattctatacttcatattcaccgtaattaaatgagcgagattcggtgaatcgatctactatagcccactcaacatcatgcccatgactagtgctacgtgaactaaatacaaaatccatagatgtgctctgccatctgcattccgaagtttacaatggcttcgttgcctctgatggtcgatggcgcatagccttaaccttttgacatggctaacatcttgctacata

SEQ ID NO: 4112 - DNA, 443 bp, Glycine max
  unsure at all n locations
ntgagaaaattcaaacgacaataactntntactcggatgtctgattgagtcccgtaatatatcgagtcgctcgaaattgaataccgaagcgctgagcaaattcaaacgacaataactttttactcggatgtctgattgagtcccgtaatatatcgaaaagctcgaaattgaatgttgaagctctaagcaaattcaaacgacaaaaactttttactcggatgtctgattgagtcccgtaatatatcgaaaagctcgaatgtgaatgtagaagctctgagcaaattcaaacaacaataactttttactcggatgtctgattgagtcccgtaatatatcgagatgctcgacatggaataccgaagctctgagcaaattcaaacgacaataactttttactcggatgtctgattgagtcccgtaatatatcgagaagctcgaaattg

SEQ ID NO: 4113 - DNA, 356 bp, Glycine max
  unsure at all n locations
tgcaagctttaactcggatgtccgattcangcgcataatatatcgagacacttgatattgaattatagaggctctcgagaaattctaatggtcataacttttcacacggatgtccgattctggcgcatactatgtcgagacgctctaaattgaacaaccgtagctcttcagaaattctaatggtcataacttttcactctgaggaccgatttacgcgcataatatatcgagacgctcgaaattgactaacggaagcttcctgagaaattcaaatggtcataacttttaactcagacgtcccatttaggcgcataatctatcgagacgctctaaattgaacaccgaaagctctctac

SEQ ID NO: 4114 - DNA, 239 bp, Glycine max
cttaatggaagtcaagagcatgatattgcgccgataccgttgactggtgagcaggtatatcagcgggttcaacacctgaacactgtatttgggaagacccaaaagaaggataaaagtcagagttgcatatggaagaagaggtccattttctttgatctttcgtactagtgtgatcttgacggtagacattgtattgatgttattcattacgacataaatgattgtgacctagtcattgt

SEQ ID NO: 4115 - DNA, 418 bp, Glycine max
cgaaggaaaacttgatgcctcggtcaacctagtaacttatcttgtcatgaatcacaaatctacacctgtcgcaagagtctatggtctatgttcttctgcagatcaccatatagatctttgtccttctttgcagcaatctagagtcaatgagcaacctgaagcttatgctgcagacatttataatagacctcctcagcagcaaaaccaacaatagcagaataattatgacccttcaagcaatagatacaatccaggttggaggaatcatccaaatctgagatggacaagtcctccacaacaacaacaacctgtccctcctttccagaatgatgctggtccaagcaagccatatgttgctcctccaatacagcagtagcgacaatagcaacaacaaagacaacaagcaactgaggcccct

SEQ ID NO: 4116 - DNA, 430 bp, Glycine max
agcttcaacatcagaccactttcaggtgctggaactacttcacatggacttgatggggcctatgcaagttgaaagccttggaggaaagaggtatgcctatgttgttgtggatgatttctccacatttacctgcgtcaactctatcagagagaaatcagacacctttgaagtattcaaagagttgagtctaagacttcaaagagaataagactgtgtcatcaacataactacgagtgaccatggcagagagtttgaaaacagcaagtttactgaattctgcacatctgaacgcatcacttatgagttctctgcagccatcacaccacaacaaaatggcatagctgaaaggaaaaacatgactctgcaagaagctgctacggtcatgcttcatgccaaagaactttcctataatctctgggctgaagccatg

SEQ ID NO: 4117 - DNA, 414 bp, Glycine max
  unsure at all n locations
agcttgacatataaattatctaattattccaattctctcacatcatacaattgcttaatcaaagcaatctcaaacattcattttatgctaaacaatgcactgcatatcatctttaatcaattcactattcaaacacgctttacgcacaacgcaaacaactcaaagtgctgaaatttaaataactgaaataaaataactgaaatatgacaactaaactagctggaaatataaggtgtttaaccttcaccaaaacatcttcaatgactctatatggtcttgtgatggagnggtcaactaactggagggtcatgcgtgtgggcattatctctatctctccaagcccgcggcacatggaaagaagcattatatctatactaactcccaagactatgagagctttgcctaccacaacct

SEQ ID NO: 4118 - DNA, 438 bp, Glycine max
  unsure at all n locations
agcttcaatggatcttacatcatgtggtatcagagtcttaattaaataaaattaaattgaatttctagaagcccaatccaattaaattttagagggggaggtgagcatttggttactacacctcattgccacattatatggtcacacgttgtgcatgtccttcatgctttacatgcctcatgccacctaagcacacttagtggagaatcttggaattgatcttggattagtgggctgaaccataactaaaattcactaatcataattagtgaaattttgtctccaaagtttgggtccacaaattcaatttcaaattcaagtgaaatttgaattgaaattcaaatttccctccaattttgtgtgacacttacgctataaatagaggtcatgtgtgtgcattntttcaactctgatcatttgaaaattaaactttagatt

SEQ ID NO: 4119 - DNA, 431 bp, Glycine max
tacataagtgccattagaatttcaatacaaacaaactttatccattttaatttttggtatttgatcacgtattctgcaattgattaagaaagcacaaaatgaccagtaggcattggttgtaggcaataaatttgtcgaagacaaaatttaactgaatgtttgtcttaatatggtccaagcaatacagattccttctgtctgtctgtggataccatgaatgcgtgtcttaatgtggtccaagcaatacagattccttttgcacttatcccccttcttattttggtgtccaaagaggaggtcatggggaccttcagaatagggcctacggtaaaggtaagcaaggtctccatcatttgatcatatggctggtagaaaatgatacaaggttattcttgtatggctattatagcaaaaggatagatgcatgcaca

SEQ ID NO: 4120 - DNA, 421 bp, Glycine max
agcttgtttaccccatgttgaatttgcttacaatatagttgttcatagcaccactaattgttctgcttttgaagttgtttatggttttaatccactaactcctcttgatcttttgcctaagcctaatgtttctgtttttaagcataaagaaggtcaagcaaaggcggactatgtgatgaagcttcatgagagagtcaaagatcaaattgagaggaaaaataaaagttatgctaaacaagccaacaaagggagaaagaaggttgtcttccaacccggagattggctttgggtgcacatgagaaaagaaaggtttccggaacaaacgaaatcacagcttcaaccaaggggagatggaccatttcaagtgcttgaaagaatcaatgataatgcttacaaagttgagcttcccggtgagtataat

SEQ ID NO: 4121 - DNA, 446 bp, Glycine max
  unsure at all n locations
acacttaaaactcaagctgtgcttaacttccccatagactctctcataagcttttaattttacccaaaaagacctaccttcattgaagacacaaaggaaggtggtaaccccaaagcttggtcatagcaaaccactttgcatgccaaacatgagttctcagcctcttggttacatccctagaagtgcaaaaaccattctctaggtttttctttagttcatatctccgatgaacacatcgaggaagcttcttttggtgattctcctccaaacctgatttggcaagggctttatcaattattcccagtttctgcctctttcttctgcacccttttcttgcaattcggttatcaaacacaattgtccttcttctcttgttcttttgagacctataatcattgnttactctattttctatgatagattgaagactatggagttcgagagca

SEQ ID NO: 4122 - DNA, 442 bp, Glycine max
ctggaatgcagctactagttccagtgttggttttcacctgcaatgacacatctgaacaagactccaattttgatgaagatgaaggttgtgagataaggctttgactcactactccttcttcctttcccttgatcatgcgaaatgattttccaacctctgaatgccaaagttgaagaaagtgatcagggcatgttttactcgttggccatgaattgagcattgtggattccaatgacaaccttgcctctgtctcaactctcacactctcccactgtaccatgtgccgcgtcgaaggagattcggacttgacaatggattgatcaggaatcacacatagctgttttgctctttgggaatgacatgatcgaaggagacgcttctttagatgggtgttccagaagttcttaatctcattgtctgttcttccaggtagttgagatgc

SEQ ID NO: 4123 - DNA, 410 bp, Glycine max
agcttcttcttgtttctctgcccatttgaaaccaacatttttcttgagcactcattgagaggtgctgccaatgtgctcaaatccgtctataagaacttgctaagccatgaaaactcctcacctcggtcacagacttaggtgtaggccattcttgaatagcactaaccttgtcctcatcaacttgcactccttgtgaactcacaacacaacctagaaacacagcatggttagcacaaacaatgcatttatcaagattggcatacaattgttcttgtctagacacagtcaagacagattttaaatgatcaatatgcaaatcaagtgcagtgctatagataagaatatcatcagagtacaccacatcgaactttcctatgaactctctcaagatatggttcattactctcatg

SEQ ID NO: 4124 - DNA, 448 bp, Glycine max
ctacaaacgaataacacttggacccttacagacttaccagctaataagaaagctattaggtgtcgttgggtttataagattaagtatcatgctaatggctccgttgaacgatataaggctcaacttgtagccaaggggtatactcaaatggaaggattggatttccttgatactttttctccagttgcgaagctcacaacagtctgattattgttagcattggttgctattcatggttggcaccttcgtcaactcgatgttagcaatgcattccttcatggagaattaaatgaagaagtctatatgtagctgcctccaggaatgcaagtctcacaccctaatcaagtttgtcgattacaacgatcactttatggtttgaaatagactagtcgacagtggtttcatcgattgtcctcatttcttcttactcatggtttcaatcaagctt

SEQ ID NO: 4125 - DNA, 436 bp, Glycine max
agcttcaaccgtatcccataactcggcaagggacgttaaatgttattcccactcagatccaacagtgtcaaagatttcaaactagtccaattactcggtatcgtaccactaatatcattacctcccaaccttatctcaacaagagaatctaacttggcaacagaaggactcacagtcccactaagattaaacttttccaaaataatcatgtccacctttccgtccccattgcaccttatccccaaccatggcccgtgacaagggtcatttccactccaagaatcaaccaaaatccaaggataccccaaccctccaagaaactccaacaacaccatcacttcaaaagcacacataaccccggcctttgcctcacaaaattcattgttctcataactcactttactcgctgcaaattccgggatcggacccatgaagt

SEQ ID NO: 4126 - DNA, 438 bp, Glycine max
agatggtggaaaaattcaagaatagttcaataccatttcatctcttgaaaatctacacccttgtggagtggatcccacctcaagagttccaatcttacatacggagagaagatcagtggaagactcaatgacatataagcatctttataggttgatgagtactctcttttccattcttccattctacttttgaccaaggatagttgaccatattcctcagaagcatcactgaaaatctcatcagcagcctgcagcaccaaatcactttgtgactgatatgcttggctctcactatcactctcatcagtgcttgattcaccttctattttatgatcatcccattccatggatgtgaccttattataaccaaatgctagtgacctcttgcgttgacaagcctcggccctcactttcatattcattcgtttctcaagattt

SEQ ID NO: 4127 - DNA, 449 bp, Glycine max
ctatgtgtcttctttaaataaagaattggtggtaaagaccccaactagtggttttgtgttaacttctaatgtgtgtttgaattgtcctatggaaatttccagtagagcattcttgattgatctgatttgttttcctttgagccaaattgatgttattctaggtatggactagttatcttccaaccatgtcttgttaaactattttgatataactgtggtgtttgatggttcttgagtaagtaaggatatgatgtttatctttgccaaccaagttatgacatctttaaaagaagatgctcaagtgcacattatcttgtctaacctggaaatagagagagaggtttccatgtgtgacctccctgttgtcagagagtttcctgaagtgttccctaaggatatatctggtttacgacccgagagagagatagagctctccatagacctagtac

SEQ ID NO: 4128 - DNA, 449 bp, Glycine max
tcttagtctcacctgatgaagatgaattcgtggctacttcatgcactcctctaatgaaaatagcatcatttctggcactaaattgttgggacttggaagccatcttctcaattaaatttctggcttcagcaggggtcatgtctccaagggcttcaccactggcagcatctatcatacttttctccatgttactgagtccttcataaaaataatggaggagaagctgctcagaaatctggtggtgagggtaactagcacatagtttcttaaatctctcccagtattcatataagctctctccactgagttgtttaatgtctgaaatatcctttctgatggtcgtggtcctggaagcagggaaaaaaatttctaagaatactctcttgaggtcatcccagctcgtgatggaccgtggagcaaggtaataaagccagtcctttgccactccc

SEQ ID NO: 4129 - DNA, 461 bp, Glycine max
  unsure at all n locations
aagtcacctgcggcatgcaagcttccttntcaggtactttgatgttgtggtagtgaacctgtacccattttacgataaagtcacatcagctggaggcgttgaatttgaggatggaattgaaaatattgacatcggtggtcccgccatgattagagctgctgcaaaggttggtttatttgactaaaaatggaaattccctaacgttaaataaatttgaaatgatgacaaaaacttcccccctcccaatcgtcattacttaaaaagttttgtaaaatggctcagaaaataatcttttggccaaataccaccaagggcctaaactactgtggaaagtaacaggacctttgttcattgcataccttctttgagctaactataaggtgataaattcttatttgagtacaaccacaaggatgttttggtagtggttgatacagaagactaccctgcccttctggaat

SEQ ID NO: 4130 - DNA, 406 bp, Glycine max
ctacaaacgaataacacttggacccttacagacttaccagctaataagaaagctattaggtgtcgttgggtttataagattaagtatcatgctaatggctccgttgaacgatataaggctcaacttgtagccaaggggtatactcaaatggaaggattggatttccttgatactctttctccagttgcgaagctcacaacagactgattattggtagcattggttgctattcatggttggcaccttcgtcaactcgacgttagcaatgcattccttcatggagaattaaatgaagaagactatatgtagctgcctccaggaatgcaagactcacaccctaatcaagtttgtcgattacaacgatcactttatggtttgaaatacactagtcaacagcggtctcatc

SEQ ID NO: 4131 - DNA, 421 bp, Glycine max
  unsure at all n locations
agcttcaaccttttcccaaaactcggtaagggacgctaaatgttattcccactcagatccaacaatgtcaaagatttcaaactagtccaattactcggtatcgtaccactaatatcattacctcccaaccttatctcaacaagagaatctaacttggcaacagaaggactcaaagtcccactaagattaaacttttccaaaataatcatgtccacctttccgtcgccattgcaccttatcctcaaccatggcccgtgacaagggtcatttccactccaagaatcaaccataatccaaggatactccaaccctccaagaaactgcaacaacaccatcacttganaagcacacataacccctggctttgcctacaaaattcatgctcttataactcactatactcgctgcaaattccgggatc

SEQ ID NO: 4132 - DNA, 430 bp, Glycine max
agcttctggtgggacatcttgacttgctttccaatctgacattcaccacagattctgccttcttctattttcagattggggatgcctctaacagcacctttgtcaatgattttcttcatgcctcttaagtgcagatgtccaaatctttgatgccatattctgacttcatcttctttggaggatagacatgtggaggagtagctggtttcttgaggtgtccataggtaacagatgtcctttgatctgctgcccttcattagaacttcactcttctcatttgtcaccaagcattctgactttgtgaagtttacattgaatccttcatcacacagctgactgatgctgatcaagtttgcagtcagtcccttcaccagtagtactttgttcagactacgaagtccatcatgagctagctttcccattccaatga

SEQ ID NO: 4133 - DNA, 439 bp, Glycine max
  unsure at all n locations
taccatgacaaagacagccatggcatggggtttgagcttgnggttttcctccaaaggaacagatgaatccttcaagaatgagaacaattgctgagctgctggagcaatctccaatattctaaatgtttaattgaattagtcatatatcactcattacttcaattgttcaaaaacatgcattaagttgtgttactaactaacattagctgatagaatataaaaaaaacaaaatgtgtcactaactacctagttggagataaggttgaaagatatgaacaaattaaacggcttacttcttgaaaaaatatagaccgagttcttgagaattcttcttcatttcgttccatgatttcaccaccagagcttcgtgctcttgcgtgagacctttgccctccatgttctctactctctagctactagctaagatcggtatatatga

SEQ ID NO: 4134 - DNA, 443 bp, Glycine max
  unsure at all n locations
agcttgtagaagcaaaaggccagctatggttntcatggtggattntgaaaaggcctatgactcagtctcatgggcttttttggattatatgctgcaaagaatgggtttttgtcccaaatggagacactggatttctgcctgtcttaattcagcaagcatttctaaaagatgtccaggtttaattctctgatttgacgctagtcaacaaattgtttctgacaagtcatcaagctaacaagcttgtaaggattctaccgaaatcattgtgattgaaaggaaaagataatagaaagtaaatatgatgctaggacaacaaatggttgtcattttgagatgattaatacactggcttagtacttcaatttattctttagaaccaataaggagactgagtattttaaagtaaaaatacagaggacttctatattttggaaacatgaatg

SEQ ID NO: 4135 - DNA, 427 bp, Glycine max
tgaggcctgtaagctcgcgggattctgtgatagtgactgtgccggatatgttgatgatataaaaagcactaccggatttgtatgtagtatgggagagatcacccgcatggaggaatacacaccaggcgttgaacgctttctaaacgggaagccgatcttgaaacatgcaacgttcgttgcacaccgtcagagcctcttagtcgtgaaaaagaatggcagtagtgaacattcatcttgttagcgcaaggaaagaccgagccatctatagatgataatagacctgcacaatatcttgacaagaatacggtgttacatgaacgaagtaagcatatagatgcaaggtatcatttcattagagagtgcattaccaagaaagaagtagaattgactcatgtgaaaactcaagatcaagttgcggatattttca

SEQ ID NO: 4136 - DNA, 346 bp, Glycine max
tatgttgatgatacaaccagtactaccggatttgtattatttatggagagaatgtgtccctacatggaggtctaatacacaacgcattgtgacactctgtacttgtgaacccgagtatgtacctgcaacttcttgcacatgtcatgccatttggcttagaagagaggcggaggaacctcacttgtggcaaaaggaaagcacaaagatctatgttgataatagatctgcacaacagcttgccacgaatcccgtgctccatgaacgaacgaagcatatagatacgaggtatcatttcattagagagtgccttaccaagaaagacgtagaattgactcatgtgaacact

SEQ ID NO: 4137 - DNA, 443 bp, Glycine max
tggtgcactagatatctcgagatgggatatacatatgttggccatatcatacaccctcatggaatggtcaacaatatgttatatcatttatagacgattactccacatatgcatacttgtttgttatacatgaaaagtcacaatctctggatgtgttcaaaacatctaaagttgaagttgaaaatcaactcatcaaaagaatcaacagtgtcagatttgacagtagtggtgaatactatggcagatatgacggttcaagtgaacaacttccgaggcctttcgccaggtacctagaggaatgtgaaattgtcccatagtacaccatgttggagtcacctaacatgagtgatgtatctgaaagatgaaatagaactcttaatgatatggtgagaagcatgatttgtccttctaacttaccagagtcactctggggagaggcactg

SEQ ID NO: 4138 - DNA, 423 bp, Glycine max
  unsure at all n locations
tctagcttaagaaaaatggcctcagcaaattccttatttccagaaggaaattctatcaataaacctccaatctttaatggagagggttaccactactggaaaacccgaatgcaaatttttattgaggcaatagacttaagtatttgggaagccatagaaatagggccatatatacccaccacagtagaaagaattacaacagatggtagcacatcaagtgaaagcataacaatagaaaaacctacagatagatggtctggagaggatagaagacgagttcaatacaatcaaaaagccaaaaacataataacatctgccctgngaatggatgaatatttcagggtttcaaattgtaagagtgctaaggaaatgtgggacactctacaattaacacatgaaggaactacagatgttaaaagatct

SEQ ID NO: 4139 - DNA, 426 bp, Glycine max
  unsure at all n locations
ctattacgtgacactatgaaactaagcttaatcattcaatttgagcatctcgatatattacgggacttaatcagacatccgagtaaaaagttattgtcgtttgaatttgctcagagcttcggtattccatttcgagcgtttcgatatattacgggactcaatcgaacatacgagtaaaaacttgttgtcgtttgaatgtgctcagagcttcaacattcaatttcgagcgtttcgatatgttacgggactcaatcggacatccgagtaaaaagtaattgtcgtttgaatttgctcagagcttcggtattccatttcgagcgtctcgatatattacgggactcaatccgacatctgagtaaaaaggttattgtcgttagaatttgctcagagcttcaacattcaattntgagcgttcggatatattac

SEQ ID NO: 4140 - DNA, 457 bp, Glycine max
  unsure at all n locations
tgagcacgtaagcttctgtcanaaatccttgttaatatattaaggtccttccttcatgatttgattagggccttgcaatttagtttcataccgaggcggnggaccaaagataatgctaatattctttatgaagtggtgcaccatatgaggatgtccaaaaggaaacaaagagatgtggtcctctagttgtatcttgagaaggcctatgatagggtggattaaggcttcctcaagcagactcttcagctttttggttttcttgaagttattgtctccctaatcatgcacgatatttcttccactagcatctccatttgttggaacgacaataagcttgagggatctaccctagtaaggggactcagaccagggatcccttatctctatatctttntgtcttgggtatgaagtgctttggagccaagaacaacaaggaggtccatgagggtaactggga

SEQ ID NO: 4141 - DNA, 452 bp, Glycine max
  unsure at all n locations
gtgtcagagaaagaagtgacaatgaacaatagttataacttatgtgaagttaattagttgaatttgacagtttaccaagaattaaacgacataatttcagttgaagagatagaccaatataaaacttcttgtgcctaatctttttgtcttccttaaagttttaaacttgggcaaaagatgtgaatttgtttagatatcttgtgtttctaaaaacatttacttcatctaatagatttttcagaaaaatcatttatttgtttttaacaaagaaccatcggatgagggctttgtttttaaaaggaaaaaagttttaaattttctaaaatcataattcaactctctttcttataatattagtctttacatacatacagatcaataatagtcacaatgcgatcccacaaagctaatggagaaagtgtccataggtnaatggtctattatgttttact

SEQ ID NO: 4142 - DNA, 465 bp, Glycine max
  unsure at all n locations
tgangcacgtaagcttgctaagatacatggcccaataatgagcctattgctgggacaaataaccactgttgttatgtcttcagcacaaatgcccaaataggtgcttctaaccaatggccaattcttgtcaaaccgaaccattccccaatctgtgccagttctaaactatgaacaatacaaccttgctttcatgcccatttcacctctttggagggaactcagaaaaatatgcaacacttagttatttgcccataagtctcttatgctagccaagacgttaggcgtaagatagtgcaataactagtctccgatatacatcaaagcagacatattggtgaagcagtggatattggcacaacaacattcaagactaccataaatcttctatcaaacactattttctctgtggatttgattcactctacaggtaaagcagaagagttgaaggacttggtgaccaatatc

SEQ ID NO: 4143 - DNA, 183 bp, Glycine max
gaagtgaacctcggatccctgtcggatacaatcctggaaggagattcatgcaaccttaccacttccttgatgtaccactctactatcttctacattctatacttcatattcaccggaataaaacgaaccgatttggtgagtcgatctactataacccacacaacatcatgcccatgactagtc

SEQ ID NO: 4144 - DNA, 415 bp, Glycine max
  unsure at all n locations
tagctntcactcgcatgtccgattcangcgcatagtgtatcgagacgctagaaatctaacaaaggaagctctcgagaaattcaaatggtcataacttttcactcgcatgtccgattcaggcgcataacatatcgagacgctcgaaattgaacaacttgatttctcgagaaattcaaatggtcataacttttaactcgcatgtccgattcaggcgcataacatatcgagacgctcgaaattgaacaacggatgttctcgagacattcaaatggtcataacttttcactctcatgtgcgattcaggcgcataacttatcgagacgctcgaaattgaacaacggaagctctcgagatattcaaatagtcataacttttcactcgcatgtccaattcaggcgcatagcgtatcgagacg

SEQ ID NO: 4145 - DNA, 406 bp, Glycine max
  unsure at all n locations
tctgctntcagcanattctaacgataatagctttntattggatgtccgaattaatcccgtaatatatcgagacactcaaaagtgaaaccaaaagctctgagccaaatcaaatgacaataactttttactcaaatgtctgagtgggggccgtggtatatcgagacgttggaaattcaaaatagaagctctgagcaaaatcaaacgacaataaattnttactgggatgtccgactgtgtcccatagtatatcaagacgctcaaaattcaaaacagaagctctgagcatattcaaacgacaataactttttactcggatgtccgaattaatcccgtaatatatcgagacactcgtaattgaaaatggaagctctaagcacattctaacgataataactcattactcgga

SEQ ID NO: 4146 - DNA, 415 bp, Glycine max
  unsure at all n locations
tgtagctgcaacttagccctgagaaactgggtttataagatttagggagtgaagattgctgaaaaccctagctctgcaacaagtcctatggaagtagacccggagatggacaagaaaatccgcagtattgtgagtagcattctgaaagatgcttctgtgcctgatgctgagaaagatgttccaacatcttccaccccaagtgtttccgtgcctgatgctgagaaagatgttccaacatcctccgctccaaatgctgaagccctcccgtcacccagtgaagaggaatcaacagaagaagaggatcaagcctcagaggagactcctgcaccacgggcaccaganactgctccaggtgacctcattgacctggaagaagtcgaatctgatgaagaacccattgccaacaggttggcac

SEQ ID NO: 4147 - DNA, 467 bp, Glycine max
  unsure at all n locations
ctgttatgcacctactagttccagtgttggttntcacctgcaatgacacatctgaacaagactccaattttgatgaagatgaaggttgtgagataaggctttgactcactactccttcttcctttcccttgatcatgcgaaatgattttccaacctctgaatgccaaagttgaagaaagtgatcagggcatgttttactcgttggccatgaattgagcattgtggattccaatgacaaccttgcctctgtctcaactctcacactctcccactgtaccatgtgccgcgtcgaaggagattcggacttgacaatggattgatcaggaatcacacatagctgttttgctctttgggaatgacatgatcgaaggagacgcttctttagatgggtgttccagaagttcttaatctcattgtctgttcttccaggtagttgagatgctatagaagcccacctaagtgaatac

SEQ ID NO: 4148 - DNA, 447 bp, Glycine max
  unsure at all n locations
ctcatcttggaggagaagctccttctttcatggcttattccttaatggatggcgccttctctcacctcttttactttggtttccgtgcatctacatggtggaaaatcaccattaaaggaccccattgaagctaaaaaattcagccttcatagaagccccataagcaagcttccatcacaaaggacttcactgatgaagaagatctaaggcctacaagctccacatggagctatttcagaggttgacaaagctaacgtggaagtcattgaaaaattaccaccaccagcaaatgtcaaaggcatcagaagttctttaggacatgttggattctacaagcanttcatcaaagattattctaaaatttccaaacctttgagcagatctttgaatcaagaagtgtcatttcattttgataattatgtcttaaagctcttgatactttgaaac

SEQ ID NO: 4149 - DNA, 421 bp, Glycine max
  unsure at all n locations
cttgcatacaacaatggagcttatccaatggacttatcaatgctaagaaaattcaggatctaaagatttagctgaatgctttggaggttggtatttctggcagaatcctgactcaacctgaagtggagctcaagaagtcttttcaggagcaactntgacatgcaactaatgcctatgaatccatgttgaggcaaaaggctagagtgaaatggttaaaggaaggggacagaaattcagcttacttccataaactgataaatcacagaagaagacaaaatgctatacaaggtttgatcattgaaggggggtgggttcaggaccctagtagggttaaaaatgacgctcttaatcattttaaagatagattctctgagcagaatcttaacagaccaaccntagatggtgtgcaactaccttccct

SEQ ID NO: 4150 - DNA, 307 bp, Glycine max
tcaattacgagcgtctggatatattactggactcaatcggacattcgagtaaaaagttattgttatttgaatctgctcacagcttctgtattcaattatgagcgtattgatatattttgggactcaatccgacatacgtggtaaaagttattgacgcttgcatttgctacgagcttccgttttcaattacgagcgtctcgatatattacgaaactcaatccaaccgtcgagttagaagttattgtcgtatgcatttgctacgagcttccgttttcaattacgagcgtctctatatattaccggactt

SEQ ID NO: 4151 - DNA, 337 bp, Glycine max
ctccatgtagcaactaacaaatccaatcgcataaagaatatcaggccttgtgcatgttaagtactgcaaatttccaactaagctcttaaagagtgtcggatctatcctttcttcctactcatgctgtgatagcttgattccacattacattggtgtgttgacaggatcagagacatccatcttgaactccttaatcacttccgtagcatgaccttctcgagtgatgaaaatgtatctatcctatcactctagttcaatgccaaggtagtaagacatgagaccaaggtcaatcattgcaaactctgccataattccttgtttaaattcatcgaacatg

SEQ ID NO: 4152 - DNA, 448 bp, Glycine max
agcttatgctgcaaacatttacaatagacctccttttcctcagcagcaaaatcaaccacaacagaacaattacgacctctccagcaacagatacaaccctggatggaggaatcaccctaatctcatatggtctagccctcagcaacaacaacaacagcctgttccttccttccaaaatgttgttggcctaagcagaccatacattcctccaccaatccaacaacagcaatagccccagaaacagccaacagttgaggctcctccacaaccttccctcgaagaacttgtgaggcaaatgactatgcagaacatgcagtttcaacaagagaccagagcctctattcagagcttaactaatcaaatgggacaattggctacacaattgaatcaacaacagtcccagaattctgacaagctgccttcccaagctgtccaaaatccccaaaat

SEQ ID NO: 4153 - DNA, 387 bp, Glycine max
  unsure at all n locations
gagctcatatatatcgagatgctcgaaattaaacatcggaagctctcgangaaatcaattggtcataatttatcacactgatgtccgattcgggtgcataatatgtcgagacgctcgaaattgaacaacggaagctctcgagaaattcaaatggctataactcttcacacagatgttcgattcaggagcatcacatatagagacgctcgaacaacagatgcactcgagaaattaaatggtcatagcttttacacccagttccgagtcacgcttatgatatattgatacgctcgagatcaacatcggaagctcacgagatattcaaatggtcattacttttcacactgatgctcgagtatggagaatgccattattagatgctcaaaa

SEQ ID NO: 4154 - DNA, 472 bp, Glycine max
  unsure at all n locations
tagatagacaatacttcattcataacatcaaataaactattttagtcatccacaatattcaaataaaacatatatgaataattaaaaaaaaataaaacaaaataccaaaagtaagtacataccactagtcatatatcattaaagtaattaagtttaaaacacataatcataaacaaccaagagcaagtcaatataatcatcatgttcagtcatactaagcaagtattaaaagaaatactaagtattcaaatttcataaaaacatagccaaatacaaggcttaaaaacaaaatataattataatctaaatctattatcagagaatcaaaacttaattctaagtaacaaaaattagttatgaacacatacatggtaactcattacttatctcaattattttagcatatcaatataattctgacaaaaatccaatcatgtcanatcatanataaatgggataacatacaataaat

SEQ ID NO: 4155 - DNA, 410 bp, Glycine max
tatagcttcatcaagatgagcggagggacagggagatatagatcatgccattatatgcctcacacgaggtctgaacattgaagcataattcctaaatgatcgaagttgataaaaatacacacatatgatctctatttatagcctacgtgtcacacaaaattagagggaaattcgaatttctattcaaattctacttgaattggaaatcgaatttgtggagccaaaatttcactaattatgattattaaatgctagctatgattcagcccacaaattcaagatcaagctcaagattctccactaagtgtgcttaagtgtcatgaggcatgtatagcatgaatgacatgcacaaagtgtgactatatgatgtggcaatggtgtgcagcaagcaaatgctcacctccttctct

SEQ ID NO: 4156 - DNA, 435 bp, Glycine max
tctgttttctattgcgagcgtctagatatactacaggacacaatcgtacattcgagataaaagttaatgtcgtttgaatatgctcagagcttcggttttcaatttcgagcgtctcgatatactacgggactcaatcggacatccgagtaaaacgttattatggtttgaatttgctaggacctactattttcaatttggagcatctcgatatattacgggactcaatcggacatctgagtaaaaagttattgtcgtttgaatatgctcagaccatatgttatcaatttcgagcatcacgatatactatgggacacaatcggacattcgagtaaaaagttattgtggtttgaattcgctaggagctactattttcaatatcgagcatctagatatattacgggactcaatcggacatccgagctaaagcttattgtc

SEQ ID NO: 4157 - DNA, 418 bp, Glycine max
  unsure at all n locations
tctgctntgagcaaattcaaccgacaataactcttatcttggacgtcagattgagtccggtaatatattgagacactcgaaattgaaaacagatgctttgagcaaattcaaacgacaataactttttactaggatgtccggttgtgtcccgtagtatatcggcacgctcgtaattgaaagcggaagcttgtagcaaattcaaacgacaataacttttaactcggatgtgcgactgagtcacgtaatatatcgagacgctcgtaattgaaaatgttagcttgtagctaattcaaacaagaataactttctactcggatgtccgaatgagtctcgtactatatcgagacgctcgaaattagagcagatgctttgagcaaattcataagacaataactgtttactcggatcgccgattgag

SEQ ID NO: 4158 - DNA, 460 bp, Glycine max
tctttgcatgaagcaccacctcattagagacacaagttaatagcaacaacaacaataatgcagaggaagattaaccttgaaatggaagaatgccccattttggttcctactaaatagagtgaacgtacaatgtcatgtttcatcattggggactttgaaaatgcgcatgattcggtttcttggggctttctaaattacatgttgatgaggatgggattttgtgaaagatggaggaaatggataaatgtttgtatgtctactgcaactatatccattttaattaatggaagtcccactagggagggtgatcccctaagagaggcttaaggcagggtgattccctaccacctttgcttttcaatatagtagtggaaggccttacaggtctgatgaacacagccatatctaagatccttttcagcagcttccaagtgggaagtcacatgaggaagttacatac

SEQ ID NO: 4159 - DNA, 466 bp, Glycine max
  unsure at all n locations
cataatatatcgatatgctcgaaactaaacatcggaagctctcgagaaattcaaatggtcataacttttcacacggatgtccgattcgggtgcataatatgtcgagatgctcaaagttgaacaacggaagctctcgtgaaattcaaatggtcataacttttcacactgaggtttgattcaggcttataatataacgatacgctcgtaagtaaacatcggaaactcttgagaaattcaaatggtcataacttttcacacggatgtccgattcgggcgcataatatgtcgagaggctcgaaattgaacaacagaagctcttgagaaattcaaatggtcataactnttcacacggatgtccgattcaggcgcataatatgtcgagacgctcgaaattgaacaacggaagctctcgagaaattcaaatggtcataacttttcacacggatgtccgattaggcgcatcaca

SEQ ID NO: 4160 - DNA, 314 bp, Glycine max
  unsure at all n locations
acatccgagaganaatctatgactatttgaatttctcaagagcttccgctgctcaatttctagcttctcgatatgcgacccgcctgaatcggacatccgcgtgacaagtcataccacccgacattctcaagagcttcccgggttcagttttcgacgcctcgatatgtgatctgtctgaatccgacatcccggtgaaaagatatgaccatttgcatctctcaagaccctccgctgttaactcccagccctccgcatattatgcgaccgaatcggacatccgcgtgaaaagttatggccatctgaatctcctcaga

SEQ ID NO: 4161 - DNA, 365 bp, Glycine max
  unsure at all n locations
tgaaggtgtgtagcccatcatcttttcatagtagaatactggtaatgtgtctactatcattggtatcattnttttcttcgtcattgaggtgccacttgagctgccaagtctctccacctttgggcgtattcttttgaaagattcatgccccctttttgcacatgttctgtagttgcatcctatccgaagacattatactgacactgcctaacaaaggaaaccactaggtccttccaagaatggactcgggaagggtccaagtttgtgtaccaagtaacagctaccccagtaagactttcttggaaggaatgtatcagcaattcctcatcttttgtgtatgcccccatcttcccgatatacatctt

SEQ ID NO: 4162 - DNA, 379 bp, Glycine max
  unsure at all n locations
cgccaaagagcatgtntgcagccaagaaaagttgctgaagctctgaatctctgaggtagaagttacttggaatgctacctgtcagagcattatcagactattaagctcagaaggaatttctccatgtagtttgtttccaaccaaattcaggtatgtcaagttagaaagatgactcaaagctgttgggattgatccagataaactgttattggccaaattcagaattttcaaagatttaagagatcacttagaggaaggtaagtctttttcaagcatgttgtttgatgctgcaaagttttggagctcttcacaaccttcaatctcttcaggtatgtggccattaatgctattcatttgtacatcaagagatattagatgc

SEQ ID NO: 4163 - DNA, 401 bp, Glycine max
  unsure at all n locations
tttagcctagctctggggacatttgactgcttcatctgacttacaagatctgcttctttattttagagggggatgccttaacagcacttgcaatgattttttcatgcctctttaagtgccagatgtccaacatcttttgatgccatattctgacttcatcttctttggaggatagacatgtggaggagtagctggtttcttgaggtgtccataggtaacagctgtcctttgatctgctgcccttcattagaacttcactcttctcatttgtcaccaagcattctgactttgtgaagtttacattgaatccttcatcacacagctgactgatgctgatcaagtttgcagtcagtcccttcaccagtagtactttggtcagacntatgaagtcatcatgagct

SEQ ID NO: 4164 - DNA, 443 bp, Glycine max
tagtaaagctaagcactaacaatctccccctgtggcaaattttgtctaaaacatacttaaacacttcctgagcatgtacgagcagttatgcaagtgggatcagcaacttccattatcagagtaatcaagcacagcggaaattctgtaagttgcaagtcgtttccaggatgtcaagacatctcacatgacatcagctttctgcttctgcatcccctgtctccatgcttactgcaacatcttttaacagctactagtcttctccaggatgtcaagacatctactgtgacatcagctatctgctccccctgtctccatgctcttactgcagcatcttctagtagctttcatcagtcatcatcagcagcagcagtctccccctcaaaatcgtatacatacaactccccctcaaaatcatgaatcatgcatacatcgtattctactac

SEQ ID NO: 4165 - DNA, 487 bp, Glycine max
  unsure at all n locations
ttacggacacttaaaactaagctaacaagcttntttatagtttgagccttgaccttttatctaaagagactntaaaaagcttgagcttggcctttatgataaacaagtcaagccgagctgagccttacataggccgagccaaaggctctcgacaagctgctcggctcatttccacccctaaccctatagcaaaagttggcatcttcagtgatgaatgtcgttttctcctcgtttggagcatgcatcctgatttggttgtatttggagtaagagtccaagaagtttagcacctggaatccagacaatccatcgactagcttgtcaatgcttgatagagggtatgcatatttagggcacgccttgttcagatcagtatagtcagtgcacatttgtcatttgtcgttggcctttttgaccatgacaatgttggcgagccangtggagtatctaacttctcttatgaagttggcattgagcagttatctac

SEQ ID NO: 4166 - DNA, 443 bp, Glycine max
  unsure at all n locations
tagcttgctaacccatggaagctcctaatatctccttactntntggggtgggccattcttggatggcctttattttctcatggtccacttggaccccatttctaccaactacaaaacctaaaaaaactatattatctacacaaaaggtacacttctctatatttgcatagagggtgtttttcctaaggattgaaagaacttgcctgagatgtcctaagtgatcatctaagctcctactgtacactaaaatatcatcaaaataaacaactacaaatctacctatgaaatcccttaagacatgatgcataagcctcataaaggtgcttggtgcattagtgagcccaaaaggcatcactgaccattcatacaaaccaaacttggtcttgaaagccgttttccactcatcaccctttntcatcctgaattggtgataaccactttta

SEQ ID NO: 4167 - DNA, 470 bp, Glycine max
  unsure at all n locations
cgatgcacaatttcattgaagagacaaatattacaatatgtatttaacatgtatataaaatgttgagataaattataaagactaagagaagaattatgacaaaaaaaatgagatgaaaagtattggagttatgattatgatcatgtcgagctttgcacaagttaacaatgtacctattaaatttggttgtgattccaaatgttgagaaaaatgtctagattcaatttccatttttccatatcaagtgtgtttttgcatgtgtatgaaaaaatgtcataaaaagtcgaataagaatggtattcattctcttaccactttntaaggttttgtaattattattttataattgaattaattattattttacatgttgtttatcattgactntatttccttagatgctgatcattacattagattcttgcttgcaagagtactaaaacaagtaaaaatatgttacaagaatattg

SEQ ID NO: 4168 - DNA, 435 bp, Glycine max
  unsure at all n locations
tctgcttccttcaatnggacaacagtggtgtgcctcttaatatcaccacctaagtagtgtttggttctactgccacgctgtccatgtccttttggnggttgggtcctccaatatcaccactccaagtggcataacttcattgatgaagaatggtctagaccacttggatttcagcttacctagaaacaatctcaatctagaattaaataacaaaacctgttgaccaggctgaaaattcctttctgaaagctttttatcatggtaaattttaactctttgcttataaatcttggaattctcataagcttgaaacctcagttcctcccattcatgaagttggagcttcttattttcactagttgcatttgagtcaaaattcagaaacttcaatgcccaataagctttgtgctccaactcaacaagtacgtgacaaga

SEQ ID NO: 4169 - DNA, 465 bp, Glycine max
  unsure at all n locations
ttatagaacgtttgttcctaatttctctacaattgcatctcctctcaatgagctggtgaagaagaatgtggcatttacctgnggtgaaaaacaagagcaagcctttgctttgctcaaagaanagcttactaaggcacctgttctagctcttcctgacttttctaaaacttttgagctagaatgtgatgcctctggagtgggagttggaactgtattgttacaaggtgggcaccctattgcttattttagtgaaaaacttcatagtgtcaccctcaactaccccacctatgataaagagctttatgccttaataagagccctctaaacttgggaacattaccttgtttccaaggaatttgtcattcatagtgatcatcaatcacttaattacattagagggcaaaacaaattaaacaaaaagcatgcaaaatgggtagagtacctatagcaatttccatatgttat

SEQ ID NO: 4170 - DNA, 470 bp, Glycine max
tatggacttgggtgttgcccaatttcatcgtatcttttgtaatactcaccacctctattagatctaataattttcacttttttgtctaattgtctttctactttattcaagtaaatttctaaggcatccattgcccgagatttctcatgcagtaagtaaacataaccataacgtgaatagtcatcaataaaggtgataaagtatctttcctttccgaaagaactaacatcaaaaggtccacaaatatcagtatgcacaatttcaagaagctgagtgcttcttgtagctcctttctttgtatgttttgttgttttcccttgatacaatccacacaaatatttagatccgtaaaatctagatcatgaagaatttcattctttattaatcattccatcctttctctagaaatgtgacctaaacgtttatgccacaagaaagcagatcgttcattcactaaacctacgttagtg

SEQ ID NO: 4171 - DNA, 392 bp, Glycine max
  unsure at all n locations
ncaagctttatagaaggttcgctcctaatttgtctattattgcatcacctctcaatgagctagtgaagaagaatgtggcatttacctggggtgaaaaacaagagcaagcctttgctttgctcaaagaaaagcttactaaggcacctgttctagctcttcctaacttttctaaaacttttgagctagaatatgatgcctctggaatgggagttgaagctgtattgctacaaggtgggcaccctattgcttattttagtcatagtgccaccctcaactaccccacctatgataaagagctttatgccttaataagagccctgcaaacttgggaacattaccttggttccaaggaatgttgcattcatagtgatcatcaatcacttaagtacatt

SEQ ID NO: 4172 - DNA, 226 bp, Glycine max
tctggtgggacatcttgacttgctgtgcgatctgacatttatcacaaattctgcctgtttctattatcagattgggaatgcctttaacagcactttagtcaacgattgtcttcatgcctcttaagtgcagatgttcaaacctttgatgccatattctgactatatcttttttggaggatttacatgtggatgagtagctggtttcttggggtgtgcatatgtaaca

SEQ ID NO: 4173 - DNA, 444 bp, Glycine max
tcaccaactcatcttcaatgactccatatggccttgtgatgtgagcggtcagctaactggagggtcatgcgtgtggacattatttccagctctccaagttgccggcacatggagagaggcattaaattgatactggctcccaagtctatgagatctttgcctacaacaacctcgctgatagaacacggtatcgtgataactccaggatctttgtgcttgggtggaagaatgcgttgaataacaacactacaattaccttccacaacaattctgtcactatggatgtaccggttcttcttggttagcatatccttaaaaattttggcatagaggggcatttgatgaagtgcttctccaaaaggccaagtaatttccagtttcttgaagatatcaagaaatctggccaaatgttgctctctatctattcgggaggtaccaatggat

SEQ ID NO: 4174 - DNA, 334 bp, Glycine max
  unsure at all n locations
acttggtaacccagctggccttgaatcataaatctgtacctgtcggaaggctttgtggtttgtgctcctctgctgaccaccatacagacctttgtccttccatgcaacaacctggagcaattgagcagnctgaagcttatgctgcaaatatttacaatagacctcctcaacctcaacagcaaaatcaaccacagcagaacaattatgacctttccagcaatagatacaaccctggatggaggaatcaccctaacctcagatggtccagccctcagcaacaacagcagtctgctccttcctttccaaatgctggtggcccaagcagaccatacat

SEQ ID NO: 4175 - DNA, 406 bp, Glycine max
  unsure at all n locations
agctntagtgtgttcttcgagcttctctgtgaaaccaaaagcaaagcaacatcataaagctttgaaagagcatcaacataaacgcacccgtacttataaaaatcgaaaaatcgaagctttagtgtgttcttcgagcttctctgcgaaaccaaaagtatgtgatgcaatcctaccccgcaagggcattggatagaaaactccaagtagattgggccagagatgcaagagaaggccctagggttcttatgagccttagggtagatttcgggcccatgggctaagtacgagcccacttatctttgtaaatattagattaaggtttcattatttttgggccttgtatttagggctccataatgtaggtagggtaccctacaaatataagatttttcagcccttgtatttt

SEQ ID NO: 4176 - DNA, 425 bp, Glycine max
agctcttactcggatgtccgattgagtcccgtaatatatcgagatgctccaaattgaaaatagtagctcctagcaaattcaaaccataataactttttactcggatgtccgattgtgtcccgtagtatatcgtgatgctcgaaattgaaaacataaggtctgagcaaattcaaacgacaataactttttactcagatgtccgattgagtcccgtaatatatcgagacgctccaaattgaaaatagaagctcctagcaaattcaaaacataataactttttactcggatgtccgattgagtcccgtagtatatctagacgctcgaaattgaaaatagaagctctgagcaaattcaaacgacattaacttttttctcggatgtacgattgtgtcacttagtatatctaaacgctcgcaacttaaaac

SEQ ID NO: 4177 - DNA, 480 bp, Glycine max
  unsure at all n locations
tgaacgaatctaagatacatcttcttcaactctggtgattcttgactccatctcattgaagcgcatatccacttgtaattccaaagtgtcaaacctttcaccaacaaaggtttgaagaccatcaaacctgtccaaaatctttgaagtgttgaaggaaaacggtaacaagatgaggctaacgcaatggagcattcaatcgcaatgccttatgcatgcgatatctaacacgatgtgcccaatcaatttgtagacctttatgaaaggcccacataacaatgagatcttcttcagaaacctgagcaaggtatgaagatctcggaagcaagatgcgaacaattagttaatgaaggatgcgactttcacaagccaatgaacccgcaagaagcctttcggtcatatccgcttggctggtgcanaccaaccggtgggcatcatgtacagagaaatcaaacttccaatcgtcaattagtgcaccttcaa

SEQ ID NO: 4178 - DNA, 430 bp, Glycine max
  unsure at all n locations
agctntattcttccattgtatcaaggtctgctgaacctcattaccctcctgtattatgactcttgaacccaacaccttgtctgggtacacatcagtctcctcagtcacttccaaatctttatgtaactctccctgtacctgtaagctacttcgcccatcttctccggcacctggaaaggtccatagaatcttgcagcgagtttctgatgaattctttttaccgctgattgttgtctatggggtctaagtttcaaaaagacccattctccaacttcaaaacacaagtccctcctcttcttgttagcataccttgtcatttgttcctgaggtttgagcaagtggagtttgagtagattcaaacctcatctctttcactcaactccaatgtcacagcagccaccttagtctcatagacaaaaatctcacaatg

SEQ ID NO: 4179 - DNA, 339 bp, Glycine max
  unsure at all n locations
acatcttgactcgctttccaatctgacattcttcacagattctgccttcttctattttcagactgggaatgcctctaacagcaccttcgtcaatgattttcttcatgcctcttaagtgcagatgtccaaatctttgatgccatattttgacttcatcttctttggagaatacacatgtgcgaggagtcactggtttattgaggtgtccatatgtaacagntgtcctttgatctgctgtccttcattaggacttcactcttctcatttgtcaccaagcattctgactctgcgaagtttacattgaatccttcatcacacaactgactgatgctgatcaag

SEQ ID NO: 4180 - DNA, 440 bp, Glycine max
  unsure at all n locations
agcttctactgcgaggaataaaatttagttacggcagtgatgtagctctttcttgtttactgatagcaaatttcaaacaaatattgaatctaaactcataagaagcatactaaaacactggtatttatttcttcccatgcttaccccttgcatagaagagatttgcgttcttgcaaactgggaattaagttggtcatggcgattaacctgactagcatcctgctgtctattaccaaactctcggttatctctgaggttttcccaagatctctcatctgtactagcaggaggttgtccagaacgaccacgccaatcacggttatctggctcagaataccgattttgtaattgatgaggaagctgcagaagataaagtaaacattattatataacatctgagttgtgaaaatgattacagagagaattaanaacagataata

SEQ ID NO: 4181 - DNA, 440 bp, Glycine max
  unsure at all n locations
tggatntcctcttagtagggaatctatctttcctaagatatatccaaactcagtccccctcattaagaactagctcatttcttcctctattgcctttagtggtatacacctttgtttggttctctatttggttcctaaccctctcatgcaacctctttacaaaatcttacctagattccccttctttatgtataaaagaagtgtcaagtgggaagggaatttggtgtaagggtgttagaggattgaacccatagacaacctcaaaaggggattgcttagtggttctatgaatccctctgttgtatgaaaattatacaagaggaagatactcatcccaagacttatggttgcctttcataattgcccttanaagggtggatagagacctattcactacctctatntgcccatcaatttatggatggcaactggtagagaaa

SEQ ID NO: 4182 - DNA, 331 bp, Glycine max
  unsure at all n locations
agcttgtactttcttggtttgacaactatcactgtggcaggaaagccactangagtttctgcctcaagctacaatgttcctaccataattgactctggcacagtaatcacaaggcttcctgtggctatttacaatgcattgaacaaatctnttgtgatgatcatgtccaaaaagtatgcacaggcaccaggattctccatattggatacttgcttcaaggggagtgttaaggaaatgtcaacagtgcctgagattcgaatcatatttcgtgggggtgctggcctagaacttaaggttcataacttccttgtggaaaatgagaaggtactac

SEQ ID NO: 4183 - DNA, 404 bp, Glycine max
agcttatgagcttcgagtgggttgccaatgtaataatgatttatatagtacaattaatatactcttaattgagagagattaaaatagcacatatttattgaaataacacactcgacaaatagtacatagaatttattaatgaaaaaataattattttattcacatataaaatttcaaaaaaatgcatttgactattttatcaaaataagaaattttgaaaataaagaaattcaatttctttatccagatacaaaattctgaaaataatgaaatttaatttgcttatccaaacatagacatttgaaaatgaaagaatttcacatgaagcatttgaaatttttagaattctaaaattagaattttaaattgcctcatccaaacaaactctaaatgtaatgttgatc

SEQ ID NO: 4184 - DNA, 468 bp, Glycine max
tcagagggaaggcctcgaaggagaaaaagaattcaaggctgaaatggaggttctgagtggtcatggatttggctggcctcatccaaacctggtcacgctctacggttggtgcctaaatggttcagagaagatactgatttatgagtacatagaaggtggaagcttggaggatttagtcactgatagaacacgtttgacatggaggaggaggctagaagtggcaattgatgtggcacgtgcactagtctatttgcaccacgagtgctacccttctgttgtgcacagagatgtgaaggctagcaatgtattactagacaaagatgggaaggccaaggtcactgattttgggcttgcaagagtggttgatgttggggacagtcatgtgagtactatggtggctgggacagtacgctatgttgaccagaatatgacacacatggcaagctactacaaaggggatgtgtacag

SEQ ID NO: 4185 - DNA, 382 bp, Glycine max
  unsure at all n locations
agctntaactcggatgtccgattcangcgctttatatatcgagacacttgatattgaataacagaagctctcgagaaattcgaatggtcataacttttcacacggatgtccgattccggcgcataatatgtcgagacgctcgaaattgaacaacggaagctctcgagaaattctaatggacataacttttcactcggaagaccgattcacgcgcataatatatcgagacgctcgaaattgaacaacggaagctcccgagaaattcaaatggtcataacttttaactcagaggtccgattcaggcgcataatatatcgagacgctcgaaattggacagcgcaagctctctagaaattcaaatggtcataacttttcacttgga

SEQ ID NO: 4186 - DNA, 397 bp, Glycine max
agcttgtgcatccaataccctgatgaggatgtcccatatgttcttaacactggactgattcattcgcttccaaagtttcatggccttgcacgtgaagacccgcacaaacatttgaaagaatttcacattgtctgctccaccatgaaacccccagatgtccaagaggatcacatatttctgaaggcttttcctcattcattagagggagtggcaaaggactggctgtattaccttgctccaaggtccatcacgagctgggatgaccttaagagagtattcttagaaaaaaatttccctgcttccaagaccacagccatcaggaaggatatctcatgtattagacaactcagtggagagagcctgtatgagtactgggagagaattaagacactatgtg

SEQ ID NO: 4187 - DNA, 458 bp, Glycine max
  unsure at all n locations
aactgaattagacctttcaattaacaaactccctggaaccatttcgggagacatagccactcgtataccatttgcaacatctgttattctagcttcaaatgaattttctggggagattcctgtgagtcttgcaaactgtaaatttcttaatacccttaaactcgatcagaatcgactcactggtcaaattcctccacaatttggtgttctctcacgaatcaagacattttatgtatccgacaatcttttgatgaggccagttccaatctttagcgctggagtttcaaaaaattatgcaaataaccaaggcctatgtggaggaaaatcattcgcgccttgcaaggcgaagtcttccaagagtaactnggttgttattgctggagctgctgttggcggcgtgactcttgcgacattacgattgtgtattggatcngtcttctttgtgcgacgtgtttctt

SEQ ID NO: 4188 - DNA, 471 bp, Glycine max
tggtgcctttcacgtctggaatatgaatgtagcatatagattcaaagacccttaggtgctttgttgatggcttcttcccgatccaagcttcaattggagtcttgtcttttacagacttagttggacatctgttgagtatgtaaacagcagtgtagactgcttcagcccagaatgtgttatgtagtcccttctccttgagcatcgatctagccatctccataactgtgcgattctttctctcggacactccattttgttgagaagaatatgcgactgtaagttgtcgctcaatgccttcatcctcacaaaatctttcaaactcgcgagaggtgtactctctgctgcgataacttcttagtacttttatccgttctcactttgattttagcaagggccttgaactccttgaatactccaaagacttctgacttttctcttacaaaatatacccatgtcattctagagaagtca

SEQ ID NO: 4189 - DNA, 440 bp, Glycine max
  unsure at all n locations
agctntgattatccttctgatacaatgctgtcttgaatgaagattgtatgagacctcaaaagaaatcttagtattcaccttacagcttggaagaatgctgattatccatttttgttttttttttttttcttgaagcagtagttctaggtcgtctcacttttttcaaaatgtttttcattattaagaaaaggtaacgaagatcaaattcgagcttgttttatagtccaggagacttcacttggggtattattctgcacccttatcctgagatctatataatgaagggaaccaaaaagtaccacagagttggaccatggaatggtttgtgtttcagtggcggcaggccaaaaactaacaatcccatttaccattacgagtttgtctccaacaaggaagaggtttattacaaatggccctcaagaatgctagtttattatcga

SEQ ID NO: 4190 - DNA, 393 bp, Glycine max
  unsure at all n locations
tgttgcgcgtcatgggaccatacaaactgctccttcatcataagatgtgttaaaggtatcacaatagtggcataacctttgaagaaatgtcaatagaaacccatcaatcccaagaaaccccatagagctttaagggaactaggagcatgccactgttggatcgcttggactttggcttgaaccagttccaccccatgttcagagacaagatgtcttaagtattcaacctaacgttgagcaaaggaacattgggacaatttaaggaagaatttgccttccaataacacctgaaatgctttttccaaatggaacaagtgctactcaaatgttttcctataagtcaagatttgcggtctcgctcacgtcctcatncttcactaaaatttgatggta

SEQ ID NO: 4191 - DNA, 441 bp, Glycine max
agcttctggtgggacatcttgacttgctttccaatctgacattcactacagattctgccttcttctattttcagattgggaatgcctctaacagcacctttgtcaatgattttcttcatgcctcttaagtgcagatgtccaaatctttgatgccatattctgacttcatcttctctggagaatagacatgtggaggagtaactggtttcttgaggtgtccataggtaacagttgtcctttgatctgctgcccttcattaggacttcactcttctcatttgtcaccaagcattctgactttgtgaagtttacattgaatccttcatcacacagctgactgatgctgatcaagtttgcagtcagtcccttcaccagcagtactttgtccagactaggaagtccatcatggactagctttcccattccagtgatctttccttta

SEQ ID NO: 4192 - DNA, 446 bp, Glycine max
  unsure at all n locations
tctggctcatttggaacttcaagctcctctgatcagtcctaattaanaatatgtttcctagcagataatgcctncatttcttcactgctaacaccactaccatcagttccctctcatatattgacttgacttgagccctgtctgacagagccttgctccaaaaagctaaaggtttctcttcctacaataaaactggccctagcccagttcctaatgcatcagtttccatgataaaattnttagagaaatctggtagtgccagaataagaagcctnctcattgctgccttaagctcttcaaaggcatgagtagcttctacgaggtatntataaaccaagttagagatagttacaatccacgtatttataaacctctatacagcagaactaacctatactaactctaacanaaagctaactaactctaacagctagctacctaactct

SEQ ID NO: 4193 - DNA, 428 bp, Glycine max
  unsure at all n locations
agcttcttatccaaggtaattcttggtggtgaagctccttcttccttgtcttattccatagtggatggtgcctcccctctcctcttctcctttgccttccgctgcatctccagggtgtaaaatcaccattaaaggacctcattgaagctcaaagatccagcctccatagaagctctacaagcaagcttccatcacaatatatataaattatcatccgggaaatcatcccgaatgggtaagtcctcatcagacacatgttcgatccgactcaaatgatcagcaactaaattntatgctctgctcctatcacggatctccaagtcaaattcttggagccaaagcatccatcagatcaacctaggctntgaatcagccttctgcaacaagtactttaaagctgcatgatcagtataaacaataatgcgagt

SEQ ID NO: 4194 - DNA, 433 bp, Glycine max
tgcatgcatattgacggacactgttgatgcgacatagaatgtgtactagaaggacttatcagctgcattgactaaggacaatgccgaaatgagaaccattagaagaattgcaggaccaatgcaatcgagtgggaatattgtgttgatttgacgaccctctgcaaaggctaagattattagagggagggatataagacctgagggcagaaggaatctttttgattgacccaaaaagattctgcctctttctgaactcatgtgcattaccaatatgacaagagtcaccaagttagaagctgctgttaagagaacgaccaagatatcaaccacaagagggtagtttgaacggtatgttttgtcacacaaataatggtcacggcaattgattgtatccaaggtttccttcactcgccaactgatgcatttgaagaat

SEQ ID NO: 4195 - DNA, 402 bp, Glycine max
agcttgtgtcacaattcactgtgacagtcatagtgtcattcacttagcaaatcaccaaatgtaccatgagaggacaaagcacatagatgtgaaactacacttcatcagagatgtgattgaatctgagaaggtgaaggtggagaaagtttcaacagaagaaaatccggctgatatgttcacaaagtccctctctagtgtcaagttcaagcactgcctggacttgatcaatttcgaagatgcctaaagcagtttggtagaagtgcagccctaaatcacaaggaagacacttgctgatttggagtcaaggtggagatttgtggtgtgtgactcacaatcacaatttgcacaagtgagaatgctttaaagtggcgctgtcataaatgttgtcagttattataactg

SEQ ID NO: 4196 - DNA, 451 bp, Glycine max
  unsure at all n locations
agcttgtttagtcaaaaaggtaggtcgtgtgtcttaagaaaagtttattatgcttgatggcccggctcatttagcaacaatgtttttttaataaaaatagtattaataataagatatataatattataattattttatttaaattataaaattattatagtggtttgatgatttaaattattttaattaatttttaaaatatgttaattcctataaacctagatgagtagcataaatattgactattttttttttggtggatttaaaagactntgctatcatgttacatgtaatatttgtatgtaagttttgtccatatcttatgatttaaaattgttttattattttaatgaanatctttgattntgttaaaaaaattatacaactattaatataaaatatgccttaaaataaactaacagatcaaacttatacaaacattagagttaga

SEQ ID NO: 4197 - DNA, 454 bp, Glycine max
agaatcggacatccgtgtgacaacttatgaccatttgaatatcacgagagcttccgctgttcaatttcgagtgtcactatatatgatgcgcctaaattggacattcgagttaaatgttaagagcatttgaatatctcaagagctttcgcttttcaattctgagcgtctcgttatgtgattcgcctgaatcggatatccgtgtgaaaagatatgtccatttgaatctctcaagagctttcgctgatagtttcgagcgtcttgacataatatgcgcccgaatcgaacatccgagttgaaagttatgaccattcgaatatctcgagagacttcgatgttgaatttcgagcgtatccatatattatatgcctgaatcagacatctgtgtgaaaacgtatgaccatatagatttcacaagagctctctgtgtgagattcgagtgtcactatatgtgatg

SEQ ID NO: 4198 - DNA, 413 bp, Glycine max
cattcaattcgtgcgtgtcgatatgttacgggactctattagacattcgagtacaaagttatggtgcgattgtattggctcagagcttcaacattcaatttcaagcgtctcgatatgttattggactcaatcagacatccgagtaaaaagttatggtcgtttgaattggctgagagcttcaacattcaattacaagcgtctcgatatagtacgggactcaatcagacatccgagtaaaaagttatggtcgtttgaattggctcaaagcttcaacatttaatttcaagcgtctcgatatgttacgggactcaatgagacatccgagtaaaaagctatggtcgttgaattggctacagcttcacattcaatctaagcgtcttatatgtacgggcccaatcaaactccgagaaaaa

SEQ ID NO: 4199 - DNA, 354 bp, Glycine max
atccacaaacttatggccagactgaggtcgcgaacttggtgcgggagcagtacttacgagccttagttcaccgcaagccaacgtcgtgcgggcaattcctgttatgggttgagtggtcatacaactcttcatgccactcaggcacaacgatcagcccgttcaagatcatctacggtcggaaaccacctgctattccggaatatttgggggggacatcgtctatcaacaccgcggatgatgtgctcaaccaacgcgaccaggttctgaagctgctcagtccgaaactgctcatggcacagcatacgatgaagtatactagatacgcacacagacgacctcaagagtctaacatcc

SEQ ID NO: 4200 - DNA, 373 bp, Glycine max
agctttctcaatcacctcattaagaactagttcgccatgcaggatgtgtctgacttttatgaaagatgaccgcctctcatcaatgagaccagatatcacttgtctcaatctatatgctaataacttaactatcacctttgtcatacattcagtcaaggagattggtctgtagtcatcaaatgactgggggtgtttggttttgggaattaaagctatgaaagaagcattactgcctctagggaagctgccatgcacatggtaatcatctacaaatcttctgatgtcagatttcatcatttcccaaaattctttaatgaatttgaagttgaagccatcctgtccaggacagttgtccgcatcacaactccacact

SEQ ID NO: 4201 - DNA, 417 bp, Glycine max
  unsure at all n locations
acgtgaatatcanaaatcaatttcaaattatattctatcttcaaaatttaaatatgctcaaacatgtatatgatatattatcagatactcgtaatatcaactaaacaaattgacctaacttcttatctctttttgatttatcattttcaatatcttcttattttaacttgaatttgaatagtttaaaaaaatattttttcaatatataaaaattatctatcataaatataaaatataatttatttgttcaaaaatatttatttattatatattttaattataatataatttatatatttagaagtatatctttatcataaattataaattctcatttataaaataaacatttactctatataatacatagactaaaatactagtatatctaaattaaatgcactatttaagttaaat

SEQ ID NO: 4202 - DNA, 327 bp, Glycine max
aagctcggcttttgttttactaaattgttaacaggttcatgcctatgagaggtcagaccgagtttacaattacaatttagatccatgtggtcctgtatatattacagttggggatgggggcaacagagagaagatggcattcaaattcgcagacgagcctggtcattgtcccgatccattaagtactcctgatccttatatgggtggcttttgtgcaacaaattttacgtttggtacaatagtgagtaacgtttgatgggatcgccagccacattacagtgctttcacgagaaagtagctttggatatgggactctagacgtactca

SEQ ID NO: 4203 - DNA, 448 bp, Glycine max
  unsure at all n locations
agcttgttcagaaacgtgcatttgtgtgcaatacacaattcccggtacaccacaacaaaatggtgtatcagaaaggcgaaatagaactttaatggatatggttaagagcatgttaatcaattagactttatccgtatccttgtggatatataccttgaaaactgccatgtagttgttgaacagggttcctagtaaggtaattccaaagacaccttttgaactgtggacaaataggatacctagtataaggaacctgcatgtttggggttgccaggcagaaataaggatttataatccgcaagaaagaaaattggatgcaagaacaatcaatggatatttcattggttatccagaanagttaaaagggtatatatcttattgttataatcatagtatgagaattgtcaaaactggaaatgcaaggttcattggaaatgatgaaatcagt

SEQ ID NO: 4204 - DNA, 421 bp, Glycine max
  unsure at all n locations
agcttgctaaccaatgtaaactcctaatatctcccacactntntggggtgggccattcttggatggccttgattttcttagggtccacttggaccccatttctaccaactacacaccctaagaaaactatattatctacacaaaaagtacacttctctatatttgcatagagggtgtttttcctaaggactgaaataacttgcctgagatgtcctaagtgatcatctaggctcctactgtacactaaaatatcatcaaaataaacaactacaaatctacctatgaaatcccttaagacatgatgcataagcctcataaaggtgcttggtgcattagtgagcccaaaaggcatcactagccattcatacaaaccanacttggtcttgaaagcagttttccattcatcaccctttttcatcat

SEQ ID NO: 4205 - DNA, 423 bp, Glycine max
  unsure at all n locations
tctcaaagatgtacttaaccaggtccatcttggatatcaactaggtggtatggctcagcatgtattgtcttagacggtgggacgcccagactaaagcacaacacgttctttcgagcagggagtagttcatttcataggccgtgaactttttactcaagtagtagacagcgcgttctcttcttccggactcgtcatgttgccccaacatacatncaatcgactcatccaaaatcatcatatacaagatgagaggccttcctggtaccaacgacataagcacgagagggttcatgagacactgtttgatccttccaaacgcctcttgacaatcctcattccaacggacggattggtttctgcgtaagagttggaataacgggtcacaattagccgtgagtcgtgatatgaatctggccatataat

SEQ ID NO: 4206 - DNA, 452 bp, Glycine max
  unsure at all n locations
ntgtagggtatcagctcgcgatctctagtttcccattcctctctcagctgatggattaccaatgttgagtcgccgtataccttgagtagtttgacattggagtcaatcgctgcctagacggctagggcacatgcttcatattcggccatgttgttggtgcagtcgaatcctagcctggctgtgaagggtacacattgattgtccggagagaccaatactgccccaacgccatggcctagaatgtttgacgctccgtcaaaccatacgatccatctgtcccgatcttcgtccaattnttcctcaaacaaggccatgatgtcctcatccgggaattcacgatgcatgggctgatagtcgctaagaggctgttgagccaaataatacgctcaggcgctcccttttatcgccttntgagcgacgtagactatatnaaactccgatagcacgacttg

SEQ ID NO: 4207 - DNA, 430 bp, Glycine max
  unsure at all n locations
agcttttagaatntaacataactatgattattgaagaacctattcatgttgttttttgcgagactaaccctataaggtcaagaaaggaaacacttgatgatattacagattctttagaagatatgcatattcatgaggaagggcacaaagacaaaggaaatggaaatgatgaagactctcaaactaatgaaactaaaacaagtacaaatcttccaagagagtgaagaacttcaagatatcatcctcttgataatatcatcggtgacatatcaaaaggggtaacaacttgacactctctcaaagatgcatgtagtaatatggcttttggttctttaattgaacctaaaaacttaaatgaagtcatagntgatgaacattgggtcattcgtatgcaagaaaagttgaattaatttgaaagacatcaagtctg

SEQ ID NO: 4208 - DNA, 436 bp, Glycine max
ggactccatctcattgaagcgcatatccacttgtaattccaaagtgtctaacctttcaccaacaaaggtttgaagaccatcaaacctgtccaaaatctatgaagtgttgaaggaaaagggtcacgagatgacgctaaggcaatggagcattcaatcgcagatgccttatgcatgcgatatctaacaagatgtgcccaatcaatttgtatacctttatgaaaggccgacataacaatgagatcttcttcagaaacctgatcagcgtttgaagatctcggaagcaatatgcgaacaattagttaatgaaggatgcgactttcacaagccaatgaaccggcatgaagcctttcggtcatatccgcttggatggtgcaaaccaaccggtgggcatcatgtacagagaaatcaatcttccaatcgtcaattagtgcacctt

SEQ ID NO: 4209 - DNA, 451 bp, Glycine max
  unsure at all n locations
tggttccttcatcaaaaagacattaaatgaatcataccaatataagcaaatcatattaaaataattgtactttggaaatttatgtaacctaaaatgatgagggtttgtctaccctacaaggtagcatattacagggaccacaacgagatggaagcaaactaaagagctgacaggatttccaggtagcccaaaagctagaattttgctttctatagattgaaagccaatctctgtaaatgtaaatggcttgcttggttaaatacacacctganagatataaattaaaaataaataaaataattattaattatgataacatgatttacaaaatcatactcaccaaaacactatacaaaagggaaaaatatctataacatgctacttctacaactacaacacattgcatccatggtctagattacaggacaccataatttaattaataaatagt

SEQ ID NO: 4210 - DNA, 400 bp, Glycine max
  unsure at all n locations
agcttccaaccagataattcttcattcatctgtgcttgagcctccttatcaagctcctcataacgggtcagatccctcctaacagtccttaggaagatcacaagaacaatgccagcaagaaaagtgatcaccataagcgaattaaggatagaaaaccaatgcactttagctccctccatcttcaagtaagcatcccatctagatggccacttgatgtcactctcctcaaaggtgacctcataagtgaaaacaacaggctgaccctccttgataggcattgccacagtggctggatcgcatctgatagacgatggatacttctcatacatcttcaaggttttcgcagaatcagcattatgcataatactacaaggaatcacctcanacccaacaaccatgt

SEQ ID NO: 4211 - DNA, 377 bp, Glycine max
  unsure at all n locations
ntgaatgagctccttgagtctgatgacaagtntggatttattgtcatggatggcaacggtactttgtttgggacattgagtggtaatacaagagaggtgcttcataaattcagtgtggatctcccaaagaaacatggaagaggagggcaatctgctctgccgtttgcccgtcttcgcatggagaagcgtcataactatgtgcggaagacggcccagctcgctacccaattctatatcaatcctgctaccagccaacccaatgtttctggattaatactggctggttcagcttgattcaagactgaacttagtcagtcagatatgtttgatccttgacttcaggcaaaaatacttaactgttgtgatgtctcctaccg

SEQ ID NO: 4212 - DNA, 368 bp, Glycine max
agcttgcagcacatgcctcgtattattgtttattctttttcagtgggaatgctatcgctaatgcttgctcaagcataatcctatgtgggaatactagcaagattcctactccgtgtcgtatttcactagatgatccattgatgaatagagtctaaggtagctcttgttgccttttttcacctttgctcagcgacatttaaaccatgaagttgcccatacactggaccttgagcgctagtctaggatgatattgcgaaccatattgtgacgatttgcttgcccgggttgccatccttcccactaaaatggagccgtggaatacttgcctgagtggttgatcaatccatactatgcatggatgtgcttgg

SEQ ID NO: 4213 - DNA, 364 bp, Glycine max
ttccctctttgaacaaatacccctcagccaaatagtatccatcttgggcctttttcccacaactcttgtaaatgggagagaaatgttcatctaaagcatacaagtccctaatgttatcaaatcctaaaatttgagctcctagggagcaaaacaatgtgtgtctcctagagagggcatcagctaccacatttgtttttccctttttgtattcgataacatatggaaattgctctaggtactctacccattttgcatgacaaattccttggaaacaaggtaatgttcccaagttcggagtactcttattaacgcataaagctctttatcatacgtggggtagttaacggtggcaccatgaagcttt

SEQ ID NO: 4214 - DNA, 437 bp, Glycine max
  unsure at all n locations
agcttctggtgggacatcttgacttgctttccaatctgacattcaccacaaattctgccttcttctattttcagactgggaatgcctctaacagcacctttgtcaatgattttcttcatgcctcttaagtgcagatgtccaaatctttgatgccatattctgacttcatcttctttggaggatagacatgtggaggagtaactggtttcttgaggtgtccataggtagcagttgtcctttgatctgctgcccttcattagaacttcactcttctcatttgtcaccaagcattctgactntgtgaagtttacattgaatccttcatcacacagctgactgatgctgatcaagtttgcagtcagtcccttcaccagcagtactttgtccagactangaagtccatcatggactagctttcccattccagtgantctttc

SEQ ID NO: 4215 - DNA, 398 bp, Glycine max
  unsure at all n locations
tctcaagatcaccttaatggctntcacattntccatggatactttcccaaggaaaagtgtgtcgtctgcatactgcaatatgctgactctgacttcatttctgcccacattgaaaccttgaaacaggtttttatccattgcttctttcaccagcgcgtntggtccttccacaagaatgttaaacaggaacggggatagagggtctccttgtcttaggcctctttggggaataaactcangtgtaggacttccgttaaccaatatggatatggaagcagactttaggcagccttcaatccaagttacccacctgtcacaaaaacccatcctcttcaacaaatatagtacacacctccaagatactgaatcataggccattttataatctactttgaata

SEQ ID NO: 4216 - DNA, 428 bp, Glycine max
agcttctgaacaatctttcatttgggtggtgatgaatatccataacaacccataaaaaagaaataaaatgggaacaaaggctttctttcggaagggtttgagcagaggatgaaggaaatgggtaaagggtttagttcttagagcttgggctccttagctgtttattttggagcatgttacaataaaagggtttatgacacattgtggatggaactcctatttggaaagtttgtgtgctggaatgccaatgattgcatggcctatctcagtcgagcaatttttgaatgagaagttgataactgaggttttaaagattggtgtccaagtggggagtagagaatggttgtcatggaactcaaaataaaaagagttggtgggaagagagaatgtgaatcattagtgacgaagttgatggtacagagtgaata

SEQ ID NO: 4217 - DNA, 330 bp, Glycine max
taattttttaatagatgaggtatttatatgaaagataatcttatttaaactggataaataagataattataagtgataaaactctgtctccaaatatttaacgtaattatatatgtaagactaattaatctagaataactttgcatgattaacatactcactgctataacactaatagtttggtcataactaattcattgatcaatattataaaatcatcaatatttgagagtattagaataaatcttacttccgattacaatgaaattaattagatgcagacctattaacgaaatgctttaacttcaccaaatatgtgattatgaaagc

SEQ ID NO: 4218 - DNA, 387 bp, Glycine max
agcttctcacctaaccactacccgtgcgatctctacctaagacccaatcttagatatgagaacctccgctcactccctctcactcacactctcgtgtttacaattaagtcaaagacacaccagagatcaactgtgaacaaaagagatcaactctacacactagagatcaactctacacactagagatcaactctacacacataggtccaacacttgatgttagggtagcatcaaggtggctcacaaaagactcaagtcccaaaaactcactaactaactgttcaatcccggacttggtacagaactcgtgcagactccatgattatatagcaatgtgcgtttctgggctgcaacttcttgatgctggaggagatctatcttcttctg

SEQ ID NO: 4219 - DNA, 395 bp, Glycine max
agcttgcagcaaatgctaacgacaataacattttactcggaagtccgattgagtcccgtaatatatcgagacactcaaaatttaaaaccgaagctcgctgcaaacgctatcgacaataacatttcactcggaagtccgattgagtcccgtaatatatcgtgacgctcgaaatttaaaatcgaagctcgtagcaaatttgaacgaccataacatttcactcggaagtccgattgagtcccgtaatatatcgagacgctcaaaatttaaaaccgaagctcgcagctaatgctaacgacaataacatttcactcggaagtccgattgagtcctgtattatatcgagacgctctgaatttaataccgatgctctgtgcaaattcgaacgacattaacat

SEQ ID NO: 4220 - DNA, 442 bp, Glycine max
  unsure at all n locations
tgtattgggataaacccaagtcccacatcagctaaaaataaagccatgttagagtatataagtgagggacaaccctcaccccttaagctagctcttgaggttgagttaggtttaaactcattctaagaatctaagatggtattagagtatatctaagcttaatccaaagggccacccacaatagttatccacgcaccacgcctaagaagtgctgggcgtgacggagtgtattgggaaaaatctaagtcacacatccactaaaaataaagtcaagttagagtatataagtgaggggcaaccctcatccttgagctaacttttggagtccagttaagcgtaaattcacattctaagaatctaagagcttgtccttacgatcacatgaacaagcattatccctcaatanttatcatactgtgtccttccctttctgtgccatctc

SEQ ID NO: 4221 - DNA, 311 bp, Glycine max
  unsure at all n locations
ctcactcggaggcccgattcacgcgcataatatatcgagactctctaaattgaacaacggaagctatcgagaaattcaaatggtcaatacttcgaactccgaggtcctattaaggcgcataatatatctagacgctcaaaattctacaatggaagctctttggctatacaaatggtcataacttttcactcgaaggtccgattaaggcgcataatatatcgagaccctccanattgaacaatggaagctcttgagcaattcaaatggtcataacttgtcactcggacgtccgatttagctgcataatatat

SEQ ID NO: 4222 - DNA, 264 bp, Glycine max
tgatgtaacattcggagaggttaatgattcaacgagatgatgcgctccatgagaggttggatttaatggagaatagagaccatatgaattgctcaagagcttccattgttcaatttcgagcgtctagatgtataatgcgcctcaatcggaccttcgagttaaaagttatgaccatttgaaatgctgcagagctttcattgttcaatttcgagcgtctcgatatattatgcacctgaatcggacctgctagtgacaacttttgac

SEQ ID NO: 4223 - DNA, 380 bp, Glycine max
agcttgaaggtaaactagatgccttggttaacctggtaacccagttggccttgaattagaaatctgtacctatcgcaagggtctgtggtttatgctcctctgttgacccccatacagacctttgcccttcaatgcaataacctggagcaattaagcagcttgaagcttatgctgcaaacatttacaatatacctccttaacctcaatagcaaaatcaaccacaatagaacaattatgacctctccagcaatagatacaatcccggatggaggaatcaccctaatcacagatggtctacccctcaacacaacaatagcagcctgctccttccatccaaaatgttgctggcccaagcagaccatacattcctccacctatcc

SEQ ID NO: 4224 - DNA, 396 bp, Glycine max
  unsure at all n locations
ntctagaagcctactccggatacaactagattagaatgcatcttccatgcgaggagaaaacaatattcatcattgaagatgccaaattttactaaagggtcatgcctttcagcctaaaaaacataggcgcgacataccaacgactgatggactgagtcttcaaacaacaaatcatatgaaaatgtcgaggtatatgtggacgacatagttttcaagtctcaaagcatatcccaacatgtggcggacaaggaagaagtcttcggggaactacgaaaatatgaatgcgccttaaccctaaaatatgtactttcggagtaggcggcgacaagttccttggttntatgatcacccaccacgggattgaagctaaccccgacacatgcactgtcataccgg

SEQ ID NO: 4225 - DNA, 396 bp, Glycine max
  unsure at all n locations
tgcacacaagttggttgttgttgttattggtttgattacatgataacctctcatttgtgtttagcttgtattattggttttgatgaaatccctttgctacaagtcaaacaattatacttgttgatagtgccattagggtttttcttcaccctanacacctatttacaaccaattggatccctagatggaggcagttcagtaagagtccatgtaccatttttcatcaaagcatcatgctcagtcctccttggtgcaaaccaagtaggattggaaagagcaatttatgttaacttgtgctcagaataagctagaagaagagtacgatgaagtctaggattgacaacaccagttntagctcttttgcacattgtaacaagatcaatttgagaagtagta

SEQ ID NO: 4226 - DNA, 271 bp, Glycine max
  unsure at all n locations
tgtcctctgccaaccaatattccaacagattcttcttgttctggttcacaaccaaccgtgataattctaatgattcaaaggcattcagctttccccttgttaaaagtgttccaaaatactgcaacagacgaggagtttgcccagcttgcacacgaacactctgccacgtaaagcagataatggcattntaaacattataactaattgaccaaacaaaaggacaccacctaaacgcaaacagtacacaaccagaacatgaatctctgtgaat

SEQ ID NO: 4227 - DNA, 405 bp, Glycine max
agcttgaggatcaaaatggggtgaagctttatttatagctgatggtgtctgtttggatgggaactcatgcaaatgaagcttttcctgaggcttggcattcatatgcatcaaaaactactggtgaaaacattgctcacactcgctccaaggaatatattcctcccaggctttgtgaccttacagttaatgagattcatgcccaatatttgtcgctaaaaaataggaatgatgtgatgctactaaatattaatatccgtaatgactcgggaattgttaactcgtaggcaagtgtaccaaaacttcacaagtagtaaagttttccgatatccgaacgtccaatccaccacgactttgcttgtacttatagtattcctgatcccattgatgcgcatgacataccaattt

SEQ ID NO: 4228 - DNA, 258 bp, Glycine max
gcttagaagaaattcaaatggtcataactcttcactcggatgtatgtattacgtgtatcacatatcgagacgctcgaaatcgaacaacacgagctctccagaaattcgaatagtcacaacctttcacaccgaggtccaattcagccgcatcacatatcgagacgctcgaaatctaacaacggaagctctgattacatacaaatgctaataacttttcactcggatgttcgattcaggcgcttcacatatcgagacgct

SEQ ID NO: 4229 - DNA, 446 bp, Glycine max
  unsure at all n locations
agcttaagctccttcaactgcacaaggctcttaatattagaagagtatccttgtggaacctttacccgacaaagacactgacaaaaacttatcttctccttcttggacaaagtatggcaggctgggggcaagtaaattttcttcccatcagaccttggatgcaactgtgatcgtatacccatatcagctagatcttgatgggtattcaagccatccttcgtcttgccttgaatgttaaggagcgtcccaatcacactatcacaaacatttttctccacatgcataacatcaatacaatgtctaacgtcaagatcacaccagtacggaagatcaaagaaaatggacctcttcttccatatgcaactctgacttttatccttctttntggtcttcccaaatacagtattcaggtgttgaacccgctgatatacctgttcatcagtcaa

SEQ ID NO: 4230 - DNA, 433 bp, Glycine max
  unsure at all n locations
agcttccttaagaagattcctaaagaagctagagcttatctacacacacatctctaatagctaagctcacctccttgagatgagaagctagagcttagctacacaccccctataatagctaagctcacccccatgacaaaatacatgaaaatacaaaaaattccctactacaaagactactcaaaatacctcgaaatacaaggcaaaaatcctatactactagaatggccaaaatacaaggcccaaacgaaggataaaacctattctaatatttacaaagataagcgggctcatacttagcccatgggctcgaaatctaccctaaggctcatgagaaccctagggccttcccttggatcgctggcccaatctgcttggtgtcttctatccaatgcccttgcggngtaggattgcatcattccctccaccttgg

SEQ ID NO: 4231 - DNA, 439 bp, Glycine max
agcttaagctccttcaactgcacaagactcttattatttgaagagtatccttatggaaccttcacccgacaaagacactgacaaaaagttatcttctcctttttggacaaagtatggcaagctgggggtaagtaaattttcttcccatcacaccttggatgcaattgtgatcgtatccccatttcagcttgatcttgatgggtattcaagccatcttttgtcttgccttgaatgttaaggagcgtcccaatcacactgtcataaacatttttctccacatgcataacatcaatacaatgtctaacgtctagatcagaccaatacggaagatcaaagaaaatggacctcttcttccatatgcaactcttacttttatccttcatttgggtctttccaaatacagtattcaggtgttgaacccgctgatatacctgctcac

SEQ ID NO: 4232 - DNA, 434 bp, Glycine max
  unsure at all n locations
agctnggactttctgtgttctgggaacctctctctttctcaggtgtacccaaacccaatcacttggttcacgcacgactttctttctgcttttgatggcttgccttgcatagctcgcattattcttttcaatttgaaccttcacttgctcatgcaacttcttcatatactcagctttagcctgtgcatccttatgcttaaacatagcaatgttaggcataggcatcacatcaagaggagtcaaaggactaaatccatacactatctcaaatggtgaacaattagttgtgctatggacagcccgattataagcaaactcaacatgaggcaaacaggcttcccaagatttaagatttttctttaaaacagtcctaagcagtgtgcctaaagtcctattgactacctcacgttgaccatcagattgtgggtgacaag

SEQ ID NO: 4233 - DNA, 197 bp, Glycine max
ctacatgctaaacggtgtgttatgcatgcacgtgaagctggatcattcctccgcggaatcgatgtgaaccgtttaccttctgtggttgattgcgaaaaggaagcacgtgtctcatctccaaacagcacggtttctagcgtctgtggaaagcgcaccgagagggaaaccaatggagaagacaacgacacagacagagc

SEQ ID NO: 4234 - DNA, 403 bp, Glycine max
  unsure at all n locations
agcttgttatcgattacacacatactgtaattgattaccagaggagttnttcagataacattctcaacagtcacatatttttatctgattctcaagtggccatcaaaggcttatatatatgtgactagagacacgaattttataatagttttgaagaacaaaaaggtcttatcctcttaacaagcaaaattgttttatcctcttacaaattccttggccaaaacacttgtgattcaataaggaattatttgagtgctcaaattttacaatctatctctttcaagagagatgtctttttctcttcttctttattctaaaaagggattaagagaccgagggtctcttgttgagaaaggattctaaacactaaggaaggattgttcttgtgtgatgagaacttgta

SEQ ID NO: 4235 - DNA, 223 bp, Glycine max
  unsure at all n locations
tgaatcggatatccgtgtganaagttatgaccatttgaatttctctttattttccgtagntcaatttcgagcttctcgacatattatgcgcccgaatcggacatccgtgtgaaaagttatgaccatttgaatatctcgagagcttcctatgtttaatttcgagcgtatcgatatattataagcctgaatcggacattcgtgtgaaaagttctgaccatttgaa

SEQ ID NO: 4236 - DNA, 402 bp, Glycine max
  unsure at all n locations
agctnttgaggaattcaaatggtcataacttttcatacggatgtccgattcaggcttataatatatcgatacgctcaaaatttaacatcggaaactctcgcgaaattcaaattgtcataacttttcacacggatatccgattcgggcacataatatgtcgagaagctcgatattgaacaacgaaagttctttagaaattcaaatggtcttaacttttcacacggatgtccgattcaggaaaatcacatatcgagacgctcaaattgaacaacggaggctcttgagaaattcaaatggtcataacttttcaccaggatgttaaattatggcgcattacgtttagagacgctcgaaaatgaacaacggaagctctcaggaaattaaaatggtcataacttttca

SEQ ID NO: 4237 - DNA, 425 bp, Glycine max
  unsure at all n locations
agctntaggtttgatggccccaatgacgtctatcctccacatggaaaaaggccaaggggcggacataacattcagaggatgtggcagaacattgacattgtccgcgtacgcttgacatttatgacatttccttacatgggtgcagcaatcgcttttcatagtgagccagtaataaccggccctaaggatcttcctggccatagcatgcccattggcatatgtcccaaataaacactcgtggatttccttaatcatgtagttcgcctctttggcatctacgcatcgtaaaagggtcatgtcatggttttgtatgtactggatagtaccactcacaaagaaaccagtagccaatctccttaacgttcttttgtcattgtcggaaatccctggtggatattctttgttctcaacatatttgttgatgt

SEQ ID NO: 4238 - DNA, 429 bp, Glycine max
agcttattctactagggactttatacaacatgcatttcatatttttcttttcagaatcatacagattgttcacattcatggtagcaacacgcctagagggtaccttcacatcaggatgcaaatattgtaataactctttaaaccttctatgttcaacaaaagagaatggaagatcatgctcaataatcgttatagatatcatctcatataccacactttgatctatttttttatttataaatctcccatcatgattgagaataatatttccaacatcactattagaatgcgtcttcaaatatacatcacatttcccatatgacgttgtaaggttgaagtcccattcttattgtcactgcccacataatctttcaaacaatatttgcatttactcctcacttttccatcactatgtataacagatttctc

SEQ ID NO: 4239 - DNA, 327 bp, Glycine max
ttgtataggcaagaaaacccctctgttaattaagggagttgacattccttcaacgatggaagagataaatcagttgagtagagaaggggatgaattattgtacgagttgaggagtaacctacttaaggctcacgatcagatgagaaaatatgcaaataaccatagaagagaactgatatttcaggagggagattgggtttttttgaaattgcaaccttatagaatgaggtccttagcaaggaagccaaatgagaaactgagtccaagattttatggaccctacaaggtgatacagaaaatacgggaggttgcttataagttggaact

SEQ ID NO: 4240 - DNA, 437 bp, Glycine max
tggacttcctggtgtttgggaacctctccttcctcaggtgtactcaaacccaatcacctggttcaagcacgactttctttctgcttttgttggcttgccttgcatagctcgcatttttcttttcaatttgaaccttcacttgctcatgcaacttcttcacatactcagctatagcctgtgcatccttatgcttaaacatagcaatgttaggcataggcaacaaatcaagaggagtcaaaggattaaatccatacactatctcaaatggtgaacaattagttgtgctatggacagccccattataagcaaactcaacatgaggcaaacaggctttccaagaattaagatttttctttataacagtcctaagcagtgtgcctaaagtcctattgactacctcagtttgaccatcagcttgtgggtgacaagcagtacaa

SEQ ID NO: 4241 - DNA, 395 bp, Glycine max
  unsure at all n locations
tgtgctattccaagttcattaatcatacctttaagccagattgattccttcactccttcagctagggccatgtattctgctttagttgttgaaagagcaacaactaattgttgatttgctttcaaactgattgttgtaccaaacaaagtaaacacatatcctgttaaggacttccttgtgtctacatttcctacaaaatctgcatctacatagcctgtgactgctgcctcgtgtgctgtcttcttgtaccttaaaccagctttcaaggatccatttagataccttagtgttcacttcacagcttcctagtgtgcgctgccaggatcntccatgaatctacttataatacttacagcatgaactaagtcaggtctgctgcaaaccattcatacatt

SEQ ID NO: 4242 - DNA, 435 bp, Glycine max
agctcggctgaaaagtacccaaaagtggtttttgtgaatgttgacatagatgaggccagggacgttgctgcacgctggaatattagcagtgttccgacattcttctttgttaagaatggcaaagaggttgacagtgtgatgggggcagacaaaagtacccttgaaagcaagattgcacaacatgctggctctttttaagtgaataccttataaagatactgatacaattaacattttcttgtttcttgtgttaacatgtccattgtgtcatacaaaaggcaaagattaattgagtttcaatgtattatggcttgacgtttcgtctgtctgattgcatgtagaaaatgttaatgctgatttgtaataagtttcatattttcaagctgattttaagtttgtgatgactgttatggggagacaccccactagcttcat

SEQ ID NO: 4243 - DNA, 434 bp, Glycine max
agcttacttgtagagattcctttatgggaaagaccgataccagctgtgttgatccattgcgatagtaccgcggatattgcaaaaattgagaaccgttattacaatggtaagaaatgacagatacgtcgtaagcacgacactgttagagaattactctcaacaggagctgttagagtggatcacgtacgcactgatgataatttagcagatcctttgatgaaaggattagctagagagaaagtccataacacttccaaaagaatgggactagtgcccttactgcgatgatcattcatgatggtaacccgacctaaatgactggagatcccaagaactaggttcaatgggtaataacaagttatgaagtgatatgagatgaacatgcagttataagtgaaagcagcatgatctctgaagtaacaagaggatgagtt

SEQ ID NO: 4244 - DNA, 417 bp, Glycine max
  unsure at all n locations
tatccccacaagagtgcagaacaactggtgagtctgcattgattatatgatgctgaaccaggtaacccgaaaagatcatttccccctgccattcattgaccaaatgcttgagcgcttggcagggtaatctcattattttcttcttgatggtttttctagttatctacaaatncatattgctcttgaggatcaagaaaagaccacattcacctgttcctttggcactttttcctataggaggaatgcccttggcctatgcaacgcccctggtaccttctgtcgcaacctacccttttgcgggcaagcgaggcgaggctcacgaggtgccttttcaaaggaggaaaatgcgcggagtcgtcaccaacgtttatttgtggaaaacgtcgaataaatcgaaggataccggtcaaaagaata

SEQ ID NO: 4245 - DNA, 449 bp, Glycine max
agcttgcctgcattgtgttgttagcaaggttcagcatccagatcccaatagtaaatacaagaacaacccttgttcatgtccctttaaatgctctacaattttagacatatgaatttcattaatgtatgactaaggtcatcatatctgtgaaatttaaaagtcaaagaaataaaatgagtaagaaaagaactagaggatgagaacagaaacctgcaatgctcatgtgtatcacctaatacatatccagtgtctgtagaaaatccaattaatatcacctaaattataagacttgacatagcacatatgtaatgtagtataaaaaaacaaaatcaaagtaagcaattaatgtcacaaatgcttacagctagacatatcataagagatccgccataatgaacagtgtcttctgccaccttgaagtacatttatcactccaaataccaacacat

SEQ ID NO: 4246 - DNA, 436 bp, Glycine max
  unsure at all n locations
aagctgtttatttgcttaaattttgatatttataaatnccaagncccattaattaatttgctttcatgttaatcctatttaaaactattatatttgatctttaggagaacattacactttagcctattaaaaaaatacgtcaacaaatcacaaacaacatttatattttacctcattcagaatataagtaaaaacatacctaatttcacattgattaagtaaggatgttaattaaattcatttaattttcttgaattaatatagagaaggaactatattctctaaaatattattaattgtatttataaattattaattaattaacttaatgacattttctttaataataacattaaatatggctaaattaattattattcttataatncaatctaccaaacataaacatttnttttatagctgaatttgtatctac

SEQ ID NO: 4247 - DNA, 457 bp, Glycine max
  unsure at all n locations
nggatttcctttagtagggaatctatccttcctaagatggtagccaaccaagtcaccctcattaagaactagctcttttcttcctctattgcctttagttgaatacacctttgtttggttctctatttggttcttaaccctctcatgcatcttctttacaaattctgacctagattccccttctttatgtataaaaaaagtgtccagtgggaggggaatgaggtctaacggtgttaggggattgaacccatagacaacctcaaaaggggactgcttggtggttctatgaacccccctggtgtaggcaaattctacatgagaaagatactcatcccaagacttatggttgcctttcagaagagcccttaatagggtggataaagacctattcactacctctgttttgcccatcagttgtggatgaccagtggtagagaaaagaagtctagttcctaac

SEQ ID NO: 4248 - DNA, 422 bp, Glycine max
  unsure at all n locations
gaagctcctggtttagctttacccgattntactcattctattgtagttgaatgtgatgctagtggagttggcattggggctgttttgatacaaaacaaaaggcctatagcttatttctcggagaaattgggaggagccagattgaactattgcacctatgacaaagagttctatgccattgtgagagctcttgatcattggaatcattatttgcgttctaatcactttatattgcattcagatcatgagtcattgaagtatatcaatgggcagcagaagttgagtccaaggcatgctaaatgggttgaatttcttcaatcttttaatttctcttcaaaatacaaggatggtaagagtaatgtggtggctgatgcactntcaaggaggtatgctttaatttcaattcttgaaactcgtttact

SEQ ID NO: 4249 - DNA, 417 bp, Glycine max
agcttgctaacccatggaagctcctaatcattctcacactttttggggtgggccattcttggatagccttgattttctcacggtccacttggaccccatttttaccaactacaaaccctaagaaaactatattatctacacaaaaggtacacttctctatatttgcgtagagggtgtttttcctaaggactaaaagaactagcctgagatgtcctaagtgatcatctacgctcctactgtacactaaaatatcatcaaaataaacaactacaaatctacctatgaaatcccttaagacatgatgcataaccctcataaacgtgcttggtgtattaatgagcccaaaaggcatcactaaccattcatagaaactaaacttggtcttgaaaggggtcttccactcatcaccttctttca

SEQ ID NO: 4250 - DNA, 339 bp, Glycine max
aaaaaaaggaaatagtctaaagatttaatatttgttaacttcttggagtaataaaaagtataaactgcaatgtgattctacagaacatctacatatttctgatgtcaaatgataggattgattattcggaaatatttctcaagaacaacaggtaatgaatagagaaagaaaaagtatcaaaattcacaaagatgtgctacctcactttcaagtgctgtatatacatcactgaattcaagaccattatatccacgtcctacaattgctatccaatcatgaacagattccagtttgagtgcctgatcacttgggatcacagtcttccctgaagatgatttt

SEQ ID NO: 4251 - DNA, 399 bp, Glycine max
  unsure at all n locations
agctntanaagtgtgtagatactatttatcttattcttagcgaaatgaattcgctgtggatacgatactcagtcttaccgtattatatactacttgtgcgaatcggcacacttgtcgagggacgaacaggtacgcggaatgggtcaccaatatcatgccagtacctaaaaaggatgggaaggtgcgaatatgcatagactatcgggatttaactgagccacgccagaggatacactttctttactgtacatcgatgttctcgtagataacacgaccaattttggcctgttttctttcatggatgggttttcaggctataatcagataaagatggcaccagaggatatggaaaagacaaccttcatcactctatatggaactttctgctacaaggtgatg

SEQ ID NO: 4252 - DNA, 459 bp, Glycine max
  unsure at all n locations
cgaagganaactcgatgccttggtcaacctggtttctcatctttccatgaataaaaaatctacacctgttgcaagtgtctgtggtctatgttcttttgcagatcaccatacagatctctgtccttctttacagcaatctggagtcaatgagcaacctgaagcttatgctgcaaacatttataatagacctcctcagcagggaaaccaacaacagcagaataattatgacttttcgagcaatagatacaatccaggttggaggaatcatcaaaatctgagatggacaagtcctccacaacaacaacagcctgtccctcctttccagaatgctgctggtccaagcaagccatatgttcctcctccgatgcagcagcagtcacaacaaagacaacaagaaactgaggctcctcctcagccttccttagaagagttagtgaggcaaatgaccatccagaatat

SEQ ID NO: 4253 - DNA, 441 bp, Glycine max
agcttgtagggttaaagtctcacgattgtctcgtgctcatgcaacaattgttagccgtggctatacgagacatcttgccaaacaaagtcaggttagccataactcgcctgtgctttttcttccatgctatatgtagcaaagtcattgatcctatcaagtttgatgagctggaaaatgaggctgcaattatactgtgccagttggagatgtattttccccctgttttctttgacatcatgattcacttgattgtgcatctggtcaaagaaatcaaatattgtggtcctgtttatctacggtggatgtacccggttgagcaatacatgaagatcttaaaagggtatacaaagaatttatatcgtccagaagcatctattgttgagaggtacattgcagaagaagccattgaattttgttcacaatacattgagaaggctaaac

SEQ ID NO: 4254 - DNA, 280 bp, Glycine max
tcaagaattatggcctcatcaaactacttgtttcccgagggatattctataaatagacctcccatctttaatggagtgggttaccactactggaaaacccgcatgcaaatctttatagaggcaatagatttaaatatttgggaagccatagaacaaggaccttatgttccctctataatagctggaagtgcaacaatagaaaaacctagagcagattggactgaggaagaaagaagattagtacaatataatttaaaggccaaaaatattattacatctg

SEQ ID NO: 4255 - DNA, 347 bp, Glycine max
  unsure at all n locations
ttttcggagccccgtgaattacgttntcgntcatgtgtccttcatcttcgagtttgttgccatgcgtagtgattgcttagggcaattctccattctcaaccctttttcggagccccatgaattgcgttctcgttcatgtgtcttccaccttcgagtttggagccatgcgcagtgattgcttagtgcaattctccattctcaacccttttatcggagccccaagaatggcgttttcgttcatgtgtgctccatcttcgagtttggagacatgcgtagagattgcttagtgcaattctccattctcaacccctctttcggagccccaagaatggtgctttgttcatgtg

SEQ ID NO: 4256 - DNA, 453 bp, Glycine max
tattgaaatcaaacaagatgataaattatcctcacattatattataaataaatcatgagtcatcaaaacataaatcatttgtctaagtcacttgcatctagaagtcctaattttcttctaatggtgtagaaagaatctttggttagtggttttgtgaagatgtctgcaagttggtttttagtatctacaagttttaaaaatacagtcacctttttcctaagactaagtgctaattgactaccaacacttaccaagatgaggttttgttaacatagaaggttctatcatataaaaataattttattaggaatacaatataataattctgaaaagcataaaatttttctgatcaatcaatcaagtaattcaaacatatcaaacaagatatatacaacgattgaaggatatagatcacagacattatcaaacattcagatctgttaagataattta

SEQ ID NO: 4257 - DNA, 304 bp, Glycine max
gcttctgagggcctatatgggcccttgctgaatgcacctcttaagttggcaggcaccctattttgagtttttgctcatttcctgttgaacgtccaaaatcttacgattggtgacaattggcttaagcaattcaatgtgaccagcaaacatccacatgtcgacaaacaattgtccccgaacgaaattatggtatgacacatggtatgaagtgtgccatcttagagaacctgtccaccaccacaaagatggaatccttgtcattccttgtctgaggaaatcctacaacaaagtccaaagacaagtc

SEQ ID NO: 4258 - DNA, 417 bp, Glycine max
agcttgattgttaccatgcatggagagataatttgagcccttaaagaatattaacattataattttacatatttgcgaatactaaaaaaaattacttaataatttaaaagttagttatgcaattaataatatttatgattacttaatcaatagtagattctttaattgataattgaaactgaaaataataaattacttagcgagattatattttgttttattttttaatatgaatatattacttaatataaatttcttatagtaatattatttattcactacctattctatcatatgtcgaccaccattaaaccatcaaaacttaaatcataatagttgctatgtctgatgcacctcaaatacaaaataggataacgtgtatattatctaaagaatcatctactacacgatcaaata

SEQ ID NO: 4259 - DNA, 213 bp, Glycine max
ttcaaaagatgcgacatggaccattgcagctatgttaagaaatatactaatagttatgttatccttgtcgtgtatgttgatgacatgttgattgcatgatctagtatggcagaaattaacacgttgaagcagtagatggcagacaactttgaaatgaatgatcttggtccagctaaacaaatctttggtataagaattcttagaaatagatca

SEQ ID NO: 4260 - DNA, 465 bp, Glycine max
  unsure at all n locations
ntgagcaaattctaacgacaataactatttacttggatgttcgataaagtcacgtaatatatcgagtcgctcgaaatagaatacagaagctgtgagaaaattctaacgtcaataactttntactcggatgtccgattgagtcacgtaatatatcgagacgcccgaaattcaatacagaaactctgagcaaattctaacgacaataattttttacttggatgtccaattgagtcgcgtaatatttcgagacactcgaaattgagtacagaagctctgaggaaattcaaataaaaataccttttgactcggatattcgattgagtcccgtaatgtatcgagacattcgaaattgaatacagaagctgtgagcaaattctaatgtcaataactttgtactcggatgtccgattgagtcactttatatatcgagacgctcganattcaatacagaagctctaacaaatt

SEQ ID NO: 4261 - DNA, 417 bp, Glycine max
  unsure at all n locations
tgttacataatggaaacaatttttgtagtaaatttacaaatacaataatctcattntctttcgatcatcaataatattaattgtataaaataaaattaaataatgtttgtcaataacatagatatttgtagtaattataataacaatcatatcaaacaaaaaaacatgtccaacaattgttgcaaatcttttttatatatctattttcttatatatgagttaactcttgtcacattaaatatatatatatatatatatatatatatatataaagctccaggatatggctgaaagtatataaaaaattatgaatgtctaacacagatacaagggattatataagacaaaaaacaaacatgtcaattgagaggaacagaatgagataaagaaagtcccanaatctcaagggtttgactg

SEQ ID NO: 4262 - DNA, 395 bp, Glycine max
  unsure at all n locations
agctggtcatcctaagtaacatgtttaggttttagtttatcttattgcatgaaacatatnctaaaatgttttttcgctgttgcattgttaaattgagtaaaaatatgacatgaaatctaatcgttaaataatctaacactaaatatttcatagagatgattgccaaagtagtacatcttgataaaggacaattaaaatttagatgtcacttcgtgaatcttacatgataaaaatcacttataatagataattgttttataaaacacccactctgataattaaatttgcaaaataacctattttgatatctaaaaaagtctgtaaactaggtaaatgggttaaaataattcttgttatttactctaatctaataaaaaaacatcttattataatct

SEQ ID NO: 4263 - DNA, 394 bp, Glycine max
agcttaccactgtccggttactccttgcccttgctgttcttcataactggcaccttcgacaactggatgtaaacaatgctttccttcatggggatcttaatgaagaggtttatatgaagctccctccaggacttgttgtggataatcccaaccttgtttgtcgccttcagcgttccttatatgggctcaaacaagccagtcgccaatggttcacacggctttcgtcatttcttctctcccagggatttcgtcaatcctcagttgatcactcgcttttattatattctgataatgataatgatataacagctattcttgtttatgttgacgacatcatcttgacaggaaataatctcgagactatagcacatgttaccaagcttctcgatcaaac

SEQ ID NO: 4264 - DNA, 261 bp, Glycine max
agcttgaatcggacatccgtgtgacaacttatgattttttgaatttcacgagagcttccgtggttcaattccgagcgccactatatgtgatgcgccaaaattggacattcgagtcaaatgtcatgaccatttaaattcctcaagagcttccgttgttcaattctaagcgtctcgttatgcgattttcctgaatcggacattcgtgtgaaaagatatgaccatttgaatttctcaagagctaccgttgttcaatttcgagcc

SEQ ID NO: 4265 - DNA, 439 bp, Glycine max
agcttgtgtttgagtgaggtgatatctcttttatcatctttgaagccattaacctctcttctcaacccgccatagtaatgagaaacaggagcatgtctcagagtaacaacatacacatcaccaaaataatatcctatagtagataaataatcatattcggatgtgcctaggtaaataacaaatgtataatgattacacctcacagaacaacatgcataaatataccagatctaaacattatgcaagttattctgacctacgtttttgtcaagagtcttggtgaactggtccaaagctggagaaaccttcaacctttgcttcagaatcctcttctctctctgaatttgaacattctttggccacttcatgaaccgagtcaagtctctcttcggaggcaacgcccctccgactctgaacttctttggacgcttctcaaaca

SEQ ID NO: 4266 - DNA, 450 bp, Glycine max
agcttgacattgaaaatagaagctatgagcaaattcatacgacaataactttttactccgatgtccgattgtgtcccgtagtatatcgagactcccgtaattgaaaacagaagctcgtagcaaattcaaacgacaataatattttactcagatgtccgattatgtcccgtagtatatccatacgctcgtaattgaaaacagaagctcgtagaaaattcaaacgacaacaactttcaactcagatgtccgattgagtgctctaatatatcgagacgctcgaaattgaaaacagaagctcttagcaaattcaaaggactataacttatatctcggatgtccgattaagtcccataatatatcgagactctcgtaattgaaaacagaagctcgtagcatattctaacgacaataactctttactcagatgtccgatcgtgacccgtagtatat

SEQ ID NO: 4267 - DNA, 366 bp, Glycine max
agctcggagctcggagtctttttgaagttcctcatctgacttgtagtagaatgagacatattgtttcacccaagacttgatagcatctcatatctctagcccatcagaagcataaggatagtcctcaatcaaaagtcgaactccatggggagcagatggatccttaacagcaactcctctgaattaaaagcacccaaataacattgattagcacaagagttatatcaagcctgaagccttttttcttcttatgccattgatgactttttatatcatgcattcatgtgttcccccaatgtatgcactttgcgatttcttttctttcttaatctattgcccaacacaaaactcgagctgaatccgaac

SEQ ID NO: 4268 - DNA, 409 bp, Glycine max
  unsure at all n locations
actcagcttagtggctcatgagcaggggaaatgataatcaatcaattatgtaagatagtcttttctataggagattactgtgaggaagttttatgtgatataatccctatggaagcagggcacattntgttaggtagaccatggcaatttgacaagaaagcaatccacaatggtctcaccaatgaaataaccctcacccatggaagcaaaaagctcaaacttgttcccttgacaccttcacaagtgattggggatcaagtacaaataaaactcaaatggaatgaggaaaagaatagaaaaagaaaagaagaacaacctttaatggttaacgaggagtgtaaggaggtaagtgatgtgaacctgagtaagagcggatcgtttgatacaggctacggagatttggatgaca

SEQ ID NO: 4269 - DNA, 448 bp, Glycine max
tcttaagtcacctgaggcatgcaagcttcaagaataacggtctcatcaaattatttatttcccgaatggaattctataaataggccttctatttttaatggcgtgggttaccattattggaaaacccgcatgcaaatttttatagaggcaaaagatcttaatatctacgaagcaataaaaattgggccctacattcccattatggtagcaggaaatacaaccatataaaaacctacggaagaatggagtgaggaagaaaagagattagttcaatacaatttaaaagccaaaaatataattgcatctgctttaggaatggatgagtacgttacggtatcaaattgtaaaagtgcaaaagatatgtgggataccctacaagtaacacatgaaggtacaatagatgtaaaaagatccaggataaatacattgactcgtgaatatgaattat

SEQ ID NO: 4270 - DNA, 296 bp, Glycine max
agcttcatacaagattatatggcttgaaactatcaccgaggcggtggtacacgaagcttaatgaggttatgaccacctcaagattcaacagatgtgacatgcaccattgttgctacattaagaaatatactaatagctatgttatccttatcatatatgctgacgacatgttgattacacgatctagtatggcagatattaacaggtagaagcagtctttggcaaagaacttagaaatgaaggatgttgttccagctaaacaagtgcttggtataagatttcttacaaatagatca

SEQ ID NO: 4271 - DNA, 460 bp, Glycine max
  unsure at all n locations
ggcatgaagaaacgttaaataaaaaagcacagganaagttattagggaaaggtacaatgggaatntaaaanaattgttgagttatatcaaaactaaaagaggaaaggaagcccattatacgattacaaatagtggggactagagagtttcttttctatttttttataaattacattcttttatttaaaaaattattaaattataactttttgttttgaaatcatactttattttgaatagattaatatacattacattgaatttaattaaaaatttaatctatctatattttgtttgataaaaaaaaattatccaatccatttattaactatttttaaaaataaacattaatatttatatantaatttatacccagatactcttgaatatngattcaaggattccttaatgaacggtgtagtatctaattcaatagaatacatattatattaaataattc

SEQ ID NO: 4272 - DNA, 580 bp, Glycine max
agcttaagggggagtgctcgtctcgaaaatgggatatttttttgtacatgctttcagatagttgtcatcatcaaaagagggagaatgtgaatgaatatgtatgaagattttgatgatgccaaagacagaagcaatacaagtttacttcaagtccaaatcaagatcatgtaaacaaaatatcaagagaaaaaacccgccttagtctatttttgttaaaagaatctcttaatgattgaaaaggtttggcctcaaaacataatttttaaattaattataaaaagttttaaaatattttaacatttctgaaaaaaggaatttttcctctggtaatcgattactagaagttgtaatcgattaccagaagcaaaattgttttaaaagcttttcaggaagttgaaatttgaattttgaaaactgtagtcgattatcatttgtatgtaatcgatcaccaataacggaactcctgaaatttcaaattgaaaaggcatgatccctcattgcataactatgtaatcgattaccagtgaggaaaattgaaaaattgctttgaaaagtcacatcctttcatgagtttttgaaa

SEQ ID NO: 4273 - DNA, 596 bp, Glycine max
agctttaattagattgttttctatctacaatttaaaagaaaatctttattagattccttcttttaaaagctttattagattcttgggtaacaaccagaaaggaaatgaatattaaaagagagaggataaagttacgaaactatactgtatagccgaagaagttcttaaattaaataatgaaatcattggaacaaaaaataggttatatatatatatttaaaacacacacacactgcgttttgaataatcactaaaacttgagacttgagagcgcagctaagctaagctgatcatgcaagacataaaattaagaagtgggaccaattgtgtagaagtttaatcctattctccattagcctaaaggtaaaagggtagacagtacacactacatagtacacacacaaagatcatgttaaaagttaaaacgatttttttcttagaaaataatatttggtgaaaaaattgagcaaaaaagaccattctagaaccaatagtaaaaaataactataaacttatatatatgccagcaacataattttctgctaaaagtgtatactcgcattaaacgaaaaccagccttttttttaaaagaaaaa

SEQ ID NO: 4274 - DNA, 444 bp, Glycine max
ttgggtggaaaatgatagtgagactcaacttggatatcaaccttgtgctacaacaattgcaacaagacccactatccacaatgagagaacaatttttgtttaaaaccttacatcttgtatgaaagatgttctctctttgagttagggttaggttacaagattgactcccaaggagccttctcaccattagaagattaccttcttcataggtgtaaacctcattaatatgctcatcacccttggcttcacccttacttccatttgaggagggagaagaagtagcctcctcttggctactatagatgtcttgactcctcatgatcgtggttttctttgtggggcattgagaagcaatgtggcctttcccaatacatttgaagcacttgatgttactagttctatcttgtgaactagcctttggagtgatttcctctatgtttttac

SEQ ID NO: 4275 - DNA, 374 bp, Glycine max
ttcaagcggggtgcatgtgagtaaccaggtttcccatctggttcgtgcaactctgaatggaggctcttgccttttgctgagaatgcgtatgatggagggtgattagcctgacgaagccttatacaaaaggtatacgaggagccttaaaggcctgatcgatatcgtgtgaaccgctgctgcataggaggaagcccacttagcttgtttgtgccaaaagaattttttaatggatggacaggcttgggctgatagcataagactttgaccctcttataataagatgatacctacttcctgaattgtgaatgaaggaagaaatgctctggttattcagtactagaaggtgtttccgctgacgaggtccattattgatg

SEQ ID NO: 4276 - DNA, 562 bp, Glycine max
  unsure at all n locations
agcttattgggcagtgaagacttgcaacttctttatggaccaagctggtgaggaaagaaagttgcaactgagtgagttagatgaaatccgcctagaagcctacgagaacgccaagttctacaaagaaaagaccaagaagttccatgatagcatgatagttaaaaaagacttcgtggttgggctaaaagtgttattgtataattctaggcttggactcatgagtggtaagttgaggtctaagtggattggtccttttgttgttactaatgtttttccttatggtacagttgagatcaaaagcgactccacaaacaagagcttcaaggtcaacggacatcgacttaagccattcctcacgaacccttctttagtggacgtagtggtggaagagacttccttactccaccctactcttcctccaccatgacttanggagtttttcttttcctatctccttccttgcttttattacacttgtccgattctttttgatgatttaattgtttttaatcttttaattgtgctacattgagggcaatgtgttgtttaagtatgggggggg

SEQ ID NO: 4277 - DNA, 373 bp, Glycine max
  unsure at all n locations
tgccgccacggagttttccgactatgcttttgtgtggtggaacaagctacaaaaggagagagcaagaaatgaagagccaatggttgatacatggacggagatgaaaaagatcatgaggaagcggtatgtgccggctagttactcaagggacttgaaattcaagctccaaaaactaacccaaggcaacaagggggttgaggagtatttcaaggaaatggatgtgctcatgattcaagcaaatattgaagaagatgaggaggtaactatggctcgatttcttaatggtttgactaatgatatccgtgatattgttgagctgcaggagtntgttgaaatggatgatttgcttcacaaagcaatccaagtggagcaa

SEQ ID NO: 4278 - DNA, 397 bp, Glycine max
agcttgcgcatccaataccttgatgaggatgtcccatatgttcttaaaactggactgattcatttgctttcaaagtttcatggccttgcaggtgaagacccacacaaacatttgaaagaatttcacattgtctgctccaccatgaaacccccagatgtccaagaggatcacatatttctgaaggcttttcctcattcattacagggagtggcaaaggactggctgtattaccttgctccaaggtccatcacgagttgggatgaccttaagagagtattcttagaaaaaactttccctgcttccaggaccacagccatcaggaaggatatctcaggtattacacacactactggacagagcctgtatgagtcctgggagagatttaagaaactatgtg

SEQ ID NO: 4279 - DNA, 406 bp, Glycine max
aagcttggttcatctgagtaaccatcttttccatctgatttgtcaaaccctgaatggaggctcttgtcttttgctgaaatcgcatattctggatggtcatttgcctaactaagtcttctaaaaaaggttgcggaggagccttaaacgcttgttgactttgttgtgactgctgcggtattgtaagacgaacatatggcttgtttggaccagcaccattctcttaaggagggacaagatgctgctgatgcctaggacttgtccatctcacatttacatgaatcctccaacctggaatgtatctgatgcttgaaaagtcctacacattctcttgttgctggacttacagatgaggaggtgtataataaatgtttgcaccctaaccttccagacgctcactgactcccta

SEQ ID NO: 4280 - DNA, 585 bp, Glycine max
agcttgtatacatgattttgaaatttatgatcctcaaaaaactaggagattgggaaacaaaaacttcctcatcaatatatccatttagggaaacactctttacatccatttggtacaacttaaaattcattattcaagcataagcaagaagtaaccttacaacctctaatctagctaccggtgcatatgtctcatcaaagtctataccatcttgtgggttataacctttggctacaaggtgagccttgaaaacctattttcctagttataacactattttcatcaagcttgttcttaaaaacctatttagttcctatgatgttcaagttattagtacttgttatcaattcccatacatcattccttttaaattgatttaactcatcatgcatagacataatccaaaactcatcttttaatgcatcatcaaaatttaagggttcaacttaagacacaaaagccatatgttcacaaaacaaacttaaagagtgtctagtagatactctcttctcaatatcaccaatgatattgtcaatatatagatttctaggggttcaccattctttgggaagatcttgtgatggg

SEQ ID NO: 4281 - DNA, 439 bp, Glycine max
tctaaaccttgtacaagaatgaagctctgataccacttgttatacaagtggcctcagatatcttaagaagggggggttgaattaagatattccaaactgtttcccctaattaaaaatctatttcactttttactcaagttatgaattcccttaatgacaatcttcttaaatattaattcaaatgaaacaatttgaatatgaatataaagcaataataaataaaaggagattaagggaagagaaaatgcaaactcagttttatactggttcggccacacccttgtgcctacgtccagtccccaagcaacccgcttgagagttccactatcttgtaaattccttttacaaattctaaacacacaaggacaattcttcctttgcgatatagatcctttacccaagagactcacagtctcttaatcccttagagaatgagaag

SEQ ID NO: 4282 - DNA, 447 bp, Glycine max
tagactcagctcgtcttaccatccacaaacagacggtcagactgaggtggcaaatcggatagtagaacaatacttgagggccttcgtccatcgcaagccagcgttgtggggacgatttctgttgtgggcagaatggtcgtataatacttcgtgccattcgagtacgggattaactccgtttgaaatcaccttcgccgaaaaccaccagctatccctgaatacataggtggaacatcacaggtgtcataccctaatttcgtccggggaccatccgtttgttgggatgcgaccctcgtttgaccacttcgaggtacttggcacccatcgttaggcaatctgtgaagtttcgtgacatgctggaagtcaaaaggaagcattgttgcacaatccgtgaagttccatgacatgctggaaatcaaaaagaagcatttgtgcacaatccgtgaa

SEQ ID NO: 4283 - DNA, 434 bp, Glycine max
tctgcttataaaggctatgggatggtgatcttgcatgagaacagctcttacccccactcctaaggcatcaacctccactataaaagtctttgtaaaatcaggtaaggccaatacaggtgtctgacttaactgatccttaagacactaaattgcaagcttggcttcctctgaccaagaaaaactatcttttttcaacatgtcatttagtggtttggctatggtgctatatctccgcacaaatcttctataatatccttccaaacccaaaaatcctctcaactatttgggggtctaaggaagtggccaattcctcatcgcttccaccttatcagggtcagtagagactccttctccagtgataaaatgtcctaagtattctactcgaataaccccaaagtagcacttagatttcttggccaacaagacatttgctc

SEQ ID NO: 4284 - DNA, 453 bp, Glycine max
tgccaacccatggaagctcctaatatctcccacactttttggggtgggccattcttggatggccttgattttctcagggtcattttggaccccatttctaccaactacaaaccctaagaaaactatattatctacacaaaaagtacacttctctatatttgcatagagggtgtttttcctaaagactgaaagaacttgcctgagatgtcctaagtgatcatctaggctcctactgtacactaaaatatcatcaaaataaacaactacaaatctacctatgaaatccctcaagacatgatgcataagcctcataaaggtgcttggtgcattagtgagcccaaaaggcatcactagccattcatacaaacaaaatttggtcttgaaagcgggtttccactcatcaccctttgtcatactgatttggtgatacccacttttaagatcaatttttga

SEQ ID NO: 4285 - DNA, 419 bp, Glycine max
agctttaagaaaaatcaaacgacaataagtttttactcagatgtcggataaaggcccgtaaaatatcgagacgctcaaaattgaaaacagaagcactcaacaaattcaaacgacaataacttttgactcggatgtccgattgtgtcccgtaatatatcgagacgctcgaaattgaaaactgaagctctgagaaaaatcaaacgacaataactttttactcggatgtccgattgagatccgtaatatatcgagacgctcataattgaaaacagaagctcttagcaaattcaaacgacaataactttttactcggatgtccgattgagtcccgcaatatatcgagacgctcgtaattgaaaacagaagctctgagcaaaatcaaacgacaatcacttttgactccgatgtccgattgagtc

SEQ ID NO: 4286 - DNA, 675 bp, Glycine max
  unsure at all n locations
atcaaacttggagaaagagctcttggggtctatacatganaaccaatcaagcataatggtactttcttcactaaagcggggatccatctccacacatattttatcaatagccacataaaaaatctctgcacggcaatgatgaaaattagtgatagatctcccttctgctcttgaacgaccccgaactggtatttcgtcatccatatttggttccagaatacttttagcaacacaaaatccttggacatcggcaaaaaaattattccagccactctttcattgtgcccaaccgagctttgacaacatcaactaattccatggcattcacaatataaagaccttctctttgccatatatgggaaagctcgttcgcaatcccaacaactttaaccattaccccaaaataaaagcaaatttaagctctacaattatttttgaaaaaattggcacatgccaaacctccatttcaattttttcatttaaaaccatacccttaggcaaccctttttaaccccgggggggaacccacatttttgtattccaaaccaaacgccacttgtttgtttatcgaaagggtggaaaccccccccattttttatagtttttcccccggggggtctctcagtgggagaaacaaaataggaattgggcgtgtaaaagccccccccctttccc

SEQ ID NO: 4287 - DNA, 658 bp, Glycine max
agctttgagccaatatcctgactcaccataaaccttgacccagggtgagaatgtcaatccttaccctcggaagcggaaagaatagaagggaaatttccaatcaaagaaaaggaaagaaagaagatttccaatcaaagagaaagcaaacaaagaaaagaaggaaaattccccaatcaaagagtgggagaaagccaaaagaaaagaaagaaaattcccaatcaaagaatgggagaaagtaaaaaaggaagaagaagaaggaaagaaagctcctgatcagggatcgaaggaaaacagaagaaatgtgcagaaaggtctttggaccggacaatatctgaacaatacagaattgtcaccaaatgaacaaaaagaaggaaaggaaaccacgacctaaaatggtcttctccctttgattaccaaccaaaatcccgtgcgctagcgactttttcgccccgcactaaacaaaaacagaaaaagaaaacgccaacaaaaaaatccaaagccaaaaacacacaaaagccgaaaaacccatcaagaaaacccatttcccaaggcaagtcctattgatccatgatcacgcatgtaatttttgatttgataagaaataatttgcacagtccagtcatgacatatctatggtttggaattaggatgaaacact

SEQ ID NO: 4288 - DNA, 389 bp, Glycine max
gaatggagaattgcactaagcaatcactacgcatagctctcaactctaaggtggaggacacatgaacgaaaacacaattcatggggctccgaaaaaggggttgagaatggagaattacactaagcaatcactacgcatagctccaaactcgaaggtggaggacacatgaacgataacgctattcatggggctcccaaaagattgagaatggagaattgcactacgcaatcactacgcatatctccaaacgcgaaggtggaggacacatgaatgaaaacgcaattcatggggctccgaaaagattgagaatggagaattgcactaaacaatcactacgcatagcttcaaactcgaaggtggaggacacatgaatgaaaatgcaattcatg

SEQ ID NO: 4289 - DNA, 512 bp, Glycine max
agctttgagcaaattcaaatgataatagctttttactcggatgtccgattgagttccgtaatatatcgagacgctcgaaattaaatacgtaaggtactagcaaattcaaaccagaataactttttactgggatttccgattgagtcccgttataaatcgagaatctcgaaattgaatacgaaagctctgagaaaattcaaacgacaataacttttttctctgatgtccgattgagtcccgtaatataccgagacgctggaaattgaatacggatgctttgagcaaattcaaaagacaataaacttttactcggatgtccgtttgagtcctatagtatatcgagaggctcgaaattgaatacataagctcctagcaaattcaaaccaaggaggaatgatgagaaaaagaaaggaattgctcttaaagcttcatcttcaactcaaggaagaagtgataaggaggatttcaatgaaatagacgaagatgatgatctcagtctttttgtaaaaaga

SEQ ID NO: 4290 - DNA, 477 bp, Glycine max
tttaagttcttcctcaaaactgtcctaagcaaagttccctaagtcctattaacaacttccgtttgcccatcggtttgtgggtgacaagtggttgaaaataacaatttagtgcccaacttgctccacaaagtcctccaaaaatggcttaggaacttagagtccctatcactaacaatgctccttggcaaaccatggagtctcacaatctccttgaaaaacaaatcagccacatgggaagcatcatcaatttttttacatggaataaaatgagccattttagaaaacctatcaacaaccacaaaaatggaatctctaccattgcttgtttttggcagccccaaaacaaaatccatggataaatcaatccaaggatactccggaattggcaatggagtatacaatacatgaggctttaccttagactttgcctttttacatacaatgcaatgttcacaaaatttctgcacatccttttta

SEQ ID NO: 4291 - DNA, 572 bp, Glycine max
agcttgttgaagctcatcttgagtgatgtatccacttccatctttatcaaaataagcgaaagccgcaactaaatgatcttccctgtcaaccttgtttagatgcaatgttgcagctatgaattctccatattcaattgtgccactgttatcaacgtcagcctgtaaaccaaaacaaaattgggttccatggatcaaaataatatactactaaaagattataccttttctaattttattacgcactatcaatatatcattataataaaaatgtcttattaaatgatacttagaacacctctttgcgcttgatcataatcataaacaatgaatagcaaacaataaattgctcccaggatccaggtgccatgaaaaattagttacgcatccctatttatgcatgaaatccactttaatgtaattataataatagcataaccagcatataaaaataagagaacaatgcaacaaattctttgaaagtctcctcttaacactattattatgtgaaaattgaaatcctaggctatccccactaaatggaagacatggagaaaatgtatgttttatgaaat

SEQ ID NO: 4292 - DNA, 406 bp, Glycine max
tttcaactctttttgcaaggtcaatttgttctcaaaatttcaaagtgttcattcacccaggcgcagattgaatatttgcatcacgttgtgtcaactcaaggggtccaaccagttgcctctaaagtccaggcagttcaacactggccaatacctcatagcacgagagctttacgcagcttctttggtttggccggattctatcaaggtttattcgaggatatgtctttttgacagcaccattaacatctttgatgatgaaggaaccttttctatggtctacagaagctcaacttgcttttaataagatcaaggaagccttatcatctgctttggttttgtccctccctatttcacccttccatttacagtggaaacagatgcttttggacaggtattgggcgtgttt

SEQ ID NO: 4293 - DNA, 431 bp, Glycine max
tgtaatcgattacacgcatactgtaatcgattaccagaggagtttttcagaaaacattctcaacagtcacatctttttgtgtggttcttgaatggctatcataggcctatatatgtgtgacttgagacacgaatttcataagagtttttcagaacaaaaaggtcttatcctcttatagaacaaaaaggtcttattcaaattgttctatttgaatcaatatttaagaaattcattattaagggaatttataacttgaatagaaagttaaatagaatttttaattagggaaataagttgtaatatcttaattcaaccccccccccttcttaagatatatgaggccacttgtccaacaccatagattcaaacagaaaacgttaatgaaacatgaagcagaaacgtacattacggatacgttgatgagacagaaa

SEQ ID NO: 4294 - DNA, 261 bp, Glycine max
cgcggcatgcagcctccatgactaccgggacttgaaccgaccccggcctaaagacaatttttccctgccacgcattgatctattggtagataatacaaccaagttgccacattttcttatttatggacggcccctccgggtataaccaaataaaaagggtccccgaacatgcacagaagacccctttcgtaaccctatgggggacgttctgctatacagcgatggccttcgggctgaaaaatgctggggcaacctatcagc

SEQ ID NO: 4295 - DNA, 514 bp, Glycine max
  unsure at all n locations
tgcatttaaaaatgttttaaaaatacttttaattaatatttgtatttttattcctttattaatatatatgtgaggggtagagggtgtcacaacatgtcttgaagttaattttgacagttttgaattttgaaattagatacgatatatttttaacacatgttcatattatgttttgaatctttccaaccctatttagtgtcttatattcttttaaaagatataagttatttcctttgtgcaacattgatttactcagctttgttgtaagttgtttttgttggaattttttgttccaataattaatgtgagctaatattataagacaattatattagttatttatcattagtgagttttattttatgtgatcagattaattgagtccgttagacaactaaatcagatgatgtagacttagatgaacatgtgttggcccattataggataatgataaccctattaagttaacatactataaaaaggctgttgtccncaatataccagccatcacata

SEQ ID NO: 4296 - DNA, 400 bp, Glycine max
cgcttaaccaattagatggaacaattggctacacagttaaatcaacaccactcccataattttgacatattaccttctcaatctgtccagaatcccaaaaatgtgagtgccattgcattgaggtcgggaaagcagtgtctagaacctcaaccagcaacatcttcctcatccgcaaatgaacctgcccaacttcactctactccacaaaaagatgatgacaaaaatttaaagagtaagatacataacaatttctatgcacgtgaatctaaagagaagcaggatatcccttttccattccctccaagaccaattttcaacaaaaaaaaggaagaagtatagaacgagatcctgcaaacatttataaaagtagaggtaaacatacctttgctggatgcattaa

SEQ ID NO: 4297 - DNA, 384 bp, Glycine max
tggctctggccaccagaaccatctgattcttaagctcatccatcttattacagatgttgctgtcatgcaagtgcttttctgcatcaaacaaatcaaatttgatcttttgatcatttacacccattttcattatacctttccccatatccaccacacaattggcgattaacatgaatggacgacccaaaatcagtgggatctcagtatcctcttcaatgtccatgacaacaaagttcgcacagaaggttaactgttgcaccttgaccaaaacatctttaatcactccataaggtcttgttatagatctgtctgctagctatagtgtaattctaactggcataatcttcaactctccaattcttctgcacatggatagcgacgaaa

SEQ ID NO: 4298 - DNA, 353 bp, Glycine max
ctataggagacggaccattccaagtgttggagaagattaacgactatgcctacaagattgacttggctagtgagtataatgtaagtgccactctcaatgtgtctggtctatctctttttgatgcagatggaggagccttggatttgaagacaaatccttttcaagaaggagggagtgatgaggacatttgataaaatttggtgagaggttctctctgggttccttgttgaaccaattatcagacttatcaaggtaatccttgtggcgtctacccagacttatcttccttcattggaagtggcgtctacccggacttatcttccttcaccggaagtggcgtctacccagactta

SEQ ID NO: 4299 - DNA, 389 bp, Glycine max
tctcggtatattatgcacctgaatcagacctccgggtgacaagttatgaccatttgaatttctcgagagcttccgttgttcaatttcgagcgtctcgatatcttatgcgcttgaatcggacctccgagtgaaaagttaagaccatttgaattgctcaatagcttccactgttcaatttctagcgtctcgatatattatacgcctgaatcggacctccgagtgaaaagttgtgaccatttgaatttctcgagagcttccgttgttcaacttagagcgtctcgatattttatgtgcgtgaatcagacctccgagttaaaagttatgaccatttgaatatctcgagagcttccgttgttcaattgcgagcgtctctatatgtgatgcgcctg

SEQ ID NO: 4300 - DNA, 369 bp, Glycine max
  unsure at all n locations
taagctccttcaactgcacaaggctcttaatatttgaagagtatccttgtggaaccttcacccgacaaagacactgaaaaaaacttatcttctcctttttggacaaagtatgagaagctgggggcaagtaaattttcttcccatcagaccttggatgcaactatgatcgtatccccatcttagctagatcttgacgggtatttgtcgcaaatgcccttttgcgggcgtgtgaggcgaggctcacgtgtgcgctttccaaaggaggaaagatgcgcggagtcgccaccaacgtctatgtgtggaaaacgtcgganaaaccaaaggaaaccggtcaaaatgaaaattctaagttcgggaattgtatttacg

SEQ ID NO: 4301 - DNA, 592 bp, Glycine max
agctttcaaaaatttctccttatcgtcaaaagttaagtccaggtaaaatatttattttcttccatcataactcttgatcaatgtacatgcatacactatcaaatctcaaagatatttcattattctcagaaaaagcaacatcacttgtaactttcctcacactatttgtttcttatatcatgtctttgagtgagaaaaatgataaaaagaaatttcttcaaatgcccatccaaatcgattgagtaacacaattattaaaatagaagaaaatttaaaataattttgttcactcttaatttatataatctgcactaataaaaatagaattatataatatgccatgtaatcctaaagaaacgggactattaaaagaatatttaaaaaaaaaacatttaaaatcatgataagaatgtattagtaatattatttaagacaattattaagtactatggaaaaaaatgtaaaattaattatatctttatgaaattatttgtatacaataactttttttttctacccgtcatgaaaaggataggaagacaagagatacacttacagtatgttatagtaaccttataacactagatgatgt

SEQ ID NO: 4302 - DNA, 483 bp, Glycine max
agcttgtgcattcaatatcctgatgttgtgtttcatatgttctcaaaactagactaatacatttgctgcccaagtttcatgatcttgcaggtgaagatcctcataagcatcttaaggagttccatattctttgctctatcatgaaaccccctgatgtccaacaagatcatatctttctgaaggcttttcctcattctctggaaggaggggcacaagattggctatactaccttgcgccccggtccattttcagctgggatgagcttaagagggtgttcttggagaaattcttccctacatttaagaccactaccattagaaaataccatttaggcatcaaacaacttactggagagagcttgtatgagtacctagaaagaatcaagaaattgggtgcgagctgccctcaccaccagatttttgcaaaactcccttttccatatttctatgagggaccttgccaacatggagaggagtatgatt

SEQ ID NO: 4303 - DNA, 356 bp, Glycine max
atcaactctgaacaaaagagatcaactctacacactagagatcaactctacacactaaagatcaactctacacacataggtccaacacttgatgttagggtagcatcaaggtggctcacaaaagactcaagtcccaaaaacttactaactaactctttaatcccggacttggtacaaaaactcgtgcagcctccatgattatatagcaatctgcgtttctgggcttgaaactttttgatgctggaggagatatatctttttttgaaaaaatctgccgttaaagaaactaaaagaaaaacttttgaacttttaactagaatcctccaatcctaaatcttataatcccctaacgaact

SEQ ID NO: 4304 - DNA, 578 bp, Glycine max
gcatgcaagcttctcacctaaccactacccgtgcgatctctacctaagacccaatcttagatatgagaacctccgtttactccctctcactcacactctcgtgtttacaattaagtcaaagacacaccagagatcaactctgaacaaaagagatcaactctacacactagagatcaactctacacactagagatcaactctacacacataggtccaacacttgatgttagggtagcatcaaggtggctcacaaaagactcaagtcccaaaaactcactaactaactcttcaatcccggacttggtacagaactcgtgcagcctccatgattatatagcaatctgcgtttctgggctgcaacttcttgatgctggaggagatctatcttcttctgaaaaaatctgcagttaaagaactaaaagataacttttgatcttttagtttgaatctttaatctttaatctttaatccctgaacgaacttttctactttgaaattcgaacttttattatcttttaattcgttcccagaagatagatcatctaatctcttgctaactgcacaataatctgttaaag

SEQ ID NO: 4305 - DNA, 354 bp, Glycine max
agggctaaagtctcacgagtgtcacatgttgattcaacatttgttagcagcggctatacgagacatcttgccaaacaaaggcaagttatccataactcgcctatgcttttatttccatgccatatgtagcaaagtcggtgatgctgactaatctgatgagctggaaaatgacgctgctattatatcgtgccagttggagatgtatttaccccctactttctttgacatcatgattcacttgattgtgcatctgggcagagaaatcaaatattgcggacctgcttatttgcggtggatgcacccggctgagcaaccaatgaagatgttaaaagggtataccaagaatctatatca

SEQ ID NO: 4306 - DNA, 632 bp, Glycine max
cctttaaactcagccactaaatcgatcatacaaatatcacatgccatcaaatacagatatcactttctaaccagaattttacttccctggccatctatttgtagcgactacttacaaatcctaaacaaacagattaactaaaatttcaagtttcatgctatacactctacactatatctcataccagctccttttattagtgatcattattactatgtattccaagtttttagaaagataagtcctagcataacaagtagaataagaaaaaagattgatgttaacatggaagagatgaactaatttaatgaatccttcatatttaaatataagggtaaaatatatacaccctctgaactctgaattattgccctatatcagcttaccctttaaagttcatcattatttttttctttaactaagtatctctccttctatctcttctaaatgtctctttcaaaaacactagaaataactgaaaacaaattacaaaaaccaaatgcaaatgatcccaattatcaaatattttaattaatataaaattaactacatctagttcaaatacataatgtaaatataactatataaccattactaccaaaataagattataaaatacatgaataaaataa

SEQ ID NO: 4307 - DNA, 579 bp, Glycine max
cttgccccttgatatatttgagggactcatggtcactattaatgacaaattccttgggataagaggtagtgttgccatgttttcaaagcccgtactaacgcatacaactccttatcataagttgaatagttaagggtaggaccacttaacttttcactaaaataagcaattggatggccttcttgcatcaacacagccccaatcccaacatttgaagcatcacactcaatttcaaaagatttttgaaagtttggcaacgcaagtatggggacattagttagcttttgcttaagaacattgaaagcttcttcttgtttctctccccatttgaaaccaacatttttcttgagcacttcattgagaggtgctgccaatgtgctaaaatccttcacaaatcgtctataaaaacttgctaagccatgaaaactcctcacctcggtcacagacttaggtgtaggccattcttgaataaccctaaccttctcctcatcaacttgcactccttttgaactcacaacaaaaccaagaaacacaacatggttaataccaaagatgcattttttaagattggcatacaat

SEQ ID NO: 4308 - DNA, 452 bp, Glycine max
gcttgacatctattgatatatcatacaaccagtttgagggcccacttcctaaaactgtagccttcaacaatgctaaaattgaagcattgagaaataataaaggcttgtgtggaaatgtcactggcttggagcgttgcccaacatcaagtgggaaatctcataatcatatgagaaagaaagtcataacagtaattttacccattactttgggcattctaataatggcattatttgtttttggagtctcgtattatttatgccaagcttcaacgaaaaaagaagagcaggctacaaatttacaaactccaaacatatttgcaatatggagttttgatggcaaaatgatattcgagaatattattgaagccacagaaaactttgacagcaagcatctcattggggttggagggcaaggatgtgtttacaaggcagtgttgcctacaggtctagtt

SEQ ID NO: 4309 - DNA, 545 bp, Glycine max
  unsure at all n locations
ccctggaagctnctaatatctgccacactttttgggttggacctattttggatggccttgattttgtcagggtgtacttggaccccatttctacaaaccacaaaccctaataaaactatattatctacataaaaggtacacttctctatatttgcatagagggtttttttcctaagaactgaaagaacttgcctgagatgtcctaagtgatcatctaggttcctactgtacactaaaatatcatcaaaataaacaactacaaatcccttaagacatgatgcataagcctcataaaggtgtttggtgcattagtgagcccaaaaggcatccctatccattcatacaaaccaaacttggtcttgaaagcggttttccactcatcactctcttcaatcctggtttggcgataaccacttttaagatcaatttttgaaaaaatgttggcatcatgcaactcatcaagtctaggaatggggtgcctatacttaaagtaatgttcgtgatggccctgcaatctgtacacattctccacttaccatcctttt

SEQ ID NO: 4310 - DNA, 505 bp, Glycine max
ttcttattttcagatgatgcagatgggtttttaattaccttatgcactcctttaatgactatggcatcatttttggcgctaaactgctgggagtgggaggccttcttcttaattaaatttctggttttagcaggagtcatgtctgcaagggctccaccactggcagcatctatcatacttttctccatatgactgagtccttcataaaaatattggagaagaagctggtccgaaatctgatggtgggggcaactggcacatactttcttaaatctgtcccagaactcatacaggctctctccactgaattgtttaaatacccgagatatcctttctgatggctgtggtcctgggagcccggaaaaatttctctaataatactctcttaaggccatcccagcccgtgatggaccttggagcaaggtattacaacccagtcttttgccctcccttgtatgaatgaagaacagcccttaaaaaaatgtgtatctttttggacattagg

SEQ ID NO: 4311 - DNA, 571 bp, Glycine max
tttaaattttatttagtgaaaaagatgagggtacttaataaactaagaggggggtgaattggatttcaataaaaacgaacttttaaaattatagttacaaaaactttttttggacagattgtattacaaaacttttataatctaaatttaattaattcaccctttacacgaaatcccttattaaagttattttttttacaaagatatatttttgaacctttttaaaattgattaatactagaatgagagataaagattaaattaagggaagaattatacaacctttttatattggttgactttatattagaagagaagctaatctagttatctaattcaaaaccagaattagatttccattatgtatatagaatctttaaaagtaattaaaactaatttacaattggtagcatagaaaaaagatttatgtatcttaaacttaggtttttagtgaataagaacctatgagaaaatttaccttatgtggaaattatataaacctattctagcatgtttttatggatttatttacaaaaaaaattattttgtaaatccttatggtataacctag

SEQ ID NO: 4312 - DNA, 387 bp, Glycine max
gcatgcaagctttagcaagaccttagacaacaatatgaaatcatttagtgactattttgtacatattcaagtgatcaccaaattcaaggaattggtaatggtctcattccaagtgtactggatgttcatctactaaatgaagttaatcaggtaccttcgtatagtcttgtcttcaagcttgtgtctcttcacgtctggaatatgaatgtagcatatagatccaaagacccttaggtgctttcctgatggcttcttcccgttccaagcttcaattggagtcttgtcttttacagacttagttagacatctgttgagtatgtaaatagcagtgtagactacttcagcccaaaatgtgttaaggagtcccttctccttgagcattgatct

SEQ ID NO: 4313 - DNA, 529 bp, Glycine max
agcataattgagtttcaaacttatagtctatatgttctatccatacttttgctgatccattgtttatggggttagaaagggtcataattgaatcctaaccatgtagcctaacttcttatttcttatctcccttcttcagaaaaaataaatctacattaactaacataatatatatcggaaacaatcttctagatattatttatcaatgttcgaggcgatattacatggaaaaaaatggtaccttgcggagattatcttccttggtgaggcgagagagacgagcgacgaagagagtgcaataagggtcttcagcagccctgggatcaccaaatgggtcatctgcaaaattcaatttgtaagcataaaatggaacacaaatgaaatttttgaaaaaggaaaatgaatatgaagaaaaaacaaacaaaggccaatggaggaacagagttgagcgcgaataacggcgttgtcgtgaggaacaacatcggtgccgtccatgctgccaacttgtatgggatggtatgaatctgcg

SEQ ID NO: 4314 - DNA, 546 bp, Glycine max
  unsure at all n locations
agcttgcttntacaatctccccctttttgatgttgacaaccctaaaatcaagaaacacatgcgcattctttttcctagtcgatcactcacttaattctccatattcttcccctttgtttttgagtttaagcttcacttgaaattaagctatttaattatatgagttcttgatttaatccctattttctctccccctttggcatcaacaaaaagccaaagtgtgttagaaatataaaacatacataaatgattataaagcataataccaaatgtaagcacatatcactagacatatgtcatcaaaataattaagcttaaaactcataacaattaagagtaagtcaatataatcatgttaagttatactaatcaaatattaaaagaaatactaagcattcaaacgtcataaaaatataaatcatttgggtaagtcactagcatctagcagtcctaattctctcctaatggtgtagaaaagaattttcgttactgggtttgtgaagacgtccgaagttgatttttactatctaaaaattctaaaacact

SEQ ID NO: 4315 - DNA, 456 bp, Glycine max
aaacgacaataactttttactcggatgtctgattgaggctcgtaatatatcgaaacgctcgagattgaatgttgaagctctgagccaattcaaacgacaatatctttttactcggatgtctgattgacgcccgtaatatatcgagacgctcgaaattgaatgttgaacctctgagccaattcaaacgacaataactttttactcggatgtctgatagaggctcgtaatatatcgagacgctcgaaattgaatgttgaagctctgagccaattcaaacgacaataactttttactcggatgtctgattgaggcccgtcatatatcgagacgctcgaaattgaacgttgaagctttgagccaattcaaacgacaataactttttactcggatgtctgattgaaccccgccatatattgagacgctcgacattgaatgttgaagctctgagccaattca

SEQ ID NO: 4316 - DNA, 453 bp, Glycine max
agcttataaaaaaaggaaaggatcaaggaataactactcttagacacaagtttattcaaccaacaaagaaagtagtccaaataatagaaaccaacaaggatgaggttgtagtgaagatcaaggaataggacgaggtcatagacaaggacaaggccatgggaaaggctcaacaaatttcaaagaggagaaatctcaacaagaggtcatggccaaggcaactcaagatcaaggtatgacaagtcaaatgtgaaatttaacaattgtggtaaattttacaattgtggccaaggcaactcaagatcaagggatgaccctttattgacgacttgcatgattaatgaaagaagaaaagacaattaatggtacctagacactggtgcaagcaatcatatgtgtggaaaaaagatcatgttggtggagcttggtgaatcgatgaacggaaatgtggctttt

SEQ ID NO: 4317 - DNA, 470 bp, Glycine max
ggaagcaggttaaaagctcttttcaaagcaaaaatgttgtttttacttcaaaaccctttgaactacttcacattgatttatttggtccctctagaactatgagtttgggtggaaattactatggcttactaatagtggatgattactcaaggttcacatggactttgtttttgaaaacaaaaaatgaagcttttgatgcttttcgcaaacttgccaaggtgattcaaaatgaaaaaggtctcaacattgtttcacttagaagtgatcaaggaggtgaatttcaaaatgagtcttttgaaaacttttgtgaagaaaatggaattcaccacaatttatctatcccaagaacaccacaacataatggtattggggaaaggaaaatagatctattgaaaaagatgcaaaaacccttttaaatgaaacaatgttacttaaggacttctgagctgatgtgctacacactatttgtt

SEQ ID NO: 4318 - DNA, 394 bp, Glycine max
  unsure at all n locations
tttttaaggaaaaganggggtgtggggaggttgaaattattagaggaaagacgcatgcctatgttgatgtggaagaattattcatatttacctgggttaacgttattagagagaaatcagaaatctttgaagtatttaaagagttgagtttaatatttcaaagagagaaagattgtgttattaagagaataaggagtgactatggcagatagttagaaaacagtaggtttattgaattttgcaaatatgaaggcatcacttatgagttctgtgtagtcattacaccataacataatggaatatttgagaggaaaaacaggactttgtaagaggatgaaagggaaaatgatttatgcaaaaaaacttactttaatctatgggttgaaggcatgaa

SEQ ID NO: 4319 - DNA, 535 bp, Glycine max
ccgtcgaacttctccattccattctgcgtggaaatagacacctccggcgtaggaatgggtgcagttctatcccagaagaaccacacaatcgccttcttcagcaaacccttctgttctaagctccttcgtgcttccacttatgtcagggagcttgtcgccattaccaccgcctttaaaaagtggagacaatacttattaggcaatcctttcactattctcacagaccaccgtagcctcaaagaattaataggtcaggccattcaaacacctgaacagcaatgctacctggcacgattactaggctatgactatacaattcactatcgtgtcggaagatccaatgcagcagtcgatgccctctcacggtagccaaaagaagccccctttggccaattttttcttctaaccattccatacttcctttttttttgcaagaacttaaacaacaactcctcaacaatcccttcttcgtggactttcaccgctgcattcaagacaatccttctcaataccctgactactccatacgttatga

SEQ ID NO: 4320 - DNA, 556 bp, Glycine max
caagcttcaacatcagaccacttccagggtgctggtaactacttcacatggatttgatggggcctatgcaggttgaaagccttggaggaaagaggtatgcctatgttgttgtggatgatttctccagatttacctgggtcaactttatcagagagaaatcagaaacctttgaagtattcaaagagttgagtctaagacttcaaagagagaaagattgtgtcatcaagagaatcaggagtgaccatggcagagagtttgaaaacagcaggttcactgaattctgcacatctgaaggcatcactcatgagttctctgcagccattacaccacaacagaatggcatagttgagaggaaaaacaggactttgcaagaggctgctagggtcatgcttcatgccaaaaaacttccctataatctctgggctgaagccatgaacacagcatgctacatccacaacagagtcacacttagagaggcactccaaccacactgtatgaaattggaaagggaagaacccactgtcagcacttcacattttgggagtccatgttacat

SEQ ID NO: 4321 - DNA, 539 bp, Glycine max
gtgggatacccaatttgatcatagtttccaagcccttattgaaaagttgatgactgctcccgtgctagttttgcctaacctgagagaatcctttgatgtgtattgtgatgcatcagagatgggtttaggaggagtatagatgcaaaatggccaagtagtggcctatgcttctggacaactcaagactcatgagaggaattatcccacccatgatctatagttggctgctgtagtttttgcccataagatgtagaggcattacctgtttggctccaaatttgaggtgtttagtgatcataagagccttaagtacttgtttagttagaaagagttgaacatgcctcaaaggagatggttagagtttcttaaagattatgattttgagtttagctaccatctcggcaaagccaatgtagtggctgtcgccttgagtaggaaatccctacatatatatgcattgatggttaaagagctggatttcctaaacaatttagagaccttagccttgcgtgggaggttaccttttataatgtgagatt

SEQ ID NO: 4322 - DNA, 572 bp, Glycine max
tataatatcttattacgctcgaaattaaacatcagaagctctcgagaaattcaaatggtcataacttttcacctagatgtccgattatggcgaatcacatatcgagacgctcaaaattgaacatcggaagcccttgagaaattctaatggtcataacttttaactcggatgtccgattcaggcgcatcacatatcgagacgctcgaaaaggaacaacggaagctctcgagaaattcaaatggtcataactttccacactgaggtccgattaaggattataatatatcaagacgctcgaaattaaacatcgaaagctctcaagaaattcaattggtcatcacttttcacacggatgtccgattcgggcgcataatatattgatacgctcgaaattagacatcggaagctctcgaaaaattcaaatggtcataacttttcacacgaatgttcgattccggcgaatcacatatcgaggacgctcaaaattgaacaacggaaggtcttgagaaattcaaatggtcatacattttcacacggatgtccgactcatgcgacatacatatctagacgct

SEQ ID NO: 4323 - DNA, 389 bp, Glycine max
agctttcaagaaattcaaatggtcataacttttcagatgaaagtccgattcggccgcataatatatctagacgctcaaaattgaacgccggaagatgatgagaaatttaaatggtcataacttatcacgcggatgtctgattcaggccaataatatatcgagatgctcgaaattgaacaatggaggtctcgagaaattcaaatggtcataacttttcaattggatgtccgattcaggcacatcacatatcgagactctcgaaattgaacaacgaaagcttttgagaaattcaaatgggcataagttttcagacggaagtccgattcaggcgcattatatatctagacgctcgatattgatcaccggaagccctttggaaatttaaatgg

SEQ ID NO: 4324 - DNA, 290 bp, Glycine max
aagaacacaatcatcccgtgagttggaagagaacaaaggaatcatagaggaggctcaattatataactctggtctaatagtaataaaacatacgtagtaagcagtgacagtgccggcagagttgccaccaacgagcttgagttgcatatcgatcctcccaaataggtactctttcttggattggaagcccggaccagagactttgtccagagaaagagatagaagctgcccaccattgaatatcttagcacggtgatcaccccatggttgatcaaagtcttggttgaagt

SEQ ID NO: 4325 - DNA, 408 bp, Glycine max
acattgtcttgaaagttctattgttgaatcatggctatgggatcgaagatttggccaccttcaacacacatgccttgaagttgttacatgagaagaacatgatgagagatctttccagcctaaaggagaacaaccaatcgtgtgaaggatgtcttcttggtaagcaacaccgatttcttttttaacaagcagaacatggagagcgaaagatctattggagctgatacataccgacggttgtggacccatgaggacgccctcccatgagaacaacaggtacttcatactcttcattgatgacttctctacaatgacatggggatattttttaaaaaaaaacttaaaagtctttggagtatttcaaaagctcaaggccccttgctgaaaatcaaagtcgaaaaccggtta

SEQ ID NO: 4326 - DNA, 543 bp, Glycine max
agcttaacaaaaggcatgcgaagtgggtggaattccttgagcaattcccttatgttatcaaacataaaaagggaaaaggtaatattgtagccgatgctctttctcggcgtcatgcattactttctatgcttgaaacaaaattgattggtattgaatgtttgaaaagcatgtatgaaaatgatgaaacctttggagaaatatttaaaaattgtgaaattttttcagaaaatggtttctttagacatgaaggctttcttttcaaagaaaataaattgtgtgtgcctaaatgttctactagaaatttgcttgtttgtgaagcacatgaaggaggtttaatggggcattttggggtccaaaagactctataaacattacaagaacatttttattggccttatatgaaaaaggatgtgcaaaaattttgtgaacattgcattgtatgtaaaaaggcaaagtctaaagtaaagcctcatggattgtataactcattgcccattccggagtattcttggaatgaattatccatggaatttgttttggggc

SEQ ID NO: 4327 - DNA, 480 bp, Glycine max
atctttttcgtgaagaaaacggggtctatacttttaattttcacgtccagtgccaaatcttggatgttggacacctagtcattaacaggaatgacaaacttggttctccatacaggatttgcttttccaaaattaacaactttggtgcaatatttgctattatgatcaatccacccaacagcaaaccattgacgcttccaaagtgaggttgaaatctggagttcatgtgcagatttaaagcttaccttcacccatataatccccatagaaagtgcaggaaagaaaaaatgagatgttcaagggatgatgtctcctgtaagcttttttatataatggttgggcagcaaaacgaaatgaacgtttttacctttcgaatgatactttactttgaaatcacaatttttttatacccaaactcccgttttggtagggcccacatggctcatgcccagttgtctaatttttcccccccccccttgt

SEQ ID NO: 4328 - DNA, 575 bp, Glycine max
gcaagcttgttaaaaaattttacaagacgagagggaattggtttttacatgctattactagatttgccacttggttatctaaccttggaaaggctccacaaagagaaagccaatattagaaagatgtttacttctaatgaatggaccttaaacaagttatctaaggaacctaaggggaaagaagctgcaaaggtagtgctcatgccttctttttggaatagtgtgatttacactcttaaagtcatggtttcacttgtcaaagagcttcgtcttgtggatggggaaaggaaaccaatcatggactatttttatgaagcaatggacaaaggaaaagaaaccattatcaagtcttttaataacaatgaaagccagtacaaagatgtggttgcaatcattggtaaaagatggaattgtaagctttatagggcattgcatggcactggccactttctaaattcaaagttcttttatgacaacattgaattgggattttgagttttaggtcctcaatgggttggttgaatggcataaaaaattggtttcacaatttgatgtgctacaaaaaaattttaact

SEQ ID NO: 4329 - DNA, 294 bp, Glycine max
  unsure at all n locations
gttaacctggtaacctaagtggttatgatttaaaaatntgnacctgtttgcagactttgtggtttatgctcctctatcgaccaccacacaaaccttttgccttctgtgcaacaatctgaagcaattgaacaggctgaagcttatgctgcaaacatctacaacagacctcctcaacctcaccaggacaatccgccaccacagaataactatgaccttttcagcaacaagtacaatcctggatggaggagtcatcccaaccttagatggtgctaccctttacaacactcccaataa

SEQ ID NO: 4330 - DNA, 585 bp, Glycine max
  unsure at all n locations
tataaactttgttacctgacattttgctctgttctcatctaaacgagttaaagcatgaaaattttttgcaggaatgttaggagcattcttcaagcatattaatgcactgcatttaaatacacatgaacgtttgcataaacaggcacaacatgcaatttcaagtttactcataaaaagccaagcttactttgtattgcaagggtttcccactactataactttgacattgcgggatgcaacggcatttaaagctcttccctgttgtacaaaaggtataatgtcattataattaacttcactttagcagaaagcaataagtatggtttaaatttcattatcattttacctgcgctgcataaatctgcccatttatgtctaacaagtctgctcgttccattccaggtcctcgaggctttgcacctattagcaaagcccattctgcatcttggaacactttataaggatcgataccaatactgacctccctcaacaaaggaaacaaagagtnctccagttccattgcaacacctgcatgttgaaatataacatttagaatgaaaagcatcatgtgtggtatttatacct

SEQ ID NO: 4331 - DNA, 491 bp, Glycine max
atcttctagacagtggttttataaactctctacttcattaattgagaatggtttctctcaatcaaagaatgactattctctttttaccattggcaaaggtgcttctctggttgttctgttagtctatgtagatgacattttgcttgctggcccaagtgctacatgtgttcattctgttcaggccaagcttcaagccttgttcaaactgaagatccttggttccttacaatattttctgggcctggaagttgcaaagtccagcaagggcattgttttgactcaaagaaaatatgccctttctcttttagaggatactggttttcttggctgcaaaccatcctctcttccaatggatccaaatttaaagctcgacatgctcagtggtgatttgctgcccgatccctcaatgtacaggtgcttacttggtcgtctcatgtacctcacttatttaatgcccggaattacattttttgttaacaagctaagccaat

SEQ ID NO: 4332 - DNA, 478 bp, Glycine max
tcaaacttgcaacaaaggagttgagcaggtaaaaaagattcgtcttcaaactcttagaggtgactttgagcgtttgtttatggaggagtccgagtcaatttctgattatttttctcgagtattggccgtagtcaatcaacttaaaagaaatggtgaagatgttgatgaggtgaaagtcatggaaaaaatacttcgaactttaaatccaagttttgacttcattgttaccaacattgaagaaaacaaggatttaaagaccatgactattgagcaactaatgggttccttacaagcatacgaagaaaaacaaaagagaaaaattaaacaaaaggaggctacggagcaactactacaactcaacgtaaaggaagcaaactatgcaaattacaagagccaaagaggacgaggtcgcggccaagatcgtggacgtggaccacgacatggaggagaacgaacacgcggtttccccaaccactcc

SEQ ID NO: 4333 - DNA, 580 bp, Glycine max
agcttcaacaatcaatttcgagcgcctcgatattttactggactcaatcagacatccgagtaaaaagttattgtcgtttgaatttgctcagtgcttcaacattcaatttctagcttctgaatatattacgggactcaatcagacatccgagtaaaaagttatcgtcgtttgaatttggtcagagctttaacattcaatttagagcgactcgatatattacgggactgaatcaaacattcgagtaaaaagctattgtcatttgaatttgctttgagcttcaccattcaattacgagcgtgttgatgtattacgggacttaatcagacctccgagcaaaacgttattgtcgtttgaattagctcataggttcaaaatttcatttccatcgtctccatttatttcgggacttaatcatacattggagtaaaaaagtgtttgcccattgaattcttctagagcttgaaaattcagttttggaacctcttgattttttaccggacttaattaaaacatcccggcaaaaaggtttttgtcaatcggaattagctccaaactttaaaattccctttttaaggcgttt

SEQ ID NO: 4334 - DNA, 483 bp, Glycine max
ttttagtaaaattaaataaataaataaatatagagcaaataataagatgagtaccctaggtataaatagttatgttaagtcagctgcctcctttttggcctcattttcgtttattccttctcttctcaaaaccctttctttttttcgcaacccaccaaacctatcttagaaaaacgacgatctcgaacctgttcaccgttggatcgtcgtgaaatttgagtatcatgtttgcaacccaattttgaatattctcaccgttgggaatttcaaaatcatatctgagcttagaggaaaacccttcgcattgtagcattttaatttcccgcagaaacccaaaactgtctcggtaaaactaggatcccagtttcgttagccgttggattttcatgaaatttggatatgttgttcgaaattcaattcctcacacttccacccgtgggaattgcgagataatattcgcgaaaggagaaaaaggaatcgcat

SEQ ID NO: 4335 - DNA, 395 bp, Glycine max
agcttatacagatgttgactatgcaggatcaataactcataggagatccactttcagatattgtacctttctaggaagaaacttggtaacttggagaagtaaaaaacaaaatgttgtagcgcgatctagagctgaagctaaattgcgggctatggcacaaggtgtttgtgaattgctttggttaaaaatcatcttataagacttgaagattaaatgggatgaacctatgaagctctactgtgataataagtcagcaatcagcatagcccataatcctgtacagcatgatcaaacaaaacacattggagtggatagacattttatcgaggaaaagttggataggggtgtgatatgcgttccatatgtgcctactgaaggtaaaaacgcaggttttt

SEQ ID NO: 4336 - DNA, 711 bp, Glycine max
agctttaatgtgtagataaaaggattttgttgttaagaattgaattatgcgtgactgtaatcaaaagtgttggaaactataattataggcgataaaaaaattgcattaattatattggtactaatagtgtttataatatgtttattttaattcacatgtatttgctctaaaaatatataatcagagtagtcaaatactcaaatcctgatttttaaaaggtttatcttttttgtttttatacattaaattaggacttgttttgtgcaatagataaacaaagatagaatactataagattatagaataaagttgataaactcccaaggttcgttttacacattagtttgatcttgttgtggatgcttatataataatagaagcacattttacccgttattaaggcgaaacattatattttaatacctttaaacaacaaagccaatttatatctaatgaatgggagtaattcttaaattggccttttaatgatcataggtcccaaattaaaacattcatatatcgctatattatttttcccaaaaaatttggttaacattagtttttcaaaagtttgaaacttgtttatccccaaaaaattaaaacatccctgtaaaaaccaaatttcaaaaaataaaaatattttttcataaaaaaaataatcgttaatagttatatagaacttaattttgtgacagttaagtttaacaaatt

SEQ ID NO: 4337 - DNA, 489 bp, Glycine max
tgtttcaaaaaatccattcggttctgattggcttgtgagaggcgggtttaaggactaaatcgcatattcattccttttgaattgattcaattcattccttgctttgttcaagatccttattcggagattcatcttcaagtgtagtgtgcttattttgaaaaccaatatcttcatttatgtgaatctcaccaattttggcttcacaaacgtgacaacaattcttgttgaattcatttttgaagcctttgtcacatagttgacttatgctcaaaagattatgcttaagtccatcaacacacaacacattttgtttatttgagtcttgtattgatttccaatgtttccttcacccataattcttcccttattattgtcttcaaaagtgacatatccacctttccttaacacaaggtcagtaagtttagacttgtcaccggcaataagcctagagcaaccactatccaagtaccatagtgagtcttttacttt

SEQ ID NO: 4338 - DNA, 596 bp, Glycine max
agcttattcagcgtggtgggggccagaaattttttttatgcaaatttcatgcagtactgctacttataatttgacgtacagcaaaataatgtggttcaggatgcctggtgatatgatcatgcactcagtgttagttgtcatcttatctacactgtttcagagctatcaattccgataggacagctccatatgcccttgttttttccaaaagttgttttgacgtgtgtaacaccaccttatcaaacaatggccaacataaagcctccacttgtaaccaaatgagacgtgcctaaatgtatcctcacatttttagtgcattattcggtattccatacttttgcaggcatgctttggacatgttttcttcatgttatgctggagtacaactggaaggtattttctgactgatgaattataaggcaacacagatagatagcaagagatcatagaccattatatttctgaggtttgacattatacatctgttttatttcaagcggattcacaccaaaaaattagataggattatcttagctactataacatgcaacggtaatttttgataaagtccttcaaggcaacaccatatgcccctg

SEQ ID NO: 4339 - DNA, 401 bp, Glycine max
agaatcggacctcagtgtgaagagttatgaccataagaatatctcgggagctatcgttggacattttcgagcgtctgtatatgagatgcgcctgaatcggacatccgagtgaaaagttatgaccattagaatctctcgagagctttcgatggttaattttgagcgtctcgatataatataagcctgaatcggacatcagtgtgaaaacatatgagcatgctaacttctggagagcgttcgttgtacattttttagcgtctatatatgtgatgcgcatgaattggacatccgagttagaacctatgaccatttgaatgtctcaagagctatcgttgaacagtttcgagcgcctagatatatcataagcttgaatcagacctcagtgtgaaaacgtatgacca

SEQ ID NO: 4340 - DNA, 416 bp, Glycine max
  unsure at all n locations
cttgatgagnaaattggagaggttaatgaaacaacgagatgatgcgctccatgagaggttggatcaaatggagaatagatatcctaatggagaagaaaggaggagaagagggaatgatggtgttcctagacaaaagcgaattgatggtattaaactcaacattcctccctttaaaggaaagaatgatccggaggactacttggagtgggagatgaaaatagagcatgttttctcgtgcaacaactatgaggaggaccaaaaggtaaagcttgccgccacggagttttctgactatgctcttgtgtggtggaacaagctacaaaaggagagagcaagaaatgaagagccaatggttgatacatgggcagagatgaaaaggatcatgaggaagcggtatgtgccgtctagttactcaa

SEQ ID NO: 4341 - DNA, 333 bp, Glycine max
tatacgagacatcttgcccaacaaagtcccgttcacgataactcgcctgtgcattttcttccatgctatatgtagcaaagtgattgatccagtaatgtttgatgagttggaaaatgacgccgcaattatactgtgccagttggagatgtattttccccctgctttctttgacatcatgattcacttcgatgtgcatctggtcagagacatcacatgctgtggtcctgtttatctacggtggatgtacccggttgagcgatacatgaagatctttaaacggtatacaaagaatctatatcgttccgaagcatctattgttgagaggtacattgc

SEQ ID NO: 4342 - DNA, 429 bp, Glycine max
  unsure at all n locations
agctgttttctctgtacacctacattcctatacacgaaaaactttttctatatacacacgcgttgaaaaactctttctctttatatcgacatggtctatataaaacctttattccttttcaaagatttctttttcctttttcaacatacactcattgtttatacaaaaattttctttatatacactcattgctcacacacaagaatttcttttcacacattgtttatacacaaaaaaaacttttcatacattntttttatatacaaaaactcttttcttttctttatatacagatatggcattntgttcacaatgcctctttctttttctattctcggggtatcacgacgttggtcatttatttaggacgacgtcctaaatgaaactctacacggttccgaatttaacaacatatcgacataacaagta

SEQ ID NO: 4343 - DNA, 421 bp, Glycine max
  unsure at all n locations
gtgatctgggatngtgaaatctctaagagttcgaggtcacatggatgtaatttgaaattcatcaaagcctcttggagcttactgaaggaagatgtcaaaagatttcttacgaagtttcatgttaatggtgtgttccctagaggtcgcaatgcatcattcatcaccttgatacctaagattgaggatccacaaaatctgggggaatttacgtccatttcactggtaggatgtatgtataagatccttgctaaaatccttgcatgaagactaaaaggtgctttggtagtgtgattgacaaaacgcaaatcgccttcttggaagggagaaacttacttcttggagtcttggtggcaaatgaactagttgataaggcaagaagaacggaaaagaagtgcttagttnttaaagttgactatgagaa

SEQ ID NO: 4344 - DNA, 418 bp, Glycine max
  unsure at all n locations
atctatacaaaggaatttatatggtgcagcctccaagactccattaagattccttgggtgaggtgggacatagtctgcctacctaagagtaaaggtgggttatggatcaaagatttgattaaattcaatgacgctttgcttgctaaatgggggtaggagttggcaaataatcagaatcagtggtgggccaaaattctattgtctagatatggtggttggagggatttgatttctgataggaactgcagtttatactctccttggtggaaagacctcaaggttatcttcaagcagcagcaaagcaacacaattngcaaaaatagctgtatttacgccatacgtaacgacggtccatggaatacaaaccaagtactcattggcttgacaacaaaggagacactcattggaaatatatatg

SEQ ID NO: 4345 - DNA, 444 bp, Glycine max
  unsure at all n locations
acaatgtcatgtgataaatgatctaataaaaacatgagaacaaatcaattnttttctaaatttaggaaaaaaaaaattaaacccaaaaaataaaaatattaaaaaagtatttaatcttatgtttatatataattatttacaaaaaatgtataattgatggttaagataagcatgacaatgaagcaccacgagattgtatgttattntttatacttgtttcctagcatcgtctccatcccccgtcctttgttcccaatgaggataataaacaaatataagagagagagagtataaatactcataacaataatagttaccatagatacttacataacatgattataactgtgtagagcttatttaatgagaaccaagactaatatgattaagatatataatatattgtataaaataacactatctatttagctttgatatatctat

SEQ ID NO: 4346 - DNA, 432 bp, Glycine max
cttcattctccacttttattcggagccccatgaattcatagccaagcgctgttcatgcatcctccaccaacgagtcaggaggctcgcgaattgattgccaagcgctgttcgccagttctccattctccactttaattctgagccccatgaatttattgcctagcgcttttcatgtgtcctccaccttcgagtctggagccccgcgaattgattgcctggcgctgttcgccaattctccattctccacttttattctgagccccatgaatacattgcctaggactgttcatgcatcctccaccaacgagtctggaggcctcgcgaattgatgcctagcgctgttccccagttctccattctccacttttattcggagccccatgaatatattgcctagcgctgttcatgtgtcctccaccttcgagtctggag

SEQ ID NO: 4347 - DNA, 462 bp, Glycine max
  unsure at all n locations
agcttcaacttctctcacataactctccttagtcaaactcttcttttatttaatgtttaggggttggtttacaaccctcatgttccattatataacatacaccatatagaatcaataatggacataacaatatacataatagtttttcatagaggtcttagccttcacaatacaaacatagaatatgtcatacaacatccatattagaatcattgatttcatctcattatgacactaagatcatcagctaacatcatgatattcattggactcatacaccactccttagaatcatacaaataaagaaattatttctattccatcaaccacacatacaatatatcatattaccacacaaaagaatcataagaataattcatagctctactacacgtcatacgttatagagccatgtacttcaagtaataaataatcatggaccacttnacccataattatcat

SEQ ID NO: 4348 - DNA, 439 bp, Glycine max
  unsure at all n locations
ntgcanaaaatgccactctactcgaaatttttgaaagatatgttgttaatgaaaaacagatacatccaccaggagaatattgttgcggaaggcaactgcagtgctgtaatacagagaattcttccaccaaaacataaagaccctggaagtgttactattccttgttcaatcggtgaagtcactgtgggaaaggctctcattgatttgggagcaagtatcaacctaatgccgctctccatgtgcagaaggttgggagagttggaaatcatgcccacacgaatgactntactacttgctgaccgatccatcacaagacctcacggngtaattaaggatgttctgataagagtgaaactacggtctttccagctgattttgtggtcatggatgtggaggaagaccatgangttctagtcatttttggacatccctttatgtc

SEQ ID NO: 4349 - DNA, 395 bp, Glycine max
  unsure at all n locations
gacatgattagcaatcaagtataatgttacttccttcactaaagcggggatccatctccacacatattttatcaatagcaacataaaaaatctctgcacggtaatgatgaagattagtgatagtcctcccttctgctcttgaacgaccccgaactggtatttcgtcatccatatttggtaccagaatacttttagcaacacaaaatccttggacatcggcaaaaaaattattccagccactctctctcattgtgcccaaccgagctntgacaacatcaactaattccatgacattcacaatattaagatcttttctttgcaatatattngaaagctcatttgtttcctatgacctggatcacgcacaatctcatttgggtaaactcataaccaca

SEQ ID NO: 4350 - DNA, 447 bp, Glycine max
  unsure at all n locations
ctgaatgctctattcaatggagttgacaagaatatcttcatacttatcaacacatgcacagtggccaaggatgcatgggagatcctgaaaaccactcatgaaggaacctccaaagtgaagatgtccagattgcaactattggctacaaaattcgaaaatctgaagatgaaggaggaagagtgtattcatgacttccacatgaacattcttgaaattgccaatgcttgcactgccttgggagaaagaatgacagacgaaaagctggtgagaaagatcctcagatctttgcctaagagatttgacatgaaagtcactgcaatagaggaggcccaagacatttgcaatatgagagtggatgaactcattggttcccttcaaacctttgagctangactctncgatagggctgaaaagaagagcaagaatctggcgttcgtgtccaatgat

SEQ ID NO: 4351 - DNA, 456 bp, Glycine max
  unsure at all n locations
ctcaagcattgaatgctctattcagtggagttgacaagaatatcttgatactgatcaacacatgcacagcggccaaagatgcatgggagatcctgaaaaccactcatgaaggaacctccaaagtgaagatgtccacattgcaactattggctacaaaattcgaaaatctgaagatgaaagaggaagagtgtattcatgacttccacatgaacattcttgaaattgccaatgctcgcactgccttgggagaaagaatgacagatgaaaagctggtgagaaagatcctcagatccttgcctaagagatttgacatgaaagtcactgcagtagaggaggcccaagacatttgcaacatgagagtggatgaactcatnggttcccttcaaacctttgagctaggactctcggatagggctgaaaagaagagcaagaacttggcgttcgtgttcaatgatg

SEQ ID NO: 4352 - DNA, 427 bp, Glycine max
  unsure at all n locations
aactctttcttttgtttagtcaaaacttctaatgctcttaatctctcctcgtctaaatcaactaactcatctgacatcattttccaataatggtcgattggaatgtccatttgtttttgtactctggctgattgcaaatgtatttcgaccggaagtacagcatcgtgcccataagtcagtcgaaatggggtagtattagttgattccttaggagaatttctacatgcccatagaacttgatctaacgttttattccaatttcttggcttttgggcaatgtgttttttaatcaagttaattacaatcttattggctgcttcgacctgaccacttgcttgcgcgtaatatggtgttgaggttaataatcgaaagccagttttttgggcaaattctttcattnttcgtccagtaaaaactgaaccttgat

SEQ ID NO: 4353 - DNA, 394 bp, Glycine max
  unsure at all n locations
agcttgtagggttaaagtctcacgattgtcacgtgttgatgcaacaattgttagccatggctntgcgagacatcttgcccaacaaagtcaggttaaccataactcaactgtgctttttctttcatgccatatgtagcaaagtccttgatcctgtcaagtttgatgagctggaaaataatgccacaattatactgtgccagttggagatataatttcgccctgctttctttgacatcatgactcacttgattgtgcatctggtcaaagaaatcgaatgtcgtggtcttggttatttgcggtggatgtacccgcgtgagtgatacatgaagatcttaaaagggtatacaaagaatctatatcgtctagaagcatctattgttgagaggtacattgc

SEQ ID NO: 4354 - DNA, 360 bp, Glycine max
  unsure at all n locations
agctntaagcaaattcaaatgacaataacttttgactcggatgtccgattgagtcattttataatttgagacgctcaaaattgaatgcaggagctcttaccaaattcaaatgccaataactttttactcggatgtccgattgagtcccgtaatatatctagatgctcaaaattgaaaacagaagctctgagcaaattcaaacgacaatagcttttgactcggatatccgattgagtcatttaataattcgagacgctcaaaattgaatacagaatctctaagcaaattcaaatgacaataacttttgaatcgtatgtccgattgagtcattttaataattgagacgctcaaaattgaatg

SEQ ID NO: 4355 - DNA, 392 bp, Glycine max
agcttgaaggcaaactggatgcattggttaacttggtaacccagctggccttgaatcataaatctgtacctgtcgcaagggtttgtggtttgtgctactttgctgaccaccatacagacctttgccctttcatgcagcaacctggagcaattgagcagcctgaagcttatgctacaaatatttacaatagaccttctcaacctcagcagtgaaatcaaccacaacagaacaattatgacctttccagcaacagatacaaccctggatggaggaatcaccctaacctcagatggtccagccctcagcaacaacagcagtctgctcctttcttccaaaatgctgctggcccaagcagaccatacattccttcaccaatccaacaacagcaacaa

SEQ ID NO: 4356 - DNA, 424 bp, Glycine max
  unsure at all n locations
taaaacatacttagacacttcctgagcatgtacgagcagttatgcaagtgggatcagcaacttccattatcagagtaatcgagcacagcggaatctgtagtttagacaagttgcaagtcgtttccaggatgtcaagacatctcacatgacatctgctttctgcttctgctccccctgtctccatgcttactgcagcatcttctaacagctactagtcttctccaggatgtcaagacatctcctgtgacatcagctatctgctccccctgtctccatgctcttactgcagcatcttctagtagctatcatcagtcatcatcagcagcagcagtctccctctcanaatcgtatacacacaactcccncttcaaatcatgaatcatgcatacatcgtatcctactactatggcatacatagtatctt

SEQ ID NO: 4357 - DNA, 321 bp, Glycine max
aatccatataatgtgcacaccactggacatgcccaatagtaccatctccaccacaaggggatgctgtgttgaaaatggaatataacaagtaacataaataaatatacatacattgaaatcatgcatgtaatgtgggcgcaacaacttacaggtcttactacaataaatcctgagaacagattccaaattgcataaaatacagcatccacaatggaaacaacatggtggtttgggttcactcccacaaccatcatgctgtataaggtgaagtacaacaatgtgaagtacatgaaaaatagataccaaaagaatttctgtaca

SEQ ID NO: 4358 - DNA, 467 bp, Glycine max
  unsure at all n locations
taattgcttctgctctttaacagttatcccaagtaccatattcaggcattgtaacttgtatccgcaagtgaattggatgcagattgtgtattgtggttaagtctgtcaactagtcacaggtttttattcaatcaaatagagctggagtctcttgatgttcatgtaggccaatcctacttagttcttgtcacaacaaaccaaaatattgctgattactacatagtagcctctcctaaactgagtaatgccacaaataataacactcttgttggtgttgttgtgcttcattatgacaactctaccacaccggctattgggtctcttccaagtggtccagatccatttgatatgcaattctccatcaaccaagaaaaatccattangtaattgcatttcacaaaatggtgctctgtatgccaaagaagagtttttccaatattctttctttgcttgcttaatgtcaacat

SEQ ID NO: 4359 - DNA, 281 bp, Glycine max
tctattgtcagattgagaatgccgctacccgcacctgtgtccatgattgtcttcatgcctcttacgtgctgatgtccaaatctacgatgccgtattctgactttatcttatccttgaaattgacctgtggaggacgtgctggcttcttgatgtgaccataagatacagttgttcttcgatctggtgcccttcattaagactacactctgctcctttgtcacccaacatactcactctgggaagagtacagtgaatgcttgataagacaactgactgatgct

SEQ ID NO: 4360 - DNA, 410 bp, Glycine max
atgataccgagaaagaaagactaatttacttcatgaaaggtagaaatagaatgctagtgaaccggctgacaaacaaaccaaattttattgacaatgcgtaaccatgctctcttccaactaaatttgcaagagcaccagtgacaaagctctcaatgaatgatatagctattgctagaattaatgtctcatgtgagagatatgtgacttatgtaaggactaataaataaataattaacgattaagggctaaattgtaattgggcttaataggagaagcttctaggttaactgctacttgatgggagtagtggttataaaatgggcttaatacccactaacgtgaaataaggtcctcttcctgaccagaaagtgttctctctcactcatagccatcacgaacagagagagaca

SEQ ID NO: 4361 - DNA, 288 bp, Glycine max
tacatgatgcgcctaaacaggacatctcgtttattggttatgacaatttgaattgctctagagattccattgttcaatttcgagcgtctcgatatattatgaatttgaatctgaccgtccgagttcaaagttatgaccatgtgaatttcctgagagcttccgttgttcaatgtcgagcgtatggatatatgattcgccagagtctgcactccgagtgataagttatgaccatgtgaatctctccagagatttcgatgttcaatttcgagcgtctcgatatattatgcg

SEQ ID NO: 4362 - DNA, 341 bp, Glycine max
gaatagatccttgccctctgatcgctggcatgagagccgtggttctggccatgactctagaaaggagaataagaggtcatcaagatggcgtcctgaagataaagagaaggattctgcgtctgagataagacatgatgttgagaacgaagatggtcacactgaaaaaccttctcctggagttgggaatcgcatggtgcctgatcgtgacactgattctcgtgataaatggaggccgcgacatctattggaagctcaagctgctggtgtggccacataccgagctgcacctgtatttgggctgcagaaaggacgcaccgaatgctccaatgtgctgatttcac

SEQ ID NO: 4363 - DNA, 420 bp, Glycine max
catgcaagcttgtacatattgcccaatggataaaaaaataaaaaggaattttataaaatctcttacctttctatgggatacattcgttgatatgaacaagaactctaagctttaccttttccacgagatgaacaaccaaatgaaacatgacagtgaagaataaaggaggaaatatcatttccatgtggtataaagtgagaacaacttggatttgtaattagtctaaattcttaactttcaataatttaaccacatatttttttaaagaatgagcataactcaattaatactgttgaaacctcatctgacaatgtagatcacatggctaatggtagcacatgccataccaatatgtgacaattgtgactcttcaacgttccagtcaactttagattttctgagtcgatacaccaagaaatg

SEQ ID NO: 4364 - DNA, 448 bp, Glycine max
  unsure at all n locations
ngacattattcagttagtggtgtttaagcaaatataatgaataagtgaaggaagtataattatgtttgccatcatttcattatattttcgaattgtggttgtgtttgtataattatataataatatcatttgttgtatattttataaacacgtgccttttaagccgacgcctatggttggtttttttatggatatcatcatattaacttttcatttttaagtttgattagttgtacgatgtggcatactttttaattattaaaaaagttagttattttatgagattgatgtagagagcaaatattttaatcccagggttgttattgttgtgagtgagaagacatatatcatcttatatataaattaatatttttaatattattaactgtttacatcatggtttaattagcacaaataattaaaataaaaatttgaattataacaactc

SEQ ID NO: 4365 - DNA, 457 bp, Glycine max
ctcattgtcatttttgggtttctgtttattgctcgtctctctgtgttcttgtttgtgagttgccatatagggaattggaaaggaggattggtgccatcccttgaagaatttgagtcaagaagaaaggggaaaaccaccttaagagctattggactaagaagcactccaaattgagtgaatcgccaaagagagaacaacctccaaaattgagaaccttattgctatttcgtaattgacaatatacttactttcattgctttcaaattctgtaacaaacaggcctttcattggaagtaagataagagcctccaatagatgaccctacttgcatttgtgtgtgataatgttaggcaattttcccttaagattgtgagtgttttgctgggaacgttaaatgtggtcttccaaacactctgaagatgcacctagcttacattgtttgcttactttcatagtt

SEQ ID NO: 4366 - DNA, 379 bp, Glycine max
  unsure at all n locations
agctttagccaaactgtacaacttggcaataataccacaatggctgttgtgggaaaaggtataattcgtatgccagtgaatggatttattcacgcaatttctggtgtctattatgttcctgaacttaaaaataatctattgagcatagggcaacttcaagaaaaaagcttaactattttgattcaacatgggaagtgtagggtatatcattccgagaaaggattaattatgcagtcagatatgagtggaaatagaatgttttctgtgttggctaccatgataccaaaagcttcttcgtgtttccaaattgtatcagaaaatgaatctcatctttggcattgccggttnggtcacttangctataacggattgaggacac

SEQ ID NO: 4367 - DNA, 451 bp, Glycine max
  unsure at all n locations
catgcaacttgccgatccaatttgtgaactgacattttttatcaaaattacataattataatacttaacagatgataagtaaaattaatcatatttttttcatttgtaaaaaattaaactcacatattaaagatnacaattttcaatacagcgttcaattaataaagttaaacccgttaatgataattaagtgtagatagaatgatttcatatatttattctgtcaaaaagtttttatgaatataaaaatctataacataaggattatgtttcacacaacttttttctctcttaagatgttttcatacttttttactacttaaaaatgatattactttttctattcaaacaaaattaatgaactccagaccactttttaacaaacttactccgacaattttgttttaattataatctattataacaataatatctcattatacatataatt

SEQ ID NO: 4368 - DNA, 445 bp, Glycine max
cgtgtgttttagcgatactcaccacaattgtgtaacatattctccacatcaagttgatcatgtcctagaagatccagttgaacaacatcaaacacaaaatgttgagcaactttttgaacaacatcaaacacaagatgttgaacaacctgttgaacaacaaccaaaaggtgtggatgtaacattgagaagatcaactagaataaagaaacctgtaattcctagtgattatcatgtgtattcacaagagtctcaatatgactttggagttgaaaatgatcctgagtcatttttgcaagcaattaacagttgcgattctaagctatggtatgatgctatgaaagatgaattggaatctatggtaaataataaagtatgggatcttgtagagtttcctaatgggataaagcctattggatgtaaatgggttttcaaaaccaagaacgat

SEQ ID NO: 4369 - DNA, 349 bp, Glycine max
  unsure at all n locations
agacttgatctaccaccaccgtcgccatcatcatcttagttntctattattcttaatattactagtactttgttttctagccgagtatttggctatattatgacatttgaacaatttagtgatgcaatcctccctaggaagggaccaatcactagaaccatgagcaagaggcttcaagaagattgggctaaagctgctgaagaacgccctacggttctcatgaaccttacgataaatntctgagcccatgggccaatgttgggtccaattatctttgtacatattagactacgatgtcattatatttggtccttgtatttagggctccatatcgtacgtagggtaccct

SEQ ID NO: 4370 - DNA, 441 bp, Glycine max
  unsure at all n locations
gacctataaatctcagctttattggcaggaatgaagaaagacgttcgcaagtacattcgggtttgccacatttgtcagcaaaataaaaccactaccaagcgtccggcggggttattacagccattaccagtgccggcgggggtatgggaagatatctccatggatttcgttactcatttaccttcatccaatggctataccgttatcatggatgtagttgaccgttactccaaggaggtgcacttcggcgccttacccacggtgttttccgccttcaaggttgccacgctctttatcgacgttgtttgcaagcaccatggatttcccaagagcatcatctccgacagggatccagttttcttgagtgctttctggagagaattatttcgactcagtggcacgcacctncgcctctgcacaacgtaccatccacaaacggac

SEQ ID NO: 4371 - DNA, 445 bp, Glycine max
  unsure at all n locations
tagactgagttcagcctactatcttcagactgatggccaaactgatcgaaccattcagtcattggaggaccttttaagagcatgtatcttagagcagaagggaagctgggagagttttcttccattgatagagttcacttataacaatagttttcattctaccgtcggcatggctccctatgaagctttgtatggtagaaggtgtaggacacccctatgttggttagagcccggagaaggcctcaccttatgaccgaaagtggtacaacaaaccaccgagaaagttatgttaatccaggaaaggatgaggactgctaagagtangcagaaaagttatcatgataagaggaggaaagatctggaattcgaggttggtgatcatgtattcttgagagtcactccatggactggggttggtcgagcatttgaaatccgaanactcaca

SEQ ID NO: 4372 - DNA, 468 bp, Glycine max
  unsure at all n locations
ctatcttacccctacagaagcatctaagagctgcttagattgtgttctcaactcgtaaacgaaaatattctgctgtatgggctcagagaatccatgagtaggagttttccacagcaagctacagaatctttctagtgcttcactcaaagattcatctgggaattggtgaaaggaagagatggcagcctttcaactgggaaatatttcttcagaaacttttccacaacttcatcccaagtcctcaagctattacctttgaatgaatgcagccacctcttggcttctccagatagtgagaatgaaaataagctgagcctaacaacatcttctggcactccagcaattcttactgtgttacaaatttcaatgtaagttgctagatgtgcataaggatcttcattggngcagccatgaaattgatttcctctgatatgctgaatcaaagaatgtggatatgtgatattctga

SEQ ID NO: 4373 - DNA, 305 bp, Glycine max
catgaaaactactcacctcggtcacagacttacgcgtacgccattcttgaatagacctaaccttctcctcatcaacttgcactccttttgaactcacaacaaaaccaagaaacacaacatggttagtacaaaagatgcatttttcaagattggcatacaattgttcttctctaagcacagtcaagacagattttaaatgatcaatatgcaaatcaagtgcagtgctatagataagaatatcatcaaagtacaccacaacaaactgtcctatgaactctctcaagatatggatcattagtctcatg

SEQ ID NO: 4374 - DNA, 472 bp, Glycine max
  unsure at all n locations
tgtaatcgattacgcaaggcttataatcgattaccagaagttttttaaactttntataacatcctttagaaatttgaatttaaattttaaagcttgcaatcaattacaacttgtgtgtaatcgattaccagacatgaaaattcaaatttcaaatctgaagagtcacaactcttcagaaactaactgtgtaatcgattacaacaattatgtaatcaattaccagtaaggaattttcgaaaataactcccaagagtcacaactgttcaagaagtttttgaatggctatcaaaggtctataaataggtgacttgngacatgaaattttgaaaaagagaattttcctgaacaaatngtcttatcctctcaataccaaattgtcttataactctcaaaaagaattccttggtcaaaacacttgcaaatntaataaggaatctngagtgatcttcaattngtatatttttcttcttaa

SEQ ID NO: 4375 - DNA, 448 bp, Glycine max
  unsure at all n locations
agcttggtgatccaggatcttacagacgactcgttggaaggctttggtacttaactatatctacgtcagatatatgttattgtgtgcacaaattaagtcagtttgtcttcaacccctatacgaaccacatgcatgctactaacatgttacttcggtaccttaagcacactgttattcaaggtattctttttaaggccaacttagacacaaaattacatgcatatgtggatgcaaattaaggatcatgtnctgaaagtanaagatcaaccactggcttctgtatcttcttaggaaattccttggtttctagaaagccaaaagacaaaagacagtaagtatgtcctcagcagaagcataatacacgtccttggcttttgtttctangtgaaatactcggattcgaaattacttactaatttcaatattagaattccttttgtactatcta

SEQ ID NO: 4376 - DNA, 446 bp, Glycine max
  unsure at all n locations
tatgacaatctgaaattctcgagagcttccgaatacgtgtgaaaagttatgaccatttgaatattttgagagattccgttgttcaattttgagcgtctcgatatattatgcgcctgaatttgacttgcctgtgaaaggttatgaccatttgaatttctcaagagcttccgttattcaatttcgaacttctctatatgtgatgcgcctaaatcagacatccggggtaaaagttatgacaatttgaatatctcanaagcttcggtagttcaatttcgagcatctcgatatattatgcgcctgaatctgacatccgtgtaaaaagttatgaccattttagtttatcgggagcttccgtttttcaattntgagcgtctctatatgtgatgcgcctgaatcggacatccgagttaaatgctattaccatttgaatttctcgagtgcttccg

SEQ ID NO: 4377 - DNA, 423 bp, Glycine max
tcttatccaggcaattcttggtggtgaaactccttctttcttggcttattccctagtggatggtgcctcccctctcctcttctcctttgccttccgctgcatctccatggtgaaaaatcaaatttgaaggaccttattgaagctcaaagatccagcctccatagaagccccacaagcaagcttccatcagaaaccaagaagaacacacaaaaataaaagaaaatgcggcgacatcctaaattgccccagattctaagcatagtatcgcttgacagcatcagagttcacgggtaaaggtagttcctcgccatccatgttggtaagtaccaaggctcctccggtaaaagccttttttacaacgaaaggccctttgtagttcggggcccacttccctcgattgtccttgacagcatgggacatctt

SEQ ID NO: 4378 - DNA, 387 bp, Glycine max
tgatgtttgtgttgaatgccttaaaggtaaacaggccaaaagcaagaaattaggtgcatatagagctacagacgtcttggaattgatacatacagacatctgtgggccatttcatacaccttcatggaatggtcaacagtattttatatcatttatagacgattactctagatatgcatacttgtttcttatacatgaaaagtcacaatctctagatatgttcaaaacatttaaagttgaagttgaaaaccaactcaacaaaagaataaagtgtgtttgaccatggtggtgaatactatggcagatacgacggttcaggtgaacaacgtctggtggcctttgccaagtacctagaggaatgtggaatcgtcccacaatacaccatgc

SEQ ID NO: 4379 - DNA, 468 bp, Glycine max
tcattaagaggcttcctccagaagcttcctcgtggcttctttgagaagctttctcaagaggcttctttgagaagctagatccttatctatccacacccctctattaactaaattaacttccttaaaaataattacggatgaaaataacgcaacaaatattcaaacatcaaacataattactaatagtatatagatatatatatatcagggtgttacaactctcccacccttttagaaatttcgtcctcgaaatttaccttactcaaacaaggatgggtgagcttctcacatctgactttctaattcccatgtggcatcttctcctgatgcacctccccagatcaccttgaccaacagaatctctttccctcttaggtgttttgtttgcctatcctcgatcctcaaatgcaatgtttcatatgtcaaattctccttcacttgtacataatccaattcaatcacatggga

SEQ ID NO: 4380 - DNA, 417 bp, Glycine max
  unsure at all n locations
ttggattcatgaactgcanaaccaagcaaagtgtgttacatattaaatgtgtccttatcggaactatatgcatcaattaaggtacttttggcctatattaccatgtcaatgccagcagaaactcctgcttcaattgaataagtgaagtttgcgtgaggtggtaaagtgatcctatcaataccctcaaaatctgaaataacaaagccctggtgtaatcaacgaagaggtaaggggttatttaaaatagtgttcataggatgataaacagattcaatgctatattcgacaaagtattttaccttgaaatggagagtattcttgaggtagccagtaataaggtcattgatagcatgcatttttactccattccaactggagtaagagaccataatggatgccacacccttgctgattgag

SEQ ID NO: 4381 - DNA, 445 bp, Glycine max
agctttgttggctttaccagaattatattatataaattaaatttatagttttattgacaattaatcatatcttaatttttattctatttcttataactcttttattagcttctactatatatagagagagaggtaattatactagaatgagagttgaataatatgttactcacattattaaatcttttccaatgacagatttttattaaataaacaagtttatttaacaacttttgtctagtgactaagataagttttcttaagtacaggtgaattggtgtccaatgatatataaaatttattcttcaatgaacatcttgtgtttagaatgtattaataataaactttgaaataatttaataagctaaagagaaatggtaaaaatacctcattttatactggatcaggcaatctgagttacgttcaattctgcgccaccaactag

SEQ ID NO: 4382 - DNA, 529 bp, Glycine max
agcttgacagctgggaacttatgaggaaatacttatttgggattcaatcccctaatgaaacatctagtaatttatttatttaacaaaaattccgatatctatcccaaatagatcattttaatcgggtgaagaacattcataaaatgatgaacttaaattttcatcattacagtttttactacacctaaaatttggacttaaaatcttatttaaagaaactaatcacccctttcgtgttgtaatattatttaaacaaatctagcatcatatataactcgaacaagccttatattatttataacacatcatatatcacatagtttaaataaaggccaataattattttcgtccctaaatgtttaaagcattaataaaatttattcttgaaagataaaaattcaaattttagttctcaaaagtgaaaaagtgtaaccaattcatatattcgctaaccttcaatgaaagaaccctgtatgacatatccagaaaccaacttgttccccattatacggccagacaaaatgactat

SEQ ID NO: 4383 - DNA, 620 bp, Glycine max
tcttagtttcagatgatgcagatgggtttgtagctacctcatgcactcctctaatgactatggcatcatttctggcgctaaactgctgggagttggaggccatcttctcaattaaatttttggcttcagcaagagtcatgtctccaagggctccaccactggcagcatctatcatacttctctccatattactgagtccttcataaaaatattggagaagaagctgttctgaaatttgatggtgggggcaactagcacatagtttcttaaatctctcccagtactcatacaggctctctccactgagttgtctaatacctgagatatccttcctgatggctgtggtcctggaagcaaggaattttttttctaagaatactctcttaaggtcatcccaactcgtgatggaccttggagcaaggtaatacagccagtcctttgccactccctctaatgaatgaggaaaagccttcataaatatgtgatcctcttggacatctgggggtttcatggtggagcagacaatgtgaaattcttttaaatgtttgtgcgggtcttcacctgcaaggccatgaactttggaagcaaatgaatcagtcccattttaagaacatatggga

SEQ ID NO: 4384 - DNA, 542 bp, Glycine max
tgccgcattacaccaagttgctgaagggccggttgttgtctaagttgctgagccacataacggagacggggtattccctcttgctccccaaggcttctttgtgtcacttgaatgtggccactgatggcatcacgcaaacaccgaaagtggggagaaattgttcttaaagcaagtgtaggatatggttctgctgctccacacccggcaaccatgtcaaaagatgacaccacaatctgcatctgatggcagtactggctggatcttttatctacctataaccagtggaaacaaggaatcttttatggagtccgccattggccgacactatcatgaattcataactaactgctttttcaatagttaaacacaccgttcaaactatgggagcaacaaatgaattctacaaacattatagatataactgtagagcaatattatgccctcttaattaatcgtcattcaaatagaattaagaacgtctaaactgtgtgaacatccactatataattaatggctttatggtggtgcaccagttcaatctg

SEQ ID NO: 4385 - DNA, 564 bp, Glycine max
agcttgtaatcgattacacatatactgtaatcgattaccacagaagattttcagaaaaatattctcaacagtcacatgtttttacttggttcttgaatggccatcaaaagcttatatatatgtgacttgagacacgaatttgctaagagattttcagaacaaaaaggtcttatcctcttaaaaagcaaaatcgttttatcctcttacaaattccttggctaaaacacttgtgattcagtaaggaattatttgagtgctcaaattgttcaatctatctctttcaagagagatttcttcttttcttcttcttcattctgaaaagggattaagagaccgagggtctcttgttgtgaaagaattctaaacacaaaggaagggttgtccttgtgtgtttagaacttgtaaaaggaatttacaagatagtggaactcttaagccgattgcttggggactggacatacgcacaacggtgtggcccaaccagtataaatctgagtttgcattttctcttcccttacacccccttaattattattgctttatattcatattcaaattgttcta

SEQ ID NO: 4386 - DNA, 521 bp, Glycine max
ttgtagcagatgccactctactctaaattcttgaaagatatgttagcaaggaagcataaatatattcatcaggaaaacatcatagtggaaggaaactgcagtgctgtgatccaaaagatccttccacccaagcataaagatcctgggagtgtaactattccttgttcaattagagaagtcaatgtgggaaaagctcttattgacctgggaactagtatcaatttgatgccactatccatgtgcagaagattgggagagttggaaataatgcccactcgaatgacttttcaattagttgcccgctccattaccaggccgtatggagtaattgaagatgtgttggtcagaataaaacattttatcttcctggcagactttgtggtaatgggatatctctgaagatactgacatacctgtaatattgggaaggccattcatgttgaccgcaagctacataattgatatggggaaaaagaagctggagctaagttttgaagatcagaaaattgaatttgatttgt

SEQ ID NO: 4387 - DNA, 451 bp, Glycine max
agcttctgtccctgagaaactggttcccagattacaacagggagtgaagattgctgaaaaccctagccttgcaacaagtcctagggaagtagacacggagatggacaagaaaatccgcagtattgtgagtagcattttaaaagacgcctctgttcctgaagctgatgaagatgttccaacatcttccaccccgaatgtttctgtgcctgatgttgagaaagatgttccaacatcttccggcccaaatgctgaagccctcccttcacccagtgaagaggaatcaacagaagaagaggatcaagcctcagaggagacccctgcaccaagggcaccagaatctgctccaggtaacctcattgacttggaagaagtcgaatctgatgaagaacccattgccaacaggttggcacctggcattgcggaaagacttcaaaacagaaagggaaaaacc

SEQ ID NO: 4388 - DNA, 430 bp, Glycine max
tgaagtgacctattatgatgtgtgtgggccttttaaagtgatatccctaggaggtaacagttactttgtgtcattcattgatgaatttactagaaaaatgtggatctatctcattatgcaaaaaagtgaagtgtttaacatttttaagaagtttaagttattgagtgaaaaacaaagtgataaggtaatcaaagggcttagaacaaatggaggtggtgagtataactcacatgaatttcaagtattttatgatgaagatgggataattcatgaagtgacatcttcctatacacctcagcataatggtgttgctgagagaagaaacataaccattctgaacatagccaggagcatgatgaaagggaagggaatacctcattacttttggggagaagcaacttctactgctatgtatattctgaacaagtgt

SEQ ID NO: 4389 - DNA, 470 bp, Glycine max
tgtaacctttggttccttgaagatgtcttaacactttctttgcaactttctggggctccaaaacttgcccaaatatgctcaccaattctacttgaagttattgatgaactcctcttgtatacatataatggcttgtttgtaagtatgtagcaaagttgagaggagcaccacaagatacgccactgtttgaaatctcatcgtttacatgatcgtaatcaacatcaatgttaccattgtatgtatcttggtcatcttcaacaatcatgttatgcaatataatgcatgccaatataatatttttcattgtatcgatgtgtcaattatgcgaaggaccacatgtaattgcaaatcaaaattttaacacattaaatgctctctccacatcctttctcgccgaatcttgatattttgcaaaaaactttcctttattttctctccctggggcatggggatggtttttacaaagcgac

SEQ ID NO: 4390 - DNA, 429 bp, Glycine max
ttgaccaaaccccagcagcaatcgtatccttagagacttgcctcagcaccttgtctccgagactgagaataattgcactgtgtgccttctgcaatagtgttttcttattcccatcagccatcatcttttcgagtttgacttctccatcaagtgcttccaccaggccctgttgaacaagaagagctctcatcttcaatcgccatagcccgaaatcattatgtcctgtgaatttttcaacctcatacttggccgagctcatttcttgaatcaaactcaaaaatcgctccacgttcaccgcaccaatttgttgtgccaagatcatattttacttcacaaaagaatgagtttcttgtatgaacaagaacaagcaaaatgcatgttaaatacaagttttgaaatttacttgaaattttgaaatcaaagcaattc

SEQ ID NO: 4391 - DNA, 322 bp, Glycine max
tgttgtatctttcaagttccaattacaatctacaatttgttgcatttattacatgaaaaacaagggattaattaactggaagtgagtcaacacttgacactcattctgagagagcttattagatcttttgaatgttatgacgattatcaatgttgcccttgctgcaaagtatacagaagcgtgaagattgaagaatccaaattcatatattggatggaatatgcacatagtatgtggggaacggcactaggagggatgtttgctttgccatattcatacctccttcataaggggtatattaccttgagattgggactgatac

SEQ ID NO: 4392 - DNA, 448 bp, Glycine max
ttcacacggatgtccgattcggggagataatatatcgagacgtctcgaaattgaacaacggaagctctcgagaaaatcgaatggtcataacttttcacacagatgtccgattcggggacataactcatctagacgctcgaaattgcacaacggaagctctgcagaaattcgaatgctcataacatttcactaggatgtgcgattcggggacataatatatcgagacgcttgaaattgaacaacggaagctcttgacagatcggaatggtcattacttttcacacgaatgttcgattctgggacataactcatccagacgctcgaaaatgaacaacggaaactctcgagaaattcgaatgggcctaacatttcactccgatgttcgattcggggacataatatatcgagacgctcgaaattgaacaacgggagctctcgagaaaatcga

SEQ ID NO: 4393 - DNA, 551 bp, Glycine max
agcttcttagtttcagatgatgtagatgagtttgtggctacctcatgcactcctctaatggctatagcatcatttttggcgctaaactattgggagttggaagccatcttctcaattaaattcctggcttcagcaggggtcatgtctccaaaggctccaccactggcagcatctatcatacttctctccatgttactgagtccttcataaaaatattggagaagaagctgctcacaaatctggtggtgagggcaactggcgcatagttttttaaatctctcccaatattcatataggctctctccactgagttgcctaatgcctgaaatatcctttctgatggtcgtggtcctgcaagcagggaaaattttttctaagaatactctcttgaggtcattccagctcgtgatggaccttggagcaaggtaatataacctgtcctttgccacttcctctaaaaaagacgaaaggccttcaaaaagatgtgatcttctttgacatttggagggttcatggtggagtagacaatatggaattctttcacaagttta

SEQ ID NO: 4394 - DNA, 190 bp, Glycine max
attttttaccattttgattgaataaagaaagcttcctgaaatggcttgttttgcaaggcctagcatgaccaagttagtgccagcttcccaatctcccatgggatctcacccttgaaattcttgtttccacctgcttagaagacttggagctttcttaaagagctaatgctttttggaatttcaccactga

SEQ ID NO: 4395 - DNA, 515 bp, Glycine max
tatatatcaaagatctgataatttagaagttgtcggctactcaaactcggattttgctggttgcgttgactctcgcatgtcaacatctggatacatcttcatgatggctatcaaagcaatatcttggagaagtgcaaaacaatcattagttgctacttaccatggaggctgagtttatttcattatttgaagcgacatcacaaggtatttggttaaaaagtttcatggtcgatctacaagtgattgattatgttcctagaccattaaagatatattgtgataattcagctgctgtttttttgactaaaaaaaataaaagtggaagttgaagcaaacacgtcgacattaagtatttagtcttgaaggaacatgtcaaagcaaattaaatcatcattgaaaacatcagtattgaactaatgattgcacatccattgacaaaaggcatgcaaacaaagtcatttaatgatcatgttaagaatatgggacttgattttgtcatattaagttcccttttt

SEQ ID NO: 4396 - DNA, 413 bp, Glycine max
tcttggggttggcaggctattatagaaagttcattgagggattttctaaattggcattgcccctaactaagttgactcgtaagaatgagaagtttgtctggaatgagaagtgtgatcaaagtttccaagagttgaagaggcggttgacgacagctccagtgttaattttgcccgaccctaagagaacatttgaagtgtattgcgatgcaagcgggcaaggcttggggtgtgtgttgatgcaagagggaagagtaatggcgtatgcttaacgtcaattacgttctcatgaagataactatccgactcatgacttggaactaccagcggtggtctttgccttaaaaatttggaagcattatttgtaccgcacttgttttgaaactttccgtgatcacaagagtcttaaatacttg

SEQ ID NO: 4397 - DNA, 503 bp, Glycine max
agcttggacataccattgaagtttgctacaagaaacatgggtacccgccgggatacaaagcttttattggaagatcaagcgtaaataatgtgatagcgggagaggggaaggtcacagatgatcaagaacaacgtcatgaatcccaagagattattagtttttctccagagcagtgcaaagccttactcgctttaatccaacaaccatctgcaggaagcacagcttctaaccacccacaaaccaaacaggttgcctccatatcttctactgatacagtgactaacccaggtataccttcttcccttagaactcaaaaatctacctcctgggtattagactcacgagccacagatcacgtaacatgtttcttaagtaaccttcatttttttaatcgaatcgaacctaatatgttgaaactcccaaacggccagcatgtttacgccacccaatccaggggggggcatcttttgtcattcataactttactagaagttctctatata

SEQ ID NO: 4398 - DNA, 600 bp, Glycine max
tatgctgcaaacatcaacaatagacctcctcaacctcagcagcaaaatcagccacaataaaacaattatgacctctccagcaacaggtacaatcccgggtggaggaatcatcccaaccttagatagtcaaatccttcacaacagcagtagcaacaacaacaaccttattttcagaatgctactggtccaagtagaccatacgttgctccaccaatccagcatcaacaacaacaacaacaacagccctagaaatagcaaacagttgaggctcctctacaaccttcccttgaagaacttgtgagacaaatgactatgcaaaacatgcagtttcaacaagagaccagagcctccattcatagcttaactaatcagatgggacaattggctacacagttaaatcaacaacagtcccagaattctgacagattaccttctcaatctgtccagaatcccaaaatgtgagtgccattacattgagatcgggaaagcagtgtcaaggacctcaacctgcaacatgttcctcatccacaaatgaacctacccaacctcactctactccaaaaaaagatgatgacaaaaatttaaagagtaagttaccta

SEQ ID NO: 4399 - DNA, 299 bp, Glycine max
agcttctcagatccggtcatggaaagacttggcaactgccttcattaggcagtaccaatacaacacggatatggctcctgatcggagccaacttcagagcatgaccaagtgggaacatgagtccattaaagaatatgctcaaaggtggagagacctagcagtccaagtcgtccccggtatgactgaaagggaaatgatcacgattatggtagatacgttgcctacgttctactacgagaagctgataggatatatgccggctaactttgcaggcctcgtcttcgccggaaaaagaatcc

SEQ ID NO: 4400 - DNA, 410 bp, Glycine max
agcttatctacccacacccctctattaactaaattaatctccttgaaaataattacggataaaaataacacagcaaatataatcaaacatcaaacataattactaataatatatagatatatatcaaggtgttacaactctcccactcttttaaaaatttcatcctcgaaatttacgttactcaaacaaggatggataagcttctcgcatttgactttctaattcccacatgacatcatcttctgatgcacctccccagatcaccttgaccaacagaatctctttccctcttaggtgttttgtttgtcggcataccctaatttcgtctagggaccattctttgatggcatacaacctttggttgaccgcttagaggtacttggaacccattgttgcacaatacgtgaagt

SEQ ID NO: 4401 - DNA, 574 bp, Glycine max
tttacgagagagattgacaagaaaatattactagcaactctaggatgagcaaatagacacctgcagtactaagaaggtaatttataaattaatcctcaccggaatgactgaatagaaaccatttggtattggttctgaaagcactccagtgcgctagagattttgtgatgctttttgagaagacaaaacatctttgtcaaaatgttgaggagactccttattacttaaagtctcatcctaagaacccaaataaacaaatccaaattttttcaacacaatctgaaggccaccacgacacattaaatggcccttgctctgctggccctgcatcttctcgtgtctgcttcatgttcttatatatttggaatgaaaaaccatgtcgtcaccattattaacccataagagacatatctaggctaaaggattttcttaaaatacaaaacctttgaatatatatttcagtaacgcccactggttcagctggaaataattgtacctgcctgaacccaaaaacaaagattttggatttttaaaaaaaataaaacacccctttaaaaagggatgaaaattttca

SEQ ID NO: 4402 - DNA, 450 bp, Glycine max
agctttgaatgctctattcaatggagttgacattaatatcttcagactaatcaacacttgcacagtggccaaagatgcatgggagatcctgaaaaccactcatgaaggaacctccaaagttaagatgttcagattgcaactcttggctacaaaattcgaaaatctgaagatgaaggaggaagagtgtatttatgacttccacatgaacattcttgaaattgccaatgcttgcactgccttgggagagaggataacagatgaaaagctggtgagaaagatcctcagatccttgcctaacagatttgacatgaaagtcactgcaatagaggaggcccaagacatttgcaacatgagagtggatgaactcattggttcccttcaacctttgaactaggactctcggatagggctgaaaagaagacaagaatctggcgctcgtgtccaatgatg

SEQ ID NO: 4403 - DNA, 486 bp, Glycine max
agcttgttgaaaagacacatttcttcaaacaattttgaaaaggtacaatggatctagatatatgtgtctgacttcgaaaaacaaaagagagatgttctaagaaaacttaattgtcaaatgttctctcaacaactattggacaaacatttacaaatctattgagaattcttctgagatcttcaatttgtatcatctactctaaagaaatatttttgttaatcttagaaactcagttgtaatcaagagactagttgtctcttggagaatcttgaacacaagggtgaggaatcccaaggtgtgttcaaagtttgtaaaagatttacagaaatagtggaaaatctcaagtgggttgcttgaggactgaacgtaagcacgggcagtggccgaaccaatataaatcaagcttacaattccctctctccttatcttatttattttattgccatcaattttgtcttacatggttaaaagaacattattaatttg

SEQ ID NO: 4404 - DNA, 445 bp, Glycine max
  unsure at all n locations
tctggtgggacatcttgacttgctttccaatctgacattcaccacagattctgccttcttctattttcagattgggaatgcctctaacagcacctttgtcaatgattttcttcatgcctcttaagtgcagatgtccaaatctttgatgccatattttgacttcatcttctttggaggatagacatgtggaggagtaactggtttcttgaggtgtccataggtaacagttgtcctttgatctgctgcccttcattanaacttcactcttctcatttgtcaccaagcattctgactttgtgaagtttacattgaatccttcatcacacaactgactgatgctgatcaagtttgcagtcagtcccttcaccagcagtactttgttcagattacgaagtccatcatggactagctttcccattctagtgatctttcctttagagccatc

SEQ ID NO: 4405 - DNA, 350 bp, Glycine max
catctaccggagggacatcttgacttgctttccaatctgacattcaccacagaatctgccttgctcaattttcagattgggaatgcctctaacagcacctttgtcaatgattggattcatgcctcttaagagcaaaggtccaaatccttgatgccatattttgacttcatattctttggatgataaacatgtgaaggaataactgtgtatttgacgtgtacctacgaaacagctgccctttgatctgctgaccttcattagaactttactcttctcatttgtcaccaagcattctgactctgtgaaattaacattgaattcttcatcacacaactgactgatgctgatca

SEQ ID NO: 4406 - DNA, 481 bp, Glycine max
agctttgatgttgtcgagaaaaaatcacatgtttttcatcatcaaaaaggcggagaatgtgaatgtatgtatacatgattttgatgatgtcaaaagaagaatccaacacggctcattttgtttcaagattaatacaagattgtttcaacaaacaaagccttgattgaagatttcttcacgatcaagccttgcctcaccatgaaaggtttcaagccattcaaggcacatgtaatcgattaccactggtttgaaagtgtgtaatcgattacacatcatatgtaatcgattaccacagactctgaacgttgggaattcaaattttaaatgaaaggccaccactattcaagagaaacaaccgtgtaatcgattaccctaatcctgcaatctattaccaaagaggattttcaaggaatatcggccacagtcccatcttatcatttggattttgaatggcccccacacgcctatatatatgtgtgac

SEQ ID NO: 4407 - DNA, 428 bp, Glycine max
tctcaaggtgtatggagactcagctctggtgatacgccagttgaaaggagaatgggaaaatagggattcgaagttgataccctatcaaactcacatcttgaggttagccaagtactttgatgatatttccttccaccacatacctcgggaagagaatcaaatggctgatgcattagccaccctgacatccatgtttcaacttgccccacacggggatctgccgtacatcgaattcaaatctcaaggcaggccggcatattgttatgcaatagaggaagagcgggatgggaaaccgtggtatttcgacatcaagcagtatatcgagaataaagaatacccaccagggatttcggacaatgacaaaaggacgttgaagagattgggctactgttttctttgtaagtggtactatcctttacaaacgaaac

SEQ ID NO: 4408 - DNA, 315 bp, Glycine max
  unsure at all n locations
cagctattagncgaattttccccatttatctagccgaccccgccattggaagaaaatatctgatggtgcgcttcaattaatttatcacaggtacgtcatcttgtccaaactgtgccgcttttcttgtgaaacacgagtgctcatccacattgcacaggttcacctggaagattcattcccaaaggcttatgactttggcgggagtttatagaccctggaaatacgtttccaaattaaagaggcgtgagcctcgacgatatcttgagatgctctatatcctcaaggtccgcgatttgttgagtcacatgacatttg

SEQ ID NO: 4409 - DNA, 486 bp, Glycine max
agcttgtgctttaacctgcctcagtaatataatatggcatgtgttaaggcacctgctacaataaactagctgtgcgtgtgtgcaagtctgaaggtgaatgttctatgtttcaactcttttctccttattgttattgtcttaatacggctagaatagaaaaagtttttggaagtaaattaaggattagctcacctttgctgatttgaatagttcatcaagaacctcggacaaagttggatgtgcatgaacggcaaattttatgtcctgcattgtaccacaaaacggtgaaatttaccaaacaggcaggataaataacagtgaaagactttgagaccattattaataactaaatgccaggtgcacacataaatgtggtagaaaaacttacctgaatatgtgtccctaatgctattgcattggatgcttcatggatgagatctgctgcatgcaaaccaaaaatatgaactcctagtatctctccattgt

SEQ ID NO: 4410 - DNA, 508 bp, Glycine max
tcgatatcttgacttgagcgccaatatatttcttggagaaggcatgtcaattccttctttcctcgggacaatgacttccttgactcacctcgacctctctggtactggattcatggggaagattccatctcagatttggaatctctccaatttggtgtatcttcgcctgacgtatgccgccaatggaacaattccatctcagatttggaatctctccaatttggtgtatcttggccttggaggtgattctgttgtcgaacctctgtttgctgaaaatgtagaatggctatcaagtatgtggaagcttgaatatcttcatttgagttatgcaaacctatccaaagcatttcattggctacacactctccaatctcttccttctttgacccacctatctttgtcagaatgcacactccctcactataatgaaccatacttgctcgacttctcatctctgcaaactctccatcttttcgtactagctattccccttgccttttttttgtcc

SEQ ID NO: 4411 - DNA, 483 bp, Glycine max
agcttgtaagatttgcaagatcatcttccttgacaacttcgcgaaaaagattgccgtcaatatgaagagataacaatttagagagtgatccaagactttcaaatggatttccactgaatttattcatagagagatcgagatatcttaatgatgaaagttttccaaatgatctaggaagagcatcaccaattgagttgttggaaaaaagtaacgtgtcaatatttttaaatgccccaatatgatctgtcagattgcctgaaagtcgtgaactctgaactgcaagtgttgtgagtccatgggaaatacaaggagcacgaatttctaaaagttcattaacctgttggttgaatttgagatatgataaatctatcacccttaagttgcagagattacccacagaagttggaatgtttcctttcagttgactatatgaacaatgaagtccacaagagaagtcaaatacccaaagaagttggaatgttt

SEQ ID NO: 4412 - DNA, 467 bp, Glycine max
agcttaacaacctgcctacatattgaagcagttttcctttcactgtcacggcccttggcaataatcctgtcaaaaagttcaccaccagcacacagctccataaccacatgaactgattggttatcctaaaaagcacctaaaattaaggctgcttcatgaagcttattaaacttttgaacatacttcaacggtaagtgcggctgtgagtatacatggcaatgaggtatggcatgaacgggtattgtctccccaatccccgactccgacttcccaacatcttcccatacccgtacccgatacctgacgggttaaaatttattatcccattccccgacttgttgggtattacgtattcctccacccctgtgccggactaaattcaaattagaaaaatattttttggtcaagaaaatattaaaaatttgattttacaaaaaataaaccgaatgttaaacatttatttttaa

SEQ ID NO: 4413 - DNA, 528 bp, Glycine max
ttagcaactctttctttttgtttagtcaagacttctaatgctcttaatctctcctcgcctaaatcaactaactcatctgacatcattttccaataatggtcgatcggaatgtccatttgtttttgtactctagctgattgcaaatgtatttcgaccggaagtatagcatcgggcccataagtcagtcgaaatggggtagtattagtcgattccttaggagaatttctacatgcccatagaacttgatctaacgttttattccaatttcttggcttttgggcaatgtgttttttaatcaagttaattacaatcttattggctgcttcgacctgaccatttgcttgcgcgtaatatggtgttgaggttaataatcgaaagccagttttttgggcaaattctttcatttttcgtccagtaaaaactgaaccttgatcagtggtaattggttcgtggttaccaaacctataaataatataattttgaatgaaactaattactgctttctgatcaaccattgggaaagggact

SEQ ID NO: 4414 - DNA, 512 bp, Glycine max
  unsure at all n locations
agcttatacggatgctgactatgtangatcaataactgataggagatccacttccgaatattgtacctttctaggaagaaacttggtaacttggagaagtaaaaaacaagatgttgtagcgtgatctagtgttgaagctgaatttcgggctacgacacaaggtatttttgaattgctttggctaaatatcatcttatatgacttgaagattaaataagaggcacatatgaagctttattgtgataataagtcagcaatcagcatagcctataatcttgtacaacatgatcgaacaaaacacattgaagtggatagacattttatcaaggaaaagttggatagtggtttgatttgtacaccttccgaaggtcaacttgcggatattctcactaaaggattgcacactccaaattttgatagaacaatatgaaagcaaggactggataacatctatcctccaccttgagggggagcgttggatagatgagcatttattgatgattttcttttca

SEQ ID NO: 4415 - DNA, 287 bp, Glycine max
tcgctttatctgttacgacgtcgttgttatattgggcccacccctttgcaagtggagcgtccgaagttgatacgggccccactatacattgcctgaaatgcgctgcttttacattattaaaaatctatggaaaagctgtcatgctggatcatttgtattatggaccagaaaagaataattgaaaagttttcttattatggagcaaaaaaatctctaataatgattttttaaataaaatcataattatttcacttaatgttgtcttatctaatgttcactatgtaaga

SEQ ID NO: 4416 - DNA, 444 bp, Glycine max
tatagttattggagggagaataaaataatccaaaatcaattgtacccttcaagtaacgaagaattctttttgcggcttttagatgaggagaggtaggagcctccgtaaagctacacacaactcccaccgcatatagaatatcgggccttgtattgattagataccttaaactccccacaagaatcttgaagatcgtggagtctaccttctctccttcatcaaactttgataacttcaagccaccttccataggtgtgttcacgggattgcaatcaagcatattaaatttcttcaacacttcttttgtgtagcttccttgtgagacaaagataccatttctccgtttgcttcacttccattcccaagtaatatgacatgagtcccatatctgtcatatcaaattcatgagatatggactcctcgaagtctttaaacaaatttggg

SEQ ID NO: 4417 - DNA, 345 bp, Glycine max
  unsure at all n locations
tcacatatagagacgctcgaaattgaacaacggaagctctcgagaaattcaaatggtcataacttgtcacttcgaggtccgattcaggcgcataatatatcgagacgctcgtaattgaacaacagaagctgtcgagaaattcaaatggacatcagctttcactcggaagtccgattcaggcgcatcacatatagagacactcgaaattgaacagcggaagctctcgagatattcaaatggtcataacttttaactcngaggtccgagtcaggcacacaatatatcgagacgcccgaaattgaacaacggaagctcttgagaaatcaaactgtcattacttttact

SEQ ID NO: 4418 - DNA, 440 bp, Glycine max
  unsure at all n locations
agcttaaaggagaagttggttttctgaactctaaactggaaaacatgacaaaatcaataaagatgctgaataaaagctcagatatgcttgatgaggtgctacagcttgngaagaatgttggaaaccagagaggacttgggtttaatcataaacctgctggcagaataaccatgacagaatttgttcctgccaaaaacagcactggagccacgatgtcacaacatcggtctcgacatcatggaacgcagcagaaaaagagtaaaagaaagaagtggaggtgtcactactgtggcaagtatggtcacataaagcccttttgctatcatctacatggccatccacatcatggaactcanagtagcagcagcagaaggaagatgatgtgggttccaaaacacaagattgtcagtcttgttgttcatacttcacttagagcatca

SEQ ID NO: 4419 - DNA, 447 bp, Glycine max
  unsure at all n locations
agcttgctcgtcttgctgatatttatcatgtagacctttctgatgatgaccgaggaacaattagggatcaacttgaaacttatgtgcttcaagtgagaagaaatgcttctttttccacttgtgaagatgttcaaagtttggctatgaagatggttcaaactgagaaacatttggtatttccattggtttataaacttattgagctagctttgatattgccggtgtcgacagcatccgttgaaagagctttttcagcaatgaagattatcaagtctaaattgcgcaataagatcaacgatgtgtggttcaatgacgtgatggtatgttgcaccgagcgggagatattcaagtcactccgcanagaagtctcggaaaggacacttgcctcgtaattntatttaacccgctattgtaagattatgtttatctcttttattntaaactata

SEQ ID NO: 4420 - DNA, 389 bp, Glycine max
tgaagcttggagggaatatttgttctatcttacataacaacacatgtatgttattgtccataattcttagatgctcaacatttaaaggtgtcgaagttagctctctacaaaattggctaagttcaacaagtggcttccaaatagatcttggtaatgagtcaaatgcaattggaagcaaccggtgcatgaaaacatgacaatcatgacttttcattccatgaatttttcccttgttaagatccacacatcgacctaaattggaggcatagccatctggtaactttagttctttgacctatttaagaacagcgagtctttgggatctggtcattgcataagctgcctttggtttacagaactcttcacgaacaacatctaccagctcaagc

SEQ ID NO: 4421 - DNA, 432 bp, Glycine max
agcttgaagagcttcttgagtcttattctgttatgaagaatatgactgaagctatagaaatgtcgaagaactgtatacaggtgttggagctttgtgtcaagtgtaacgatcacatttctgaaggccagttttattctgcattgaaaactttggatttagttgaggaaagttgcacacagaatattcctgcaaaggctatcaaaatggtcatagagagtagaattcctgctataaaattgcacgttgagaagaaagtatgcactgaagttaatgaatggatggttgagataatgagttctgctaaaaatattgggcacacggcaattggccgtgctgtgacagttcgtccaagggacaaggaaatgctagaacagcagaggaatgccgaggagcatagtatttcaggactatgcgatctagcttatactttgg

SEQ ID NO: 4422 - DNA, 309 bp, Glycine max
ctggatgcgttggtcaacttggtaacccagctggccttgaatcagaaatctgtacctgtcgcaagggtttgtggtttgtgctcctctgctgaccaccatacagacctttgcccttccatgcagcaacctagagcaattgagcagcctgaagcttatgcagcaaatatatacaatagacctcctcaacctcagcagcaaaatcaaccacagcagagcaattatgacctttccagcaacagatacaaccctggatggaggaattaccctaacctcagatggtccagccctcagcaacaacaacaacagcct

SEQ ID NO: 4423 - DNA, 425 bp, Glycine max
  unsure at all n locations
agcttctagtctcaattttagcgtctcgatatattacccaattcaatcggacatccgagtaaaaagttattgtcgtttgaatttcctacgagcttctgttttcaatttggagcgtctcgatatattaaaggactcaaccggacatccatgtataaagctattgccaatttaattttcttagagcttcggatcaaaattttgagcgtctcgatatattacgggactcaatcagacatccgagcaaaaagttattgtcgcttgaatttgatacgagcttctattttcaatttggagaatcttctcataaattacaacactctgtccggcatncgagtaaaaagctattgtcgcttgaattctctaagagtttccgcctcaatctggagcgctccatatattacgggactacaccgacatccgtgtat

SEQ ID NO: 4424 - DNA, 416 bp, Glycine max
  unsure at all n locations
agctntcttttggtcatggataatcctgatgaggtcaacttgtggtggctggttggttgaagttctcaatctcataaagtagggaaacatagtctcttacaatgcatctttgcacttggggcaatgatgcagctagtgaggttctaaccgaaaagcgtctattgttggttgaaaactatttccaaaccccgtcttacgtctaggttcaccctatgcctttgagaatttctggaagggcttcctcaagggcaaagccttacgagccttacaaactatttccaaaccccctcttaattaagtttgcaagacttactcctatggtaagtgaatatcctatatatctatgtcatcctaaactatctattagctcttaagaaggagattacggtaaaaaaaagactttcattctggttacc

SEQ ID NO: 4425 - DNA, 357 bp, Glycine max
  unsure at all n locations
ctcagctataatatatcgatacgctcgaattaaacattgganactctcgagaagatcagatgatcatgacttttcacacggatgtccgattcgggcgcataatatgtcgagaggctcgaaattgaagaacggaagctcttgagatattcaaatggtcataacttttcacacgaatgtacgattcgatcccataatatgccgagaggctcgaatttgaacaacagaatctcttgagaaatccaaatggtcataacatttaactcgaatgtccaatttaggcgcatcacatatagtgatattcgaaagtgaacaacggaagctctcgtcaaattcacatggtcataacttttcacactg

SEQ ID NO: 4426 - DNA, 378 bp, Glycine max
  unsure at all n locations
agcttgaatcggacatccgtgtganaagttatgtccatttgtatttctcaagagcttccgtagttcaatctcgagcttctcgacatattatgcgcgcgaataagacatccgtgtgaagagttatgaccatttgaatatctcgagtgcttccgatgtttaatttcgagtgtatcgatatattttaaacctgaatcggacctcagtgtgaaaagttatgactatttgcatttcgcgagagtttccgatgttttatttcgagcgtatcgatatattataagcctgaattggacatccgtgtgaaaagctatgaccatttgaatttctcaggagcttctgttgctcaatcttgagcgtctggatatgtgatttgtctgaatc

SEQ ID NO: 4427 - DNA, 309 bp, Glycine max
atgcataatgctcattttgcttactgcagctgggttatttcaattcccatatcgcatcatatttgctgttgccactttgaaatcattggacatttatgacactgagagcacctctccgatagctgtattagctggccttcactatgcccgaataacagatattaccgtggaaattatagatgctagcaattccttttctggtttgagaattaagatgaatatttacggaaagggttaactctaactgttacttgctcataaggtcatgtgatgctcattatttggcattagcctcacaagatggtatct

SEQ ID NO: 4428 - DNA, 342 bp, Glycine max
  unsure at all n locations
tggcattgcccctaactaagttgactcgtaagaatgagaagtttgtttggaatgagaagtgtgatcaaagcttccaagaattgaagaggcggctgacaacagctccagtgttaattttgcccgaccctaagagaccatttgaagtgtattgcgatgcaagcgggcaatgcttggggtgtgtgttgatgaaagagggaagagtantggcttatgcttcacgtcaattacgtcctcgtgaagttaactatccgacccatgacttggaactatcagcagtggtctctgctctatagaattggagacattacttatacggtactcgttttgaagtttcagtgatca

SEQ ID NO: 4429 - DNA, 405 bp, Glycine max
  unsure at all n locations
acatctagatctaagtggagattctcttcgtggagatatcccttctgaagtagggaagcttacaagcttacgacacttagagatctaatcttcacttcttttcgtggagaaatccattctaacgtanggatgcttacaagcttgcaacatctagatctgagtggaaattctcttcttggagaaatcccttctgaagtagggaagcttacagccttacgatatctagatctaagttataatgtggctattcatggagagatcccttatcactttaacaacctctcacaactgcaatatctatgtcttggagaacataatctntccggaccaataccttgtccggttggcgaatcttctatctgtcatactcttagacttgaaggcaatcttgatcttaaaattaac

SEQ ID NO: 4430 - DNA, 420 bp, Glycine max
  unsure at all n locations
aagctattatgtactcttgtcatagcaacaattctactttcaaccaagtgcttatgacatgaactctgatngggattagtttttttattgaatgagtgtctaattaagttacttacccagattgcattctgaatgaaacatggattaatgcttcttcattttcatgatttggtttctaaatagttaacaatggttcaaattcctctgttttggcaggtgctgtctgcatgctttaccgtatgcacccttggttatgcagcagcaggtgttttgggctacttaatgtttggacaggaggttgaatcacaagtgactttgaacctcccaacaggcaagttcagttcacatgtggcaatattcactaccttggtcaatcctataaccaaatatgcattgatgcttactccagtcataaatgct

SEQ ID NO: 4431 - DNA, 441 bp, Glycine max
agcttttgcgcaagaatcagttcgtccaatggaacgacgactgctaagtggcgttcggaaggatcaaacgatgccttatgaatcctcttgtgcttgtgccaccagtgcctagaagatccctcattctatacatgactgtgttggatgagccgatgggatgtatgctggggcagtatgacgagtctgggaagaaggagcgggtcgtctattacataagcaagaagttcacagcatgtgaaatgaactactctttgcttgaaagaacatgttgcaccttggtatgggcagcccaccgcctaagccaatacatgttgtggtacaccacttggctggcatccaagatggacccagtcaagtatatttttgaaaagccctctttcatcggacggattgctcggtggtaggttctactgtcagagttcgacattgtttatgtcactc

SEQ ID NO: 4432 - DNA, 322 bp, Glycine max
tagcacctagaacccacacgctccatcgactagcctgtcgatgctgggcaaagggcatttggggcacgccctgttcaaatcagtatagttggtgcacattcaccatttgtccgtggccttttttactgtgatgatgctggccagccaggtggagtatctgacttctctgatgatgttggcatggagaagtttgtccacttcttctttgacaactatgtgtcggtcttctcccatcttccttttcttttgtgatattgatttagcctggggacacatggcaagcttgtggcatataatgttggggtggattcccgacatgtca

SEQ ID NO: 4433 - DNA, 141 bp, Glycine max
  unsure at all n locations
ctctgactttgtatgtggaaagcatatactggcttgggccttagaggaaatgaaaatngcattttgattggttttggatgatcaatgcattttcttttatttagttactctgaacacacttttaacactgngctgtatata

SEQ ID NO: 4434 - DNA, 235 bp, Glycine max
ccaaacttttctcctaattaaaaatgtatcttactttttactcaaggtatgaattcccttaatgacaaacttcttgaacattaattccaatgaagcaacttgaattatgaatgttaagcactattcaataaacgagagttatggaagagataatgcaaactcagttgtatactggttcggccacacccttgtgcctacgtacagtcctcaagcgaaccgcttgagagatccacta

SEQ ID NO: 4435 - DNA, 455 bp, Glycine max
agcttcatcaccttctcgttacccttcaggatcttttgtccaatgaaacccttctggttcaccattttctttcgttgttccaattcaggcatagttctgagcttttccaccaccctttggactccccaatgggatggccaaacctctggctcaggatcattgtggccataaactatagcacacgcttcaatgccacagagggtgctgagttcctcaaccttcttcagcatccccttcttccttttcttgtatgttgccctccttgcagcatcattccctatgaatgcgagtttcaccttttttctagtcatgacggtgaccagaaaaaatggagagaaactaaaagaaaattgaaaagagtgataattgtggtggttttctattgccaccaacaatctctttatatggaacaatttgatatgcgtttgactttcctgtaagcctttggtgatagt

SEQ ID NO: 4436 - DNA, 443 bp, Glycine max
  unsure at all n locations
agcttcccagatccgatcatgtaaggacttggcaactgccttcattaggcagtaccagtacaatacggacatggctcccaatcggaaccaacttcagggtatgactaaacgagagcatgagtccattaaggaatatgcccagagatggagagatctcgcagcccaagtcgtaccgcccatgacggaaagggagatgatcacaattatggtagatacgttacccacgttctactgtgaaaagctgataggctacatgccagctaactttgcagatctcgtcttcgccggagaaaggattgaatccgggctacgaaaaggcaagtttgaatatgcttccaatatggcccccaacaacaacagaagagccttatcagtgggcgcgaggaanaaggaaggagacgcccacgcggtcaccaccgccccaacatggatgaaagcaccct

SEQ ID NO: 4437 - DNA, 422 bp, Glycine max
  unsure at all n locations
agcttctatagaaggttcgttcctaatttctctacaattgcatcaactctcaatgagctagtgaagaagaatgtggcatttacctgnggtgaaaaacaagagcaagcctttgctttgctcaaagaaaagcttactaaggcacatgttctagctcttcctgacttttctaaaacttttgagctagaatgtgatgcctctggagtgggagttggagctgttttgttgcaaggtgggcaccctattgcttattttagtgaaaaacttcatggtgccacccttaactaccccacctatgataaagagctttatgccttaataagagcactccgaacttgggaacattatcttgtttccaaggaatttgtcattcatagtgatcatcaatcacttaagttcattagagggcaaagcaagttaaacaa

SEQ ID NO: 4438 - DNA, 438 bp, Glycine max
caagcttgtaacccatggaagcttctatatctccacactttttggggtgggccattcttggatggccttgattttctcagggtccacttggaccccatttctaccaactacaaaacctaagaaaactatattatctacacaaaaggtacacttctctatatttgcatagagggtgtttttcctaaggactgaaacaacttgtgtgagatgtcctaagtgatcatctagcctcctactatacactaaaatatcatcaaaataaacaactacaaatctacctatgaaatcccttaagacatgatgcataagcctcatagaggtgcttggtgcattactgagaccaaaaggcatcactagccattcatacaaaccagacttggtcttgaaagcacgtttccactcatcacccttcttcatcctgatttggtgataaccact

SEQ ID NO: 4439 - DNA, 276 bp, Glycine max
actcggatgtcttgattgagtccgtaatatatcgagacgctctaaattgaatggtgaagctctgaccaaattcaaacgacgataaatttttactcggatgtctgattgagtcccgtaatatatcgagactctcgaaattgaatgttgaagctctcagccaaatcaaacgacaataactctttactcggatgtctgattgagtcccgtaatacatcgagacgctcgaaattgaatgttgaagctctcagcatattcaaacgaccataacattttact

SEQ ID NO: 4440 - DNA, 272 bp, Glycine max
  unsure at all n locations
agcttcaacattcaatntcgagggtctcgatatattacgggactcaatctgacatccgagaaaaaagttattgtcatttgtatttgctcacagcatcaacattcaatttcgagcgtgtccatatattacgggactcaatcggacatcccagtaaaacagtattgtcgcttgaatttgctcagagcttccgtattcatattccagcgtctcgatatattacaggacttaatcagacatccgagtaaaaaggtattgtcgcttgaattcgctca

SEQ ID NO: 4441 - DNA, 430 bp, Glycine max
  unsure at all n locations
agcttcaagaagccgtggattntgtgatcatatcccgtctctatgaaaggatggctggtctcattgctgtgtccaacgctggggaagtggcttatggtttcaattgcaatggcatgtttaagggctgtgccactgaaaatggcttcatggaggtcggaatctgggaatagctccattattttccttcatggctgtttcgatgcaacttttggatttctgtaccatgttccactgtagtgtacggtctttctgctggtgcccgatttagataaaaaatggtaaccttgtttctaagaattacaaaaaaatgcgaaacaataatatggtaactttggtgctttctcaaaataaagacttgtggtagacctatcaaacccgtgtcctttttactatacttacttaacttcttctcttntcttcaatttatata

SEQ ID NO: 4442 - DNA, 442 bp, Glycine max
  unsure at all n locations
agcttaacaaaatttcaccactgctaggtaattattttcaacagacgtttgacacgtgaccgtcaacggctgagtttaatggtcaatgtctaattgaggcttcagggatcaacattgcagaattttacaaaatataaggattcaatttgtaaattaaattagcggaggatcaaatgcgaaattggacctaaagtgggggaccaaaagttcaattttgcctaaaaaataattgtgtatgacttaaaaaaattaatttaaaaatcaacaaactcttattataatntgtaatttgatgttattacatatactaatatacattcatattttattatgaaatatttattaaaaacaattaaataaatagtatttgattaaacagacataataataattctcttatccgtttagagtaaaatttctttttctttctttccctgtgatg

SEQ ID NO: 4443 - DNA, 235 bp, Glycine max
cgcataatatatcgagacgctcgtaaatgaacaacggaagctatcgagaaattcaaatggacaatacttctaactcggagggcctattaaggcgcataatatatctagacgctcaacatcttacaacggaagctctttggctatacaaatggtcataacttctcactcgaaggtccgattaaggcgcataatatatcgagacgctcggaactgaacaatggaagctcttgagcaa

SEQ ID NO: 4444 - DNA, 414 bp, Glycine max
agcttgtacggctaaagtctcacgattgtcacgtgctcatgcaacaattgtgagccagggctatacgagacatcatgccacacaaagtcaggttcatgataactcgcctgtgctttttcttccatgctatatgtagcaaagagattgatccactaatgcttgatgagtcggaaaatgaggccgcaattatactgtgccagctggagatgtattttccccctgctttctttgacatcatgattcacttgattgtgcatatggtcagagaaatcaaatgatgtggtcctgtttatatacggtggatgtccccggctgatcgatacatgaagatcttataagggtatacaaagaatctatatcatccggaagcatctattggtgagaggtacattgcacaagaagccattgaatttt

SEQ ID NO: 4445 - DNA, 451 bp, Glycine max
agcttgtaacaagctcaaaagttgctcaacgatcatagcctacaggtcttttgtttcttcgatgatggcgacaatatatttaaattttagatctaacgatctaagaattttctccataatgtttacatcatcaagcttttcaccacttctcttaagatgattggtgattgctaagactctagagaaatagtcggagatgactttaccttctctcatatgcaaggtttgaaacttaactcttacactatgaagacgtaccttcttgatcggatctgctcccttatacgaggtttgaagcttctgccatgcttctttcaccgactttgcttctgaaaccttcttgaaagcatcatcatctactcctagatagattagatagagagccttcttgtctctctctcttgagtctctaaactatctctttgagtctgagaaagactaccctcattct

SEQ ID NO: 4446 - DNA, 400 bp, Glycine max
agcttgtgcatccaataccctgatgaggatgtcccatatgttcttaaaactggactgattcatttgcttccaaagtttcatggccttgcaggtgaagacccgcacaaacatttgaaagaatttcacattgtctactccaccatgaaacccccagatgtccaagaggatcacatatttctgaaggcttttcctcattcattagagggagtggcaaaggactggctgtattaccttgctccaaggtccatcacgagctgggatgaccttaagagagtattcttagaaaattttttccctgctttcaggaccacagccatcaggaaggatatctcaggtattagacaactcagtggagagagcctgtatgagtactgagagagatctaagatactatgtgcca

SEQ ID NO: 4447 - DNA, 225 bp, Glycine max
tgtgtggatgatttcttcagatttacctgggtcaactctattatagagaaatcacacacctttgcagtattcaaggagttgagtctgagactctcaagagaataagactgtgtcatcaagagaatcacgagtgaccatggcagagagtttgaatatagcaagtgtactgaattctgcacatctgaaggcatcactcatgagttctctgcagccattacaccacaa

SEQ ID NO: 4448 - DNA, 426 bp, Glycine max
agcttctagaaaacgttgatgtcaaatgcattctatttttcttccatgtttcagttgcacgtagcttgtgtcttcttaacaaatagggcatgcgcgatggcccttaacacaatatccacccaaatttttgtatgctggaaagtcattaatggtacaaaataacattacacacaacttgaatgtctcatttcaatacccatcaaacacaataacccccttgttctacaactttgtcaagtcttcaatcaagggactgagataaacatcaatgccatttcttggctgtcctgtgttcgatatcatcatagacaacatcatgcattttcgctccatgcacaatcaaagaggcaagttgtaaattactagcaaaacagaccacgcactatgtcgagtgcttaaattgccataaagatgcattccatcctt

SEQ ID NO: 4449 - DNA, 330 bp, Glycine max
  unsure at all n locations
tgtganagagaagggcatttcacagctatggattgagactgattctacttcagcagtggattatattttaaataaacgcgtgcagaaaggtgatccttctgctcctcttgttgagtccatactcgagttgatgataggaaattggacgtttcgagtatcccattgttatcgtgaagcaaacacagttgctgactggttgtctaaatatgcgcatactactgcttttggtcttcatgtgctcgatgttcctcctcatggttgtataacatacttaactgatgactctactggagtttatagacttcgtactgtacgtgttattgactcatg

SEQ ID NO: 4450 - DNA, 418 bp, Glycine max
agcttgtagatgtcacttaagaacatacgtgcaacggaagcaacggagaacttggctggtcatgttttgaagtgagtatactctgtcaaacaatctacaatcacctaggtaattgacttcccctgtgacactggtaagtgtgtaataaaatccatacagaagtctttccagacctaattgggaataggtcaaggctataaaaggccatgctatttgtgattgggagacttatgctcttgacaaatctcacaggtttgcacatactccttgacatcccgacacatgtgtggccatgaaaaggaagctgccaaacatataagcatgcctttaacacttgagtgtcctcctgcaagggtggcatggcaatcttgaagcaactgaaagcaaagcgcagactctagtggaacacataagcact

SEQ ID NO: 4451 - DNA, 455 bp, Glycine max
  unsure at all n locations
agcttgtgcatccaataccctgatgaggatgtcccatatgttcttaaaattggactaattcatttgcttccaaagtttcatggccttgaaggtgaagacccgcacacacatttgaaggaatttcatattgtctgctccaccatgaaacccccagatgtccaggaggatcacatatttctgaaggcttttcctcattctttggagggagtggcaaaagactgactgtattaccttgctccaaggtccatcacgagctgggatgaccttaagagagtattcttagaaaaaaatttccctgcttccaggaccacagccatcaggaaagatatctcacgtattagacaactcagtggagagagtctgtatgagtactacgagcgacttaaaaaattatgtgccagctgccctcaccatcagatttcggagcagcttcttctncaatatctttatgaatg

SEQ ID NO: 4452 - DNA, 199 bp, Glycine max
  unsure at all n locations
gacagtcattcaaaatgaaaagaatgacctaacccccacaatgattggcactggctggagaatgtgcatcgattatcgcaagctcaatgaagccatatggaaagatcattttcctttaccattcatggaccaaatgttggagaggcttgcgggacangcttattactgcttcttagatgaatactctgggtacaatcag

SEQ ID NO: 4453 - DNA, 232 bp, Glycine max
actagacattctcttaaagatttatgccataatatggcatttgtgtctatgattgaacctacaaatataaatgaagccataatggatgatcattggatagttgctatgtaagaagaactaaatcagtttgagagaaataatgtgtgggaactagttgagaaacctgaaaactaccccatcataggaacaaaatgggtatctaggaataagttagatgaacatggaataatca

SEQ ID NO: 4454 - DNA, 393 bp, Glycine max
  unsure at all n locations
agcttcttagtanattgtggggagtttgaagccatcttctcaattaaatttctggcttcatcaggagtcatgtctccaagggttccaccactggcagcatctatcatacttctctccatgttactgagtccttcataaaaatattggagaacaagctcctcacaaatctggtggtgagggcaactggcacatagatctttaaatctctcccagtattcatataggctctctccactgagttgcctaatgccttaaatatcctgtctgatggccgaggtcctggaagtacggaaaatcttttctaagaatactctcttgaggtccatccatcttgtgatggaccttggagcaaggtaatatactcagtccttcgccgctcccctctaaaaacga

SEQ ID NO: 4455 - DNA, 229 bp, Glycine max
tcttaattgccaccattgtttcttcccttcactgaaaatccatggttggtccatattaacatcctcctctaaatctccattctaaaaggcagttttcacattcatctgatgtagcttccaagtcataatgggctactaatggccatgataattctgaaagaatccttttgtgagactggagaaaatgttctcatataatcaatgccatctttctgagtatatcccttag

SEQ ID NO: 4456 - DNA, 456 bp, Glycine max
agcttgtaaggctttgggtgggacatgatagagagactcaacttggataccaaccttgtgctacaacaattgcagcaagacccactatccataatgagagaataatttttgtttaaaaccttgcatcttgtatgaaagatgttttctttttgggtttgggttaggtcacaagattgactcccaatgagccatctctccattagaagatcaccttcttcgtaggggcaaacctcttcaatatgctcatcacccttggcttcaccctcacttccacctgaggaaggagaagaagtagccttctcttgactactgtagatgtcttgatcccacatgatcatggttttctttgtagtggcattgagaaagaatgtggcctttcccaatacattttaagcacttaatgttactagttctatcttgtgaactaccctttggagtgatttcttctatgttttt

SEQ ID NO: 4457 - DNA, 464 bp, Glycine max
tcttcacatagtccgcctttgcttgaccttctttatgcttataaacagaaacattatgcataggcaaaagattaagtggagttagtgggttaaaaccacaaacaacttcaaaaggagaacaattagtggtgctatgaacagatctattgtaagaaaattcaacatggggtaaacaagcttcccaagtttttaagttcttcctcaaaactgtcctaagcaaggttcccaaagtcctattaacagcttccgtttgcccatcggtttgtgggtgacaagtggttgaaaataacaatttagtgcccaacttgctccacaaagtcctccaaaaatggcttaagaacttagagtccctatcactaacaatgctccttggcaaaccatggagtctcacaatctccttgaaaaacaaatcaaccacatgggaagcatcataaacttttttacatggaataaaatgagccatt

SEQ ID NO: 4458 - DNA, 435 bp, Glycine max
tgccaaatgttattacagtccttttaaagtcacaaaatgcatcgacaaagtttcccacaaactgcagttatcgaaaggttctcgcattcatccagtcttccactattccattctaaaattgttcctccaatcctcatcgaatgaccctcacccagtcgcactacctgtcgcggacaaggataaccaacctgtcatcactcctttggccatactcagtactcgctgggattactcctacactggacatcgtttaatggtgcttgtgcaatggtcgagtcttcactctaatgatgcatcatgggaagagtgagtctccttgaaagatatttatcaacttgaggacaaggtgcttttcgatggtcttgggaatgataggtagagaaagataataacccaacaagcccacagtgaaaggcccaagaggaaaatcaactc

SEQ ID NO: 4459 - DNA, 367 bp, Glycine max
tgctcactcctatggctctagccttgtctgagtcatagagtgcctccattgctctccatgtattgggaatgtctggttgctcaaaatattctttattgagtccaaatgttccacttttcattcggactggccagtggatctacagcacaaacccatttagtttgttttaagacagaataattgatgaaaatgaaatcaacccctgataactaaactctgcattacatgaatgcgtataaccgatgcactttgctcaaagcgttatttttatttaaagcacttaggggcaaagaaaacgtttttatttctcccattttcagtttaaaatactttcaagttaccatgtttttacgtctatcaactttgt

SEQ ID NO: 4460 - DNA, 413 bp, Glycine max
agccttttggtcgcgattcagattcttcagctgcattaactagatcactcaagcagtatctgacagaagaacaaattttcaagttttttaactaaaactgataatcttcaattcaactttaagattgtaaagtacattttataaaatgggaaatattatacaggattgaccactatcttgggaaagagcttgtggaaaatctttctgttctccgattctcaaatctcatctttgaaccattatggtcaaggcaatatataagaaatgtacaggtgatattctcagaagattttggcactgaagggcgtggcgggtaacctttattccttaacagctttcacactttctgttcttataatggggattcttatacattttcatatctgtaccatgtgtaggtacttttgaccatt

SEQ ID NO: 4461 - DNA, 424 bp, Glycine max
agcttaaaggtcaatcaaagaatgagttcaagatgtttatgatagaatcaagaacacttcaagattcaagaggaaagttgatttcaagaatcaagatcaagatccaagactcaagattcaagaatcaagagaaggcttaatccagataagtatgaagaggttttttcaaaaattgagtagcacatggattttgctcaaaacatgtttacgaaagagtttttactctctggtaatccattaccacattattgtaatcgattaccagtcgcagaatggatttgaaaatgttttcaaatgaatatacaacgttccaattgatttcaaaaagctgtaatcgattaccatgttttggtaatcgattattagtgcctttgaacgttgaaatgtaaattcgaatgtgaagagtcacatcctttcacataaa

SEQ ID NO: 4462 - DNA, 305 bp, Glycine max
ttgagcaacttcaaacaacaataactttgtactcggatgtctgattgatacccgtaatatatccagacgctcgaaattgaataccgaagctctgagcaaattcaaacgccaataagtttttactcggaaggtcgattgagtcccgtgatatatagaaacgctcgaaaatgaaaaccgaatctctgagcaaattctaacgacaataactttgtactcggatgttcgattgagtcccgtaatatatctcaacgctctaaatagaatgttgaagctttgtgctaattcgaacgaccataacttgtttc

SEQ ID NO: 4463 - DNA, 525 bp, Glycine max
ttaaaagattggctaaaattttgttaaaacataagcacttatacaatgaaggaaagctggagttgctgcacatgctgtctaacattatgtcaaggaatcagatcgggctgcacaatgcacaaggcaagataaaatgtcaaatgaagaattgaagctgcaggatccacgatgtcggatacaatgtccaggacatcctgcccgaaaatactggacacataaacctgttatatctttaacagattaatgtgcagttagcaacagatttaggcgatctatctttaggaacgaattaaaagataattaaagttcgaattacaaacttgaatagttcgttcagggattaaagattaaagataaaaactaaaagatcaaactttatcttttagatctttaaatgcaaattttcaggagaatgatagatcttatccagcgcaagttgttgcagcccaaatacgcacactgctatataaacatgaaggctgcacgggttttgtaccaagtccgagaatgaagagttattttgtg

SEQ ID NO: 4464 - DNA, 298 bp, Glycine max
agcttgaaatgcctcatttttatgaggggagaacaatgtcccagtttatcttggataatcatcaactatgacgagtgcataataactttcaccaaaactcatgactcttgatggaccaaacaaatctatatgttgtaattataaacgttgagttgttgaaacaacgtttttggatttaaacgatgccctaatttggtttcccttttgacctgcctcacataatttatctttttcaaattttagccttggcaagccaacaaccaaatcttttgaaaataatttgtttaaatggtccata

SEQ ID NO: 4465 - DNA, 474 bp, Glycine max
ttgaagagctatgtcagaatttacgaacacattgaacactaaagtgttgagtgacttgctcataatatcacaaaagtgtgcccggatgaaataagagaaatttggatccacattgaagacccaagtaatgttgaaatttggatcatttacattagcatcccccattgcttcagcagtggcatagacccaatttggggcagtctcaggtgtaacagccaccggatacttaatgcttgaaggattcaccgacacatttaggaccgagctgttgacatgaaggtatttcctatcattcacccaagtcctacccaaggtgtcattttgggcagtaatcaaaggaccccccatgttcaagcgataaacagtttcaaaggcaagttcagaaagtccactgaatgttgctggcgggttaacagccaatgcatgatcaaaaaacaactcattcggcattgacacgacttcaattgcattgac

SEQ ID NO: 4466 - DNA, 473 bp, Glycine max
tctaaactttatacaagaatgaagctttgataccacttgtttgacaagtggcctcagatatcttaagaagggggattgaatttatatattacaaactatttccccaattaaaattctatttcactttctattcaagttacaaattcccttaacaatgaacttcttaaatattgattcaaatagaacaatctgaatataaatataaaacaataataaataaaagagtttaaaggaagagaaagtgcaaactcggatttatactggttcggccacacccttgtgcctacgtccagtccccaagcaacccgcttgagagttccactatcttgtaaaatccttttacaagttctgaacacataaggacaatccttcctttgtgttcaaaattcttttacaacaagagacccttcgtctcttaatcccttaacaattatgaagaacggaggaatgaatctctcttgaagagaaagatt

SEQ ID NO: 4467 - DNA, 159 bp, Glycine max
tgaaattgaacaacggaagctctcgagaaattcaaatggttattacttatcacacgtcagtccgattccggcggataatatatcgagaagcctctaattgaacaacgaatgctttcctgaaattctaatggtcataacttatcacacggaagcccgatt

SEQ ID NO: 4468 - DNA, 341 bp, Glycine max
agcttgaatggcttactgaggatggagatgtgctttgtaacgaagcaagtggagttgaatatttgcattggaaagtacaatgataaggtgctttgtgatgttgttcctatggaggccaaccacttactcttggggagaccatggcaatttgataagagagcttatcatgatggtttcaccaacaagatctcttttacgtattaaggcaaaaagatagtgctccaaccattgaatcctcaataaatgtgtgaggatcaaagaaaaatgagagagaaaattctttctgaaaagagagaaaaagaaaaagagagcttaccactttaaagttcaaaaagtgagga

SEQ ID NO: 4469 - DNA, 423 bp, Glycine max
ttgatttcctttgttccggaaacctttcttttctcatgtgcacccaaacccaatctccgggttcgaagacaaccttctttctccctttgttggcttgtttaacatagcttttatttttcctctcaatttgatctttgactctctcatgaaacttcttcacatagtccgcctttgcttgaccttcttaatgcttaaaaacagaaacattatgcataagcaaaagatcaagaggagttagtgggttaaaaccataaacaacttcaaaaggagaacaattagtggtgctatgaacagctctattgtaagaaaattcaacatggggtaaacaagcttcccaagtttttaagttcttccttaaaactgttctaaacaaagttcccaaagtcctattaacaacttccggttgcccattcggtttgtggg

SEQ ID NO: 4470 - DNA, 468 bp, Glycine max
agctctgcaactttttatccctagcacaattgttttgattcaaactattcctgcactagacgagtccaaccaatcccaaacaaggtcatattccatcgaattttttggtcatttaacgcatgtattgatgcgttttcattttataaacccattgtgcaaatctatggaacatggctatatggaagatacaaagggatgttgttaattgcaattgcacaagatggtgctaacaacatatttccattgtcatttgtcattgtcgagggtgagacaacagatgggtggcacatttttttgaaaaacttgagaacacatgtgacacccccacatggtatatgcttaatctctgaccgacatgagtcaatccaaaatgcctacagatgacctgacagggggtggacagcagacacctcgtcacatgtgttgtgtattcggcacctatgcccaaactacaaaaaaaaaaccatt

SEQ ID NO: 4471 - DNA, 303 bp, Glycine max
agctttctcttttgtgtaactatctcatcctctttttcaagtgtacaatgaagcttggcagattcaggtgcaggtgctgctactggtggaggcacttgaatttggttgccagacctcaaggtgaaggcactcacatttttcggatcctgcacagtttgtgaagacaatttgtcagaattttgggactgagcttggttcatctgagtagccatctgccccatttgatttgttagactctgaatggaagctcttgtctcttgttgcaattgcatattctggatggtcatttgcctcactaactct

SEQ ID NO: 4472 - DNA, 398 bp, Glycine max
agctttaagcaaattcaaatgacaataacttttgactcggatgtccgattgagtcatttaataattcttgacgctcgaaattgaatacagaagctctcacccaatttaaatgacaataactttttactcagaagtctgattgtgtcccgtaatatatctagatgctcaaaattgaaaacagaagctctgagccaattccaacgacaataacttttgactccgatatccgattgagtcatttaataatttgagacgctcaaaattgaatacacaagctctaagcagattcgaatgacaataacttttgactcgaatgtcccattgagtcattttataatttgagacgctcaaaattgaatgcggagctctcaccccatttaaatggacataacttttta

SEQ ID NO: 4473 - DNA, 374 bp, Glycine max
gcttttagcctcagatgatgcagctgattttgtatctacctcatgcactcctctaatgactatggcatcatttctggcgctaaactgctgagagttggaagccatcttttcaattaaatttctagcttcaacacgagtcatgtctccaagggctccaccactggcagcatctatgatacttctctgcatattactgagtccttcataaaaatattggaaaaaaagctgctctgaaatctgatggcgagggcaactggcgcataattttttaaatcgctcccaatactcatacaggctcttttcactgagttgtctaatacctgagatatcctttctgatggctgtggtccctggaagcaaggaaaaatttttct

SEQ ID NO: 4474 - DNA, 413 bp, Glycine max
tcctagcggtttctaattatatggacctataaatctatcatatgctgacaatagacgagaagttcgtggatctcctcgggggggagtaggtgtccgccatcgctttggccttggctagctcttcatcaatggattcctttgcatcttggaagatgaatggcaatgtaatggagaaaggaagagagagaggagacgccacttcaaggagaagatgagtctagaagaagctcaccaccataggaggccatggataagagcttggaggaagaaagagatgaatgaagggagaaggagaaaacagcccgaaattttgtgctctaaatgagctctgcaatctgagagttaatactcacaagatccaagtttaaaacaatgcccacctttgacctctaattatacccctactggccccc

SEQ ID NO: 4475 - DNA, 323 bp, Glycine max
agcttgtggataatcatatccaaatgtttcctgatatcatcatgatgattcaccagccatggatgacctatgcataaaatcaggctatcttcaacatacttcatgaaaattaaagtaagaatattgataccatatacaccaccatgggaaatgggaagacatacttaatgcctgagctgccggaaatcttttactgtaattcttattcaacaacctctgtacaaaatctttatcatcaactgataaagaatgccgacgagcctcattaaaactaagatctgtcttgagtacatcccgaaatataccatattctggccgggccc

SEQ ID NO: 4476 - DNA, 542 bp, Glycine max
tagacattagagtcatccaagagggctagtgtcttcaggggctgaaaattatataaaataaaataaaaatagaacgttagatatcaaaatgtgtaaatgaaaataaataaaattcttatacctataaaaacaaatttctagaaattgaagtaaccagaataataacatcaagttaatgatagattaaaatcacaatagtttataagaaaaatatttatggtaataatgaagatctttaatatcttaagattaagtattcaacatcgataattatgagtttaatgatcatgcagcggcaatgaaatttttatggttaattaatcttaatattacttttgtaaaactccatgaatttatcatatacattggaaattattagatgtcagtataaaataattttagacatttagtgcatagcttattttctctaattatatctctatcttattttattatgatgaagacttttcatccaaattttcaaaacgttccatagaacatagttttattaaaacaaaatatggatgttaacaccaaatacc

SEQ ID NO: 4477 - DNA, 465 bp, Glycine max
aagcttctcgaaagattccaaaactagcatacccgtgcatgatttgcattgtcaaacgcacagaaggcagatgccagattcctacgcacaaaccgctgttgaacataaccaatgtaatctcattcttctccaaactttcaatactccccccttaatatccaaccaccaccgccggaccatatagcccgccacccaacgccaactgaaccaacaccacgcatgctctcctcatctccccaaacaacaacaaagcctggctgctctttccatttcccagcacacccggcaaccatggtggtccaagacacaacattcctgcacggcattacctcaaaaaccctcctagccccatcgaaatcggcacacctgacatacccagcaagcatagaattccagctaacaacacttctctggggcataccatcaaacacatggggcccccgctcaacgccaccgcgcccagca

SEQ ID NO: 4478 - DNA, 395 bp, Glycine max
ctatgctcttttgtggtggaacaagctacaaaaggagagagcaagaaatgaagagcccatggttgatacatggacggcgatgaaaaagatcatgaagaagcggtatgttccggctaattactcaagggacttgaaatttaagcttcaaaaactaacccaaggcaacaagggggttgaggagtatttcaaggaaatggatgtgctcatgattcaagcaaatattgaagaagatgaggaggtaactatggctcgatttcttaatggtttgactaatgatatccgtgatattgttgagctgcaggagtttgttgaaatggatgatttgcttacaaagcaatccaagtggaacaacaattaaaaaggaaaggagtggctaacaggagttttaccaactt

SEQ ID NO: 4479 - DNA, 464 bp, Glycine max
ttgttgtaaataccataacttttatgttaatctttgatgggttttaaatctttctttaaattgcggccataggacttataattctgaacatagaaaagtaaatcatggttgatttggtggcagggaagcacagccaatgaaatgggccatgaagttgagggtggctttctacttacctcaagctctacaatattgcactactaaaggaaagggtttgtatcatgatctcaatgcctacagaatcttgtttgatcaggtataactggtgtttaataaatgctctccagttctaactaaaccctgtttcttcctatttgaaacttggattggcttgggatgtatcaacaggatgctcatcccaggttgtcctgcttttggactcatggaaaagagcacagatggcaacagttacagcacaaacctggcttttaccccttctgaatacttaaagactggcaaaattt

SEQ ID NO: 4480 - DNA, 336 bp, Glycine max
agcttcagtaatgtgagttttgaaaagtaagttttaaatgtatttactctgagtcatcaatatacagttattagggagatatttaatctctacacccaagaaataatccacatgacctacctgtttgacagagaatgcagtgtgaaacttggctgtgagctgctgaattaaaaaagttgaacctacccgtgatgactatatcatccacatagaccccaagaataacaatatgaacctgttgcgtgtagatgaccagagaaatggcacatttgcttcccttcaatcccaactgaaatagagtagatttccgcttatcaaaccactgccttggaactt

SEQ ID NO: 4481 - DNA, 396 bp, Glycine max
agcttgatttttttgtatggctatccctgttatcttaattatcagcaaattgtttcacgcccaactcttgatgttgattggcgaaacaatgtttcatttgctacatgctcctctaataaaatgatacatgtttgcaaaattggagggaatagaccaatcaaaactttctcagggcatcaggtatctcttcctagtcaaccagttcactgatggttttttttattaatatactaacttttaattggaaaggagacaacgactttccatcacaaaatagaataatatgctcacttataattcaactatgaggatattcagttacagttttaatcatttctcaaacattctgaaatacttttgtttcacgatgaagttaatgccattaaatgggaacca

SEQ ID NO: 4482 - DNA, 389 bp, Glycine max
tgaatttaatgaatctaatagtactacaataaagtgaacattttataacggatgctctatcatatatttgactgaacatttaagttggaaatattctgaaagcccctttattcctgaatattacccaagcctcaggttttgtgataatggatcccccgcaaacctaaaagcaccatgaactaaatctttttactgttgtgggggtcttctaagaaagagtttgatatttattttataggtttttgttcgagattttgtgcccagtgctctagcctttttgatgaatggtgaacccgagatagtcaggaacttcttgttgaagacacctgcatcttcagggttgggaaaaaaaagtacatcgggttaagcttggtgaaggtgtgatgcca

SEQ ID NO: 4483 - DNA, 544 bp, Glycine max
ttggagtttccaagtgccaattcgtcctcttctttagtccagtcttcttctggcttcaattcatcagtgggctttccttctgtgtccagcatcttgggatgttcccagcctttgatgacagctttccaagttctgctatccagtgatttgaggaaggccaccattcttgctttccagtattcatagttgcttccatcaagaattggtggtctgttcactggtcctccttctttctccatgttcatcagaatttatctccccagatctcactctgtgatttcgagtgttggctctgataccaattgaaattctgatacccagggacagatgtcgtacaggatgtcacgacatcacgcttaaaaacatgcaaattgtatggtgtcctatgaacagattaaacacgtaataacaccagagaattgttacccagttcggtgccccttacctacatctgggggctaccaagccaggggaggaaatccactctcaatagtgttagttcaaggtctaacaaccccctgtttacaacctttctacctaacca

SEQ ID NO: 4484 - DNA, 390 bp, Glycine max
tctacattcaatttcgagcttttcgatatattactggactctttcggacatccgagtaaaaaggtattgtagtttgaatttgctcagggcttccgtattccatttcgagcgtttcgatatattaccggactcaatccgacattccagtaaaaagttattggtggttgaatttgctcaaagcttcggtatttcatttcgagcgtttcgatatattaccggactcaatcagacatccgagtaaaaagatattgtcgtttgaatttgctcaaggctttcgcatttcatttcgagcgtctcgatgtattacgggactcaatcagacatcccagtaaaaagttattggcgtttgaatttgcttaaaagcttccacattcaatttccagcttttca

SEQ ID NO: 4485 - DNA, 385 bp, Glycine max
tatcatatatcgatacgctcgaaattaaacattggaaactctcgggaaattcaaatagtcataacttttcacacggatgtccgattcgggtgcataatatgtcgagaggctcgaaattgaacaacgcaagctcttgagaaattagactggtataactttttacacggaagctctcgtgaaattcatatggtcataacttttcacactgaggtccgattcaggcttataatatatcgatgcactcgaaattaaacatcggaaactctctaaaaattcaaatggtcataacgtttcacacggatgtccgattcaggcgcataatatgtccagaggctctaaatttgaaaaacgaagctcttgagaaatttcaatgggcataactttt

SEQ ID NO: 4486 - DNA, 413 bp, Glycine max
agcttgaatcggacatccgtgtgaaaagttattattttttgaatttctcaagagcttccgttgtgtaatttcgagcctctcgacatattatgcgcccgaatcggacatctgtgtgaaaagtcatgatcatttgaatttctcgagagtttccgatgtttaatttcgagcgtatcgatatattataaccctgaatcggacctcagtgtgaaaagttatgaccatttgaatttgacaagagcttccgttgctcaatttcgaatatcactatatgtgatgcgcctaaattggacattcgcgttaaatgtcatgaccatttgaatttctccagagcttccgttgttcaattctgagcgtctccatatgtcagtcgcctgaatcggacatcccggtgaaagcttttacccttttaattt

SEQ ID NO: 4487 - DNA, 474 bp, Glycine max
tgtagacttttgactctgtgttgtagccaatgaaaatacacttttctcctttatcggccaatttcttcctaagttgatctagaacatgtgcatatgctatgcacccaaaaactttaagatgtctaattgatggtcactgtccattctaggctttttctggcgtcttgtcacaaacacttttagtcaggcacctattcaaaaatgtaaataattgtagcaactgcttctgcccataactccttaggcatttccatggccttcgacatgcacctcaccatatccatgattgttctattctttctttcagctactccattctgctgaagcatgtatcttgttgccaattgatggtgaatcccatgctggtcaaggaaagttatgcaagtgagatattcttgtccttttgtcagtcgaagtactttgattctacacccattttgcttctctaccaacacatttgaaagcatcacaagc

SEQ ID NO: 4488 - DNA, 466 bp, Glycine max
tggatttccttttagtagggaatctttccttcctaagatgcatccaaacccagtccccctcattaagaactagctcctttcttcctctattgcccttaattgaatacacctttgtttggttctctatttgggtcttaaccctctcatgcaacttctttacaaactctgacctagattccccttctttatgtatgaaagaagtgtcaagtgggaggggaatgaggtctaagggtgttaagggattgaacccatagacaacctcaaaaggggattgcttggtggttctatgaacccccctattgtaggcaaattctacatgaggaagatactcatcccaagacttatggttgccttttagaagagcccttaaaagagtggataaagaactattcactacctttggttgcccatcaatttgtggatgacaagggggagaaaaaaaaaacttaatttctaacttaaccca

SEQ ID NO: 4489 - DNA, 364 bp, Glycine max
aatacttattctcgagaatggagaattgcactaagcaatcactacgcctatcttctaactcgaagcggaggacacattaacgaaaactcaattcatggggcttcgaaaaaagggtttataatggataattacactaagcaatcactacgcatagcttcaaactcaaatgtggaggacacatgaacgataacccacttcatggggctccgaaaagattgagaatggagaattgcactacgccatcactacgcatagctccaaacgcgaaggtggaggactcatgaatgaaaacgcaattcatggggctcccaatagattgataatggagaattgctctaatcaattactacccctatgtccaaac

SEQ ID NO: 4490 - DNA, 328 bp, Glycine max
ggttgatacacctatgcgtctgttttataccatggttaacctgttttgagctaaggtattgcaaaattcttttctaacagagggctgaggcagcaattgctattgggttttgatgatttcattgcagatgccttgcaaggtactggattctatcaaaaaggaacattggaaaataagagagctgatggtatatcattgctgaagaggttattgagaaaaaaaaggaaaaaagccaaatgtaatatatctgtcattcctttcacaactgatggaaagtagccattggagttctatttcaaaaaaagattatgtgctccttcataaattt

SEQ ID NO: 4491 - DNA, 479 bp, Glycine max
agcttgccgccacggagttttccgactatgctcttgtgtggtggaacaagctacaaaaggagagagcaagaaatgaagagccaatggttgatacatggacggagatgaaaaagatcatgaggaaacggtatgtgccggctagttactcaagggacttgaaattcaagctccaaaaactaacccaaggcaacaagggggttgaggagtatttcaaggaaatggatgtgctcatgattcaagcaaatattgaagaagatgaggaggtaactatggctcgatttcttaatggtttgactaatgaaatccgtgatattgttgaactgcacgaatttgttgaaatggatgatttgcttcacaaagcaatccaaggtgggccaccatttaaaaggaaaggaagggctaaaaagagttttacccacttttggtcttctatttggaaaaacaaagggatgaaagatggggctggtacttttagaatt

SEQ ID NO: 4492 - DNA, 288 bp, Glycine max
cctttgtcaatgagtatcttcatgcctcttaagtgcagaagtccaaatctttgatgccatatggggacttcatcttctttggaggatagacacatcgaggagtaactggattgttgaagtgtccataagtaacacgagccctttgatttgctgcccttcatcagaacttcactcctataatttgtcaccaagcatactgactttgtgaaggttacattggatccttcatcaaccaactgactgaagctgatcaagtttgcagtcactccctttaccagcagaactttg

SEQ ID NO: 4493 - DNA, 598 bp, Glycine max
  unsure at all n locations
ttgcacaaaggtntgaaagtccttttaactccnnnnantnnnnntnnnnnnnnnnnttnntnnnnnnannnnnnnccccccnnngcaccaccacttccggcacatctacaaaatcatttggataaagttcaaccatcctcaacaaatttttcacatcaaaagctttaaatgatgatgagggactcaaacatgaaacacattgtaaaagttcagtattctcttcatcaaacctagcattgagctcatgcaactgcaaatctaaaacactaaataaaaaatcatgcttataatgatgaaaattagaaacactataagtggtagcatgtcatctaggtttcttcccttgcacatacggtgcatccaaatcaagcacattaatatcatgcttattgcaaatttccataaccttagatataagttctttccattcatcatttcctatttcttggaaattcttctttggtggctttgacaagtgataaagcatttcaaaagatcttgatcacgcctttggagcgcttcacttaaatcatttgtaaaatctcaaatctcaaccctcatgtataacatggaaattaaaatcaaggactgaagccca

SEQ ID NO: 4494 - DNA, 340 bp, Glycine max
ttttgggatgtttccagcctttgatgacagctttccaggttctgctatccagtgatttgaggaaagccaccattcttgctttccagtattcatagttggttccatcaagaattggtggtctgttcactggtccttcttctttctccatgttcatcagaatttatctccctagatctcactctgtgatttcgagtgttggctctgataccaattgaaattctgataccaggggacagatgttgtaccggatgtcacgacatcacgcttcagaacatgcagattatatgtgtccgtatgaacagattaaacaagttaataacacaagagaattgtttaccca

SEQ ID NO: 4495 - DNA, 503 bp, Glycine max
  unsure at all n locations
ttcaatgctcttaagcaaaagttaaccaatgcccccatacttgttttgnnaaannnnnnaaaatntttngaaattgaaggggaagnnnnaaaaatgggattggggctgtattgttacaagaagttcatccaattgcttattttagtgaaaaattaagtggtcctacccttaactattctacttatgataaggagttgtatgccttactgagagcgttgaaaacatggcaacactatctttatcccaaggagtttgtgatccatagtgaccatgagtccctaaaatacttaaaaggacaaggtaagctaaataaaaggcatgccaaatgggtggaatttcttgagcaatttccttatgttattaaacataaaaaaggaaaaggaaatattgttgcagatgccttgtcaaggagacaccttttgctttctatgcttganacaaaaatgattgggattgattacttgaaaaaaatgtatgaaggaaatgacacctttggtgaaatc

SEQ ID NO: 4496 - DNA, 528 bp, Glycine max
agcttgcttgagcttgcagctaataacgatgttgaaggtttttagcgaatgattgagagggatccttcctgtgtagatgaggtaggactatggtacagtcgtcaaaagggatctaggcggatggtcaatgagctcagaaccccattgatggttgctgctacttatggtagcattgatattctggatctgattctctcactttctggctgtgatattaataaaccttgtggccttgacaagagcactgcccttcattgtgctgcttcgggtgggtctgaaaatgttgttgatgttgttatattgcttctagcagcgggggctgatccaaattctgtggatggcaatggtcatcgtccagatgatgtcattgttgttccttccaagcatgagtctgttagaaacaatcttgaagcacttctttaaactgatgacttcattgcagtgtgtaatttcagggtggacaccgcttcatcaaatgcatattcttcacctttgtcaacattatcagagaatgggtctccttttgca

SEQ ID NO: 4497 - DNA, 591 bp, Glycine max
agcttgaaggcaaattggatgcattggttaacttggtaacctagctggccttgaaccagaaatatgtacctgttgcaagggtctgtggtttgtgctcctctgctgaccaccatacagaccttttcccttccatgcagcaacctggagcaattaagcagcccgaagcttatgctgctaatatttacaatagacctcctcaacctcagcagcaaaatcaaccacagcagaacaattataacctctccagcaacagatacaaccctggatggaggaatcaccctaatctcagatggtctagccctcagcaacaacaacaacagcctgttccttccttccaaaatgctgctagcccaagcagaccatacattcctccaccaatccaacaacaacaacagcgccagaaacagccaacagttgagacccctccacaacctttcctcaaagaacttgtgaggcaaatgactatgcagaacatgcagtttcaacaagagaccagagcctccatttagagcttaaccaatcaaatgggacaattggctacacaattgaatcaacaacagtcccaaaattttgacagctggctttttaaac

SEQ ID NO: 4498 - DNA, 691 bp, Glycine max
agcttcaatcttttacttgtgtttcattcagatgtatttactactttcaaaactcaatacctttatgtatttatgtactttttacacatatttctataggttaaagttatttcattactctcttttttgtctaaaagtggtatatggttatatctaaaaatgacattttgcactcataaagtatttcgaaagatgcatttatttttaccgaacaatttatcttttgtcatgactagtatgtaataaataaataaaaaagaaattttttactcatgttttcttaaaggaaaaagctttcttcactggattgatgaacatgattatctaaaataaatttaaattaaaggaaaaaggcgtgatttttcataatagattttaggatgtcacacgataagcttaaatattttggatttctttttgtctcacactatattgttagaaaaactcctgaattttttcttttgcaaaaatattataagctattggactaattatatctttggtttccaaacttttcttgaaattttacttgtagtccttaaacaaaaatttaataataatatttggtcccctataatattttttctattcaatagtcttaagttctttgttaccaagtaaaaatggttaatttgaataccttaatcaattcaatcattgtattaggccccataactcatttttttttttt

SEQ ID NO: 4499 - DNA, 370 bp, Glycine max
agcttgctgccacggagttttccgactatgcttttgtgtggtttaacaagctacaaaaggagagagcaagaaatgaagagccaatggttgatacatggacggagatgaaaaagatcatgaggaagcggtatgtgccggctaattactcaagggacttgaaattcaagctccaaaaactaacccaaggcaacaagggggttgaggagtatttcaaggaaatggatgtgctcatgattcaagcaaatattgaagaagatgaggaagtaactatggctcgattttttaatggtttgactaatgatatccgtgatatttgtgaactgcatgaatttgttgaaaaggatgatttgcttcacaaagcaattcaagt

SEQ ID NO: 4500 - DNA, 504 bp, Glycine max
  unsure at all n locations
taggaacccaaacttgtagcttcaatgcaaggaaacgtgcttatggcttnnganccccaaaattnggnnnnanaattanaaannnannnnnnnnnnnatttgtttgtaagaatttgggctgccccatgattggtactttgcacctaaataacatgggaaatgattttcaatgctgtgtagatatatgtgtaaatatgaagggcatgaaattctttgcaaaggatgaaggaatattgaggtcacttcctaaatgaatgtatgatagcatgggattcccttttgaatgcaagtatgtgcataatgttaaatatcttgccaataggcataagtgtgagtgaaacaatgaaagtttgtatggtatatatatcttgagtgtgtgtagttagtttgtgatagcaaatgtttaggatataattaagtgtaaattttgacgcaatgccttaaacgtgagaatgtgtgtttcttttaaaatgcatatatatgtatgacaattggaatgtgttg

SEQ ID NO: 4501 - DNA, 244 bp, Glycine max
tggtcataacttttcacatggaggttggcttatgcgcataatatatctagacgctcgaaattgaacaatggaagctcttgagcaattcaaatggtcataacttgtcactccgaagtgggattcaggcgcataatatatctagaatctcgaaaatgaacaatggaagctcttgagcaatttaaatggggattactttttactcggaagggcgattcacgcgcctaatatatcgagacgctcgaaa

SEQ ID NO: 4502 - DNA, 509 bp, Glycine max
agctttgatgtaacatttggagaggttaatgatacaacgagatgatgcgctccatgagaggttggatcaaatggagaatagagaccatatgaattgctcaagagcttccattgttcaatttcgagcgtctagatatataatgcgcctcaatcggacctccgagttaaaagttatgaccatttgaaatgctcaagagcttccattgttcaatttcgagcgtcacgatatattatgcacctgaatcggacctgcgagtgacaacttatgaccatttgaattgctcaagagcttccattgttcaattttgagcgtcacgatatattatgcacctgaatcggacctgcgagtgacaacttatgaccatttgaattgctcaagagcttccattgttcaatttcgagcgtctcgatatataatgcgcctcaatcggaccttcgagttaaaagttatgaccatttgaattgctcaagagcttccatttttcaatttcgagcgtcacaatatattat

SEQ ID NO: 4503 - DNA, 491 bp, Glycine max
  unsure at all n locations
ttgatgcaacagttggagaggttaatggaagaaggtatatctncnctnnatnanangnnnnatnaaatgganaatanagannttccctnnaaaagaaaggaggagaagagggaatgatgatgttcctagacaaaaccgaattgatggtattaaactcaacattcctctctttaaaggaaagaatgatccacaggcctacttggaatgggagatgaaaatagagcatgttttctcatgcaaaaactatgaggaggaccaaaaggtcacgcttgccgccacggagttttccgactatgctcttgtgtggtggaacaagctacaaaaggagagaacaagaaatgaagagtcaatggttgatacatgggcggagatgaaaaggatcatgaggaagcggtatgtgccggctagttactcaagggacttgaaattcaagcctccaaaactaacccaaggccacaagggggttgaggagtatttcaaggaaatggatg

SEQ ID NO: 4504 - DNA, 458 bp, Glycine max
agcttctgtccctgagaaactggtttccagaatacaacagggagtgaagattgctgaaaaccctagccttgcaacaagtcctagggaagtagatacggagatggacaagaaaatctgcagtattgtgagtagcattttgaaagacgcctctgtgcctgaagctgatgaagatgtcccaacatcgtccaccccaaatgtttctgtgcctgatgtcaataaagatgttccaacatcttccggcccaaatgctgaagtactctcttcccccagcaaagagagatcaacagaggaagatgatcaagccgcagaggagactcctacaccacgggcaccagaacctgctccaggtgacctcattgacttagaagaagtcgaatccgatgaagaacccattgcaaacaggttggcacctggcattgcggaaagaatttaaaacagaaagggaaaaacccctctta

SEQ ID NO: 4505 - DNA, 484 bp, Glycine max
agcttgtacacctctgtttctctacctttcattacaaacttttgtggttgagtgacaaaaacttcttcttctagtgagccattaagaaatgcagattttacattcatttggtatacttcccagcaattgtagctagccattgctattacaagtctcactgtttccaacctagcaacaggggcaaatacttcatcataatccagaccttgcttctgtagaaatccctttgcaacaagtctggctatgaactttgttacttctcctttaggattcaacttagttttgtagacccattttactggtatggctttctttcctgttggtagctttgtgagactccatgccttgttttttctaatagacctcagctcttcttccattgcttcaacccaatgggagtgcttcaaagcttctttcacgcccaataggttccatctcagcaagtaaggccatatggacaaaatcaccatcaactgtaatcgag

SEQ ID NO: 4506 - DNA, 384 bp, Glycine max
  unsure at all n locations
taaacattcaatttcgagcgtntngttatattactggcccctttngnnnnnnnnnnnnnnnnattgnnnnngaannnnncnnnnnttaaacattcaactttgagcgtctcgatatattacgggactcaatcagacatccgagtaaaaagttattgccgattgaattggctcagaggttcaaaattcaatttcgagcgtctcgatatatttctggactcaatcaaacatcccactaaaaagttattgccgcttgaattggctcataggttcaacattcaatttcgagcgtctcgatatatttcgggactcaatcagacatccgagtaaaaagttattgtcgcttgtaatggctcagaagttcaacattcaatttccagcgtcccg

SEQ ID NO: 4507 - DNA, 504 bp, Glycine max
  unsure at all n locations
agctttaagccaattcatacgacaataactttttactcggatgtatgattgagtcccgtaatataacgaaacgctcgaaattgaatgtttaagctttgagccaattctaacgataataactttttactcggatgtccgattgagtctcgtaatatatcgacacgctcgaaattgaatgttgaagctctaagcctattcaaacaacaataacgttttacttggatgtccgattcagtgacgtaatatatcgggacgctcgaaattgaaagttgaacctctgagccaactcaaacgacaataactttttactcggatgtccgattgagtcccgtaatatatcaggacgctcgaaattgaatgttgaacctatgagcctattcaaacgacaataactttttacttggatgcctgaatgagtcccattatatatcgagacgctcgaaattgaaagtttaaactttgagccaattcaaacgacaataactttttactcngatgattgat

SEQ ID NO: 4508 - DNA, 509 bp, Glycine max
  unsure at all n locations
tgaaatgcatnattnttatgagtaataaatagngtnaagnatannnannnaannanaananngncnngnnnnnanannnnncaccaaaactcataattctagaaggaccaaacaaattcatatgtaacaattgtaatgattgagtagttgaaacaatctttttggatttgaatgaaactctagtttgttttcccttttgacatgcatcacataatctatctttttaaaatttcaatttaggcaaaccaacaactaaatcttttgaaattaatttatttaagtgttccatgtttatgtgagcaattcgtttatgacatagccatggatcatcatctttgctaagaaaacattgattattatatagtttatggcttaaagttatcatataaacattggtgactctataccctatatgctntatattagtaacatgcttatgctctatgagacaatttttagaatcaaattatactagatagcctttatcacataagtgactaacactaagc

SEQ ID NO: 4509 - DNA, 202 bp, Glycine max
agcttattctgattgtagggtcgtaggagagtataacaagcacccccaaacactcaggaacttataatctgggtgtctgttgaacaatttctgataaggcacctcttgattaatagaggatgatggaaggcgattgataaggtacatgctagaagtaacagcatggtccccgtccacaagagtcatagagacttgcgataac

SEQ ID NO: 4510 - DNA, 402 bp, Glycine max
agcttgtaatcgattacatcatttgtgtaattaccaaacacaaaaaattcatttttcaagtctaaagagtcacaactcttcaaaaacaaactgtgtaatcgattaccacattcatgtaatcgactaccagtaaggaattttcgaaaataactcccaatagtcacaactgtttaagaagtttttgaatggccatcaaaggcatataaataggtgacttgggatatgaaattccttagagtttttctgaacaacattgtcttatcctctcaaaaccaaattgtcttatgactctcaaaatattccttggccaaaacacttgccaattcaataaggaatcttgatcaatctttaattgtaatatccttctcttaaagaaagaaaatccttcttcttcttattcaa

SEQ ID NO: 4511 - DNA, 372 bp, Glycine max
agcttctattctgaatttcaagcatctcgatatactacgggacacaatcgaacatccgagcaaaaagttattatcgtttgattttgctcacagcttctattatgaatttcaagcatctcgatatactacaggacacaatcggacaaccgagtaaaaagttattgtggattgattttgctcaaagcttctgttctgaatttcaagcgtctctatatactacgggacacaatcagacatccgagtaaaaagttattgtcgtttaattttggcagaacatctgttttgaatgttcaaacgttttggtatactacgggacacaaatggacattcgggtaaaaaggtattggcccttgaattttgctcagaactttt

SEQ ID NO: 4512 - DNA, 553 bp, Glycine max
  unsure at all n locations
atagaatagctaagcttcttacaggattaacttgatctgtaagtnttaaaaatcaactttatcnntaaaaaaanaannnannanannaataatnnnancatttnnnnccggagatgggtgcaccagcaatgatactaggtgtacctaacaacactctcaactaattcaactaattcatactttatgctttattggactctcattacaattttctaattcattgataatgtccaaaactaaattaaattaataaaataatactgaatgaacgatgaaactaaaagtgtttgataaattattttatatgaatcttgtataaatcattttcaataaaaaaaattattgaatttttatctatttctaattaagtattgtttattttagatggtgaacctaacactctttttaagtaaataatactatccctctattttgttaacgttatacagttaaagggtgacagtgtaaagtgtaaggataaaaaagagaggaaagtttgtataaatcttacgaaattttaaaagtatcaatataatttacttacttttttaat

SEQ ID NO: 4513 - DNA, 477 bp, Glycine max
gcatgcaagcttgtgccaaagttaccctgccagtcgtggataggatcttagctttccatttagtaatttttcgccagatatttctaatatggggtttaaacagctactcatttctcttatgatcctatactaggaaacccaaataggaatcaagattattagtaatagtcacctgaagctgttgactaagctccctcaccttagcttatgagacattagttgagaagagaacctttgatttgctcatgttgatcttctggctagatgcattagcaaaagggtttaatatctggttgacttccccagctgctacactgaagcttcagccaccaaaatcagatcatccgcacagaataagtgtgagacattaacccaccgagaatggatgccaggtaccattctgaactgaatcttggatgagatgtgcccatctctgaatacacaacacaaatattttagggagagaacgggtccccc

SEQ ID NO: 4514 - DNA, 353 bp, Glycine max
agcttgaggacacatgaacgaaaacgcaattcatggggctttgaaaaaggataagtatggagaattgcactaaccaatcactacgcatggctccaaactcaaaggtggaggactcatgaacgaaaactcaattcatgggctcccaaaaagggttgagaatggagaattgcactaagcaatcactacccatagctccaaactctaaggtggaggacacatgaacgaaaacgcaatttattgggtctccgaaaaaggttgagaatggagaattgcacttagcgatcactacgcatagctccaaactctaaggtggaggacacctgattgaaaacgaaattcatggggcttccaaa

SEQ ID NO: 4515 - DNA, 550 bp, Glycine max
  unsure at all n locations
tgtaatcgattacacaagtnttgtaatcgattacctgaggggattnttanaaaataatttnnaaaagtnaaatttattcnnnngccccatgaatggccatcaaaagtgacttggaaacacgaatttaaagagagttttcattgcccaaacagttttatgctctcaaaagattaagagtttttctgaactgaaatgtcttatcctctcaaaaagattccttggtcaaccacttgcatattcaataaggaattttgattgatcttcattgtacaatctatctcttttaagagagatttcttcttctcttcttcttatttctgaaaaaagatttaagagaccgtgggtctcttgttgtagagaattcttgaacacaagggaagggttgcccctgtgtggttcagactttgtagaaggagttttacaaagaagagtgaaaatctcaagtgtttgcttgaggactagacgtangcacgagaagtggccgaaccaatatanatcaaagttgcatttctctcttctctaaacttctttttttattggtatttatctt

SEQ ID NO: 4516 - DNA, 563 bp, Glycine max
agctttaatgaatttaattttttttatattaaattttcatttttaattcaaatattaactacctatattttgaaattaattctttttgatttattaaagaatttctcttttccactaaagctaaactacccattccattgctagtcttgtgttttacttgaaatgtttgaatattttttcttgtatcttttgcatgtaatgattttttgttgttattagcttgttaattatacctttgattgagaatgatggtgtgtttagaattagattagattataacttttgcatagtattcattaattctggattataatttttatttttgtgcatcttatctttaatttctatatagtataaattataaatttttgaatctataatctctggtatagtggttatcctgctacacatggtatagtgtttttggggccagccatgccttatcatgatcccagatttatgatattaccctttcatttatttctaagttggatgacttggatctaaactatcatcatcttttgagctgcagttaaacatgtggatttaatattgataaataa

SEQ ID NO: 4517 - DNA, 535 bp, Glycine max
agcttcaggctgctcaattgctccaggttgctgcatggaagggcaaaggtctgtatggtggtcagcagaggagcacaagccacaaacccttacaacaggtacatatttctgatttaaggccagctgggttaccaagttaaccaatgcatccagtttgccttcaggcttcttagtctcagatgatgcagctgagtttgtagctacctcatgcactcctctaatgactatggcatcatttctggcgctaaactgctgagagttggaagccatcttctcaattaaatttctggcttcagcatgagtcatgtctccaaaggctccaccactggcagcatctatcatacttctctccatattactgagtccttcataaaaatattggagaagaagctgctccgaaatctgatggtgaaggcaactggcacataattttttaaatcgctcccagtactcatacgggctctctccactgagttgtctaatacctgagatatctttcttgatggctgtggtcctggaaacacggaaaaatttt

SEQ ID NO: 4518 - DNA, 577 bp, Glycine max
agcttagaatgcagaagaagcagcattcaatttaataatgttctttaaacatgccagacaaaattgattgcaataaaataaatgagataagagaagagagaatgcaaacatagttttatactggttcggcaaagtccgtgcttacttccaatactcaagcaacccgcttgagattttcctttctctttgtaaattcctttacaacttctgaaccacacagggacaactcatcccttgtgttaaggaattcttacaacttaagagaccctcagtcccttaatcaatctctttgaatgagaagaaagaaagaagaattctctcttgaagaaaaggatattacaattgaagtccatggagaaactcttaatggatttgcaagtgtttgcctaagagtttcttttgagagagcatttggcaatgaagttagatgtgccatcattttcttctatttcttaaaccctttttgcaccattttaattattgattagtcttaattgcaaattaattaggcagttttattatttgggctcatttaactaatttgatgtttttatctaattttagaaataatgaaaca

SEQ ID NO: 4519 - DNA, 541 bp, Glycine max
  unsure at all n locations
tctcgatatattatgtgcctgaatcggacttnngttnnaaaaannnnnnnnannnnaatnnntnnaaannnnnnnnccccnnnttcgagtgtctcgatatattatgcgcctgaatcggacttttgtgtgacaagttatgaacatttgaatttctcgagacctttcggttttcaattaagatcgtctcgatatgtgatgcgccagaatcggacttccgtgtgacaagttatgaccattggaatttatcgagaccttccgatcttcaatttcgaaggtctcgatatattatgtgcctgaatcggactttcgtgtgacaagttatgaacattggaatttctcgagaccatacgttgttcaatttcaagcgtctcgatatattatgcgcctgaatcggacttccgttagacaaggtatgaccttttgaatttctcgagagcttccggtttttaatttagagcgtctcgatatgtcatgcgcccgaatcagacttctcgggtgacaagttatgaccattggaatttttcgagagctttcgatgttc

SEQ ID NO: 4520 - DNA, 389 bp, Glycine max
agcttctcgatatattatgcgcctgaatcagacttccgttacaaaagttatgaccatatgaatttctcgagagccttcgttgttcaatttcgagcgtcttgatatagtatgcgcctgaatcggacttccgtgtgataagttatgaccatttgaatttgtcgagagcttccgattttcaatttagagcttctcgatatattatgaacctgaatcggacttccgtgtgacaagttatgaccatttgaatacctagatagcattcgttgttcaatttcgagcgtctcgatatattatgcgcctgaatcggacttccgggtgacaagttatgaccctttgaatttcttgagagcatccgttgttagatttcgagcgtctcgatatattatgcg

SEQ ID NO: 4521 - DNA, 394 bp, Glycine max
atgatattgcagaattttagaacaaatgcacattcatggacaagattctacaggaaaaagagaaggaagcaatgaagatccaccagtagaagtcaaagcaaataatgattttccaagagagtgaaaaacttcaagagatcatccccttgacaacatcattggtgacatctcaaaaggggtaactactagacactctctcagagatttatgcaataacatggcttttgtatctatgatagaacctaaaaatttaaatgaagccataatagatgaaaattggataatagctatgcaggaagaactaaaccaatttgaaaagaatgatgttgggagttagttgaaaaacctgaaaactatccaatcattggaacaaaatgggttttttaaaataaat

SEQ ID NO: 4522 - DNA, 464 bp, Glycine max
  unsure at all n locations
tccgttattcaattttgagcgtntngatatatcatgnggccccttntcannnnnnnnnnnnnaaannnatggnngnnngaannngcccaaaaattcagtggtcaatttcaaaggtgtcgatatatgatacacgtgaatcagacatccgagagaaaagttatagccatttgaatttctcgagagcgtctgttggtcaattttgagcgtctcgatatatcatgggcatcgatcatacattcgagtcaaacgttatggccgtctgaatttgccgagagctttcgtggtcaatttcaagggtctcgatatatgatgcacgtgaatcggacatccgagtgaaaaaatatagccttttgaatttctcgagaggttccgttgttcaattttgagcatctcgatatatcatgggcgtcgatcatacattccagtcaaaagttatggccgtttgaatttgccaaagcttccgt

SEQ ID NO: 4523 - DNA, 348 bp, Glycine max
  unsure at all n locations
ttgagcagaatnaaangacaataaatttttactccnanggnnnannngnnnnnngnnngnatnnagaagttcgnnccccnnanaaaagctctgagcagtatcaaacgacaataactttttactcggatgtccgaaagaatcccgtaatatatcgagacgctcgaaattcaaaattgaagctttgagccaaatctaacgacaataactttttactcggatgtccgattgtgtcccgtaatatatctagacgcacgaaattcaaaacagaagctttgagcaaaaatcaatgacaataactttttactctgatttgcgattgtgttccgtagtatattgagacgctcgaaa

SEQ ID NO: 4524 - DNA, 622 bp, Glycine max
agctttgatttcctttgttccggaaacctttcttttctcatgtgcacccaaacccaatctccgggttcaaagacaaccttctttctccctttgttggcttgtttaacatagcttttatttttcctctcaatttgatctttcactctctcatgaagcttcttcacatagtccgcctttgcttgaccttctttatgcttaaaaacagaaacattaggcataggcaaaagatcaagaggagttagtgggttaaaaccataaacaacttcaaaaggagaacaattagtggtgctatgaacagctctattgtaagcaaattcaacatggggtaaacaagtttcccaagtttttaagttcttcctcaaaattgtcctaagcaaagttcccaaagtcctattaacaacttccgtttgcccatcggtttgtgggtgacaagtggttgaaaataacaatttagtgcccaacttgctccacaaagtcctccaaaaatgacttaggaacttagagtccctatcactaacaatgctctttggcaaaccatggagtctcacaatctccttgaaaaacaaatcagccacataggaagcatcatcaactttttacatggaataaaatgagccatttt

SEQ ID NO: 4525 - DNA, 415 bp, Glycine max
  unsure at all n locations
atgtttcatttgagttcaatgctatggcacagagatgggacaccatcaaagtggacgacctcaagatacaaaggaatgaatttgtggctgtgaactgcatgtttcagtttgagcatctgctagacgagactgtggtgttgaataatcccagggatgctgttttgagattgattaagaatgcaaatcctgacatatttgtgcatggcattgtcaacggatcctatgatgtaccattctttgtgtcatggttccgggaggctctctttcattacactgcattgnttgacatgcttgacaccaacgttgctcgcaagaatccatgaggttgatgtttgagaaggaattgtttggacgggagatagtgaacattatagcttgtgaaagttttgagaggggtgaaagagcacaaacatac

SEQ ID NO: 4526 - DNA, 408 bp, Glycine max
  unsure at all n locations
tatgctgcaaanatttataatagaccttcttcgcannnnannnnnnannnannaannnntnnnnnntttnaannnntccccnnaattcatgttggaggaatcatccaaatctgagatggacaagtccttcacaacaacaacagtctgtccctcattttcagaatgatgctgatccaagcaagccatatgttcctcttccaatacaacaacatcagtcacaacaaagacaacaagcaactgaggctccttctcaaccttccttagaagagttagtgaggcaaatgaccatccagaatatgcaatttcagcaagagacaagagcctccattcagagtctgacaaatcagatggggcagatggctactcagttaaaccaagctcagtcccaaaattttgacaaatgccttt

SEQ ID NO: 4527 - DNA, 445 bp, Glycine max
  unsure at all n locations
catcagaccacttccagggtgctggaactacttcacatggactngatggggcctatgcaagttgaaagccttggaggaaagaggtatgcctatgttgttgtggatgatttctccagatttacctgngtcaactttatcagagagaaatcagaaacctttgaagtattcaaagagttgagtctaagacttcaaagagaaaaagactgtgtcatcaagagaatcaggagtgaccatggcagagaatttgaaaacagcaggttcactgaattctgcacatctgaaggcatcactcatgagttctctgcagccattacaccacaacagaatggcatagttgaaaggaaaaacaggactttgcaagaggctgctagggtcatgcttcatgccaaagaacttccctataatctctgggctaaagccatgaacacagcatgctacatccaca

SEQ ID NO: 4528 - DNA, 453 bp, Glycine max
  unsure at all n locations
tgtagggttaaagtttcacgaatgtcacgtgctcatgcaacaattgttagtcgtggctatacgagacatcttgccaaacaaagtcaggttcacgataactcgcttgtgctttttcttccatgctatatgtagcaaagtgattgatccagtaatgtttgatgagttggaaaatgaggccgcaattatactctgccagttggagatgtattttccccctgctttctttgacatcatgattcacttgattgtgcatctggttagagaaatcaaatgctatggtcctgtttatctacggtggatgtacccggttgagcgatacatgaagatcttanaagggtatacaaagaatctatatcgtncggaagcatctattnttgagaggtacattgcagaagaagccattgaantttgttcagaatacttagagaaggctaaagctgttgggctttctga

SEQ ID NO: 4529 - DNA, 452 bp, Glycine max
  unsure at all n locations
cccggatctctaagcaccgcggctgcagctgatcaattgaggagagatgttcggaagtattcaactaccacaggaaagaaagttgttggagcaaaatgggtctttcacaacaaactatatgataatggtaaagttatgagaaacaaagcatggttagttgctaaagaatactcacaagaagaaagtatagactacaaagaaacttatccacctgtagcatgtctagaggcaatacatatcttactttcatttgcagcttataaaaatatgaagctatatcaaaaggacgtaaaaaatgcatttctaaatggcttaattcaagagtaagtttatgttgaacaatctccatgctttggaagtgaaacctttcctcaacatgttttcacactcaacanagccctatatggacttaagcaagctcctagagcttggtacgaaaaactaagttcatt

SEQ ID NO: 4530 - DNA, 387 bp, Glycine max
  unsure at all n locations
agctngaagctcaagaaaaagcttgaagatgttttagaagaagttntggcttttagatgttattagcagcttcaactaccccattcatcttgggcctgtatggcgtggaattatggtgttggatcctgaaatcctcacacatttccttcatcattttgttgttcagattggtggcattatttgtgataatcttcttgggcaacccataccggcagattatctctttcttaatgaacttgaccaccacactccttgtcacactggcatatgaagcagcttcaacccatttggtgaagtagtcgatcgcaaccaaaatgaagcgacgtctattcgaagccttggcctcaatagccccaatcacatctattccccacatagagaatgcct

SEQ ID NO: 4531 - DNA, 429 bp, Glycine max
agcttgttgtatagaaatcctcgttgaatgtgctttttacaccgaacaacatttcatttgtttcaaactgatcccatcccctagaaaaataaaaaaataattgtcaacgtaaaacaaaaacagaggagctattaagaactgcaataagaaacaaatgacaaaaacctggatataaataatggtagtagcaatgtcatatattccattaagcctcatcttaataagtaaagacctagcacaaaatcccctatttcagttttggaatgtcagaataattcataaccagattttatgccaatattctttcaataattccgagggcgagccctggtgcagcggtaaagttgtgccttggtgacttgttggtcatgggttcgaatccggaaacagcctctttgcatatgcaagggtaaggctgcgtacaacatc

SEQ ID NO: 4532 - DNA, 395 bp, Glycine max
  unsure at all n locations
tgtatttcttgtttgactacatataaggatatctccacaatctgttagtcttcaactaatttgctgttctctctgccagaaaataaaacatcaatacagagatagggctgctgatagaagaatattgcatggtggcttccgcatgggtccaggacagaagaatctgtcggacatttataatacaccatcttcacctcgtgatgattgtccacaagaagctaccgccaacgccttggagatgtcatttggagctggtagttatgctagacaacttctacnaagcatgggttggaaggaggtatcttcttactttcttatcatcanattactcccttttattttattgaagattctaagaactgctaatataatttcaactcctatcacaactttct

SEQ ID NO: 4533 - DNA, 413 bp, Glycine max
  unsure at all n locations
gcaagcttataatatatcgaanatgaacaacggatgctctcgtgatattcanatggacataacttttcacactgaggtccgattcaggtttataatgtctcgatactctcggggtaagcatcgcaccctctctagaaattcaaatggccattacttttcacacggatgtccgattcgggcgcataatatgttgagaggctcgacattgaacaacggacgctcttgaaactttgattggagcttaactggacacacggaagtacgattctggctactctcatgtcgagacgctctgtctgaaaacccttgatgccttagagaaaaagagatgcgcttttcttttacactatttaagcaatgccacatgtctccatttgagtggagcaaaaagggcccactttccctctttgaat

SEQ ID NO: 4534 - DNA, 326 bp, Glycine max
  unsure at all n locations
ctaagcttaatcggacattcgtgtganaagttatgaccatttgaatntctcaagagctttcgtgttcaattctgagcctctctacatattatgcgcccgaatcggacatccgtgtgaaaagttatgaccatctgaatttctcaagagctttcgatgtgtaatttcgagcgtatcgatatattataagcccggatcggaactcagtgtgaaaagtcatgaccatctgaatttcacgagagcttccgttgtgcattttcgagcgtctctatatgtgatccgcctgactcgcacatccgcgtgaaaagctatgaccatctgaatgtctc

SEQ ID NO: 4535 - DNA, 424 bp, Glycine max
  unsure at all n locations
agcatacctgcatgcatgcangcttcaactagtaaagcactttaccaactcgtgatagaatttgaaattgcccaaaataacgggaagatgatttgggattaattcatcgagccataattagctatctataagggcacaacttaacaaacacccaatccccctcagtaaagaatgtggccccatgatgcttatcaacaaccttattcatggattgttgggcacaaagcaaatgagcttttaattgatgcatagccttgtccctgtcaaacaatactgacgtgatagaacccactaatgtctctctggccaaaagcatagcacaaaaggaggtgatcaaccatagacgacctcgaagggagtcttctcgatggctgaatgcaaacaagtattttgtaccaatactctacccacggaagtcataaat

SEQ ID NO: 4536 - DNA, 364 bp, Glycine max
  unsure at all n locations
acggaagctctcgaganattcaaatgctcataacatttcacacggatgtccgattcagatgcataacgtatctagatgctcaaaattgaaaaacagaagctctcgagaaattcaaatggtcataacttttaacatggatgtctgattccgaagcataacatatcgtgacgctcacaattgaataagagaagctctcgagaaattcaaattgtcataaattttcacacggatgttcgattcggggataaaatatgttgagatgcttgaaattgagagataaaagctctcgtgaaattccaatggtcataacttttcactcggagttccgattcaagacacttgaaattgaccaacggaagctttt

SEQ ID NO: 4537 - DNA, 435 bp, Glycine max
  unsure at all n locations
agctntgatggtgtcgagaagaaatcacatgtttgtcatcatcaaaaagggggagaatgtgaatgtatgtatacatgattntgatgatgtcaaagaagaatctaacaaggctgcttcaaatgataagcatttgcttcaagaataattcaagattgcttcaacaaacaaagccttgtttcaagattcactaaagaccaagccttgccttaaaacaaagtgctttcaagacatgcaaggctctggtaatcgattaccaggaagtgtaatcgattaccagaagacagggttgagaaatagctgttgaaaaatgttttgaatttgaattttcaacatgtaatcgattaccatatgtctgtaatcgattaccagcaacgaaactttggaaattcaaattcanaagtcatatacccttcaaatataactgtgtaatcgata

SEQ ID NO: 4538 - DNA, 451 bp, Glycine max
  unsure at all n locations
gacctcagtgtganaagttatgaccactttaattttccgagagcttccgttgttcattttcgagggtctttatatgtgatgcgccttaatctaacatccgtgtgaaaagttatgaccatttgaatttctcaagagcttctgttgttcaatttcgagcctctcgacatattatgcgcccgaatcggatatccgtgtgaaaatttatggccatttgaatttctcgagagtttctgatgctttattatgagcgtatcgatatattataagcctgaatcggacatccgtgtgaaaagttatgaccatttgaatttctcaagagcttccgttgttcaatttcgagcgtctcgacatattatgcgcccgactcggaatccgtgtgaaacgtatgaccatctaaatttcgcgagagtcttcgacgtttaatttcgagcgtatcatatattataagcct

SEQ ID NO: 4539 - DNA, 417 bp, Glycine max
  unsure at all n locations
agcttatatatatcgatactctcganattattcatcggaagctgtcgagatattcaagtggccatgactcttcacacggatgtccgattcaggcgcatagtatgttgagacgctcgagattgaactacgtaagctcttgagatattcacatgggcataacttttcacactgatgtccgattcaggcttatactatatcgatacgctcgaaattgaacatcggaaactctcgagaaattgaaatggtcataacttttcacacggatgtcctattcggacgcataacatgtcgcgaggctcgaaattgagcaatggaagctctcgagaaattcaaatgcgcataacttttcacacggatgtccgactcaggcatataatatattgatacgctcgaaattgaacatcggatactctcgag

SEQ ID NO: 4540 - DNA, 445 bp, Glycine max
  unsure at all n locations
tctatagaacgttcattcctaatntctctgcaatngcatcacctctcaatgagatagtgaagaagaatgtggcatttacctgcggtgaaaaacaagagcaagcctttgctttgctcacagaaaagcttactaaggcacctattctagctcttcctgacttttctaaaacttttgagctagaatgtgatgcctctggagtgggagttagagctgttttgttacaaggtgggcaccctattgcttatgttagtgaaaaacttcatggtgccacccttaactaccccacctatgataaagagctttatgccttaataagagcacttcgaacttgggaacattaccttgtttccaaggaatttgtcattcataatgatcatcaatcacttaagttcattagagggaaaagcaagttaaacaaaaggcatgcaaaatgggtagagtacct

SEQ ID NO: 4541 - DNA, 433 bp, Glycine max
agctagctgccacggagttttccgactatgctcttgtgtggtggaacaagctacaaaaggagagagcaagaaatgaagagccaatggttgatacatggacggagatgaaaaagatcatgaggaagcggtatgtgccggctagttactcaagggacttgaaattcaagctccaaaaactaacccaaggcaacaagggggttgaggagtatttcaaggaaatggatgtgctcatgattcaagcaaatattgaagaagatgaggaggtaactatggctcgatttcttaatggtttgactaatgatatccgagatattgttgagctgcaggagtttgttgaaatggatgatttgcttcacaaagcaatccaagtagagcaacaattaaaaaggaaaggagtggctaagaggagttttaccaactttggttcctctag

SEQ ID NO: 4542 - DNA, 447 bp, Glycine max
  unsure at all n locations
nntgggactctgagcttgaggagggtagcaatggtcaacaaccaatgccaacaaggaggtgcagccattgcttggctcagaggaccccgcagtggagggcaggaccattaggtccaaagacactatgcaatgcatgtggagtgaggtacaagtctggtaggttgctaccagagtataggccagccaagagtcctacttttgttagctacttgcactccaattcccacaagaaagtcatggagatgaggatggctgttttctccaccatttctagtgagcagtagtagtggttgttacttattagaggtatatttctatgtaaaaaaaaaaaatcaaacttcaaattttatgaacaaaaaactatttggcaaacagagagatactgttaaggggagagtgcttaatgctatgatngattataggcacatttattatatgacttattat

SEQ ID NO: 4543 - DNA, 426 bp, Glycine max
  unsure at all n locations
ggcagggttaaagtctcacgattgtcacgtgctcatgcaacaattgttagttgtggctatacgagacatcttgccaaacaaagtcaggttagccataactcgcttgtgctttntcttccatgctatatgtagcaaagtcattgatcctatgaagtttgatgagctggaaaatgaggccgcaattatactgtgccagttagagatgtattttccccctactttctttgacatcatgattcacttgattgtgcatctggtcagagaaatcaaatgttgtggtcttgtttatctacggtggatgtacccgattgagcgatacatgaagatcttaaaagggtatacaaagaatctatatcttctagaagcatctattgttgagaggtacattacagaagaagccattgaattntgttcagaatacattga

SEQ ID NO: 4544 - DNA, 427 bp, Glycine max
  unsure at all n locations
agcttgaggatagagacttcccaagctatttatctctacttggatctattaggaatgaaggctcctacccttatttatactactccacctccacaatgaatggtggagattacatgtatcctagggtggagattaattctctagaatgctccacacattctaggagtctctacactcttctactctttttcatatccttccataaggttccagaaggttccacacatctctagaatattccagaggtttccacattctttcacaagcttctagagagttttacactactctagagttctccaggacgttctagaaaattctacacttttccagaaagctccaaaattttctagaacctctcgaattaaggagggatcccaacactttccagcaaatggtattcgaanaggctctgtgcaaaaaatgc

SEQ ID NO: 4545 - DNA, 439 bp, Glycine max
  unsure at all n locations
agcttgaaattcanaataagaagctcctagcatatccaaacgacaataactatttactcggatgtccacttgagtcccgtaatatatcgagacgctccaaattcaaaacggaagctcgtagcaaatgcaaaccgcaataacttttaactaagaagtccgattgagtcccgtaatatatcgagacgctcgaaattgaaaacagaagctccgagcaaattcaaacgagaataactatttactcaggtgtccgactgagtcctggaatatatcgagacactccaaattgaaaacggaagctcttatcaaattcaaacgacaataacctttntctcagatgttcgattgagtcccgtaatatatcgagactctccaatttgagaacggaagcccttatcaaattcaaaagacaataactttntactcggatgtccgattgagt

SEQ ID NO: 4546 - DNA, 338 bp, Glycine max
  unsure at all n locations
nttatccatggcttcatatggtggtgagcttcttcttgactcatcttctccttgaagtggcgtctccaatcatctttcttccttctccattccactgccatgatcttcaagaagcaaaggactccattgatgaagaagattcaaggcctacacaccccttgatggaagcttgcttgtgaagcttctatggaggctggatctttgagctgcaatgaggtccctcaatggtgattttacacgatggagatgcactggtagataaaggagatgacgtgagaggaagcaccttccactagggagtatgccatggaacaaagagcatgaccgccatgaaagtg

SEQ ID NO: 4547 - DNA, 448 bp, Glycine max
tatccatatcacacacagtcgaggtagatttacaattggcatcctcatcacttgtgtcacattcttcattgcattgcacatccggttcttccttcaaacttcaccaccaccatcatcatgggaaagttctatcttcaacaccactcacaatgagctcaattccacggtccataagcttggttcctcggtcacgtttcttccactcaaggatctccgttatgcacgtgcacctcttgaaggccacacatggttcatgagttccatgtatgacacacatgaagttggtgaggtccaataccagcaattcccatcagaaccatcacatggtaagcttctatgtctcaaaggatgcgacacgcatgtcgggtcatggaactcctatgctttggcatggcctgaggcattgccttataacaccaccttcatgaaggttaacttttgtgtcata

SEQ ID NO: 4548 - DNA, 440 bp, Glycine max
  unsure at all n locations
agctngaagactttgtttcaggactttngctttctctcttttttgccattagtgggcttaaaactaacctagggctcatccatggctcatacacctgggtaattcttattatagtcatttttttggcctgccttggtaaagttgttggaaccattttggttgcattgttttatgaaatgccaatacatgaaggagctgcccttggtttactcatgaacacaaaaggcctcgttgaaatggtcgtgcttaatgttgggaaggaccagaaggtgctaatactataatcaataatgttatattatatccttctattatcttcaatacataaagcattcaatactttgtttaacaaatatgaagaaaattatatgaggagaattatgctagtagctcaatcaattcctctctagatgagtggtttatacatgtngatcatttac

SEQ ID NO: 4549 - DNA, 458 bp, Glycine max
  unsure at all n locations
gggcatgtcanaaatatgcatgagggccaaactaggagaaattattgtatggtctggtatcactatggtcctggccaattttctcgtgatatataaccaagttttattaacattttcttgtaattggaaaaactcggttacacatcatgtggagattgattaggattcaggactaaagatatgaggtggagtcacatcatacaataatttctccgaaaatagagaaatggaagaaacatattgaggaaaaaataagttatatttataaaaaaatattctttaaattgtaaaatggaaacctttatttggtggctgactgatttgtaggtcacactttggagcagccttctcaggcatggcatatggctntttaactagtccaatacttcagttgaatgattcatcatcaggaactggtcaagaaggacttaaacttgttagaaaatatggtgattctt

SEQ ID NO: 4550 - DNA, 409 bp, Glycine max
  unsure at all n locations
ctactcttgttgactgttttcaagaaaaggtcttcttggttgcaaacactaaacacaagggaccaatgttccttgggttcattgcaagaagcaggatttacttcttggttgatcactggacacaaaagaccaacatcttttgggttcattgcaagaagtgggtacaacttcttggttgttatcactggacacaagggaccaacgttccttgtggttcattgcaagaagtgagaataacttcttggttgtaatcattgaacacaaaggaggggattcctttgtggttcattgcttgtcaaggattttacaaggatagtggaaatctcaagcacgttgccttgggattggacgtacgcacgggttgtgtccgaaccaatataaatccgngtttgcattctctcttccctta

SEQ ID NO: 4551 - DNA, 442 bp, Glycine max
  unsure at all n locations
agctnggtgatggtcataaggtgataacaaatgtagtgtgtataggggtcaatatgaagatggngggggattgaagtgattgtggatgcgttggtgttggagctagggggaatggatatggagttaggagttgcctggttaagcactcttgggaaggtgattatggattggaaggccatgactatgcaattttcttatgaaaatgagttggtgaaattgcaaggtcaaggcagtaaggtggtcagacaatgttatttgaactcctatcttgaggatactcatagcagaactgagctgggttggtggtgggttcatctacagtcaatggaagcaaccaagtcagtggttcccaaaggcttaaaacctatactagaagaattccaggaagtgtttggaaacaacattcagctacctcctgagaggagtcaggtgcatcggatta

SEQ ID NO: 4552 - DNA, 452 bp, Glycine max
acctttcatcatggcatgttgacataagctcaatagttgagggtaaaatttgtcaaaaaagaaataaaattcgacaaaaatataagagtttgagataaaatttgtcaaataaataatattatgatcttattaaaatgtttaatggtgcttaattttaaaaattttctaagttttctaccataggagctctttttttcaccccatccatgttgtcacatgtgggtgaaaagaggaaagagagggatgggatttctcttgctttaggcataacgggccaaagtgggaggcccacacgaagggttattagctcagtagtaaagtgtgtccttgataattgtgtcggcttggagtggagtgagacatgtcattgaatagcaaggagatagccacttcgttatgaaattagaaaagttaagagcccttcattcatttggataatttcgaatgaagat

SEQ ID NO: 4553 - DNA, 397 bp, Glycine max
agcttcaagaaaaagatggcctcagcaaactctttatttccagaagggaattctatcaatagacctccaatctttaatggagagggttaccattactggaaaacccgaatgcaaatttttattgaggcaatagatctaaatatttgggaagccatagaaatagggccttatatacccaccacagtggaaagagtttcaatagatggtagttcatcaagtgaaagaataactatagaaaaacctagagatagatggtctgaagaggatagaaaacgagtacaatacaacttaaaagccaaaaatataataacatctgccctgggaatggatgaatatttcagggtttcaaattgtaagagtgctaaggaaatgtggaacactcttcgattaacacatg

SEQ ID NO: 4554 - DNA, 437 bp, Glycine max
  unsure at all n locations
agctgggtccncaaggctntatgaagactcttctcaaaatctagaggtaaatctgggatctctatcagaaactatgctagaaggaacaccgtgtagtctaactatctcactgacgtacaagctagtcaacctctctaaagaatatctgatgtttattgggatgaagtgagcagatttggtcaacctgtctacaataacccaaatggaatctaaacctttgggggtcctaggtaaccccactacgaaatccatggagatgctatcccacttccactcaggtatctctaaaggttgcaacttccctgaaggcttctggtgttctatcttagctttctgacacactaggcatgcaaggacaaactcattaacttctttcttcagacccggccaccaaaacatctgcctaaggtcctggtacatcttagtcgctcccgggt

SEQ ID NO: 4555 - DNA, 446 bp, Glycine max
  unsure at all n locations
tgtatggtagaggaatagaagaatgggaatctactttggatcatgtatgaaaaaaatcctcctagagacatacacatggcacttaaaatatcctttgatgctctgggttacctcgagaaggaggtttttctagacattgcatgtttcttcaatggatttgaattagcagagatcgagcatatacttggtgcacatcacggttgttgtttgaaatttcatattggagcattggtggaaaaatctcttataatgattgacgagcatggccgtgttcagatgcacgatttgatacaacaaatgggtagagaaattgttcgacaggaatcaccggagcaccctggcaaacgcagtaggttatggtctactgaggatatagttcatgttttagaagataacacggtgagtaagactgagatcaatggtttgatcttcattnttagcattga

SEQ ID NO: 4556 - DNA, 221 bp, Glycine max
agctaggaccattctaaacctttgagtttctgccgccaataccgagcgtgtagatgagtcatgtccccgaatcggacacctgtgtgaaaagctatgaccattcgattttctcgagagcttccgttgatcaatttcgagcgtctcgagttattatgaccccgaatcggacatccgtgcgaaaacgtacgaccatgcgactttctcgagagctgccgctaggc

SEQ ID NO: 4557 - DNA, 427 bp, Glycine max
  unsure at all n locations
agcttctaaactttgtacaagaatgaagctctgataccacttgttagacaagtggcctcagatatcttaagaagggggggttgaattaagatattccaaactgtttcccctaattaaaaatctatttctctttttactcaagttatgaattcccttaaagacaatcttcttaaatattaattcaaacgaagcaacttgaatgtgaatataaagcaataataaataaaagagattaagggaagagaaaatgcaaactcagttttatactggttcggccacacccttgtgcctacgtccagtcctcaagcaacccgcttgagagttccactaacttgtaaattccttntacaagttctaaacacacaangacaatccttcctttgtgtttagagatcctttacaacaagagactcacagtctcttaatc

SEQ ID NO: 4558 - DNA, 431 bp, Glycine max
  unsure at all n locations
gctttgaatgcactattcaatggagttgacaagaacatcttcagactgatcaacacttgcacagtggccaaagatgcatgggagatcctgaaaatcactcatgaaggaacctncaaagtgaagatttccagattgcaactcttggctacaaaattcgaaaatctgaagatgaaggaggaagagtgtattcatgacttccacatgaacattcttgaaattgccaatgcctgcactgccttgggagagaggataacagatgaaaagctggtgagaaagatcctcagatccttgcctaagagatttgacatgaaagtcactgcaatagaggaggcccaagacatttgcaacatgagagtagatgaactcattggttctcttcaaacctttgagctangactctcggatagggctgaaaagaagagcaagaatct

SEQ ID NO: 4559 - DNA, 420 bp, Glycine max
ggatccttacactgcgctcagctaactcattcagctctatttacgactaacagcatcagaaaattatgcgttgattgctaagatcacattcatttcgagcgtctcgatatattacgggactcaatcagacatccgagtaaaaagttattgtcggttgaattggctccgagcttcaacattccatttcgagcgtctcgatatgttacgagactcaatcagacatccgagtaaaaagctattgtcgtttgaatttgctcagagattcaacattgaatttcgagggtctcgatatcttacgggactcaatcagacatcccagtgaatagttattgtcgtttgaattggctcagagcatcaacattcaatttcgagggtctcgatatattacgggactcaatcagacatccgagtaaaaattta

SEQ ID NO: 4560 - DNA, 438 bp, Glycine max
tcaacctagaggagacgaaccattccaagtgttggagaagatcaacgacaatgcctacaagattgacttgcctagtgagtataatgtaagtgccactttcaatgtgtctgatctatctctttttgatgcagatggaggagccttggatttgaggacaaatccttttcaaggagggagtgatgaggacataaccaagggcaaggaccatgaagcacttgaaggtcccatgaccagaggcagacttaaacaagcccaacacatcatagagacaaggctggtcatttgtatagctgtcattgatgatgattgaaggcccaagtggagaaagatgaaggcccagaggcagaggcactaccaagactactaattgttgctgaaggcccaaactaacttgaaggcccaagttaaataagttcttagttataatttaattttatt

SEQ ID NO: 4561 - DNA, 314 bp, Glycine max
  unsure at all n locations
caagctcgatcctgaaacaactttatgattatagacttgntgcttatgagtacatggctaatggttcattggataaatggatattcaacaagaacaaagaggaatttcagttggattgggatacaaggtataacatagcacttggaatagcaaaaggacttgcttatctacatgaagattgtgactcanacattattcattgtgacattaaaccagaaaacgtgctcctagatgataatttcagggttaaggtttctaattttggtttggctaagctcatgaaacgtgaacaaagacatgttttcacaacactt

SEQ ID NO: 4562 - DNA, 447 bp, Glycine max
  unsure at all n locations
agctntacatcttatctgttttattgtttcacggtttttaagtcttggatattcaacacctttcttgtcacttggatcatcttacatgtacccttccctggctgctgctaacgctgctgtgatttctgctggtgaagaaattgcgacgcagggattgccattggggatttgtcccctggtttgtttatttactggttcacgaaatggtatggtgttaggaaatgatactctatttttataaatgctatcctttcttaagcggacatgaaattaaactaatccattcatgaaccaatgtttctgatatcccatttatttttgcctaataaatgtttaaaagtgtcacttgtgctgacttttgaatccttcatctcctgtagtttgctctggtgcacaggagatatttaagcttcttcctcataccntctgtgatccatctaaactacg

SEQ ID NO: 4563 - DNA, 403 bp, Glycine max
  unsure at all n locations
agcttgaagganaactggatgcattggttaacttggtaacccagctgaccttgaataaaaaatctgtacctatcgcaagggtttgcggcttgtgctcctctgctgaccaccatacagacctttgccctttcatgcagcaacctggagcaattgagcagcctgaagcttatgctgcaaatatttacaatagacctcctcaacctcagcagcaaaatcaaccacagcagagcaattatgacctttccagcaacagatacaaccctggatggaggaatcaccctacccttagatggtccagccctcagcaacaacaacagcagcctgctccttccttccaaaatgctgctggctaagcagaccatacattccttcacaatccaacaacagcaacaaccccagaaac

SEQ ID NO: 4564 - DNA, 461 bp, Glycine max
  unsure at all n locations
cagcttgtcaagctacagcttatatccaatcttgagcaatctatgcaactcagtagggacctcaccaaccataagcacagacacatagttgatgtcctacacaggaacacggacctgtttgcttgatagccttctgacatgtagggaatccaccccaacattatctgccacaagctcatcatctgtccccaggccaaactggtatcacaatataagaggaagatgggagaagaatgatacaaatcggttagagaagaggtggacaagctcctcaatgccaacttcatcagagaagccagatattctacctagctcgccaatgtcgtcatggtcaaaaaggctaatgaaaaatggcaaatgtgaatcaattatactggtctgaatagggcgtgccncacagatgcataccttctgcccaacatcgatagactagtcaatggagtgtccgagttccaagtact

SEQ ID NO: 4565 - DNA, 403 bp, Glycine max
  unsure at all n locations
tgcactcaatgtagatgtgacccagatgaatctccgaaggacttttataatgtcacaagggatatacataaccaaaaattgactacaaattataaaggaggtctattntgttgtcaggacaacttacaatgcaagcaaatagagggttttcaaggttcaaggagaatggtttccttaagatacaaaattagttgggttgattggaacatataccaaataccagttaaggtttacatacttgattccaccgacaaagtgaggtcaaatggttccaaaatacttcatgattgtctggtagataagttnttcaagacagtactctatgataaaacaatatacttctcaatcttattagagtgagtgaacaaaagtaaatcttaattccttgcaggcagagtatacc

SEQ ID NO: 4566 - DNA, 415 bp, Glycine max
  unsure at all n locations
agcttgtaatcgattacacatatactgtaatctattaccagagaaaattntcagaanaatattctcaacagtcacatgtttttacttggttcttgaatggccatcaaaggcttatatatatgtgacttgagacacgaatttgctaagagtttttcagaacaaaagggtcttatcctcttaaaaagcaaaatcgttttatcctcttacaaattccttggccaaaacacttgtgattcaataaggatctatttgagtgctcaaattgttcaatctatctctttcaagggagattacttcttgtcttcttctttattctgaaaaaaggattaagagaccgacggtctcttattgtaaagaaatctgaacacaaaggaagggttgtccttgtgtggtcacatcttgtatacgctttaca

SEQ ID NO: 4567 - DNA, 445 bp, Glycine max
  unsure at all n locations
agcttggctcacacctatgtctctntaacatttactccaatgcatttagattagctaaaagactgaactcatgagtcatgaattactttaagatggataatgcaacctttctattgaacactcgatgctcggcgcatcggaagacgcaacatgtggttctgtcattgccaatccagacctaattgtcccatcaagcctaggaattagccattcttgtagttgttctttatctccatagcgcagtaatacctaaacgtaacgaactgctacgaaattagacaaaaatgcaccatagatagagcgcatgctaaatatgatcaacccacaagagaatccaattaagttcagtcagttattgatcaaccaagcaaatccatgagtttcatcttacctccatattacctggtgcacgtgcaccacaactaaacactcgtggagcccaaag

SEQ ID NO: 4568 - DNA, 442 bp, Glycine max
  unsure at all n locations
agctntgagagggagtttgggacttaccgagtactatagaagattcatttgcaactatggacaaatagctcgacccctagctgatttattgaagaaggaaaatttcaagtggactactaaaagtattgaggactttacccagttgcagcaggctgtcaccacagctcctgtactatcaatgccaaatttctcaaaaaaaatttccatataatgtgatgcatccggaaagggagtaggggctgtgttaactcaagaaaaaaggcctattgcttatttcagcaaggctctggcagattcaacactcactaaatcaatntatgaaaaggaattgatgaccctagttctagcaattcaacactggaggccttatctcttacgtcagacatttactgtngttactgatcagaagagtctaaggtacctcttggagcaaaaaataaca

SEQ ID NO: 4569 - DNA, 435 bp, Glycine max
  unsure at all n locations
agcttgaatcatgcagccactctgctcttcaatccactgcttaaatctccaaatatacacttgcgacctctgacttagacttgagaaaacaaatccagcccattctggtgaaatcatctataaagatgatgtaatatttactctctttaagcgaagcagtcctttgacgttcgaccaaatctgtgtgaatcaaatgtagcttctctgttgctcttcacgttgattgtttgaagggtaatcttgcttgcttaccatattgacatgcttcacaacttgttaatttataatctaagtgagggaagccatgaaccaactgctttcgttgcatgttcagcacaattgcatgatgaaaatgacctaaccttttgtgtcaagcctctgtactgtttacagtanctggataggctgcttgctcctcctttagtgggtcaaatg

SEQ ID NO: 4570 - DNA, 215 bp, Glycine max
  unsure at all n locations
cgagcgtcttcatatattacaggactcaatcagacatccgagtaaaacgttattggtgtttgaatgtgctcaaagcttcaaaattcactttcgagcgtctngatatattacgggactcaattagacatccgagtaaaaagttattggtcgtggaattggctcagagcttcaatattcaattacgagtgtctcgatatattacgggactcaatcag

SEQ ID NO: 4571 - DNA, 431 bp, Glycine max
  unsure at all n locations
agctntaggcaaattcaaacgacaataactttttactcggatgtctgattgagtcccgtaatatatcaagacgctcgaaattgaatgttgaacctatgagccaattcaaacgacaataactatttaatcggatgtctgattgagtcccgtaatatatcgagacgctcgaaattgaatgttgaagctttaggcaaattcaaacgacaataactttctactcggatgtctaattgagtcccgtaatatatcgagacgctcgaaattgaatgttgaacctatgagccaattcaaacgacaataactttctactcggatgtctgattgagtcccataatatatcgagacgctcgaaattgaatgttgaacctctgagccaattcaaacgacaataactctttactcggatgtccgattcagtggtgtaatatatc

SEQ ID NO: 4572 - DNA, 435 bp, Glycine max
agcttcaacattcaatttcgagcgtctcgatatattacggtacacaatcaaacatccgagaaaaaagttattgtcgtttgaatatgctcagaggttcaacattcaatttcgagcgtcttgatatattacgggactcaatcagacatccgagtaaaaagttattgtcgtttgaaatggctcagaggttcaacaatcaatttcgagcgtctcgttatattacgggactcaatcagacatccgagtaaaaagtcattgtcgtttgaattggctctgagattcaacattcaatttcgagcgtatcgatatattacgggactcaatcagacatccgagtaaaaagttattgtcgtttgaactagctcagagcttcaacattcaatttcgagcgtctcgatatattacgggactcaatcagacatccgagtaaaagttatt

SEQ ID NO: 4573 - DNA, 441 bp, Glycine max
agcttcttagtctcacctgatgaagatgaattcgtggctacttcatgcactcctctaatgacaataacatcatttctggcactaaattgctgggagttggaagccatcttctcaattaaatttctagctacagcaggggtcatgtcttcaaaggctccaccactggcagcatctatcatacttctttccatgttattgagtccttcataaaaatattggaggagaagctgctcagaaatctggtggtaaggacaactggcacatagtttattgaatctctcccagtattcatataagctctctccactgagttgcctaattcctgaaatatcttttctgatggtcgtggtcctagaagcagggaaatgtttttctaagaatactctcttgaagtcatcccagctcgtgatggaccttggagcaaggtaatataaccagtcc

SEQ ID NO: 4574 - DNA, 398 bp, Glycine max
agcttaataaagccacaagaaaagatcactactcatttcccttcatggatcaaatgcttgagagacttgcagggcaatctttctactattttttggatggctactcaggttacaatcagattgcagtagatcctcgagaccaagaaaagacagctttcacatgtccctttggtgtttttgcttatcgccgcatgccattcgggttatgtaatgcacctgctattttccaaagatgtatgatggctatttttgctgacatggtagaaaaatgtattgaagtcttcatggatgattttttgatttttggtgcatcttttgagaactgtttagcacatctagagaaagtgttacaacgctgtgaagaatccaatctggtgcttaactgggaaaaatgtcac

SEQ ID NO: 4575 - DNA, 413 bp, Glycine max
agctactgggtcacttggattatttcttgaggctaaaaattaaatatcttcctaacagatctatcaatgactcacaacaagtatgtgcgtgatttgctatcataaaacataaatggctgaggcacattctatctgcactcctatggttaccaactgcaaattatctaaacatggggctgatctatctcatgatccaacactctatatatcagtgggtgccttgcagtatgctatccttactagaccagaaatcagctttgctgttaataacgattgtcagaatatggttaatctcttggattctcactacgctgtggataaaacaatgttgagatatctcaagggtacacttggtcatggtctacttattcaacacgctcatgtttcaaaacctatcgcactttatgctttct

SEQ ID NO: 4576 - DNA, 292 bp, Glycine max
agcattgggccgcatcagcaacagtatattggtgtctgaatgctatgaaatgagcagccttgctcagcctatcaacaacaacaaagattacttgtttgcccaaagaattgggaagaccctctatgaagtccatgggaatgtgcttccaaatcaggatcatggactacaagtgggtgtagcaacccacgggaagcagaattatcatacttacattgctggcaggtagtacattgatggacaaaccttttaacgaccttagataaccctttctagtacaccaatgtcttgactc

SEQ ID NO: 4577 - DNA, 240 bp, Glycine max
cctatgttgttgtggatgatttctccagattcacctgggtcaactttatcagagagaaatcagatacctttgaagtattcaaagagttgagtctaagacttcaaagagaaaaagactgtgtcatcaagagaatcaggagtgaccatggcagagagtttgaaaacagcaagtttactgaattctgcacatctgaaggcatcactcatgagttctctgcagccattacaccacaacaaaatg

SEQ ID NO: 4578 - DNA, 437 bp, Glycine max
  unsure at all n locations
agctntctncactaagttgcctgatgcctgaaatgtcttttctgatggcagtggtcctagatgcagggaagaatttctccaagaacaccctcttaaggtcatcccagctgaaaatggacctgcgagcaaggtaagatagccaatcttttgccactccctccagagaatgaggaaaagcctttagaaagatatgatcttcttggacattatggggcttcatggtggaacaaacaatatggaaatccttaagattcttatgaggatcttcacctgtaagaccatgaaacttgcgcagcaaatgtattagtccagtcttgagatcatatggaacaccctcatcaggatattgaatgtacaagctttcataagtgaaatcaggtgcagccatctccctaagagtcctctcgcgaggtggaggttgagtcatgttctcagta

SEQ ID NO: 4579 - DNA, 315 bp, Glycine max
agcttaaggagcttgttttataccatacaagcctttgtttagtttgaaaacatgataagcgtagatagaactctcaaactcaacggttgttccacatatacctcttgcttgattagtctatctaggaacacactttctacgtccatttaatgcagcatcataccgtgatgggcaacaaaggacaataaaatgtgtatttcctctatacaaccaataggagccaaagttttagtataatagataccatcttgttgcgagtaaccttcggctacaagcttagccttgttcctcccaaccttacatgtttcatcaaac

SEQ ID NO: 4580 - DNA, 335 bp, Glycine max
  unsure at all n locations
caccgatcgtgtgatattggatgcaattgctctcatatgcccaatttaaccaagtcttgacgacacttcaaaccattctttgtcttgcctttaatggtaagaatggtcccaattgaactatcacagacatttttctgcacatgcatcacatcaatacaatgtctaacatcaagattggactagtaaggaagatcaaagaatagttaccttttcttccatatgtttggctcagacgatgctntctttngggtctgtccaaagacagctgtgatgtcattcacccgatcataaacttattttccttgcaatggatttggcacagtctcattttcctg

SEQ ID NO: 4581 - DNA, 288 bp, Glycine max
agacacactgctggcttctactgttagctataacagataccgagatctattctaaagatacacataattatgactcatcattataacactccccctcaagctggagcatataaatcatatgctccaagcttggaacatataacctgaatcctatgcccccttaagggtttagtcaaaatatctgctggctgatcactggagttaatgaactcagtgacaatatctttagacagtgatttctcccgaatgaagtgacaatcaatctcaatgggtttcgttctctcatgg

SEQ ID NO: 4582 - DNA, 395 bp, Glycine max
  unsure at all n locations
agcttctctgttcttggttaattattatattttgtttttaatccttgtatttggctatggttttatgacatttgaatacttagtatttcttttaatacttgcttactatgactgaacatgatgattttattgacttgctcttggttgcttatgattatgtgttttaaacttaattactttaataatatatgacttgtggtatgtacttacatttgatattgagctctatgttttttatttatttattcatatatgcttttttcgaatattatgaatgactttctggattatatgacattctatgaagtattatctttctaagattgatgaataggtaagccatcttgttcgattggtcctattctcgcgatttggnttatattatgacatatgaa

SEQ ID NO: 4583 - DNA, 429 bp, Glycine max
agctttcgagaaattcaaatggtcataagttttcacacgaatgttcgattcggtgacataactcatctagacgcctgaaattgaacaacggaagctctcgagaaattcgaatgctcataagttttcacaccgatgtccgattcggggacataatatatcgagacgctcgaaattgaacaacggaagctctcgagaaattcgaatggtcaccacatttcactcggatgcccgattcgggaacataatatatcgagacgctcgaaattgaacaacggaagctctcgagaaattcgaatggtcataagctttcactcggatgttcgattcggggacataacttatctagacgctcgaaattgaacaacggaagctctcgagaaattcgaatggccatacgttttcacacagatgtccgattctgggacataa

SEQ ID NO: 4584 - DNA, 274 bp, Glycine max
  unsure at all n locations
atgaattatccacattggcatgctgagaggctttgtccttcccaatatgtcctggaaacatggcaataccgtgccctttgtcctgngaaagagttgcagacctgcaaggaacattaccatgcaattctgtggagggtgcaacattaagattgctgggcttggctccatatagtgatgcagaacctgctgcagctggccaaaatggattcatcctcgcgattncgtggtgatacaaaatattgcgagcaatgtagcagtgggtggcacacctttt

SEQ ID NO: 4585 - DNA, 418 bp, Glycine max
  unsure at all n locations
agcttcctatacgcttactccagatataaccagatcaggatgcatgctctagacgaggagaaaacaacatttatcattgaagatgccaacttttgctacagggtcatgcctttcagtctaaaaaatacaggtgctacataccaatgactaatggaccgagtctttaaatagcagatcgggcgaaacgtcaacgtatgtggcggacctggaagaagtctttggggaactctgcanatatgacatgcgcctcaaccttgaaaaatatacttttagggtaggcgaaggcaagttcctcggcttcatgatcactcactgggggattgaagccaaccccgacaaatgcactaccatactggagatgtgtagcccaaccaacgtccaagaagtncagaagttgaatggtagggctagcatcctg

SEQ ID NO: 4586 - DNA, 354 bp, Glycine max
  unsure at all n locations
ttatgttaccttgatatgctaaaattgtnagaaggggaaacacgttccatgtcggccaagacttgggggagcaattggtcctcgatcttgtgatcatgttcctcacgtttaattctgtcttatgttgtgttttgcatgatacatgatatgccttacttttttcattttttattttgggatgtctcttacgagataaaggaattttgtagcctggtgaagaacctttgccaattgatccctggctcgtggttcctgacaagagcagatatgtcgatcaacaaaccttgaagatgcaagaaaatccagaggagtactaatacaagattgatcttaaaaacacttttaagtcacttg

SEQ ID NO: 4587 - DNA, 303 bp, Glycine max
agcttcgacatcgccacctagtcatcttgatgggtttctgtgatgaacattcacagatggttcttgtgtatgagcacatggctaatggcccctttcgttctcacctctatggctccaaccttcctcttttgtcatgggaaaagaggcttgaaatatgcattggtgctgctcgtggcttgcactatctccacactgatgcaactcaaaatattacacaccctgatgtgaaaacaacaaacgtcctgttacatgagaactatgttgccaacgcttctgacttcggtttgtcaaaagctgtcccac

SEQ ID NO: 4588 - DNA, 450 bp, Glycine max
agcttagaaacttgctattattaattgtctaattaatatctaacatcctcccttaattggacaattcttctgcacaccaagtcttgctcgcaatcttcaaaaatcttcaaatttgagagacttggtgaaaatatctgcaacttgatcttgagtcttcacatgagtcaattctactactttcttggcaatgcactctctaatgaaatgataccttgtatctatatgcttacttcgttcatggaacaccagattcttggcaagctcttgtgcagatctattatcaacatagatctttgtgctttccttctgcaacaagtgaagttccttcaacaatcttcttagccaaatggcatgacatgtgcaagaagttgcagctatatactcggcttcacaagtagaaagtgtcacaatgacttgcttcttagaactccatgtaaaaacacaatcacc

SEQ ID NO: 4589 - DNA, 450 bp, Glycine max
  unsure at all n locations
tgcaagctntgatagtgtcgagaagagatcacaagtttgtcatcatataaaagggggagaatgtaaatgtatgtatacatgattctgatgatgtcaaaagaagaaccaaacaaggctcatttgcttcaagattaatacaagattgcttcaacaagcaaagccttgcttcaagatttacttaagatcaagccttgccttaaaacaaagtgcttttaagccattcaaggctctggtaatcgattaccaggtagtataatcgattaccataagacagggttgagaaatagctgttgaaaaggattttgaatttgaattttcaacatgtaatcgattaccatatgtctgtaatcgattaccaacaacgaaacttttgaaattcaaattcaaaagtcatgacccttcaaattataactgtgtaatcgattacancaaacattgtaatcgattacc

SEQ ID NO: 4590 - DNA, 417 bp, Glycine max
  unsure at all n locations
tgcaagcttatccctagaggggatggaccttttaggttntggagaggatcaataacaatgcctataggttggacctcccagaagagtatggagtcagcaccacttttaacatttctgatttaactccttttgcaggtggagctgatattcatgaggaggaactaacagatttgaggtcaaatcctcttcaaggggaaggggatgatgcaatcctccctatgaagggaccaatcactagaaccatgagcaagaggctccaagaagattgggctatagctgctgaagaaggccctacggttctcatgaaccttagggtagatntttgagcccatgggccaaggttgggtccaattatctttgtacatattagactangatgtcattatatttggtcctcgtatatagggctccatattg

SEQ ID NO: 4591 - DNA, 457 bp, Glycine max
  unsure at all n locations
agctntgatggtgtcaagaagaaatcacatgtntgtcatcatcaaaaagggggagaatgtgaatgtatgtatacatgantttgatgatgtcaaagaagaatctaacaaggctgcttcaaatgataagcatttgcttcaagaataattcaagaatgcttcaacaaacaaagacttgtttcaagattcactaaagaccaagccttgccttaaaacaaagtgctttcaagacatgcaaggctctggtaatcgattatcaggaagtgtaatcgattaccagaaaacagggttgagaaatagctgttgaaaaaggttttgaatctgaattttcaacatgtaatcgattaccatatgtttgtaatcgattaccagcaacgaaactttggaaattcaaattcacaagtcataacccttcaaattataactgtgtaatcgattacacaaacattgtaatcgatta

SEQ ID NO: 4592 - DNA, 439 bp, Glycine max
  unsure at all n locations
gcttgcttctacaagggtctcgtctattccaaagtatcccatgagcccaccctcatgggtctctctcacaagtaatttcctaatggatccttgaggtatgcaaagctntccctctttgaacaaatactccatctccaaatagaatccatcttaggcctttttcccacaactctcgtaatgggagagaaatgttcatctaaagcatacaagtccctaatattatcaaatcctaaaatttgagctcctacggagcaaaacaatgtgtatctcctaaatagggcatcagctaccacatttgatcttccctttctgtatttgataacatatggaaatttctctaggtactctacccatattgcataccacttgtttaacttgctttgcccttcaatgtacttaactgattgatgatcactacaaatgacaaattccttggaaa

SEQ ID NO: 4593 - DNA, 446 bp, Glycine max
agcttagccagatagaatgtcaaagatggacgatactttaacacaatttatgcaagtatccagcacagaccagaagaagactgatgcatctattaaaaatctagaagttcaagtaggacaactggcaaaataactatccgaacaaggaagtggatctttctcagcaaccacacaggtcaacttaaaggaacattgtaatttaattacaacaaggttggggactatggttggtttgaaggataatgatgaaaaaagaataaaaaaagagttgaaaaagacaacgagaaaaatgatgaagtgatgactagtgaaaaagtggaagacaaagtggtaagtgaagaagagaagaagaaatcaaatgaacaaaccagtaataaaggtaaagctatagtaaaccatccaccaattgagcatcttccttatccgcaagctctgtcaaagaaaga

SEQ ID NO: 4594 - DNA, 464 bp, Glycine max
  unsure at all n locations
agcttattggtacagatggcacaatatcttgagtagatgaagtatgacttgaacaagcttaaaataaggaaacttgaacccattaaagacaacatctttagatatatatatctttcctataggtgaaagacacttaaatcctttgtgagaagtagaatatccaagtaagacacgctcatgagaccgaaattctagtttctgactattgtagggtcttaagaaaggatagcatgaacatccaaatgattttaagaaattataatcaagggtatgtttaaacatagtagtaaaaggaacttcaaaatttaaggatgaagtggcaacctattaatgagaaaaacaattgttgtaaattcaaattccctaaatntgagtggaagggaggcctgtttgagaagagtaagtcccaattctggaatgtgtctatgttagaattctattacaccactttaatggtgagtatg

SEQ ID NO: 4595 - DNA, 455 bp, Glycine max
agcttattggtacagatggcacaatatcttgagtagatgaagaatgacttgaaaaagcttaaaataaggaaacttgaacccattaaagacaacatctttagatatatatatctttcctataggtgaaagacacttaaatcctttgtgagaagtagaatatccaagtaagacacgctcatgagaccgaaattctagtttttgactattgtagggtcttaagaaaggatagcatgaacatccaaatgattttaagaaattataatcaagggtatgtttaaacatagtagtaaaaggaacttcaaaatttaaggatgaagtggcaacctattaatgagaaaaacaattgttgtaaattcaaattccctaaatttgagtggaagggaggcctgtttgagaagagtaagtcccaattctgtaatgtgtctatgttagaattctattacaccactttaatg

SEQ ID NO: 4596 - DNA, 468 bp, Glycine max
  unsure at all n locations
gggatccttacgtcacctgcggcatgcaagctgaaatgaacacggaagctctcagatatctagtggcataaattncacacagatgtccgattcggggaaataatatatcgagacgcacgaaattgaacaacggaagctctcgagaaatntgaatggtcataacatctcactcggatgttcgatccggggacataatttatcgagacgctcgaaattgaacaaccgaagctctcgacaaattagaatggtcgtaacttttcacgcgaatgttcgattcggggacataactcatctagacgctcgaaatcgaacaacggaagctctcgagaaatctgaatggtcataagttctcacacggatgtccgattcgggaacataatatatcaagacactcgaaattgacaacggaagctctcgagaaaatcgaatggtcataacgtttcacacagatgtccgattctgggacat

SEQ ID NO: 4597 - DNA, 450 bp, Glycine max
  unsure at all n locations
agcttccaaacaaaaantttcatgtaggtggaccttcttttagtaattctgacttaccgcagcctcctatccctattccattcccacctagagcaatgccaaacaaaaaaatggaagaagtggaaaaggagatcttggagaccttcagaanagtagaggtgaacatagctctgctagatgccatcaagcagattccaagatatgtgaagtttctaaaggagttgtgtacccacaaaaggaagttcaagggcaatgaaaggattagcatgggtagaaatgtgtcagcattgataggtaaatatgttcctcacattcctgagaaatgtaaggacccaggtactttctntataccttgcattattgggaacaataaatttgagaatccatgctagatctangagcatcagttagtgtcaatccttttgtcaatttcaattctttatctcttgg

SEQ ID NO: 4598 - DNA, 399 bp, Glycine max
agcttcataagagagtcaaaaaatctaattgagatgagaaataaaagctatgctaaacaagccaacaaagggagaaagaaggtcgtctttgaacccagagattgggtttgggtgcacatgagaaaagaaagatttccggaacaaaggaaatcaaagcttcaaccaaggggagatggaccatttcaagtgcttgaaagaatcaatgacgatgcttacaaagttgagctgcccggtgagtataatgttagttccaccttcaatgtctctgacttatctctttttgatgcagatggagaatctgattagaggacaaatccttctcaagagggagagaatgatgaggacatgacctagagcaagggcaaggatccacttgaaggacttggaggacctatgaca

SEQ ID NO: 4599 - DNA, 386 bp, Glycine max
agcttcgtcctttgtacgaagtaagtagagatacatatatcgtgaataatcatctataaaggtgataaagtattttggactacttgcatccatatctggacaacaaatatctgtatgtatgatttctaataggtttgagctcctctttgcatcgtttttagacttgttagtttgcttacccttaatgcaattcacacaagtgtcgaaatcagcaaaatccaaagtactaagtactccttcatttaccaatctcttaattctctcgatagagatgtgtcctaatctatggtgccacaacatagaggattcctcattcacaacacattgtttaaccctggcagtaaaatgcatagaattataagaagcatcattttgcaattcaatat

SEQ ID NO: 4600 - DNA, 406 bp, Glycine max
  unsure at all n locations
agcttataagccacaagtcctatcttttgcacatattgaaaagggacgtaaaatcttttagccaatttggaatattgacttccagtggccgttgactggtgttgaggtcgtagcttgaccaagacctgagttcctacttcaaattggacattgcgtctttgcttatccgcgctctccttcattcattgctgggccttgattattttctttgtcaaactggatagcaaggcatcatgctcagtcaaccatttgttggatcaagtggcctcggaataattaagaagggtgggttgaattaattatgaacgtgtcttgactaattaaaaatttattcttcttaatgttactagattcaattaggctctactaccaagntatacgatagtagagaacagaaataataact

SEQ ID NO: 4601 - DNA, 371 bp, Glycine max
  unsure at all n locations
agcttgtgcctctttatgtctgggatatgaatgtagcatatanatccaaagacccttatgtgctatgctgatggcttcttcccattccaagcttcaattggagtcttgtcttttacagacttagttggacatctgttgagtatgtaaacaacagcgtacactgcttcagcccagaatgtgttcggtagtcctttttccttgagcatcaatctagcaatctccataactgtgtgattctttctctcggacactccattttgttgaggagaatatgcgactgcaagtagtcgctcaatgccttcatcctcacaaaatctttcaaactcgcgagaggtgtactctttgtcgcgatcacttcttaatacttttat

SEQ ID NO: 4602 - DNA, 413 bp, Glycine max
agcttgtaggttaaagtctcacgattgtcacgtgttcatgcgacaattgctagacgtggctatacgagacatcttgccaaacaaagtcaagttaacgataactcgcatgtgctttttcttccattctatatgtagcaaagtcattgatccagacatgtttgatgagttggaaaatgaggccgcaattatactgtgccagatggagatgtatattccccctgctttctttgacatcatgattcacttgattgtgcatctggtcaaagaaatcaaatgttgccggcctgtttatctacagaggatgtactctggtgagcgacacatgaagatctcataaggcttcagagaatctattcgtcagaacatctattgtgagaggtcatttacaagaaccattgattttgtcaaatact

SEQ ID NO: 4603 - DNA, 376 bp, Glycine max
  unsure at all n locations
agcttgctaacccatggaagctcctaatatctcccacactttntggggtgggccattcttggatggccttgattttctcagggtccacttggaccccatttctaccaactacaaaacctaagaaaactatattatctacacaaaagttacacttctctatatttgcatagagggtgtttttcctaacgactgaaagaacttgtctgagatgtcctaagtgatcatctaggctcctactatacactaaaatatcatcaaaataaacaactacaaatctacctatgaaatcccttaagacatgatgcataagcctcataaaggtgcttggtgcattagtgagcccaaaaggcatcactagccattcatacaaaccaaa

SEQ ID NO: 4604 - DNA, 418 bp, Glycine max
agcttctgcactatcctttccccacttgaaaccctctttctttaacagattagtaagtggtcttgttatcctgccatagccttcaataaaccttctataatacccagccaaaccaagaaatcccttgactaatttcactgttttaggcacaagccatttcaacacaacatccactttcttcctatccatggtcacgcctgctccagaaatgatatggcccaagtattccaccttttttctaccaaagctgcaccttttgaaattggcaaagaactcattcagaatctgtagtgttaggactaatctaaggtgtccaaatgcgcctcccaactagcactatacaccaatatatcatgaacgaaaactaacacattttctgagaaatgcgtgtaaagtggaattcatagcacattgaaat

SEQ ID NO: 4605 - DNA, 455 bp, Glycine max
  unsure at all n locations
atagtctcatactgtttgtggtttttataagttttcacatagcagataatgactgttcaatactgaaggaataaagaanaataagtgactgtatgcataattacataccagaacaagtccaataatatttgtaggctgctcataatagacaggaactctgctatgccctttctccaatattggattcatcaaatccctgcttaataataagcattcagttggatgacaaaatgctgtataagatagaaaagctagtttgaacttgtaattnttttgagtcacaaatagagtccatacctatcaagctttacattaatatcaatagaaaatatatcagttatgggagtcatggcatcactagctatcttttcatagagtccttacctgtaggctgtaaggaatagaatagaagaanaaccaataccctcaaataatagatgagaaactcacctaat

SEQ ID NO: 4606 - DNA, 441 bp, Glycine max
agcttatatatcaaagatctgacaatgtagaagttgttggctactcagactcggattttgctagttgcgttgactctcacaggtcggcatctggatacatcttcatgatggctaacggagcaatatctttgagaagtgccgaacaatcattagtttctacttctaccatggaggctgagcttatttcattatgtgaagtggcatcacagggtatttgggtaaaaagtttcatagtcggactacaagtgatggattctattcatagaccattaaagatatatagtgataattcagctgctgtttctctagctaataacaataaaagtggaagtcgaagcaagcacatcgacattaagtatttagccatgaaggaatgtgtcatagcaaatgacatcatcttcgacaacatcattattgaactaatgattgcagatccattga

SEQ ID NO: 4607 - DNA, 452 bp, Glycine max
  unsure at all n locations
gctaacaataaagatcttctctatgatagtctataaaagattcagacataaaaatgcacaccatatactcacctcaacattatccccatacagattaagtatatggttttcattattaaaaacttgggcagggtacttgtttctagcattacatgccatgtcatctgctagcatgagtataatcctctcatccggtatttctagccgtttaactgtcctgaatgagaaagaagttaaagaccaataatacatcattgtcaagcataattcaaacaatttaaaaaagaaaaaaaggctaaagttgtatacgtacctatacaatgacagggtattggccatatgccgataattaaacctgaacaagggaagcagcacatttagtatactatgcatgccatacaacaagaaacctacatgtaaaatataattcanaatacctctgtaagacacat

SEQ ID NO: 4608 - DNA, 444 bp, Glycine max
tcattaggctatctatggcctcaaacaagctccaagggcttgatttgatagactcaaagagactcctactgaagtttgagttcatatccagcaagtgtgatcccactttgtgtactccaagggatcatctactatctacatgctagtatatattgggaaacatccaagtcccaaatcgactagagataaggccaatatagaatatataagtggggggcaaccctcatcctttaagctaacttttagggttgagttagacttgaacccacattctaagatgatattagaacttatcttagatctattaaaagggagtcacccaccatattatccatgctcgaagcacaaacgtgttgggcgtgaggggatgtattgtggaaaacccaagtcccacattggttagagataacgcccagatagactgtataagtgagggatcaccct

SEQ ID NO: 4609 - DNA, 395 bp, Glycine max
  unsure at all n locations
ntacattactcctcatgcttctcaccatgtctaataaggttctatttcttcgttctgccacaccattctgatccagagaaccaggcatagtgtattgngcaacaatcccatgttcttgaagaaatttcgcaaatgaacctggtgcttgtccatcctctgtgtatctaccatagtactccccaactctatctaatctcacgatcttaatttgttttccacattgtttctcaacttcagccttaaaaactttaaaggcatctaaagcttcattcttagaatgaagtaagtagagatacatatatcgtgaataatcatctataaaggttatgaagtatttcggactatttgcatccatgtctggacaacatatgtctgtatgtatgatttctaataaa

SEQ ID NO: 4610 - DNA, 235 bp, Glycine max
  unsure at all n locations
cttgattgcctaggtgtggaccctcaagtgcaatcctccattctncactcttntcggagccccatgaatgtcattgcctagcgctattcatgtgtcctccatcttcgagtctggagccccgcggatgtcattgcctaacactgttcgctaattctccattctccacttttattcggagctccatgaatgtcattgcctaccgctgttcatgtgtcctccaccttcaagtctggag

SEQ ID NO: 4611 - DNA, 432 bp, Glycine max
agcttgaggttaatcgtaaaactgcaaagacatgaccttgtgagaggtttaccaagaatgtcatacaaagttgatttactttgtgaagcatgtcaggagaggaaacaaattaaaacctctttctcaagcaaaaactctatttccacctaaagaccacttgaattattacatatcaatttgtttggtccaactagaacaacctctgtcagtcgaaagagatatagtctggtagtagtggatgactactcaagatggacatgggttatgttccttgctcacaagaataattccttagagatcttctttaaattctataaaaggattcaaaatgaaaagggagtatgccttacttcaataagaagtgatcatggtggagagtttgaaaatgagaactttcatctattttgtgaagaaaatggaattctttataac

SEQ ID NO: 4612 - DNA, 454 bp, Glycine max
  unsure at all n locations
taagcatgataaagatattgagcatatatgtttcaaagatattaatgtttacatgattgatatgaaacaacaattatctgattatgggattgtattataccatattcccataaaatgtgacaacacaagcgccataaatatatctaagaacccaatctttcactctataaccaagcacatagaaattacgcatcattttcttagagatcatgtcctacaaggtgactgtgttctacaatttgtagataccaaaaatcaactcgcagatatcttcacaaaaccactacccaaagattccttctacaccattagaagagaattaagacttntagatgccaatgacttagacaaatgatctattctatgttatgatgactcatcacttgtttaatacacatgctcttattatgttttgtgaataatgtctgacatctatgtcgtcatttattttctg

SEQ ID NO: 4613 - DNA, 291 bp, Glycine max
  unsure at all n locations
agcttgtcaaatagggaagcgagttaaaaaattctttctaagcaaaaacgttgtttctacttcaaaatcccttgaactacttcacattgatttatttagtccctcaagaacaatgagtttaggtggaaattactatggcttagtaataggggatgactactcaaggttcacttggaccttgtttttgaaaacaaaaaatgaagctcttaatgctnttcgcacacttgccaaggtgattcaaaatgaaaaaggtctcaacattgtttcaaaataagtcttttgaaatatttt

SEQ ID NO: 4614 - DNA, 403 bp, Glycine max
  unsure at all n locations
ntgatgcaatcttctcatccttaatggtgttcctcatgttgtatgcatagttctccaaagcattctttgcgtcgaccttcttcttgtgctcctcatcctcggccttgtacttctccgcctcttggaccatcttctcaatctcatccttcgatagtctacccttgtcgttggtgatggtgatcttgttcttctgccctgtggtcttgtcctcggcagagacattcaagataccattggcatcgatatcaaagcagacagtaatctgaggaacacccctgcgtgctgggggaatgccagaaagctcaaatttacccaacaagttgttggccctggttctagctctctctccctcatacacctgaatcaagacaccaggttggttgtctgagtaagtagagaacac

SEQ ID NO: 4615 - DNA, 458 bp, Glycine max
  unsure at all n locations
ctataaaactaagcttcgacatgataatggagacacatgaacagcgctaggcaatgacattcatggtgctccgaacaaaggcggagtatggaggattggcttgagggtccacacttangcaattatgaaactcagctccaaactcgaaagtggaggacacacgaacaaccctaagcaagaacattcatgtggctccgaaaaaggacgagaatggaggattgccttgagggtcctctcttatgcaatcatgaaacacagctccaaactcaaaagtggaggacacacgaacagccctaagcaagaacattcatgtggctccgaaaaaggacgagaatggaggattgccttgagggtcctctcttatgcaatcatggaacacagctccagactcgaaaatggaggacacatgaatgacaacgcaattcattcatgtggctccggaaaatgatgagaatgga

SEQ ID NO: 4616 - DNA, 415 bp, Glycine max
  unsure at all n locations
tgtgcatccaataccctgatgaggatgtcctatatgttcttatacaggactgatccatgtgcttccaaagtttcatggccttgaaggtgaagacccacacaaacatctganagaattccatattgtttgctccaccatgaaacccccagatgtccaagaggatcacatatttctaaagacctttcctcattctttagaaggaatggctaacgactggctatattaccttgctccaaggtccatcacgagctaggatgacctcaagagagtattcttagaaaaatttttccctgcttccaggaccacgtccatcagaaaggatatttcacgtattagacaactcaatggagagagcctatatgaatactgtgagaggtttaaaaaattatgtgcccgttgccctcaccaccagatt

SEQ ID NO: 4617 - DNA, 462 bp, Glycine max
  unsure at all n locations
tagccctagaggggatggacccaatcctccctaggaagggaccaatcactagaaccatgagcaagaggctccaagaagattgngctagagctgctgaagaaggccctagggttctcatgcaacttanggtagatttctgagcccatgggccaaggttgggtccaattatctttgtacatattagactaggatgtcattatatttggtccttgtatttagggctccatattgtaggtagggtaccctagaaatataggatttttcaacccttgtatttttgggcacctagactagtttttgtattaggggtagttttgtaatttcacatgcactaagtggatatttgatgtgtgtggttggaaataaatttaattgaattggtagaagcccaatccaattaaattntagagggggaggtgagcatttgcttactacaccccattgccacatcatatagtcaca

SEQ ID NO: 4618 - DNA, 424 bp, Glycine max
agcttcccgccatggtattgaggttaatgattccattgcttcttttagatttaaggaaaatactgttgatcgatgtatatatctgaaggtcagtaagagtaaggttattttctaattttgtatgttgatgacattctgcttgcaactaatgatcttggtcttcttcatgaaattgagaagtttctctctggtaactttgaaatgaaagatatgggtgaggtaagatattgtgatatggatagaaatattccataatatatcacaaggattgttagacttatctcagaaagcatatatcaataaagtattagagagatttacgatgacaaggtatttttagcatcacctattccaatttagaaaaggggaaaatttagttttgcacaatgtcctagatatgatatggaatgaaaacatatgaaag

SEQ ID NO: 4619 - DNA, 451 bp, Glycine max
  unsure at all n locations
tanacattcaatttcgagcgtctccatatattacgcgactcaatcagacatctgagtaaaaagctattgtcgtttgaattggctcagaggttcaacattncaatttgagcatatcgatatattacgggactcaatcagacatccgagtaaaaagttattgtcgtttgaattggctcagagctttaacattcaatttcgagcgtctcgatatattacgggactcaatcagacatccgagtaaaaagatattgtcgttctaattggctcagaggttcaacatataatttggagcgtctcgatatattatgggactaaatcagacatccaagtaaaaagttattgtcgtttgaattggctcataggttgaacattcaatattgaccgtctcgatatattatgggactcaatcagacatccgagtaaaaagttactgtcgcttgaataggctcat

SEQ ID NO: 4620 - DNA, 377 bp, Glycine max
  unsure at all n locations
agctntaagccaattcatatttctataactntttactcggatgtctgaatgagtcccgtaatataacgaaacgctcgaatatgaatgtttaagctttgagccaattctaacgataataactttttactcggatgtccgatagagtctcgtaatatatcgacacgctcgaaattgaatgttgaagctctaagcctattcaaacaacaataacgttttactcggatgtccgattcagtgacgtaatatatcgcgacgctcgaaattgaatgttgaacctctgagccaactcaaacgacaataactctttactcggatgtctgattgatgtccgtattatatcgagacgctcgaaattgattgttgacctctgagccaat

SEQ ID NO: 4621 - DNA, 442 bp, Glycine max
  unsure at all n locations
tgaaggcctccatgtaattngaatggcacttgctgcatgacttttaattgatccgannaaatgtatggactagtangaactnttgacatacaaattntgtgtcacagtaactntntttttagaatatttacagcatttccttttcattacaaaccagtttattcagatttacaaaatttgaattaattaaaattatttggaagaaatgttcctgataaaatcgcgtcaataattntaaaatatcatactacaatatggaaaatgatttggaagaaattatttggagtatatgattggtgacatatcttcatggttatataagtgctttttacgaaatctctttaattgcgtggtaagaaaatgagttaaattcaattattttttttataaactntcctagatgattgatggaatttcaaataagcgcgttacaataattcac

SEQ ID NO: 4622 - DNA, 397 bp, Glycine max
  unsure at all n locations
agcttctatagaaggttcgttcctaatttctctattattgcatcacctctcaatgagctggtgaagaagaatgtggcatttacctggggtgaaaaacaagagcaagcctttgctttgctcaaagaaaagcttactaaggcacctgttctagctcttcttgacttttctaaaacttttgagctagaatgtgatgcctctggagtgggagttggagctgtattgttacaaggtaagcaccctattgcttattttagtgaaaaacttcatagtgccaccctcaactaccccacctatgataaagagctntatgccttaatatgagccctccaaacttgggaacattacctttgttccaaggaatttttcattcatagtaatcatcaatcacttaagtaca

SEQ ID NO: 4623 - DNA, 427 bp, Glycine max
agcttgaattataatataaacataagcatgatattaaataataaaaaaactataaagcttcacaaaaataaagaggataatacctctttaataataaatctcagaacgttagaaaattctccaactgttggcactccctctggctactcaaatgccacaaaggtctgtccacgtgaatcataaggaagagacctgagaggcttggagaacacctctgagaattcatctgcatctgaagcatccacagtcacaataacctgtaatagagaaaaataattacaaagaccttggagttggattattttatgaaaaattcgaagcatctataatattcattacatcttccaacaattgctctggtatcgtgtttgtgcacttgtactgaaacacaacatgcctatcataaatgtgtttaatgacattaact

SEQ ID NO: 4624 - DNA, 356 bp, Glycine max
  unsure at all n locations
cgtanagcaggaagtatgggtnaaggaaatgtaagaagagatacagacgatcgagacaaacaacacgtgggagttagtaaaccgtccccatggaaaatatatcattggggttaagtgggtctataagacaaagctcaaccctgatggcaccatacagaaacacaaggcaaggctagtagctaagggttactcacagcaacccagaattgactacaatgagacatttgcaccagtagctcgtcttgataccataagagctctaatagctcttgcgtcacataaaggatggagtatccatcaactagatatcaaattcgccttccttaacgacgtacttgaagaagatatctatgtgg

SEQ ID NO: 4625 - DNA, 447 bp, Glycine max
  unsure at all n locations
tatgctgcanatatatacaatagacctnctcaacctcagcatcanaatcaaccacagcataacaattatgacctctccagcaacagatacaaccctagatggaggaatcaccctaaattcagatggtccagccctcagcaacaacaacaacagcctgctccttccttccaaaatgctgctggcccaagcagaccatacattcctccaccaatccaacaacagcaacaaccccagaaacagccaacagttgaggcccctccacaaccttccctcgaagaacttgtgaggcaaatgactatgcagaacatgcagtttcaacaagagactagagcctccattcagagcttaaccaatcagatgggacaattagctacccaattaaatcaacaacagttccagaattctgacaagttgccttctcaagcctgtcaaaatcccaaaaatgca

SEQ ID NO: 4626 - DNA, 426 bp, Glycine max
  unsure at all n locations
agctntatctctgccattattaagatctgcccatccaccatatttggatgttaaaattctaacccataactgattttgattagaggataaagcccatatccatcttcccatcaaagctgcattaaatctggtaatatccttaatcccaagtcccccatcctccttggggaggcaaatgacctcccacttcacccacacaattttcttgaggtcttgagaacccccccacagaaaatttctttgtagagatatcaatttcagaactactctttgtggaattttaaaaaaagataggagatatatgggtagagcagttaatactgaatttatcaaagtaaccttccctgccattgataggattttctggttccacttagaataatttgcttcatattttntaatcagcggtttccacatcaagtagct

SEQ ID NO: 4627 - DNA, 445 bp, Glycine max
  unsure at all n locations
ccacccacacccctctaatattctaccgcttagactcactntatatgtaacaaaaataatctctttaaaattaattaaaaatcatgagttctggtaaatttatttctcatttaatataaatcaagagactcaatcatttgagaagcaaaacctaaaaaaaattataattttcaataaatcttaaccaattataaagagaatataattaaataacaatctataattaaataatcttataaaagtcaacaatttatgattaatttatataacggtgacacatcataataatattatactctttttattaaaattagctgttctatatctaatttcatgttatgcggatagcttaccatattatacgctccatcaacacttattaatttctttgttatccttctctttttatcacattntataacctattatacttacactgcattat

SEQ ID NO: 4628 - DNA, 440 bp, Glycine max
  unsure at all n locations
agcttgccaactccctcactcagtggccgagatatcttattatcctgcaggtatagttcattcaaattctgtagcagaaagatgctctctggaaggcttcctgacaaattatttttattaatagacagatgctgcagagaggaacaatcacccaaatttcgtggaatctcaccagaaaagtagttacttgacagtttaaatactcggagctgagtaaaagaggaacacatagttgtatctatagagccttcaaattgattattgctaaagtccatgatctccaagtttggaagatgaaacaagctgtgtggaagagagccagtgaagagatttttggaaagcttcaagactctaagttgatccaaacatgctaatgattcacagatcttccctgtaagttgtgtgcttncaagttccaagcgaaccaccctcgtgccaac

SEQ ID NO: 4629 - DNA, 434 bp, Glycine max
  unsure at all n locations
agctntcgagaaatacaaatggtcataacttttcacactgagctcttattcaggtttacaatatattgagtcgctcgaaattaaacatcggaagctctcgagaaattcaaatggtcataacttttcacacggatgtccgattcgagcgcataatatatcgagatgctcgacattgaacatcgaaagctctcgagaaattcaaatgggcataacttttcacactgaggtccgattctggcttacaatatattgagacgctcgaaattaaacatcggaagctctcgagaaattcaaatggtcataacttttcacacgaaggtcagattcgggcacataatatgtcgagatactcggaattgaaccacggaagctctcgagaaactcaaatggtcataacttttcacacggatgtccgattcgagcgcataatatat

SEQ ID NO: 4630 - DNA, 349 bp, Glycine max
  unsure at all n locations
agctggattggacctcagtgtgaaaagntatgtttatttngaattctcgagagctttcgttggtcaatgtcgagcatctcgacatattatgcgctcgaatcggacatccgtgtgaaaagttatgaccatttgagtttctcgagagcttccgtggttcaattccgagtatctagacctattatgtgcccgaatctgaccttcgtgtgaaaagttatgaccatttgaatttctcgagagcttccgtggttcagtttcgagcctctcgacatattatgcgcccgaatcggacatccgtgtgaaaagttatgaccatntgaatttctcgagagctttcgatgtttaatttcga

SEQ ID NO: 4631 - DNA, 420 bp, Glycine max
  unsure at all n locations
ctttacactacgtatntaaattggtttgacattaattntntattacaattaacattttatattttttaacctattaaaaaataatttttaaaatcaaattcttgagatgaatattctttattaaatcaactacgaaaatttacacttaacttatgagaaagaacaattgacctaaaactacaataacaattaaattattagagagaaattactctgttttatttaaggttatggtacttttaatataaatagaactttttttttttgcttaatgacatgagacttaactaatttattaaatatgttatttcatctagttaatatgagatcgatcaatattttcttatgagttgaagcaggaaaacttataaaagcataggttttacgcatgaattattgtaaaaatttacattatcttac

SEQ ID NO: 4632 - DNA, 444 bp, Glycine max
  unsure at all n locations
tganagtgtgtaaccaaccattntctcattgtagaacaccggtaacgtgtatactatcattgtgatcatctttttctctgtcattgaaggtgccacttgagctgtcaagtccctccacctctgggcgtattccttgaatgactcatgctcttttttacacatgttttgtagttgcgttctatccggagccgtatcataattgtactgatattgcctaacgaaggcaaccattangtccttccaagaatagactcgggaaggttccaagttagtgtcataccctaatttcgtccggggattattacttgacgacatgcaacctttgattggccgtttcaagatacttggcaccctttgttgcacaatatgtaagtcttgagacgcaccggaagtcaaaaggaagcagggttatgcgatccgtgaaattccgtaatgtggcggaaa

SEQ ID NO: 4633 - DNA, 439 bp, Glycine max
agcttgtgcttacaaaatatcattaaacaaattagattggcttaatactttaatgttatcatatgcagccacaacaaaagaaaatgcatgccaaattcacaagtcctgtgttgcaactgcttcgagcataattattggtttgcaatgatcacctacagtaaattgaccttttcaaggtgcatgataattttttcattcctagtgcatacaatcaactgaatccaacatacccggaatgccacatgtatcctccatttgtagtacgtggcggaaacattataacaaatataggattttgagaatttttggtagaagaaggtacacaattatgtatataattgtatgtggagttgtctgggggcggcggaaacatagggaaaaatggatggaaacatttgtcgagcacatgttggcccacatacaattgtgaatcttgatt

SEQ ID NO: 4634 - DNA, 443 bp, Glycine max
  unsure at all n locations
ngatacttggtactctattcacttcttcaactcttgtatttatatttcccacatcaactctcacagtgcctgaattccgcaacagtaataccattaacacgtctctctttcgattcacgctttgtttgattgattgccccaatggccgcgtgtggctatatatctgctgccaacttcaatcatcttgttggcgccagaaacttatccaaattcagttcttcggatgccacaatttcgttatcatttggcgggagcgattcaatgggtcttagtttgcgacccgctccaattcgtgctcctaagaggaaccatttctctcccttgcgtgtcgtttgcgtcgattatcctcgaccggagctcgaaaacactgttaatttcgtcgaagctgcttacttgtcttccaccttccgtgcttcttcgcgtccactaaaacccttgaacat

SEQ ID NO: 4635 - DNA, 455 bp, Glycine max
  unsure at all n locations
taacgcattntacctctaagggtcttgtaattgcataatggtggtcagtctctcgatgttcccaccatggtatagcttcaatctctgaccatttactatccatgttctgtgcggagtttctgactgagggtcaagtaattccacaactccatatggcttgacttccttcatggtgaatggtccagactatttagactttaatttgcttggaaacaactttaatcttgagttgaacagcagcacttgttgtcctggcctaaagtccttctttagcagcttcttgtcatgataagcctttactttttctttgtacagtctgaaagactcataagcattcaatctcatctcttccagctccaagagttgcaacttcctctnttcccctaatagagcctcatcaaaattcaggaatttcaaagcccagtatgccttatgttccatttctaccagaaagt

SEQ ID NO: 4636 - DNA, 380 bp, Glycine max
  unsure at all n locations
agctnttaatggaagtcaagagcatgatattttcccgataccgttgactagtgagcaggtatatcagcgggttcaacacctgaatactgtatttgggaagacctaaaagaaggataaaagtcagagttgcatatggaagaagaggtccattttttttatcttccgtactggtgtgatcttgacgttagacattgtattgatgttatgcatgtgaagaaaaatgtttgtgacagtgtgattaggacactccttaacattcaaggcaagaggaatgatggcttgaatacccgtcaagatctagctgatatgggtatatgatcacagttgcatccaaggtctgatgggaagaaaatttacttgcccccagcctgccatacttt

SEQ ID NO: 4637 - DNA, 423 bp, Glycine max
  unsure at all n locations
agcttaacaaaaacaaaaagttggtgaanaaactagcctataaatatcatgtccttttagcctctgaagcagtcatcaagcagattcctcgtctcttgggacctggtctcaacaaggcaggcatgttttattgttttggattttgaatctcttttggacattttagagagaacttggtgatttgcttgttttaataacttacatcggtcattgctgtgttatttttttgttaatcgttggtcacattctgctattacatgctctgtttttaagtacgaacattataaaatctttcaagtggctttctgtatcatatcgaatatggtatattagtcctttcttttccatctagtaagatgctctgttttaaagatttgatatcttctgggttttaaatttcaatgtcgctttagcttgatctat

SEQ ID NO: 4638 - DNA, 402 bp, Glycine max
agcttatgctgcaaatatttacaataaacctccttaacctcggcagcaaaatcatccacagaagaacaattatgacctctccagcaacagatacaaccctggatggaggaatcaccctaacctcagatggtccagccctcagcaacaacaacagcagcctgctccttgcttccaaaatgctgctggcccaagcagaccatacattcctccaccaatccaacaacagcaactaccccagatacagccaacagttgaggcccctgcacaaccttccctcgaagaacttgtgaagcaaatgactatgcagaacatgcagtttcaacatgagaccagagcctccattcagagcttaaccaatcagatgggacaactggctacccaattgaatcaacgacagtccca

SEQ ID NO: 4639 - DNA, 466 bp, Glycine max
  unsure at all n locations
gcttaacatcagaccacttccagggtgctggaactacttcacttggacttgatggggcctatgcaagttgaaagccttggaggaaagaggtatgcctatgttgttgtggatgatttctccagatttacctgggtcaactttatcagagagaaatcagacacctttgaagtattcaaagagttgagtctaagacttcaaagagaaaaagactgtgtcatcaagagaattatgagtgaccatggcagagagtttgaaaacagcaagtttactgaattctgcacatctgaaggcatcactcatgagttctctgcagccattacaccacaacaaaatggcatagttgaaaggaaaaacaggactntgcaagaagctgctagggtcatgcttcatgccaaagaacttccctataatctctgggctgaagccatgaacacagcatgctatatncacaacagagtcacactta

SEQ ID NO: 4640 - DNA, 442 bp, Glycine max
  unsure at all n locations
agctntgaagaactcatgctgccattttataagcacaactttnttttgtcattcataaattagcagaagagtttaattactgagtttgttcttagaacggattccagttcatgatgaacttataaatgacaacatagtcataacttgaatcttataatattcccaaattaataattctgaattatcttcggtgttattttaaataaataagcaatttgatattttcctatatataaagtttagaacaaattgccctgacattccttgtgattttttaaaattgcacacaatacttctatctaacgtttacactaatcttcttataggaatacatgtgtaatatttttcttagagaagaaatgtcaatataatctatttcaaacattnttttatataacaatctatttcaaacaattaaagatagggatttaaaggacaaaaa

SEQ ID NO: 4641 - DNA, 471 bp, Glycine max
  unsure at all n locations
tctaacaagttatcttagattaatggttntggttcaataattgagttgcgtaatttgactgtaagatgtcatttgctttcagcttgggattgttctgcctgggtacgtacttatgcattatatttggaagaaagactcgaatgtttccaggttctgaactatgatattgaagctgagcgtctagctaagcctgttgctggggaggacaaggtaattttctctctcttggataaaataagagatttattacaatgaagtgagtgggaaggtaatttcattaagctatgattatacttttgtgtgatattcaatcaagtgaaaagcatctatgacagtttttgcatggaaaaatgaatacagaaactaccttatctcctttacatgtaagatatataagtatttaattcttaggcattntattggttgttctttaggttctcagacctacatgactgtcataaatattaatag

SEQ ID NO: 4642 - DNA, 458 bp, Glycine max
  unsure at all n locations
ntgatggtgtcgagaagaaatcacatgtttgtcatcatcaaaaagggggagaatgtgaatgtatgtatacatgattntgatgatgtcaaagaagaatctaacaaggctgcttcaaatgataagcatttgcttcaagaataattcaagattgcttcaacaaacaaagccttgtttcaagattcactaaagaccaagccttgccttaaaacaaagtgctttcaagacatgcaaggctctggtaatcgattaccaggaagtgtaatcgattacccgaagacagggttgagaaatagctgttgaaaaatgttttgaatttgaattttcaacatgtaatcgattaccatatgtctgtaatcgattaccagcaacgaaactttggaaattcaaattcaaaagtcataacccttcacattataactgtgtaatcgattacacaaacattgtaatcgattaccagt

SEQ ID NO: 4643 - DNA, 461 bp, Glycine max
tcatgcttaactatgtatggcaaaacttcattactgttgttcaagacatacaagtgagcttgtaacaaatcttctacacttggagtgatcacctgcagtcctcttgaacccttaccacccactctgtcatcatgccgagactcaggaagcccaacaggtttagccttctctaagtattctgaacaaaatccaatggcttcttctacaatgtacctctcaacaatagatgcttctggacgatatagattatttgtatacccttttaagatcttcatgtatcgctcaaccgggtacatccaacgtagataaacaagaccacaacatttgatttctctgaccagatgcacaatcaagtgaatcatgatgtcaaagaaagcagggggaaaatacatctccaactggcacagtataattgcgggctcattgtccaactcatcaaacatgactggatcaatgacttt

SEQ ID NO: 4644 - DNA, 405 bp, Glycine max
cctttcttttctcatgtgcactcaaacccaagctgctggttcgaagacaaccatttttctaccttagatggcttgtgtagcatagctattacttttcctctcaatttgatctttgactctataatgaagcttcttcacatagtccgcctttgcttgaccttctttatgcttaaaaacagaaacattaggcataggcaaaagatcaagaggagttagtggattaaaaccataaacaacttcaagggttaagaaagaagaatcatcggatgacgccgatcgaacatttgctaatagacatcatccacatattattcagggattgaatagaagatacaatagccgacatcggccgttgtaaatcagcgactgatatttttcatccgacggtgcgcaatttcttttaca

SEQ ID NO: 4645 - DNA, 443 bp, Glycine max
  unsure at all n locations
taactaatcagatgggacaattggctacacagttaaatcaacaacagtcctagaattctgacagattaccttctcaatctgtccagaatcctaaaaatgtgagtgccattgcattgaggtcaggaaagcaatgtcaaggacctcaaccagtagcatcttccccattagtaaatgaacctgcccaacttcactctactccaaaaaaagaggatgacaaaaatttaaagagtaagttgcctaacaatttctatgcaggtgaatcttccactggtaattctgacttacagaagtagcatatccctcttccattccctccaagagcaatttccaacgaaaaaatggaagaggtagagaaggagatcttggaaacatttataagagtagaggtaaacatacctctgctagatgcaatanagcaaattccaagatatgctaaattcttg

SEQ ID NO: 4646 - DNA, 402 bp, Glycine max
tgtaggccttggatcttcttcatcaatggagtcttttgcttcttgaagatcaatggcagcaaaatggagaaagaagaaagatgattggagacgccacttcaaggagaagatgagtcaagaacaagcttaccaccataagaagcaatggataaaaacttgaaagtaggagaagaatagtggagggggaagaagaaaaagagcacagaattttatgcctcaaatgaagtctaaactttgaagtgtaattctcaaatgatcaaagttgaaaaaatgcatacacaaggcctctatttatagcctaagtgtaatacaaaattagaagaaaatttgaatttctattcaaatttcactcgaatttgaatttgtggagcccaattttgaggtcaaatttcactaattatg

SEQ ID NO: 4647 - DNA, 429 bp, Glycine max
  unsure at all n locations
tgtggaataaagcctaaacaagtatttatctttgctacctgttttgcagtcccttctcctgcagagaatgggatgttcaaagtcttaacatagtgttattgcaagcataatgatgccagctttttttgcctttcttgatgaaaatattgacttaaaaaattatcctgctttangtggaagtgactgatgctgctattcttgccctaatagaaaactactgccgagaagcaggggtcaggaatcttcaaaagcacatagaaaaaatttaccgaaaggtctgttaatttgtttttttaggtcaatacagtcaacttttagttactgacagtgaaaaggctatgttgtatatggttgaaaagacaaccactcatgatttgatggtttcaataattttggctgcttatttcatcactatatctgaatttgaat

SEQ ID NO: 4648 - DNA, 507 bp, Glycine max
tgatgtgtcattattttctcctatttcttaaccctttttgtcaccattttaattactgattagccttaattgtcaaattaattatgcagttttatcatttgggcctacttgactaattttgtgttttttatttaatttcaggagaattataagcaattggacttgaatccagaattgagcttggacttgaagagagcatacaattttatttcatcaaatcttatcttatccaaattttatttcatctagattttatttcgtccagattttatttcatccaatcttatcttatcttgtccagattttattttatttcgtttatgggcttggactcaaaacagatttgtaagctttggggttgaggacctatataacagcaccagggttttagtttagagagagtttttggagaggagaataattttagggttttgcaattccagtttttactggtcatgcccactggtcatgtagcaataaaatttgttttctgcaaattccgttttc

SEQ ID NO: 4649 - DNA, 449 bp, Glycine max
ttggggttgaggaccaatataacagcaccagggttttagtttgaggagtttttggaagaggaaaatgttggatcgagaggcctcaaaataattaaaaaagggggttgaattaattattcctaaacccttactaattaaaaattactcttttaaggcttttactaaattgttaaaagaacgaggagtagaagagaaacttaacaaaaagtaaaagcggaaattaaatgcacagcggaaagttaaagagtatagaagaaggaaacaaacacacaaggatttttatactggtttagcacaaacctgtgcctacctccagtccccaagcaacctgcggtccttgggatttctttcaaccttgtaaaaaaccttttacaagcaaagatccacaagggatgtacactcccttgttctctttgaatctagtggatgtaccctccactagaactgat

SEQ ID NO: 4650 - DNA, 423 bp, Glycine max
  unsure at all n locations
agcttctcaccccttggcccagggtaganaccctttaataggaaccaagttagggtgccttatccttccaagaaattgaatcatctcatccaattcctcaccccttgcagtgcacactggcctcagaaacctaagcagcctcaccttgttgctcctttgcaacaaagccttgtacagtgttccatagttggattttccaatcacttcaccaggagcatccaaaatgtcacatattgtaaggtcctctccaccttgaaagatcatcaaatcctccttctgtgccacatcctcctccttgtgttctgaactctcaatgtctttactctcatcatactttgacacccttctcttgcaatagaacacataaactgcaacaaaaactaaaaaagtagctgaagctagtccaagcactagtatcaacat

SEQ ID NO: 4651 - DNA, 524 bp, Glycine max
cagcttatgctgcaaaacatctacaacagacctcctcaatttcaacagcaaaatcacccacaacagaacaattatgacctctccaacaacaggtacaatcccgggtggaggaatcattccaaccttatatggtcgaatccttcacaacagtagcaacaacaataatagccttattttcaaaatgtcgttggcataagcagaccataagttcctccaccaatccagtagcaacaacagcaacaaccctataaatagcaaacagttgaggctcctccgcaaccttcccttgaagaacttgtgaggcaaatgacgatgcaaaacatgcagttttaacaagagaccagagcctccattcagagcttaactaatcagatgggacaattggctacacagctaaatcaacaacagttctagaattctgatagattaccttctcaatttgcccaaaatcccaaaaatgtgagcgtcattgcaattgacgtcgcgaaaacagcgtcaagaacctcaaccaccaacatttttcc

SEQ ID NO: 4652 - DNA, 413 bp, Glycine max
tagcttcaacaacagcccggaactgatccttacattatcccacagcagcttaaaacccaaccaataatgctgcaaggtcgacacaaattcccctcttcagtgaaccagtttttttgcccaatccttcctgcagcagcgacaattagcacaccaaaacacgcaataaccaaccattgacgaataaacatttcactgcttcaaatttctatctaacaaattcaaaagcccgagctgcaatttctatactctaaacaaaactgtaacctcaatttaaaatcaaatgcactctcaacccgaaatgcaacaatcagcaaacctaaacgccaaatcaccaacgaacaaacatttcaccgttttaaatttcaatctgccacaacaaatagcaattgccgccccaaacctacaatttcaaa

SEQ ID NO: 4653 - DNA, 389 bp, Glycine max
tggggtcccttgtttcccattcccctctcagctggtgaatcaccagtgctgagtccccgtatactttgagcagtttgacattagagtcaattgccgcctggacgaccaaggcacacgcttcatactcagccatattgttggtgcagtcaaaccccagcctggccatgaaaggtacacattgattgtttggagagaccaatactgctccaatgccatggcctagaacgtttgacactccgtcaaacaacacggtccacttgtcccgatcctcgtctagctttttctcaaataaggccataatgtcctcatcgggaatttgggatgcatgggctgatagtcgttgagaggctgctgacccaataatctgccaggcgcttctttatcgcctt

SEQ ID NO: 4654 - DNA, 529 bp, Glycine max
tgaacacctattagtatttatattttttaaaaaaaatatgtatgacatcaactcgccattggctcccaggttagtggattaagctaaatagaccaatacaaactcacgggttaagtcacctaacccattgatccaaagtttacattgtcacctctacattagtgactttttgttgcctttgtttcctttaagctttttgtgtataaaaatatattttttcttgtgtgaaatatttgtttgtaattcagttttaactatataataaaattgatggctaagtttaatatatatttaaacagacttgatcatttgattatgaggacttggataaaatttatattcttcaaagttttgttaatataactcgttaaacataattctatttttataaactatgaaaaaatacaaaatttatatgaattcaagctcaacacattaaaacaagtaccaaccaatactatcatacctttgacattttaaaaactaatggcaacaaaataatcaatgggatcataatagtctaaagatg

SEQ ID NO: 4655 - DNA, 479 bp, Glycine max
ttgttagcacatcctttgatgcatgatgacattattctcagtgttcaacaatccaacttggttttgaaaatgaagggtttagcttttgtattttgtgaaatgtgatacatatatattatccctttaaaatgtaagaaattactaattttaaaatgttagaaataaaaccaattttatctaaattttaaagaaccatttttttgtttgttgaataacaagagctaccagccccaactagaacataatacactcaatattttaactatagattaatactaataagatcttcttaaacaaattaagtctcaagtttaaaaaaaaactcttaattaatattatggggggtttattatataggctattggaaatctgaaagtttaattctattggaaggtcctttatattcaattaatggaagcaattaatttatatctcttgcatgccggaatattactttaatatcaatagtggcctttttt

SEQ ID NO: 4656 - DNA, 231 bp, Glycine max
tcataacatacttcttgacgatggagcttgtggtgactaataacttgtgtacaaacccatattttcgtcatgaagcatcttcggtacgctctattattgtcgtttttcggcgcaatcttcctattattattagccacagatttgtatggcccgctttctattgtctaacagcttggtattctgacgcatcaaacctatgtgaatctgacttgcttcttgtgaagagagcat

SEQ ID NO: 4657 - DNA, 350 bp, Glycine max
tcttagtctcggctaatgaagatgaattcatggctactttatgcactcctctaatgacaatagcatcacttctgacactaaattgttgggagttggaagccatcttctcaattaaatttctggcttcatcaggggtcatgtctccaagggctccaccactggtagcatctatcatacttctttccatgttactgagtccttcataaaaatattggagaagaagctgctcacaaatctagtggtgaggacaactggcacatagtttcttaaatctctcccagtattcatataaactctctccattgagttgcataattcctgaaatatcttttctgatggttgtggtcttg

SEQ ID NO: 4658 - DNA, 410 bp, Glycine max
agcttcaagtgatacagacagtgaaatcatttttgatgagcttgccacatcctatagagaactatgcatcaaaagcgagaagattcttcagcaagaagcacaactgaagaaggtcattgcaaatctggaggctgagaaggaggcacatgaagaggaaatctctgaacttaaaggagaaattggctttctgaattctaaaccggaaaatatgacaaagtcaataaagatgctgaataaaggctcagatgtgctcgatgaggtgctacagcttgggaagaatgttggaaaccagagaggacttggatttaatcataagtctggtggcagaacaaccatgacagaatttgttcctgccaaaaacagcactggagccacgatgtcacaacattggtctcgacatcatggaacgc

SEQ ID NO: 4659 - DNA, 387 bp, Glycine max
  unsure at all n locations
agcttntagattggtgtaccatgccacagctgttccgggtaagccgtcttgaaagaagtgcattaacagctttttcgtccgtagaatatgcccccatccttcggcaatacatgcgaagatgaccttttggacacgtcgtccctttgaatttatcaaaatctggtactttaaacttggggggaataatgatgtcaggtaccacacatagatccggtaaatacaagaacggatagttgccgaggccttctaccgctctcagcctctctttaagtagatcaatctttcccttgtcccttgcaaagggaagaagttccttaacgggtgcggatggagaccggacgtggcggactatgtctggttggggcaactcatggggggctgagtcct

SEQ ID NO: 4660 - DNA, 370 bp, Glycine max
agcttgatgataaaagtgagaagtacgtgtttgtgggttaccactcaagatccaaggggtacaagctctatactcccaatagtagaaagatcgtcataagtcgcgacgtggagttcgacgaagaagattgttgggattggagtgttcaacaagataagtatgattctcttccttattttgaagaagatgatgaaattgaacccacccatcatagaggaacatattacaccacctgcctcaccgacaccaaggctggatgaaacaagttcaagtgaaaggacaccgcgactaaggagcattgaagagatttatgagctaacccaaaacctaaatgacattaacctcttttttctttttggggactgtgagc

SEQ ID NO: 4661 - DNA, 429 bp, Glycine max
tcattccttttttcactcatgtgtccaagtctttgatggcatagggttgaattgttgacagcctcagtaactgctaccatatcctcatctgcaatcatgtaaagagatcctcgcttcttttcacgagccacaatgagattgccttttgttaccttccaagctctatatccaaaagtggtgtaatgcccctcattatccaactaccctatagatgttagatttccctttaaggcaagaatatgtcaaacattgtacagtgtccatagggatccactagaggtcttgatgtcaatatcacctcttccgacaatgtcaagagattttccatctgcaaggtaaactttctcaaatcttccaaaaatatagttagaaaataaatctttaaagggagtggtgtggaatgacgcacctgattcataatctatgaat

SEQ ID NO: 4662 - DNA, 414 bp, Glycine max
  unsure at all n locations
gcaagcttttacaaaaggtctgccccatatttttctatacttgtagcaccacttgttgagttggtgaggaactatgttctctcatgggaagatggncagcaaaggggtttttagtccttaccctactctaacatacccaacataactaatacatatgtttttattctttttacaggtgttgaggaaagaatccctgagtttcaagaacctctggatttgaggtcaaatccttttcaagggagagggaatgatgcaatcctaccccacaaggtcattggatagaagactccaagaagattgggccagagatggccctagggttctcatgagccttagggtagatttcgagcccatggactaaatatgagcccacttatctttgtacatattaaattaaggtttcattattttttg

SEQ ID NO: 4663 - DNA, 446 bp, Glycine max
agcttatgctgcaaatatttacaatagacctccttaacctcagcagcaaaatcaaccacagcagaacaattatgacctttccagcaacagataccaccctggatggaggaatcaccctaacctcagatggtccagccctcagcaacaatagcagcctgcttcttccttccaaaatgctgctggcccaagcagaccatacattcctccaccaatccaacaacagcaacaaccccagaaacagccaacaattgaggcccctccacaaccttccctcgaagaacttgtgaggcaaatgactatgcagaacatgcagtttcaccaagagaccagagcctccattcagagcttaaccaatcagatgggacaattagctaccccaattgaatcaacaacagtcccagaattctgacaagctggccttctaaactgtcccaaatcccaaaaat

SEQ ID NO: 4664 - DNA, 436 bp, Glycine max
tgacactaaacatctaggtaaacttccagtctaaagatttgatgataaatccactacatcaagctcataattgcacgaaagattctcgaaaagcatcccgggtaatttgttcccagaaatatttcagataagtaatagaaggaagtgacaacaatcctggttgaaaaggccccacaaatgaattcgatgaaatatccaatcgctcaagctgatagtatgaactcaatttagcccgaataccacacctgaagctattttttcttacaactagtataaccaacctgttaccgagctgacgaaactgcggtccaaaagcattatcattcaattcaagcacttgaatattcgtcaaacggcttaaatcacgcaccggccccataaagggaatattataaagtgaaaagggtctcaaattctccacattaccaagcgaatt

SEQ ID NO: 4665 - DNA, 529 bp, Glycine max
tgcattacctcttagtaggtggtgtaagctctattggagcttgtatgcctatgatcttcttcattaatggatttctttgcttcttggaagatgaatggccgcggaatggagaaggaagagagagaggagatgccacttaaaggagaagatgagtctagaagaagctcaccaccataggaggccatggataagagcttggaggaagaatgaggataatgaaaggagaggaagcgaagagcatgaaattttgtgctctaaaagagctctgaaatctgaagtttaattttcaaatcatcaaagttgaaaaaaatgcacacacatgacctctatttatagcctaagtgtcacacaaaattggaggaaaatttgaatttcacttgaatatgtggagccaaactttggagccaaaatttcactaattatgataagcgaattttaagtatggtgttgcccacctatcccagatcaattccaagattctccactaagtgtgcttaggtgtcatgaagcatgtaaagcatgaacgaca

SEQ ID NO: 4666 - DNA, 531 bp, Glycine max
tttcttaaaaatccaaaaagctagagcttatttacatacctctctaatagctaagctcatccccatgacaaaatacatgaaaatacaaaataaaaatccctattataaagactactcagaatgcctcgaaatacaaggctaaaaccctatactactagaatggacaaaatacaaggcccaaacaaaggaaaaccctattctaatatttacaaagataaccggcctcatacttagcccatgggcttgaaatctattctaaggctcatgagaaccctaagacctttccttggatctctggcctaatatacttggagtcttctatccaatgcccttgcggggtaggattgcatcaacttccttggcttcttgtacaaccattctttttagctctgagggaaaaccccaattcctaattttcccatccttaacttgtgttaccagggggataaaaggaacggctagctcctcggtttcattaccttcacaagactcattatccgatctatacccttttatcgcaacaaaaaaaaa

SEQ ID NO: 4667 - DNA, 456 bp, Glycine max
tcacacagtttatttttctcatacttgagttttggaagaccaatttctaagactttcctaactagaagaataagatgatgcatattaatgtgtgcatccctacgatgccacaaccaagaatcatctattttacttaccaagtaactcaactcatgaaatgatgcatgcttaacattcagcatatagatattacctattctcttgccaatgtggacaactttatcggacatggcttcacttgtaagacaacaatttttgttgaattcaattttgaagcctttgtcccaaagttgactaatgcttaaaaggttgtgttttagtccatccacatataacatgttctttatttgagttttgtgttgatttccaatatttccttctcctattatttttcctttgctattgcctccaaatgtgacatgtcctccatcttttgacacaaagtcagagagttta

SEQ ID NO: 4668 - DNA, 515 bp, Glycine max
agcttatgctgcaaacatttataatagacctccttagcaacaaaaccagccacaacagaatcattatgacctttcaagcaatagatacaatccaggttgaagaaatcatcccaatctgaaatggacaagtcctccacaacaacaacaacatattcctccttttcagaatgttgctggtccaagcaagccatatgttcctcctccaatgcagcaacagcagcagcaatcacaacaaagacaacaagcaactgaggcctcttctcaaccttccttagaagagttagtgaggcaaatgaccatccagaatatgcaatttcagcaagagacaaaagcctccattcagagtctgacaaataagatggggcagatggctacttagatgaaccaagctcagtcccaaaattctgacaaattggcttcacaaactgtacaaaatccaaaaaatgtgagtgccattaccttgaggtctggcaaccaaattcaagtggcctcaccagtagcagcacctgcacctg

SEQ ID NO: 4669 - DNA, 544 bp, Glycine max
ttgatggtgtcgagaagaaatcacatgtttgtcatcatcaaaaagggggagaatgtgaatgtatgtatacatgattttgatgatgtcaaagaagaatctaacaaggctacttcaaatgataagcatttgcttcaagaataattcaagattgcttcaacaaacaaagccttgtttcaagattcactaaagaccaagccttgccttaaaacaaagtgctttcaagacatgcaaggctctggtaatcgattaccaggaagtgtaatcgattacccgaagcacggttgagaaatagctgttgaaaaaggttttgaatttgaattttcaacatgtaatcgattaccatatgtctgtaatcgattaccagcaacgaaactttggaacatcaaattcaaaagtcataaccccttcaattataactgtgtaatcgattacacaaacattgtaatcgactaccagtggaaagtttttagaatatctgccaccgccacatcttttcattagatttgtgaatggtcatcaaaagcctaataataggtgacttggg

SEQ ID NO: 4670 - DNA, 273 bp, Glycine max
tacttaagctttatcctttggatctttaagtgtcgagtttggggaatttgatttatctcatccagcgccagtgttgcaacccacatactcacactgctttataaacatgaaggctgtcccagttttctaccaagttccggattgaagagttaattttgtgtagtttttgggactctgaactgtttttgtgagccaccttgatgtcaccctaacatcaagtgttggacctcactgtgtaaagttgatctctttgttagaaaagcacctctggtg

SEQ ID NO: 4671 - DNA, 248 bp, Glycine max
  unsure at all n locations
agcttggtcacntnctttttcaccacatccagaatgattatgttgagtcgcccgctgtggctgcctcactggcttatcttcatcctctaaaagcatcccatgcatgccggtagatgggctaatactaggaatgtttgctaaagtccatctaatggctttcttgtgcttcttgagaactatcaacaacctctcgtcttgcttaccagcaagggaggcacagatgatcactggacaatttttcttgtcct

SEQ ID NO: 4672 - DNA, 461 bp, Glycine max
agctttgatccgcctctatattttccacaatttcattttctctccagataatgagcttctggggaagggtagatgggacagccccaactccatgaatccacttccttcctaatagcaagttaaaattagccttagactgtatcaccacgaaaagagttggtcgaactatactgcctacagcaacatctacttgaatggctcccaaagaatagtcagctttaccctcataattccaaagcacaatgttgtgggcagatagatcagtgtcatgtttcccgatcttgtagagcatagatcgaggcattaagttgacagccgctccttcatcaatgagcactttgttgattccaacattctcaactcttgctctgatgaaaagaggtttgagatgactttttatctgaaaatctggcttttcgaaaaaagctaatttgctcttcccccacacccattattcataa

SEQ ID NO: 4673 - DNA, 355 bp, Glycine max
tcaattctgaatttcgagcgtctcgatatactatgggacactttcggacgtctgagtaagaagttattgtcgttttgaatttgcatagagcttttgttttcaatttcgagcgtctcgatatattacgagagtcaatcggacctccgagtaaaaagttgttgttgttagaatttgctcaaaacttcttttctgaatttcgagcgtctcaatatactacgggacacaatcgcaaatcagagtaaaaagttattgtcatttgattttgctcagagcttctgttctgaatttcgtgcatctcgatatactacgggacacaatcggacattcgagtaaaaagttattgtcgttagatttt

SEQ ID NO: 4674 - DNA, 387 bp, Glycine max
  unsure at all n locations
ttggagcttctctgatggactatgatatcttgacaatgtcacttgcaccaagtgatgaacatcaatctcaagtacagtttgccctagaaaggggactcccagcattgcttggtgtactaagcattcacaggctaacattcccttcaagatcatttgatatggtccattgctctagatgccttgtcccatggactgattatggtattactttaatcttttcacttaaacattaaatgtatgcattagaaaaaatatatttttttaatttcctacttccattctgagtgttggaaagttctaggtcccctgcgtcagttattgggatgctttatatatctaatgggcatttttatttagtgttaattggntttgacacggaatctaaca

SEQ ID NO: 4675 - DNA, 380 bp, Glycine max
tggagaggtttcttccattggtagagttcacttataataacagttttcactctaccattggcatgactccctatgaagctttgtatggtataaggtgtaggacacccctatgttggttagagcacggaaaaggcctcaccttacgaccagaagtggtacagtaaaccacttagaaagctaagctaatttaggaaaggatgagaactggtcagagtacgcagaaaagttatcatgataagaggaagaaagatctggaattcgacggtggtgatcatgtattcttgatagtcactccatggactggggttgggcgagcattgaaattccgaaaacttacacctcgcttaattggtcctttcctaaatcttaataaagttggc

SEQ ID NO: 4676 - DNA, 406 bp, Glycine max
agcttctgccactcactgttctaaattgagcctctacaacatgtcatgcgcagtgccaaaatcctttgtaaatatctcctatctagtcacactacatgttataagttagggcttgaatggttcttttccaaaagatatcttgcaaatatcaacgttgaagatgcttgacttctcagacaaacaagatcttgggggttctttgccaaacttcccacaacatggttctcttcatgacctgaatcttagctatacaaatttctcaggagagcttgcaagtgcaatttccaatttgaagcaggtatttgcaattgatctatcttactgccaaattaatggtacaccttctaattcattctcagaactcatccaacttgcttatctagacttgtcttacaataactttaca

SEQ ID NO: 4677 - DNA, 301 bp, Glycine max
agcttctcgatatattatgcgcctgaatcggatttacatttgaaaagttatgaccatttgaagttctcgagagcttccgttgttacatttcgagcatatccatatattatgcgcatgaatcggactttcaggcgataagccttgaccctatgaatttctcaagagctttcgatgataaattttgagagtctcgatatattatgagcctgaatagctgtaccgcgtgaaaagttatgacagtgtgagaccctcgagagatctcgttgtataattgagagagactaagtatattaagcgccgg

SEQ ID NO: 4678 - DNA, 444 bp, Glycine max
agcttatgcggcaaacatctacaatagacctcctcaacctcagcagcagaatcagccacaacagaacaattatgacctctccaacaacaggtacaatctcgggtggaggaatcatgccaaacagcatcaacaacaatcttattttcaaaatgctattgccccaagcagaccatacattcctccaccaatccagcaacaacaacagcaacagccccagaaacagcagacagttgacgctccttcgcaaccttcccttgaagaacttgtgaggcaaatgactatgcaaaacatgcagtttcaacaagagaccagagcctccattcagagcttaactaatcagatgggacaattggctacacagttaaatcaacaacagtcccagaattctaatagattaccttctcaatctgtccagaatcccgataatgtgagtgccatacattg

SEQ ID NO: 4679 - DNA, 443 bp, Glycine max
  unsure at all n locations
agctngtagggttaaagtctcacaattgtcacgtgctcatgncaaaaatgttagtcgtggctatacgagacatcttgccaaacaaagtcaggttagccataactcgcctgtgctttttcttccatgctatatgtagcaaagtcattgatcctgtcaagtttgatgagctggaaaatgaggccgcaattatactatgccagttggagatgtattttccccctgctttctttgacatcatgattctcttgattgtgcatctggtcagagaaatcaaatgttgtggtcctgtttatctacggtggatgtacccagttgagcgattcatgaagatcttaaaaggatatacaaagaatctatatcatccagaagcatctattgttgagaggtacattgcagaaaaagccattgtaatttgttcagaatacattcagaaggctaaacat

SEQ ID NO: 4680 - DNA, 443 bp, Glycine max
ttacacatatactgtaatcgattaccagagtagattcttataatatattctcaacagtcacatctttttatgtggttcttgaatgactatcaaaggcctatatatatgtgacttgagacacgaatttgcgaagagtttttcagaacaaaaaggtcttatcctcttataaagaaaaatcggtttatcctcttacaaattccttggccaaattacttatgattcaataaggaattatttgagtgctcaaattgttcaatctatctctttcaagagagatttcttcttttcttcttcttcattctgaaaagggattaagagaccgagggtctcttgttgtgaaagaattctaaacacaaaggaagggttgtccttgtgtgtttagaacttgttaaaggaacttacaagatagtggaactctcaagcgggtctgcttgtgactgaac

SEQ ID NO: 4681 - DNA, 433 bp, Glycine max
gcttagatgatgcagctgagtttgtagctacctcatgcactcctctaatgactatagcatcatttctggcgctaaactgctgggagttggaagccatcttctcaattaaatttctggcttcagcaggagtcatgtctccaagggctccacaccactggcagcatttatcatacttctctccatattactgagtccttcataaaaatattggagaagcagctgctccgaaatttgatggtgagggcaactggcacatagttttttaaatctctcccagtattcatacaggctctctccactgagttgtctaataccttagatatccttcctgatggttgtggtcctggaagcagggaaaaaaatttctaagaatactctcttaaggtcatcccagctcatgatggaccttggagcaaggtaatacagtcagtcc

SEQ ID NO: 4682 - DNA, 451 bp, Glycine max
  unsure at all n locations
ctaagctnggtacaattctctcatcctatcctccaactcccatgtagaatcaccctcatcggttccccactgcaccttcaccaacgcgatctcctttcctttcaacgacttcattcttcggtcagtgatcttctgaggttgtgctttataggtgaggttatccttcacctgtacctcgtccactgcaagaatatgtgatggatccgggttgtaccgtctcagttgagagacatggaacacagggtgcaaattcgataaactcggaggtaaggcgatatgataagctacaggcccaatcttcttcaaaatctgatatggacctagatacttgggtgtcaacttcctagccttgagagctcttccaactncggttatgggagaaaccttcaaaaacacatgttcttcttcctgaaaatctagtgggttccaccttctatcataatagctcttc

SEQ ID NO: 4683 - DNA, 355 bp, Glycine max
aagagcagtttccaacaaaaaaatggaagaggcagagaaagagatcttggaaacgtttagaaaagtagaggtaaacatacctctgttggatgcaataaagcaaattccaagatatgccaaattcttgaaggagctgtgcactaataagcggaagcttaaaggaagtgaacgaattagcatgggcagaaatgtcttcgcattgattggtcaatctgttcctcaaattcctgaaaaatgcaaagatccaggtacattcagcataccttgtattatagggaatagtaagtttgacaatgccatgctagatttatgagcctctgttagtgttatgcctctgtcgatttttaattctcta

SEQ ID NO: 4684 - DNA, 431 bp, Glycine max
gctttatctcagtagtagtataatgtgcttgatcatcatctcacgtcctataagcataatatatcaccctgcgcaatttatcaattttttgagcaaggacagcccccaatgcataatttgatgcatcacacataagctcaaaaggggctgtccaatcacgtgcctggatgatgggggtggtagtaaacgctcttttgaggcaatcaaaagcctctttgcatctgtcattaaagtcaaactccacctccttttgcaacaagttggacagtggaagggctactttgctaaaattccttacaaagcgcctgtagaatcctgcatgaccaagaaaagatcgcacctctcgcacacaatagggtgtaggcaattgcgaaataacacaactctttgcaggatctacttcaatacccttattggaaataatgtggcct

SEQ ID NO: 4685 - DNA, 432 bp, Glycine max
agcttaccagtgccatattcactgcaacttgctggtatataagatacaaagaaaatcacatgcatttgcaaataaacgtgatgatattctaactggacaatgttctgtcatgcattccaatattccatgatctttgctattatttttagtgatatatttatatatatgagatatgtgagtttgcgtttatgttttgaagataaggagtatggaccaagaactgtaaaagatttgaagttaattagtgccggataaatattggagaacaacagaacagtgggagaatgtcagagtcccctgtgtgatctacctggtggagttataacaatgcatgtggttgtgcaaccaccttctgtgtgagaagggttagtattactatatactcgtttatttataggcatgccacacagtctgtttactcgtatatacagc

SEQ ID NO: 4686 - DNA, 424 bp, Glycine max
  unsure at all n locations
tagaaactaagctggattcctanatgtacaactgancatggtgtttatataaatgtcatcaatactactaacttgactgtagtgtgcctgtatgtagatgacttgcttgtgacatgttataatgagactaaaattgccaacttttaaggagagatgatgagagaattcgatatgactgatttggaccttatttcttattttcttggaattgaattctagagagctgatgaaggagtgatcatgcatcaatggaagtatgcaagagatgtactgaagaagctcatcatggttgactcgaattctgcagacacatccactgccactggtgtgaacttggtgaaagatcctaatgaagaagacatagatgtactctgtatatacacatggtgtgctcactgaggtatctttagtgtactagacctga

SEQ ID NO: 4687 - DNA, 450 bp, Glycine max
  unsure at all n locations
ctaagctttagccactacagatatttcctcaaagatcccaacggttaaatcatggtaaattgtcttgtgaagttgaaaaccaaatttagagaagatccaacggttaacgaaggctggacagtgtttctaccgaggcagcttcatgtagttttctctagaagcttcattaagaggcttcctccagaagcttcattaagaggcttctagcacactacagacatcttctaaacgatcccaacggtcagatcatggaaaagttttttgtgaagttgcagaccaaatttcgagaagatccaacggttaatgaaggctgggcagcgtttttaccgaggcagcttcatgtagctttctctagaagcttcattaagaggctttctctagaagcttgctcgtggcttctatgagaagctctctgaagaggattctttgagaagctacatncttatctat

SEQ ID NO: 4688 - DNA, 424 bp, Glycine max
  unsure at all n locations
agcttgtaggattttgtgatagtggatttgccggagatgttgatgatagaaaagtactaccggatttgtattttttatgggtgattgtgtttttacatggagttctaagaagcaagacattgtgacactttttacttgtgaagccgagtatgtagctgcaacttcttgcacatgtcatgccatttggcttagaagattgttggaggaacttcagttgttgcaaaaggaaagcacaaagatctatattgataatagatctgcacaagagcttgccaagaatccggtgttccatgaacgaagtaagtatatagatacaaggtagcatttcattagagagtgcattaccaaanaagaagtagaattgactcatgtgaaaactcaagatcaagttgcggatattntcaccaagcctcttcaaattgaa

SEQ ID NO: 4689 - DNA, 444 bp, Glycine max
  unsure at all n locations
agcttcacaaggagttacatcaatgaacatcacaaaataaaccccaatttgatactctaaggatccctacacatgttcattttaacccaaattgcaataaactcatcccttatctctaagcgggctcacgggtgcagctggcagggatatcaacgtctctagtggttccctaagatttctgaaatttttcctctgtttgctttgttagggtttccaagtgttagagagaaggagaagaaattggagcctccaattcactgtatatgttcaatgagaatttctccctccatagacattactttacaaatcccaacactagacatgtgtagaaattagttccaaaggtggtgtccaaatttcactaggatccaacagttaacaagtccgggatcgtagttntcttgggatgggtttggatgtatatgggaatgagatcctaatctc

SEQ ID NO: 4690 - DNA, 423 bp, Glycine max
atacaagaatgaagctctgataccacctgttgtacaagtggcctcaaatatcttaagaagggggggttgaattaagatattacaaattatttcccccaattacaaattctactttgattccaatacaagttccaagttcccttaaagatggatttctaaacaatgattcaaattaaacaatctgaatataaatgtaaagcaataataacataaaagagtttaatggaagagaaagtgccaactcatatttatactggttcggccacacccttgtgcctacgttcagtccacaagcaacctgcttgagagttccactatctttgtaaatccctttacaagttctgaaccacacaatgacaacccttactttgtgttctgatttgtttacatcaagagaccctccgtctcttaactcctttttga

SEQ ID NO: 4691 - DNA, 441 bp, Glycine max
  unsure at all n locations
agcttgtaaactagccatggtctagctacttgcataccctgagggatgaccatgtagacttcttcatttaaattaccatgtaagaaaacattgttcacatctagttgtttgagatgccacttattaatagcagctaaagccaataaaaatctcactatggttagtttaactactggagagaaagtgtccaggtagtcttgttcttccacctgagtatacccttttgccactaatggctttatacctctctatggaaccatcagatttgtgattgatcttatacacccatttacaatcaattatagtcttgtgatgaggaagatcagtgagaacctangtatcattaagctctagtgctttgatctcaacattcatggcttcaatccaattaggatccttagatgctccactgtataactgaggttcaacactctgtgtgat

SEQ ID NO: 4692 - DNA, 454 bp, Glycine max
agcttcagtaaaatgggacagctggcctagatgatgcaatcctacccccccccccaagggcattggatagaagactccaagaagattgggccagagatgcaagagaaggccgtaaggttctcatgagccttagggtagattttgggcccatgggctaagtatgagcccacttatctttgtacatattagattaggatttcattatttttgggtcttgtatgtagggcttcataatgtaggtagggtaccctagaaatgtaggatttttcagcccttgtattttagggcacctagactagtttttgtattacgggtagttttgtaatttcacatgcattaagtgaatatttgatgtgtgtgttgagaaatcaatttaattgaattgggagaagcccaatccaattataatttagagggggaggtgagcatttgcttgctgcacctcattgccaca

SEQ ID NO: 4693 - DNA, 430 bp, Glycine max
agcttcggtcttcaatttcgagcgtctcgacatatttcgggactcaatcagacatccgagtaaaaagttattgtcatttgaatttgctcagagctaaggcattcaagtccgagggtctcgatatattacaggactcaatcagacatccgagtaaaaaagttattgtcgtttgaatttgctcagagcttcggcattcaagtccgagcgtgtcgatatactacgggactcaatcagacatccgagtaaaaagttattgtcgtttgaattttctcagagcttcagtcttcaatttcgagcgtttcgatatattacgggactcaatcaaacatacgagtaaaaacttattgtcgcttgaatttgctcagagctttggtattcaatttccagcttctggatatattacgggtctcaatcagacatccgagtaaaa

SEQ ID NO: 4694 - DNA, 450 bp, Glycine max
  unsure at all n locations
agcttctntgagaaaacttccttgagaagctagagcttagctacacacacccctctcataactaagctcacctccttgagaagcatccttaagaagattcgtaaagaagctagagcttagctacacatacctctctaatagctaagctcacctccttgagatgagaagctagagcttagctacacaccccctataatagctaagctcacccccatgacaaanaacatgaaaataaaaaaaagtccttattacaaagacaactcaaaatgccccgaaatacaaggctaaaaccctatactactagaatggccaaaataaaaggccttgacgaaggaaaaacctattcgaatgggtcataattttcacacggatgtccgattcggtacataactcatctagacgctcgaaattgaacaacgggagctcttgacaattcgaatggtctaacat

SEQ ID NO: 4695 - DNA, 431 bp, Glycine max
agctttaagcaaattcaaatgacaataatctttgactcggatgtccgattgagtcattttataatttgagacgctcaaaattgaatgcaggagctcttaccaaattcaaatgccaataactttttactcggatgtccgattgagtcccgtaatatatctagatgctcaaaattgaaaacagtaactctaagcaaattcaaacgacaataacttctaactcggatgttcgattgagtcatttaataattcttgacgctagaaattgaatacagaagctctcaccaaatttaaatgacaataactttttactcagaagtctgattgagtcctgtaatttatctagacgctcagaatcgaaaacatatgctcttaggaaattcaaacgaatgtaacttttgactcagatgttcgattgagtcatttaataattc

SEQ ID NO: 4696 - DNA, 457 bp, Glycine max
  unsure at all n locations
agctnntgcatagtttggataaatatacacatgcgatcatgacaatgacaaaacagatcgatttatgttgtgtgaatttttcaattttgttacggaatgtatgtttttaatttgcgatataattcaaacactgaaaagattcttttttacatttttatttaatcatgaaatttaaatgattgagtttttgtaataatcacttanaaaattatatttaaaataatttctaattagttgatagtataattttttttttttacaataacaacatgttaaaagtaaaatgttaaattgattgaattttaattnttatggttacctcctttacgtggactaaactgtaatattttttaaacaattaagaaatttagtgtaatgtataaggagtgttgttataatatttntaaaataattaagaaatgttagtataggaatagaaaaaacatggagagattga

SEQ ID NO: 4697 - DNA, 448 bp, Glycine max
  unsure at all n locations
agctttnttcagtcgtctgtaaggatgattgggtgttagaaaacggcgatgcctactgtagactgtttttcttccatgttttagttgtatgtagcttgtgttttcttcacagatggggcatgcatgatgacccttaacactgtaaccgctgagatttccatatggtggaaagtcattaatggtacaaaaaagcattgcacgcatttcaaacgtttccttgcaaaacgcatcaaacactacaaccccctggtccaacaacttttccaggtcttcaaccaacggacttagataaacatcaatgtcatttcctggctgtcttaggcctgatatcatcatagacaacatcatgtattttcgcttcatgcacaaccaaggaggcaaattgtaaattactagcagaactagccatgaactgtgttgagtgcttaaggtgccatatggattcatt

SEQ ID NO: 4698 - DNA, 338 bp, Glycine max
tgaagctgacaggatcaacaatggttggttgaattatctccttagctgggaagacaccccatgtgacagcattaacatcagtttgacccacattagatttccagctcccgtctttattcacagtcatataagttcaagatgtttgatccttgcattcatcaacaagtgcatccagcttttccttagagcagaagaactctacatatgccttctggtaaacatacccgcctggtccaccccagactatgccaaatttcaaacacaaacgatttactgtatctcatatccaccaaccaatatggaccagatatgaataccctcatcacaaactgcaccct

SEQ ID NO: 4699 - DNA, 396 bp, Glycine max
  unsure at all n locations
acaaaattcttgaccgnttccnnnttgggaccntggacttcatgtcccggagggtctcctggagatgctcccctcactaccgttggaggaggcaaggaaggagacggacacggtgctcttcggggccgtcgacgagctcttggagaaaaccggtgttgaagccaaagacattgggattcttgtggtgaattgttgctcgttcaattccacaccatctttctctgactcaattgtcaaccggtacaagcttagagggaacattttggctataattctagtgggatggggtgcagtgctggggtcttgctgttgacttggcacacagttcctcagggtctctcttacatcatggctataaataatattcatgcattttgattgtttactgcatacata

SEQ ID NO: 4700 - DNA, 417 bp, Glycine max
agcttgaaggaaaactggatgcattggttaacttggtaacccagctggctttgaaccagaaatctgtacctgttgcaagggtttgtggtttgtgctcctctgctgaccaccatacagacctttgcccttccatgcagcaacctggagcaattgagcagcccgaagcttatgctgcaaatatttacaatagagctcctcaacctcagcagcaaaatcaaccacagcagaacaattatgacctctccagcaacagatacaaccctggatggaggaatcaccctaatctcagatggtctagccctcagcaacaacaacagcagcagcctgcttcttccttccaaaatgatgctggcccaagcagactatacattcctccaccaatccaacaatagcaaaagcaccagaaacaaccaacag

SEQ ID NO: 4701 - DNA, 409 bp, Glycine max
agaatcattacgcataggcaaaagatcaagaggagttagtggattaaaaccataaacaacttcaaaaggagaacaattagtggtgctatgaacagctctattgtaagcaaattcaacatggggtaaacaagcttcccaagtttttaagttctttctcaaaactgtcctaagcaaagttcccaaagtactattaacaacttccgtttgcccatcggattgtgggtgacaagtggttgaaaataacaattttatgccccacttgctccacaaagtgcttccaaaatgacttatgaacttagagtccctatcactaacaatgattcctggcaaaccatggagtatcacaatctcccttgaaaacaaattagccacatgggaagcgtcatcaaactttttacatggaataaat

SEQ ID NO: 4702 - DNA, 436 bp, Glycine max
atatgtatataaaatgacataacaaagctactaaaaatctaaaacatagattaacactaatagaaatcagagactagaaagagcagtaaaaaggtaaatcacctttggaggtttaattccaactcgaaggaagagctcaggattcattataggcagttcaattgactccctcaattccctgatctgatcagataagccaccaacagctgagtagctgatattaccaggatcttcatgcaacatattgtaaactactggatcaacctggcaactccaacgacaaagaattagagacaatagtgaccaccagggatccaataaatcagatcttagcacaacaggaaaagaacatgttcataaaatgaaaatattaaaataataaactacgacttacttctcgaggaagagctcgcattatggtgagtgttgtcatatc

SEQ ID NO: 4703 - DNA, 477 bp, Glycine max
  unsure at all n locations
atctctaagcacctgcggcatgcaagcttctgcaattaattntcattacaatgctaacatttcctttcttcaattttaactgatagttgaagtaggaataatccatttatcatactctaaatatgcttagcattaatgtgacgaagaaatgtctccttgcagaaggttggtgtcctgtttttgcaacaagtcaggttcgtccttgaactatgaatttaatttctgatacattgtgcataaaccttcatgtaatgcagtttttactggctggtatagctaattaatttgattcaatacttgacagattcacaaagtattgcagcgggcaactatggactgcagttctcaagttgtggcgatattccaggttttagagacaacggaatcaccacctacctattgttgcacaaacaaattcacttcttctcaagaaattggtgatgcctatgggtaatttacgtagacctcagcatgtgc

SEQ ID NO: 4704 - DNA, 404 bp, Glycine max
  unsure at all n locations
ccttgtatatgcataacatcaaaatcgatangtataggacaatcatcaaagatgaccatctcgaatttacccatgaattctctcaaaacatggttcattaatctcataaaattgcttggtgcataagtcaaaccgaaaggcataaccaaccattcatataatccatgtttagttttgaaagcggatttccattcatctccttctttaatccttatttgatagtaaccacttttcaaatcaattttggaaaagaacaagcaccatgcaattcatcacgcaaatcattaagtctacgtattggatacctatatttaatggcaatattgtgtgaagctctacacatcggagcacattctccagaaccatgtctctttgaacccaattccccgacagcacatggacta

SEQ ID NO: 4705 - DNA, 454 bp, Glycine max
  unsure at all n locations
agctntgatnggtttgagaagaaatcacatgtttgtcatcatcaagaagggggagaatgtgaatgtatgtatacatgattttgatgatgtcaaaagaagaatcaaacaaggctcattttgcttcaagattaatacaagattgtttcaacaaacagagccttgattcgagatttcttcaagatcaagccttgcttcacaatgagaggtttcaagtcattcaaggcacatgtaatcgattaccaatacatgtaatcgattaccaatggtttgaaagtgtgtaatcgattacacatcatatgtaatcgattaccagagactctgaacgttgagaattgaaattttaaatgaagggtcacatctgttcaagcataataattgtgtaatcgattacactaattttgtaatcgattaccagagcggattttcaaggaatatcgccaacagtcacatcttt

SEQ ID NO: 4706 - DNA, 358 bp, Glycine max
cagctattcttggtgggttgatgtactctatctcgcagaatggcatgatcactggcagacatagtcataatcaattcacttgcctctttagggattctcaactttatcttccctcctgctgaagcatctaacaactgcttgggttgcggtctcagcccatctataaacatgttcaatagaattggctcagagaatccatgtgtaggagtctttcttaacaaacctcgaaacctctccaatgcttcactcaaagactcatcatggaatgggtgaaatgatgaaataacaactttcccttctgcagtctttgactcggagaagtatttcttcagaaattactcaacaacttcctcccacg

SEQ ID NO: 4707 - DNA, 348 bp, Glycine max
  unsure at all n locations
tttcatcgtcattctgggcatgtacaagagccgtggttatgcgatcataaccttttttaatgtgcttgaataaatattcgacggacattgattgattgcaccattctatgttgaggtgagcctgatatttcaacaataagattggattgtatggtaccacgtatctatcgtctanggttattccatttttatctatattcttactatcattatgccttntataaataggatattcctcttgctcaacaacagtttcaggtngctttttctttgaaaacatctacaacatgtttcatgcatggcgactctctatttgcactgacacatgaatcatgcatatacgattct

SEQ ID NO: 4708 - DNA, 411 bp, Glycine max
  unsure at all n locations
agctnttgcccaatgaacttttcttgacaaagcatatgttgaacaaaaactcttagaaagatgttaagaataattttcttgaaattcgtgtcatggtcacgtattatagccatttgatggctcttgaagaaaccatgttaaaagttgtgactcttggcaatttcttcaaaatcagtcactgataatcgattaccataatggtgtaattgattacacagtttattttatcaaaggttgtgactcttcatgttgaggtttgaaatctaacgttcagaatcactggtaatcgattacaaatattgtgtaatcgattacattattttgaaaatacttttgaacgttacaagacaatggtaatcgattgcatgcccatgctaatcgattactacttggttaatcaattataaaact

SEQ ID NO: 4709 - DNA, 363 bp, Glycine max
  unsure at all n locations
naagctatgctgcanacatttacaatagacctcctcaaccttagcagcaaaatcaaccacagcagaacaattatgacctctncagtaacagatacaaccttggatggaggaatcaccctaatcttagatggtctagcccttaacaacaacaacagcagcctgctctttcttccaaatgttgctgcccaagcagacatatattcctcaccaatcaacaacaacacagccccagaaacagaaacagtgacgctctcgaaccttcctcgagaacttggagcaatgactatgcaaaatgcatttaacagagacagacctcatcagagttactaatagatgacaatgctacacataatcatacagtcc

SEQ ID NO: 4710 - DNA, 311 bp, Glycine max
agcttggaaggtagtcttacctcacaaatatatatatgtatgtttaggtttcttgataccttggatatgcatgtatgtggcaaaaaatacctcacaatatatatatgtatgtttaggtaacacgataccttggatatgcatgtatgtggcaaagaatacctcacaatatatatatgtatgtttaaggagcaagataccttggatatgcatgtatgtggcaaaaaatacctcacaatatatatatgtatgtttaggtagcaagataccttggatatgcatatatatagcaaaaatacctcacaaaaatatac

SEQ ID NO: 4711 - DNA, 132 bp, Glycine max
  unsure at all n locations
gctctcgagaaattcaaatggtcatttacttatcacacctaagttttattcangcgcataatataccgagacgctcgaaattgaacaacggaagctctcgagaattctaatgggccttacttatcacaccaa

SEQ ID NO: 4712 - DNA, 322 bp, Glycine max
actagctatgtgacatttggagatggctctaaaggaaagatcattggaatgggaaagctagtccatgatggaccttctaatctgaacaaagtactgctggtgaagggactgactgcaaacctgatcagcatcagtcagttgtgtgatgaaggattcaatgtaaacttcacaaagtcagaatgcttggtgacaaatgagaagagtgaagtcctaatgaagggcaggagatcaaaggacaactgttacctatggacacctcaagataccagctactcctccacatgtctatttctccaagaagatgaagtcagaatatggcatc

SEQ ID NO: 4713 - DNA, 304 bp, Glycine max
  unsure at all n locations
gagcgtctcgatatattacgggactctatcatacatccgagtaaaaagttatggccgntttgaatggctcagaggttcaaaattcaatttcgagcgtctcgatatatttcgggactcaatcagacatccgagtaaaaagttattgccgtttgaattggctcagaggttcaaaattcaatttcgagcgtctcgatatattacgggactcaatcagacatccgagtaaaaagatattgtcgtttgaattggctcagaggttcaacattcaatttcgagcgtgtcgatatattactggactgaatca

SEQ ID NO: 4714 - DNA, 348 bp, Glycine max
  unsure at all n locations
ctgcagctttgagccattctacgatataactttttatctcgatggccgattgagtctcgtaatatatcgacacgctcgaaattgaatgttgaagctctaggcctattcaaacaacaataacgttttactcggaagtncgattcagtgacgtaatatatcgggacgctcgaaattgaatggtgaacctctgagccaactcaaacgacaataactttttactcggatgtctgattgagttccgtattatatcgagacgcttgaaattgaatgttgaacctctgagccaattcaaacgacaatatactnttactcggattgttgatggagtcccataatatatcgagacgc

SEQ ID NO: 4715 - DNA, 288 bp, Glycine max
  unsure at all n locations
gctctcgagaaagttttatggttattactnttcaaacgcaagtctgattaaggtgcataataaatcgagaagcttgaaattgaacaacggaagctctcgagaaattcaaatgggcattacatatcacacggaagtccgattcaggcgcctaatatattgagacgctcgaaattgaacaacgaatgctctcgagaaattaaaatggtcataacttgtcacacggaagtctgattcaggcgcataatatatcaagacgctcgaaattgaataacggaagctctcgagaaa

SEQ ID NO: 4716 - DNA, 389 bp, Glycine max
  unsure at all n locations
agctntntcaaaatccactttaaacaccaagcacaatttctttagcctnctatcctnctcaacaaccttattagcaatcaagactccatgcaacaactgtctacccttaacaaatgctgactgtctttcatcaacaaagtgattcaataccttactaagcctattagataggactttagcaataattntgtagacacaacctatgagggatatgggtctgaaatcacttatatgtcgaggatccttgagcttaaggataagagcaatgaatgatgaattgaggcccttaggaaaagcagcattcacatgaaattctgccaaaaaccttaagaaactcaagttcagctcattccataaatgcttaataaatatgaaattaaacccatctg

SEQ ID NO: 4717 - DNA, 214 bp, Glycine max
  unsure at all n locations
agtgctngaaagaatcaatgacantgctttactaagtgagctgcccggtgagtataatgctagttccaccttcaatgtctctgatttatctctttttgatgcagatggagaatccgatttgatgacaaatccttctctagagggagagaatgatgacgacatgttcaaaagcaagggcaacgatccacttgaaggacttggacgacctatgaca

SEQ ID NO: 4718 - DNA, 208 bp, Glycine max
tcagatatcttaagaagggggggtgaattaagatattaccaactatttccccgattaaaattctatttcactttctattcaaggtacaaattcccttaataatgaacttcttaaatattgattcaaatagaaaaatttggatattaatattaaaccaatattaattaaagagttttagggaagagaaagtgccaacttagatttatat

SEQ ID NO: 4719 - DNA, 293 bp, Glycine max
ctcagctggattcctttagtagggaatctattcttcctaagatggttccaaacccagtcaccctcattaagaactagctcttttcttcctctattgcctttagttgaatacacctttggttgattctctatttggttcttaaccctctcatgcatcttctttacaaattctgacctagattccccttctttatgtataaaagaagtgtccagtgggaggggaatgaggtctaacggtgttaggggattgaacccatagacaacctcaaaaggggactgcttggtggttctatg

SEQ ID NO: 4720 - DNA, 328 bp, Glycine max
tcttaagaagggggggttgaattaagatattccaaacttgctcccctaattaaaaatctatttcactttttactcaaattatgaatttccttaatgaccatcttccttaatatttattcagatgaagcaacttgaatatgaatataagccataataaatcaaggagattaacggaagagaaaatgcaaacttcagtttatactggttcggccacacccttgtgcctacgtccagtccccaagcaacccgcttgaaagtgcactatcttgtaaattctttgacagttctaacacacaggacaatcttctttgtgttagaatccttacac

SEQ ID NO: 4721 - DNA, 465 bp, Glycine max
  unsure at all n locations
tcctcgtggtttctttgagaagctntctcaagaagcttcttttagaagctagatccttatctatccacacccctctattaactaaattaacttccttaaaaataattatggatgaaaataacgcaacaaataatcaaacatcaaatataattactatatatatatatatatatatatatatatatatatatatatatatatatatcagggtgttacaactctcccacccttttagaaatttcgtcctcgaaatttaccttactcaaacaaggatgggtgagcttctcgcatctgactttctaattcctacgtggcatcttctcctgatgcacctccccagatcaccttgaccaacggaatctcttttcctcttaagtgtttggtcgcctatcctcgatcctcaaaagcaatggttcatatgtcaaattctccttcacttgtacatcatccaattcaatcacatgg

SEQ ID NO: 4722 - DNA, 305 bp, Glycine max
  unsure at all n locations
agaaaacatgtgggccatcatcgaccaatacaaggaaaagttaagcctagcggtcactcacaaacaaaggctataggacgactgcgtgaaagtataagtcctgcaagtggaaagggaagcaagggaaagggtgatcgattcattacacagagaagcaatgatgtggatggataggttctcctttactgaaattctgatactggggacagatgtcctacaggatgtcacgacatcgcgcttcataacatgcagcttgtatatgaccgtatgaacagattaaacaagtntataacacaagagaattg

SEQ ID NO: 4723 - DNA, 427 bp, Glycine max
tctggtgggacatcttgactcgcgtttctatctgacattcaccacagaatctagcttcttctattttcagattgggaatgcctctaacagcacctctgtcaatgattatcttcatgcctcttaagtgcagatgtccgaatctttgatgccatattctgacttcatcttctttggaggatagacatgtggaggagtagctggtttcttgaggtgtccataggtagcagttgtcctttgatctgctgcccttcattagaacttcactcttctcatttgtcaccaagcattctgactctgtgaggtttacattgaatccttcatcacacagctgactgatgctgatcaagtttgcagtcagtcccttcaccagcagtactttgtccagactaggaagtccatcatgaactagctttcccatttcatgatc

SEQ ID NO: 4724 - DNA, 425 bp, Glycine max
  unsure at all n locations
tctggtgggacatcttgacttgctttccaatctgacattcaccacagattctgccttcttctattntcagattgggaatgcctctaacagcacctttgtcaatgattttcttcatgcctcttaagtgcagatgtccaaatctttgatgccacattctgacttcatcttctttggagaatagacatgtggatgagtaactggtttcttgaggtgtccataggtaacagttgtcctttgatctgctgcccttcattagaacttcactcttctcatttgtcaccaagcattctgactttgtgaagtttacattgaatccttcatcacacaactgactgatagctgatcaagttgcagtcagtcccttcaccagcagtactttgtccagactaggaaagtcatcatggactagctttcccattcagtga

SEQ ID NO: 4725 - DNA, 359 bp, Glycine max
  unsure at all n locations
agcttgtgcctcttcatgtctggaatatgaatacatcatatagatccaaagacccttangtgctttgctgatggcttcttctcgttccaagcttcaattggagtcttgtttttactgacttagttggacatctcgttagtatgtaaacagcagtgtagactgcttcagcccagaatgtgttatgtagtcccttttccttgagcatcgatctagccatctccataattgtgcgattctttctctcggacanctccatttgttgaggagaatatgcgactgntaagtgtcgctcaatgccttcatccttacaaaatctttcacactcacgagaggtgtactctttgtcgcgatcacttctt

SEQ ID NO: 4726 - DNA, 299 bp, Glycine max
  unsure at all n locations
agcttggntatctccttctttactacatcaagaatcaccgggttgagtcttctctgtgggtgtcttactggtttagctccatcctctaaatttattcgatgcatacatgtggatgggctaataccaggaatgtccgccagggtccagcctataaccttcttatgcttcttgagaactgacaacaacttcttctcttgctcatcagcaagggaggcagatataatcactggaaaactcttgctatcatccaagtaagcgtattttaaatttgatggcagaagcttcaattctggtgtggt

SEQ ID NO: 4727 - DNA, 438 bp, Glycine max
  unsure at all n locations
agcttctaaactntatacaagaatgaagctctgataccacttgttatacaagcggcctcagatatcttaagaagggggggttgaattaaaatattccaaactacttccccaattaaaaatctatttcactttttattcaagttatgaattccctcaatgacaatcttcttaaatattgattcaaataaaacaatttgaatatgaatataaagcaataataaataaaggagattaagggaagagaaagtgcaaactcagatttatactggttcggccacacccttgtgcctacgtncagtccccaagcaacccgcttgagagttccactatcttgtaaattccttttacaagttctaaacacacaaggacaatccttcctttgtgtttagaattcctttacaacaagagactcacggtctcttaatcccttagagaatg

SEQ ID NO: 4728 - DNA, 444 bp, Glycine max
  unsure at all n locations
gcttataatatatcgatacgctcgaaatttaacatcagaaactctctagatattcaaatggtcataacttttcacacggatgtgcgattcgggcgcataatatcgcgaggggcttgaaattgaacaacggaagctcttgagaaattcaaatggtcatagcttctcacacggatgtccgattcgagcaaatcacatatcgagacgctcagaattgaacaacggaaggtcttgagaaatacaaatgatcttaacatttaactcgaatgtccaattcaggcgcatcacatatagtgacactcngaattgaacaacggaagctctcgagaaattcaaatggtcataactnttcacactgatgtccgattcacgcctataatatattgatacgctcgaaattaacatcgaagctcttgagatatcaaatggcataactttcacatgatg

SEQ ID NO: 4729 - DNA, 389 bp, Glycine max
  unsure at all n locations
agcttctcgacatatgatgctctcgaatcggacatccgngtgaaaaggtatgaccatttaaatttcgcgagagctttcgatgtttaatttcgagcgtatcgatatattataagcctgagtcgtacatccgtgtgaaatgttatgaccatttgaatttctcaagagcttctcgtgttcaatttcgagcctctcgacatattatgcgcccgaatcggacatccgtgtgaaaagttatggccatttgaatttctcgagagcttccgatgtttaatttcgagcgtatcgatatattataagcctgaatcggacatccgtgtgaaaagttatgaccatttgaatttcacgagagcattcgttgttcaatttcgagcgtcactatatgtgatgcg

SEQ ID NO: 4730 - DNA, 337 bp, Glycine max
  unsure at all n locations
cttgagccaactcanacgataataactttntactcggatgtctgattgagtcccgtaacatatcgagacgctcgaaattgaatgttgaacctctgagccaattcaaacgacaataacttttttcacggatgtctgattgagtcccgtaacatatcgagacgctcgaaattgaatgttgaacctctgagccaattcaaacgacaataactntttactcggatgtctgattgagtcccgtaacatatcgagacgctcgaaatngaatgttgaagctctgagccaatacaaacgaccatatacttttactcggatgtctgattgagtccccgaacatatc

SEQ ID NO: 4731 - DNA, 422 bp, Glycine max
  unsure at all n locations
tcaacaaaggggagatggaccatttcaagtgnttgaaagaatcaatgacaatgcttacaaagttgagcttcccggtgagtataatgttagttccaccttcaatgtctctgatttatctctttttgatgcagatggagaatccgatttgaggacaaatccttctcaagagggagagaatgatgaggacatgaccaagagcaagggcaaggatccacttgaaggacttggagggcctatgacaagggctagagcaaggaaagccaaggaagctcttcaacaagtgctgtccatactatttgaatacaagcccaagtttcaaggagaaaagtccaaggttgtgagttgtatcatggcccanatggaggaggactaaatggcaccactttgtctcaattttagagtggttagtttttctaaataat

SEQ ID NO: 4732 - DNA, 393 bp, Glycine max
  unsure at all n locations
tcaagaaaaagatggcctcaacaaattccttatttccagaatggaattctatcaatagacctccaatctttaatggagagggttaccactactggaaaacccgaatgcaaatttttatcgaggcaatagatctaaatatctgggaagccatagaaatagggccttatatacccaccacagtagaaagagtttcaatagatggtagttcatcaagtgaaagcataaccatagaaaaacctaaagatagatggtctgaagaggatagaaaacgagtacaatacaacttaaaagccaaaaacataataacatctgccctaggaatggatgaatatntcacggtttcaaaatgtaagagtgctaacgaaatgtngaacactcttcgattaacacatg

SEQ ID NO: 4733 - DNA, 428 bp, Glycine max
  unsure at all n locations
agcttgcgcaacanatatttaattgttgcgtgatcagtgtaaatcactatcattgatcccactagataagatcgaaatttctcaagtgcaaacataattgccaacaattctttctcaatggtggcatagttaatctaagcatcattcaaaactttgctagcataatatatggtatgaaacattctgctcttccgctgccccaacacagcacctactgcataatcacttgcatcacacatcaattcaaactcttgtccccagtctggtgctgtaatcataggagcagaaaccaatttggctntgagagtgttaaaggcttctaaacattcttcattaaacacaaacacaacctccttgttcaacagatngcttangggtttaagcaatttggagaagtctttaatgaatcgccgataaaatccaacatg

SEQ ID NO: 4734 - DNA, 454 bp, Glycine max
acttaactcttcttaccttaacgaattgagttgtggttaaagactctctactgtgggtaactactatccagcatgccctgaacctgaattaactatgggcgctgccaagcacacagatggtaacttcatgactttacttctacaagaccaaattggtggtcttcaagttcttcatcagaatcaatgggtcaatcttcctccagtacatggagctcttgttgtaaacgtaggagaccttctacaggtaaatattccaagttattattctcaatcgttagattatgcattttagagcttacttttaagtttaaatgtgttttaggttcctaatgaatcttagagcttactttctatgacaagtgattgatttttcttctagatatctaatcaagtgtgtcgtacaatctattcattatatatggaaagtttcgtttgagtcgatgttgcacttaaa

SEQ ID NO: 4735 - DNA, 470 bp, Glycine max
  unsure at all n locations
taagaaatctatgtatggtttaaaataagcctcccgtcagtggtaccttaagtttcatgggataatttcctcatttggttttgatgaaaaccccatggatcaatgcatataccacaagattagtaggagtaaaatatgttttcttgttttatatgtagatgatattttacttacagccaatgatccgggtttgctacatgaggtgaaataatttctctctaagaattttgacttcaagaatatgggtgatacatcttatgtcattgacattaagattcatatagatagacctcgaggtattttaggtctatcacaggaaacctatattaacaaaattntagagagatttcggatgaaagattgttcactaagtgttgctcccattgtgaagggtgataggtttaatttgaaccaatacccacagaatgactntgagagagaacatatgagaaacattccttatgcttcac

SEQ ID NO: 4736 - DNA, 334 bp, Glycine max
agcttctaaactctgtacaagaatgaagctctgataccactggttatacaagtggcctcagatatcttaaggagggggggttgaattaagatattccaaactgtctcccctaataaaaaatctatttcactttctacttaccttatgaattcccgtagtgacaatcttcttaaatattaattcaaacaaagcagcttgaatatgaatatgatgcaataatgcatgaaggagattaatggaatagaaactgcatactcagctatatactggttccgtcacactcttgagcctacatccaggccccaagcaacccgcttgagagaacactatcctg

SEQ ID NO: 4737 - DNA, 416 bp, Glycine max
  unsure at all n locations
catgcaagcttcgtgatcttggacaagagggttntatgttagcacatgcaccttattatgaaaaattagaaactgagttcaagaagccattgtatctcggatgcgcaaacttcacacgattatcgaaggtgttagctntggtgaatttgaaggcaagatttgggtggagtgacaaaagcttcaatgaattacttttgttattgaagaatatgcttcctatggataacacgttacccaagaatcattatgaggccaagaagaatttatgttcagtgggtatggaataccaaaaaatacatgcttgccctaatgattggtatttgtatagaaatcagtttacacaaatggcgcactgccctacatgtggngtgtcatgctacaaagtgaagtgatgatgcaaccacatacaaggatcg

SEQ ID NO: 4738 - DNA, 384 bp, Glycine max
ctaagcttctaagaacagccttgataccctttattctccatagaggcttctccaaagaagatggtatcatccgcaaactgaagaatattcactgggaccttgttcttccctaccataaagctgtgaaataagattctggacattgcttccctcatcaatcctagtagcccttcagcagccaagacaaataaaagaggggccaagggatccccttgtctcaatcctctttgaggcttaaattcttcagttggacttccatttacaagaatggatattgaagctgatgagaggcaacctttaacccaactaatccatttttcgtggaaccccattcttctcatcatataaaagatgaattgacaggccacagaatcataagctttt

SEQ ID NO: 4739 - DNA, 358 bp, Glycine max
  unsure at all n locations
taataagtccatctatggattgaaacaagcctcctgctagtggtatttaaaatttcatgaggttatttcttcattcagctttgaagagaatgtcatggatcactgtatatactagaaggtcagtgggagtaagatttgtttccttgtattatacatagatgatattctacttgcgactaatgataagggtatgctatatgaggtgaaacaatttctctcaaagaactttgatatgaaggatatgggagaggcatcttatgtcataggcataaagatccatagagaaagatctcgaggcattntaagcttgtctcaagaaacctatatcaacaaagttttagagagatttaacatgaaa

SEQ ID NO: 4740 - DNA, 312 bp, Glycine max
taaacaatgatcaaacttactctgtggaactggctttgtgtacatatcagctggattgtgcagagtgctgatcttatgaactctgattcttctatctgaccgaatgaagtgatatctaacatctatatgcttggttctatcatgatgaacctgatccttggccaagcatatagcactaaggctatcacagtagatgttagcatattcttgattaattctgagatcatttatcagacctcttagccaaattcctttctttgcagcttcagtgagagccatatattcagcctcagtagttgagagggcaacaaa

SEQ ID NO: 4741 - DNA, 473 bp, Glycine max
  unsure at all n locations
tgtgcatccaataccctgatgaggatgtcccatatgttcttttaactggactaatccatttgcttccagagtttcatggccttgcaggtgaagacccacacaaacatctgaaagaattccatattgtttgctccaccatgaaacccccagatgtccaggaggatcacatatttttgaaggcctttcctcattctttagagggagtggcaaaggactggctatattaccttactccatggtccatcacgagctgggatgacctcaagagagtattcttagaaaaaaatttccctgcttccaggaccacgaccatcagaaaggatatttcaggtattagacaattcaatggagagagcctatatgaatactgngagagatttaaaaagttatgtgtcatttgcccgcaccaccaaatttcagagcagcttcttctccaatatttttatgaaggactcagtaacatggagagaagt

SEQ ID NO: 4742 - DNA, 470 bp, Glycine max
  unsure at all n locations
ngtgcctcttcacgtctggaatatgaatgtagcatatagatctcaaagacccttaggttctttgctgatggcttcttcccgttccaagcttcaattggagtcttgtcttttacagacttagttggacatctgttgagtacgtaaacagtagtgtagactgcttcagcccagaatgtgttaggtagtcccttctctttgagcatcgatctagccatttccataattgtgcgattctttctctcggacactccattttgttgaggagaatatgcgactgtaagttgtcgctcaatgccttcatcctcacaaaatctttcaaactcgcgagaggtgtactctctgccgcgatcacttcttagtacttttatccgttttccactttgattttcagcaagggccttgaacttttngaatactccaaagactactgattttcttttagaaaatatacacatgtcattctagagaag

SEQ ID NO: 4743 - DNA, 366 bp, Glycine max
  unsure at all n locations
agcttgaccaggaattatntggatgggttggatgttgaattcatgttgttcctggtgcggagatgatggtactgcgggtgaaccaaaagctgcagtttcttttggtgaggtagccatggaagagcagagcgtttggaatgatttcgtaaatctcagaaagctattgggaaatgctggagaaaacacgaatgccaagcagatataaatttgaatgaagaatgtagaggggcgtgtgaagcaacggtcgaatttgctttgtagtgaacgtgctattaatgttaagtgattcgtttgggcacgttcagattgcagtagctgctataattcctctagcagacaaatgcccagcttgcccctcagtttttc

SEQ ID NO: 4744 - DNA, 444 bp, Glycine max
  unsure at all n locations
ggtcatcaatgaagcccttgtgcactggtccgaaacctccttcgccgagaaaattactcgaagagaaactctgcgtgatgatcttgagctccgagagcgaaaacacatgcaggttagaccccactagagaaacggagagatcctccgaaagcgttgagccagggaaactcaagtccgttatagagaccctgttggaagaagaaccaccctttgtagccaccactttggttggcttcggagaaggtgacacagactcaccctcataacaactagagaagctcgatcccatgtgaattatctttaatctattaagtcctatgctgcacaagtatctatgtttctataggaagagagatatgttngatgaacgtttataagtagatgggaaatgattggagatgatgtggttgaagattttaaaggggtagcatatatataaaatct

SEQ ID NO: 4745 - DNA, 387 bp, Glycine max
  unsure at all n locations
agcttcttagtttcagatgatgcagatgagtttgtggctacctcatgcactcctctaatgactatagcctcatttatggcgctaaactgttgggagtcggaagccatcttctcaattaaattcctggcttcaacaggggtcatgtcttcaagggctccaccactggcagcatctatcatacttctctccatgttactgagtccttgataaaaatattggagaagaagctgctcagaaatctggtggtgagggcaactggcacatagttntttaaatctctcccagtattcatataggctctctccactgagttgcctgatgcctaaaatatcctttctaatggtcgtggtcctggaagcacggaaaaagtttctaanaatactctct

SEQ ID NO: 4746 - DNA, 369 bp, Glycine max
taagctccttcaactgcacaaggctcttaatatttgaagagtatccttgtggaaccttcacccgacgaagacactgacaaaaacttatcttctcattcttggacaaagtatggcaagctgggggcaagtaaattttcttcccatcagaccttggatgcaactgtgatcgtatacccatatcagctagatcttgacgggtattcaagccatccttcatcttgccttgaatgttaaggagcgtcccaatcacactgtcacaaacatttttctccacatgcataacatcaatacaatgtctaacgtcaagatcataccagtacggaagatcaaagaaaatggacctcttcttccatatgcaactctaacttt

SEQ ID NO: 4747 - DNA, 454 bp, Glycine max
  unsure at all n locations
cttgatggtgtcgagaagaaatcacatgtntgtcatcatcattaaaggggagaatgtgaatgtatgtatacatgattttgatgatgccaaagaagaatctaacaaggctgcttcaaatgataagcatttgcttcaagaataattcaagattgcttcaacaaacaaagcccttgtttcaagattcactaaagaccaagccttgccttaaaacaatgtgctttcaagacatgcaaggctctggtaatcgattaccaggaagtgtaatcgattaccagaagacagggttgagaaatagctgttgaaaaaggttttgaatttgaattttcaacatgtaatcgattaccatatgtctgtaatcgattaccagcaacgaaactttggaaattcaaattcaaaagtcataacccttcaaattataattgtgtaatcgattacacaaacattgtaatcgatt

SEQ ID NO: 4748 - DNA, 459 bp, Glycine max
  unsure at all n locations
tcaatatcttacgtccattatagaatatactagtggtttccgtatattaaaagtaaacttagtaatttttctttaaacttactaatattttaaaaccatcagagtaaacaatgaaaatgataaaacttggggcgaaactatatatgaacgaatgtgaaatatgaacaacatgtttcataaagcaagttaaatattatcatgctaaaagtggcgatgtcttgtcccaactaataattaattttctgaaatgttttatttactgtaacttttgtttcaattggcatctttntttattttgagagagaatatttttaaaatagtagtgaataaaaaataagtgcaaataaagataaaaacacacacaattntgcatacattattaattatntaatgttcaaataattttcatgacacttgatggatgatacaaacatatacatacattgaaacaaaaacatg

SEQ ID NO: 4749 - DNA, 428 bp, Glycine max
  unsure at all n locations
catgcaagcttgtaacttatataatatatacattntattgtaattatattttaacacatcagaatggtgcgcctataacccacaggtcccaggatcgaaacctggttctgataaagagtggcttccgatctatcacatatatatatattntatgcgtaaaacatatatcattacgcaatgacatttgagtataataaaaaatagttctgcagggcctaacatttcagtgcttatattaatttagttaccatttaaattttattattgagtcaactttntaacgtatattcatattttctctttgttaattctaatttaatttgtttaagtaaacatatcttttatggataataatggcttccagtttcttagtgaaccacatctganaaattatactcgaacaagaagatgtgtttcactatgttcat

SEQ ID NO: 4750 - DNA, 418 bp, Glycine max
  unsure at all n locations
catgcaagcttgttntcattntccttgtctacaaaggcttaaagatggtttcattcatttaaaggtaacagtcttaagacttgtgatgacgtggttgaaaaattcttgaagaaatacttcccagagtccaagaatactaaaggaaaagctgccatctcatcctttcatcaatttccagacgagtccttgagtgaggctttgaaaagatttcatgggttactaagaaagacacctactcatggattttcagaaccaatccaactcaatattttcattgacgggttaatgccacaatcgaggtagcttttagatgcttctgcaaggggaaaaataaaattgaagacccctaaagaagccatggaattaattgagaatatggctgctagtgaccatgcaatcttgcgtgatagagcacaca

SEQ ID NO: 4751 - DNA, 434 bp, Glycine max
  unsure at all n locations
tgtttctcatatcaaggaatcaactataattcctgttcttgttcatgctggtaatgttcttccatataaatntcatattctgtagttagtatataggctntattttttgaatttgttcgtttcattatgcagatggaatttgtcatgtatatgttgacaagtctgctaatattgatatggcaaagcagattgttagggatgcaaagaccgattatcctgcagcttgcaatgcgatggtaattagcatttacacatcctttgcaatgcactaaataaaacatgttaatctgtatcctcctctcctnnttgggtttactgaattggtaggtgtgatgttattggaattatggactatgctcatcaaaatatnnttgtttggtattctagganactcttctcgtcacaaggatctgtcaataatggtggactcatga

SEQ ID NO: 4752 - DNA, 394 bp, Glycine max
  unsure at all n locations
agctntacttcaatattntccatatcatcaagtaatttgttgaaatcagccaattgttcagtggttgttcttgactctgtcatcttgaaggtgtacagttagtgcttcaagcatagccgatntgcaagggactttgtcatatacaatgactccagtttcagccacattgaggctgttgtcttttctcttgcaacttctcttaaagctttatctccaaggcataaaatgattgcacttctggatttagcaatcatctctgatttctcctttgagcttagagaatcagacatcttttcttctcctttaagagcttctgcacagccatgttgaatcaaaaatgctncatcttgattctcataacccgagtcattttccccttgaaactctctatatc

SEQ ID NO: 4753 - DNA, 455 bp, Glycine max
  unsure at all n locations
tganatngaacaacagaagctctcgagatattcaaatggtcataacttatcacatggaagaccgattcaaacgcataatatatcgggaagctcgaaattgaacaacggaagctctcgagaaattcaaattgtcataacttatcacacggaggtccgattctggcggatagtatatcgagaagctcataattgaacaacgaaagctctcaagaatttcaaatcgtcataacttttcaaacggaagtccgattcaggtgcataatatatcgagaagcttgaatttgaacaacggaagctctcgagaaattcaaatggtcataacttttcacacggaagtccgattctggcgcataatatatcgagacgctcgaaattgaacaacagaagctctcgagaaattcaaatggtcataacttttcacacggaagtccgattcaagcgcataatatatcgag

SEQ ID NO: 4754 - DNA, 158 bp, Glycine max
agcttctcgatacattatccacctgaatcagacttccgtgtgataagttatgaccatttaaatttcttaagagcttccgttgatcaatttcgagcgtctcggtatactatgcgcccgaatcggactttcgtgtgataagttatgaccatatgaattct

SEQ ID NO: 4755 - DNA, 339 bp, Glycine max
  unsure at all n locations
ccaagctntgtgccaaccagaattatggtgacaccaggatcataatgcttcaactccggaatccactgaaaatgaaaccacacatgcaatttatcatcgactttttttataaatgaattattttcttaacatataacatgatccatacatccttcattacaggccatacagaaaccttataattatcaaaataaataagaagaaatacacccaaaacactatgaccacaataaattgccacgaagtacctttttagagacattttcataactggccttgcttatgagagagagagccagtatgaaaacatcggcaccacgggaactcaaaggtcttaat

SEQ ID NO: 4756 - DNA, 449 bp, Glycine max
  unsure at all n locations
tcttattcacataacaccaatagtattccatttataagcagtgattgacgattcanattacatatttataagagaccaaccaaacacaaagcaaccacagcttaaaacacccgtaacaaatcctagaacatttgaatttgcaaaggcgggccatgaccactttattctaaaacttcaaacacaacacatacttattatttattgatacatgtattacagctatctctgcttgaaggttatgcatgttgatctcacttgcagctgcatgggtcgcaagtgcagtttgatccacagttgcagccaccgttctcagctgcaacacccatttcagcaccctcgaattgggccttcaccggcccaacacccaaaactagagtctcaattgtgatcttctcaacgtagtcaaaagagtacttgttgcacttgcatacatgaaaaataacatacat

SEQ ID NO: 4757 - DNA, 421 bp, Glycine max
  unsure at all n locations
tccttacagtcacctcgcggcatgcaagcttataaatatacaccctntaagaaagttaattaatatagttagtagcattaaattgttaactatntgtattatttttgtcaaaattattcttaaaattatcggaactcataattnttctcttttcacttaattactttcccacctaattaattaatgggtgctagtcttcctatctaatccttataagataggtaatgcatntatctttttagtatataacatttattgtaaaataattatgggtatttgggtcaaaaaataattaatacaaaagataacttgagaagactcttataagaagggaacaaataaaattgaaaaaagattattatatctatggatagagtgagtatgtccgagcactaagccccttgtgaaactaatggcatgc

SEQ ID NO: 4758 - DNA, 469 bp, Glycine max
  unsure at all n locations
gtcacgaacgatgctgggacgattgtgaatgaacttgaagttcagcatcctgctgccaaggtgttggttntggctgggaaggctcaacaagaggagattgnggatggagctaatttaactatttcatttgctggggagctcctgcagggtgccgaggaacttatcangatgggtttgcatccgagcgagatcatcagtggatacactaaagcaatcaacaaggttttttcagtttttgatgaaagccttagtgatctgtctttaaatgtcatattgctgctctctctccctctaatttcttgttttgtttcagactgttcaaatattggatgaactagttgaggatggttctgacaatatggatgttcgtgataaggaacaagttatttcaagaatgaaagcagccgttgccagcaagcaatctggtcaagaagatatcatatgttcgcttgttgctgatgtgagtata

SEQ ID NO: 4759 - DNA, 465 bp, Glycine max
  unsure at all n locations
tcttacgtcacctgccgcatgcatgcttaaatacactcaatgaacactagcatataccgaataattataaattttcatactaatcttcttatatactatttttgaaatttccaagatattaaacatattctttntttgtgtttatattttcaataaaatattcgatcagagaatttgtagaagaatataattaagattactcttaatccaccttatatatgtgcgaattcatttggatcattaaaatatgttacaacaaaaatgaaatatttcaaggaaatttatataaaattttgcaaagagttttatganaatggtgcatataattttttctataaatatagatataataaaccacagttctttttgtacataaaatttgtgttgctttaatttcgtgtgtgtntgtggtgtatatataatatcttgaaatgtttccttaaaaaaatatcttgaaatgttttt

SEQ ID NO: 4760 - DNA, 409 bp, Glycine max
  unsure at all n locations
ngatgttcgtcttcgtgcctttatatgtgccactcatactcttggaggggtttacatctatagtaatcaccaaggctgtgatggcagtcgcctttactatggtaaaaaaatacttttctcttaatagaatgctattttgtacttttcacatttgtcccattgcatatcatcaaaattagtataagggcattntaatttccgcttagcttgtttatatttcatttacataagatttttccatatttctataattttatcttgcctttgcaacagatggctgtgctagtgctgtggtaaatggagatagtgtcgctcagggttcacaatttttctttaaaagatgttgacgttgtggttgctcaaataaatctagacgtggtatgtattgcatggtattccatatatcaat

SEQ ID NO: 4761 - DNA, 393 bp, Glycine max
  unsure at all n locations
tccatcaataactnttcactcggatgtccgatcaggcgaattatatatcgagacacccgaaattgactaaaggaagttgtcgagaaattcaaatggtcacaacttttcactcggatttccgattcaggcgcataatatatcgacacgctcgaaattgaacaacggaagctctcaagaaatctaaatggtgataactttttactcggatgtccaattccggcatataatatttctagacgctcgaaattgaataactgaagctctcgggaaattcaaatggtcataacatttccgacagatgtctgattcaggcgcataatatatcgagacgctcgaaatntaacaacggaagctcacgagaaattcaatgtgtcataactttcacacggatgt

SEQ ID NO: 4762 - DNA, 420 bp, Glycine max
agcttgtgcttcaacaattgcaacaagacccactatccataatgagagaacaatttttttttaaaaccttgcatctcgtatgaaatatgttctctctttaggtttgggttaggtcagcggatttactcccaaggagccttctcaccattagaagatcaccttcttcatagggtaaacctcttcaatatgctcatcacccatggcttcaccttcatttccacttgaggaaggagaagaagtagcctcctcttggctactatagatgtcttgacccctcataatcatggttttctttgtgggggtattgagaagcaatgtggcctttcccaatacatttaaagcacttaatgttactagttctatcttatgaactagcctttggagtgatttcctctatgcatttacccttatcatcctttg

SEQ ID NO: 4763 - DNA, 276 bp, Glycine max
agcttgtatggttaaagactcacgattgtcacgtgctcatgcaacaattgttagcccgggctatacgagacatctttccaaacaaagtcaagttaaccataactcgcctgtgctttctcttccatgctatatgtagctaagtcattgatcctgtgaaggttgatgagctggaaaatgacgccgcaattatactgtgccaggtggagatgtattgttcccctgctttctctgacatcatgattcacttgattgtgcatctagacagagaaatcaaat

SEQ ID NO: 4764 - DNA, 307 bp, Glycine max
taagctccttcaactgcacaaggctcttaatatttgaagagtatccttgtggaaccttcacccgatgaagacactgacaaaaacttatcttctccttcttggacaaagtatggcaggctgggggcaagtaaattttcttcccatcagaccttggatgcaactgtgatcttatacccatatcaactagatcttgacgggtattcaagccatgcttcgtcttgccttgaatgttaaggagcgtcccaatcacactgtcacaaacatttttctccacatgcataacatcaatacaatgtctaacgtcaag

SEQ ID NO: 4765 - DNA, 306 bp, Glycine max
taataaatctatatatggtttaaaacaagcttcccgtcagtggttctcttatttttcatgggataatttcttcatttggttttgaggaaaaccccatggatcaatgcatataccacaaggtcagtgggagtaaaatatatttccttgttttatatgtagatgatattttacttgcagccaatgatcggggtttgctacatgaggtgaaacaatttctctctaacaattttgacatgaaggatataggtgatgcatcttatgtcatcgacattaagattcatagagatagatcttgaagtattttgg

SEQ ID NO: 4766 - DNA, 318 bp, Glycine max
ttgagaaaattcaaacgacaataactttttactcggatgtctgattgagtttcctaaatatatcgagacgctcgaaattgaataccgaagcgctaagcaaattcaaacgacaaaaactttttactcggatgtctgattgagtcccgtaatatatcgaaaagctcgaatgtgaatgtagaagctctgagcaaattcaaacaacaataactttttactcggatgtctgattgagtcccgtaatatatcgagatgctcgaaatggaataccgaagctcggagcaaattcaaacaataataactttttactcggatgtccga

SEQ ID NO: 4767 - DNA, 357 bp, Glycine max
agcttgtcttttctcttcagtttcaaaaatcatatttacgagaattatgaatttgaattctgcgaaggacatttgggactacctcaaattagagtatcaaggtagtgatcgaaccaaaggtatgaaggtacttaacttggctagagaatttgagatgcagagcatgaaggagacagaaactatcaaaagttatgctgacaaactgttgagtattgcaaacaaggtacgtctccttggtaaggattttcctgacgaaaggatagtgcaaaaaatacttgttattgtacctgaaaaatatgaatctaaaatattagcattagaggagtcaaaagacttgtcaaatatcacccttggaga

SEQ ID NO: 4768 - DNA, 356 bp, Glycine max
agctttagatttctactttattattaatactcatgtcatccttgagtaatcattgatgatggagaggaagtaactttcccctcctagtaatggaactcttgaaggcccctagtagtcagaatggacgtagtcctatatggcctttgtagtgtgcatgaacttttggaattttgttcgatgctacttcccatagacacagtgctcacaaaattaaagaggttccaccttatgatttctaggtaagcctggcttgctaagtgtacttagcaaaatctagagttgactaacgccagggtggatgtagcttggaagggctccatgatttcacacgtcggactagaggtgccctcttttaa

SEQ ID NO: 4769 - DNA, 350 bp, Glycine max
agctttgcttctacaatattatattattacgatcgaaattgaacaacagaagctctcgagaaattcgaatggtcatgacttttcacacgaatgttcaattcggggacataactcatgtagacgctccaaattgaacagcggaagcattcgagaaatttgaatggtcataacttttcacacgaaagtccgattgggggacataactcatgtagacgctcgaaattgaaaaacgtaagctctcgaaaaattcgaatggtcataacttttcactcggatgtccgattcgtggacataactcatctagacgcttgaaattgaacaatagaagctctcgagaaattcgaatgctc

SEQ ID NO: 4770 - DNA, 357 bp, Glycine max
agcttagtccataaggttttccatatgtggctaaggaacttagcatctctatctaacacaatggtcctaggcaaaccatgcggtctcacaacttccctgaaaaagagttttgagatgtgggaagcatcatccaccttgtggcatggtctaaagtgtgccatcttgataaacctatccaccaccacaaagatagagtctacacctctttgggatctaggaagcccaaggacaaagtccatactaatgtctacccaaggtgcagaagggatgggtaagggtgtgtatagcccatgaggcatcaccctagacttggcttgtaaacaagccacacacctagtgcaatgcttatggacatct

SEQ ID NO: 4771 - DNA, 317 bp, Glycine max
  unsure at all n locations
ttaagcaaattcaaatgacaataacttttgactcggatgtccgatttagttattttataatttgagacgctcaaaattgaatgcaggagctcttaccaaattcaaatgccaataactttttactcggatgtccgattgagtcccgtaatatatctagatgctcaaaattgaaaacagtaactctaagcaaattcaaacgacaataacttctaactcggatgttcgattgagtcatttaataattcttgacgctagaaattgaatacagaagctctcaccannattaaatgacaataactctttactcagaagtctga

SEQ ID NO: 4772 - DNA, 358 bp, Glycine max
agcttgtaggccttggatcttctttatcaatggagtcctttgcttcttgaagatgaatggcagtggaatggagatggaagaaagatgattggagacgacacttcaaggagaagatgagtcaagaagaagctcaccatcataggaagccatggataagagcctgaaggcaggagaagatgagtggacagagagggagagaaggagcacgaaattttatgcctcaaatgaggtataaactttgaagtgtaattcttaaatgatcaaagttgaaaaaatgcacacacatggcctctatttatagcctaagtgtcacacaaaattggagggaaatttgaatttctattcaaatttcacttga

SEQ ID NO: 4773 - DNA, 347 bp, Glycine max
agctcgtaaggcttttgtctctctattgtcacatgctcatgcaacaattattagccgtggctataccagacatcttgccaaacaaagtcaggttagccataactcgcctgtgctttttcttccatgctatatgtagcaaagtcattgattctgtcaagtttgatgagctagaaaatgaggccgcaattatactgtgccagttggagatgtattttccccttgctttctttgacatcatgattcacttgattgtgcatctggtcagagaaatcaaatgttatggtcctgtttatctacggtggatgtacccagttgagcgatacatgaagatcttaaaagggtataca

SEQ ID NO: 4774 - DNA, 248 bp, Glycine max
gaatggcaaaccaatggagatggaagaaagacgatcgcagaccacacttcaaggaaaacacgacccaagaagaaccccaccatcataggaagccacggataagagcctgaaggcaggagaagaagagtggacagagagggagagaaggaccacgaaatcatacgcctcaaatgaggcataaactccgaagcgcaatcctcaaatgaccaaagtcgaaaaaacgcccacacatggcctccatccatagc

SEQ ID NO: 4775 - DNA, 324 bp, Glycine max
tgcttaagattgtatattgatttctttaatttgcacaccatgtgtttctgtccttttactgagaaccccattgactaatccatataaacattctcatctaaatatccattaagaaagagagttttcacatccatctgatgtagctccaagtcataataggctactaatgtcatgataatcctgaaagaatcctttcgtgaaaccagggaaaatgtctctttataatcaatgttatctttctaagtaaacctcttaacaacaagtctagccttgtaacgttcgaagttggcatgagagtcacatttagtcttgaagacccactta

SEQ ID NO: 4776 - DNA, 320 bp, Glycine max
tgtcactccacccatatctggccttcacattaaccacacttaacactcttttttttcaatgttagtgtttagctctactgagctttaaaagattggctaagattttgttaaaacataagcacttagacaatgaaggaaagctggagttgctgcacatgatgtccaacgttatgtcaaggaataagatcgggctgcacaatgtacaaggcaagataaaatggcaaatgaagaattgaagttgcaggatccacgatgtcggatacaatgtcctgacatcctgcccgagaatactggagttgctgtacaatgcaagataaaag

SEQ ID NO: 4777 - DNA, 355 bp, Glycine max
agcttgtagttgctggaaatccttctggattattagtggacagcactgatgggtggaacacagcttctgttgtgggaacattctcagggcctaagcatcgcttggccacagcagcaactgtgaaggacgggaaggtgtatctgaaccatatggttggaattggatacccaaaaaagaagcatgcaattgttgaggcagttttttaacgcatactttctagaaatctaaacattggggaactgggaatgtggggatcatacatttacaggacgtttagttgaaatttggtgtacctttgcttatttatgtttggttttgttgcattacttggcctcagacctcaatgcttttccct

SEQ ID NO: 4778 - DNA, 348 bp, Glycine max
agctttccctctttgaacaaatactcctcagccaaatagaatccatcttgggcctttttcccacaactctcataaatgggagagagaaatgttcatctaaagcatacaagtccctaatattatcaaatcctaaaatttgagctcctagggagaaaaacaatgtgtgtctcctagagagggcatcagctaccacatttgtttttccctttttgtatttgataacatatggaaattgctctaggtactctacccattttgcatgcctcttgtttaacttgctttgccctctaatgtacttaagtgattgatgatcactatgaatgacaaattccttggaaacaaggtaat

SEQ ID NO: 4779 - DNA, 315 bp, Glycine max
tgggtacactaggcacacacaccctatcctgaaacctcaatactccattttttcccaatctaaaactactctttctccctgcgactatggactctaactgagctgacaagaatgggtcagacttctgaccctcacggatctcgcttaagagttcgctggtgactctcaacatacccaacttaatgctactagaggtgatctcacatgccaaactcatgtctctaaactgctctaagagatccaactctctaaccatcaaagcagacatttgaagggactttctacttaaggcatcagctactacattggctttac

SEQ ID NO: 4780 - DNA, 340 bp, Glycine max
  unsure at all n locations
agcttangggacgttttgattattcttatatngcagaaaaagactatgaaacttttgcacacaaatggttcgaaaaaagacattcctggttgcttgaaatgtaataacggtgttgcatacgccgaaaggcattacctaatacttataatgaccatcatgaatgtgaaaactcatctttgtaatgtcatgggtcagattcgatattgatggaagctcacggttagatcaagcttgtaaaaaatggtggccactcccacaataagcaaaggaatcttgtccttaactgtgagtgcattaatcacttgatagtccaagcacaagcactataaactgtgcttat

SEQ ID NO: 4781 - DNA, 337 bp, Glycine max
  unsure at all n locations
gctttgcatcagctctgataaatctgccatatactcatccgatattaggcctcatgagctttctcatatttagcagcttattggaattagcttgagtggcttcccttttagatacttgggtgttccccttttatcatctagattaaatgtatgccattatactcccttgctttccaagattactggcctgattcagtgatggagcangaagtctttatcttatgcaggtaagctagagttgatcagagtagttattcaagggaatgtgaatttctggatggggattattcctttgcctcaatctgttctggatcggatcaacacttcatgtcgtaat

SEQ ID NO: 4782 - DNA, 411 bp, Glycine max
  unsure at all n locations
agcttgccttttgcaattccaagacactagtgagcttccaagtatatgacatgtaccacttgtaattntcctatctaatttgcatcttccagaatcagagtctgaaaaaccttttaagtttagggaacttcttttgaataccacanacctacattggttgtgcccttaagatacttaatgatcctcttaacagtagttaagtgagattcctttggattggactgatatatngcacataatcaaacacttagcatgatatccggtctacttgcagttaggtagagaagtgatccaatcatacctatgtatcttgattcatccactgatttacctttctcatctaagtaagggagggtaatgttgtaacgcctttaaatttcaataactgaaaatagatgtttgatgtatttc

SEQ ID NO: 4783 - DNA, 345 bp, Glycine max
aatatgtatgtatgtaaatatgttgaataaaatgccttgcaaaatgttgaataaaatgccttgcaaaatatgaatatatatagcaggaaaatgcctggcataatatgattatatatagcatgaagtgccttacaaaatgcttagatgggtagcgtaaaagtgtttttcaaaatatgtgtatttgtgaataggtagcataagaagccttccaaaaaatgtgtatatatataggatgtagcatgaaaaggttgtcacacaatatgtcatggatatgtgtcgaaatgcttctcacaaattttatgtgtgatatgcgttgtgtcataaatacatggcccatatgatatt

SEQ ID NO: 4784 - DNA, 452 bp, Glycine max
acttcgatggtgtgtttgctaaattgcaatctttcatctgaaacctatccaagaattctccctcatatttcttttgacaaataaagattccattagttggttgattcacttctttatctccacttttaacatagagtgtgtgctcataatgacattttgtgaacatagcttaagaaaaatatgcttcaatgcgactataccatgctcgtggggctttgttcaacccgtacaagaacctttttaatcttgtaactttatgctcacttccaatcttgacataacccggtggttgttcaataaatacttgctccttcaagtatccatgtaagaatgttgatttaacatctagttggcaaatgggccatgatatttatgccactaaagcaatcatcaatctgatcgtgtcatgtcttgcaacttgagaaaaacttctgtatagtcaatcccatatt

SEQ ID NO: 4785 - DNA, 472 bp, Glycine max
  unsure at all n locations
actctcncttgtagttgtctacctcaacctcaatttcatatattggctagcctagtatagttgctactgttaataataactcttgtgtggtttccaattctgttgtttcttcttctagtactcctagcctttggcattctagattaggtcaccctaatggtcatgtaatgaaactagtcttcaatcattgtaacatttctccatcaaataaaaatttctcaggtttttgttcttctagttgtatgggaaagtctcatagattaccatctcacactcttgtttttgtttacttctccttggagcttattttcacatatttgtggggaccttctcatntgacttcatatgctggttataaatattatgtatcctntattgatgtntttttccaagtacacctggatatttcttatcaagtctaaagttgaaactctntgttttcaagctttaaatctatggtgaactgcaacta

SEQ ID NO: 4786 - DNA, 464 bp, Glycine max
  unsure at all n locations
cttcctcactagcaattgctagtactatcatctcagattccatagtggactaagctaagatagtctgtttcttcgacttccaagaaacagccccaccagctatgctaaatatatagccactggttgctttggaatcatctgaaagagtgttccaatctgcatcactgtatccttcaagtacagcgggaaaccttttataatgtaatccaaggtttatgattcttttaaggtacctcattaccatttcaatagcgtgtcagtgctccatactaggtctgctggtaaacctacataataatcctacaacataggctatgtcgggtctagtacaatcagtggcatacctaagggtgccaatgatactngcgtactcagttggttgtataccttcaccagtgttcttaaacaagtttacacttggattatatggtgtactagcaggtntacagtcaaagtagtcatat

SEQ ID NO: 4787 - DNA, 311 bp, Glycine max
  unsure at all n locations
agctctccaaaaattcaaatggtcataacttttcacacggaggtccgattcaggcacatgatatatcgagacgttcgtaatngaacaatggaagccctcgagaaattcaaatggtcataactttttactcggatgtccgattcaggcacatcacatatcgagacgctcggaattgaacaacggaagctatgaagaaatcaaatggtcataaactttactcgaatgtctgattcacgtgcatcacatatcgcgacgctcgaaattgaacaacggaagcaattgataaattcacatggtcatacttttttgtc

SEQ ID NO: 4788 - DNA, 358 bp, Glycine max
  unsure at all n locations
tatctaccccatntctgacagtgctngngtaagcccagtccaggtggtaccaaagaaagggggcatgacagtcattcggaataaaaagaatgacctaattccaacaaggattgtcactggttggagaatatgcatcgactaccacaagctcaacgaagccacaaggaaagaccattttcctttgccattcatggaccanatgttggagaggcttgcgggacaagcttattactgcttcttggatggatactctagatacaatcaaattgcgataaaccccaaggatcaggagaagacggccttcacatgcccttttggcgtctntgcttacagacgaatgtcanttgggttatgtaat

SEQ ID NO: 4789 - DNA, 464 bp, Glycine max
  unsure at all n locations
gcttgagatcctgacaggatccanacacaaacaaacatatggagtgagttatcatattcgtaaacaggtagagataaatgaagacacatatataatataagtataacaagctcaacttagcacaattcacatcattttaccactcatgtaacatcacttgtcccaagaatctaataaaaaaatcacatttcacactttcacataatcacgtgttcagaacaacacattcaagtacaatacaacatctcatgctcacacaattcattactcaccatcacgtaacaaatcacaatgatcattacatagacattatgcaacaaatacactaagactcaattntatatgcaatgtggtattaggtgagtgaaaaatctcatcaggcgcctaggaatacatgacaagacaagtcatacatcggtaagtcaagtcactctcactaggtaaaatcatagagagagcaatca

SEQ ID NO: 4790 - DNA, 468 bp, Glycine max
  unsure at all n locations
cctcatgaatcttgaagtgttcttcatctnttcttcttgagtcttgaattgttcttgattccatcttgaacattatgaactcattctttcattgacctttgtgccttttgtcattacctttgtcatcatcttttgttataatcattgttatcatcaaaacatctttgaatcattcttgattcaccatgaagctttgcttctacacgttagtccctcaagtcatagaaataagataacatacaaatgctaaatgatgaaacatgaaaagaatacgaatctggggatcccacggtcatgtggctccgcatgccaccggactcttgggtcacggtaacaaaaagtgaggtggtcgacaaaagcatggctnttgctcctacgtatcctcaatntgtgatgaggaactcagacctacgtagttcttgataactgtgagaactaaaatagtctcggtgttttcttcactaaaat

SEQ ID NO: 4791 - DNA, 410 bp, Glycine max
  unsure at all n locations
cacttccagngccctacattacgagtatatgtgtctagggtaatcatgcttcatatngaatttttgattacagcttcctcttttctaatggtcaatatcatgggtaagttggctattgtatccacttagaagttattattttgaaaaaaaaaaaaaagctatttgctgttttaagcataataattctggcaaaaaaatggaaaaactaaggccagaattagacattacagatggtatggggaagtatgagttcaagttcctatattgcttcaagaagctagttattacaatcaatggcanaactctaggacccagcatccagccataggaaggtgataccattattgttcaagttaataatagtttactcacagaanaccttttgatccattagcactggatcagacaag

SEQ ID NO: 4792 - DNA, 478 bp, Glycine max
  unsure at all n locations
gtgctcacctttagtagaggagaattcttcaagttgtttcatgtaaacctctttctctagatgaccattaaggaatgtcgttttcacatccatttgatgtaactcanagtcaaaatgagctactaatgccataattactcaaaaggaatctttcttagatacaggagaaaaaatctttgtgtaatcgattccttctctttgagtgaaccctttggcaacaagtcttgcctaatgtctctcaatgtttccttgtgagtctttattggttttaaaaacccatctacatccgatggctnttacaccactaggcaactgtataagatcccagacttggttaaatgtcatagaatccatctcatctttcatggcattgtaccacaagtttgattctttagaactcatggcttctgaaaacatttcaggatcatttgcagctccaatgttgtagtccgattcttgcagatacactacataatca

SEQ ID NO: 4793 - DNA, 455 bp, Glycine max
  unsure at all n locations
agcttctatacatcattcttctaaataggtctagctttttntgcatttctttggcccagtattcattagatatagcgtcatccatgtgctctggctcgatcttggaaagtagtgttgtgtgcttgagagaattccttgtctggactntgcccttaggatcaccaatgatctaggactctngatgatattttctcagcaagtgtctagttggttctctaacttctttaggttgatcatccattggtgagttggacacaagttggttctgactggatgcaacaatagacttgacgatatcttcaattttcatctctgcaaaggactcatccagttttgacatggtagtgttaggctcgttgtcattaaacctcacatgaatggcttcttccanagtcaaggctctggagttgtacactctatatgcctacactattatcantaaatttttattccct

SEQ ID NO: 4794 - DNA, 382 bp, Glycine max
  unsure at all n locations
tatgatcatggatctatcaatntaagttaaaggagtaaatcacttctaggaatgatntaataaaagataactaatctattagagattacccaaatagtttgatcatgcaattcagtgcaaaaaattctctacctagatctaccaattacatgcaggtgataactattatgcaatcgattgagtattagaatgacctatgccaaataaacattaaaataaggaagaaaattaattaacataaaacaatgagaaattccattaagaacaaggaaaggagtacatttggacaattacatcataaccctcgaactaaggggactatctactcaaaatcaaagcanaattagcaattctataaaataaaataaaaagtaaagataga

SEQ ID NO: 4795 - DNA, 496 bp, Glycine max
  unsure at all n locations
tgatagtgagactcaacttggatactcttcttgtgctttatcaattgcaacaagacccactatccataatgagagaacaattnttttttaaaaccttgcatctcgtatgaaatatgttctctctttaggtttgggttaggtcagcggatttactcccaaggagccttctcaccattagaagatcaccttcttcatagggtaaacctcttcaatatgctcatcacccatggcttcaccttcatttccacttgaggaaggagaagaagtagcctcctcttggctactatagatgtcttgacccctcataatcatggttttctttgtgggggtattgagaagcaatgtggcctttcccaatacatttaaagcacttaatgttactagttctatcttatngaactagccttggagtgatttcctctatgcatntacccttatcatccttnggcttagaaggtggtactccttgtctcttacttccatanttaaactactt

SEQ ID NO: 4796 - DNA, 467 bp, Glycine max
  unsure at all n locations
agaagaagaagaaattcanagagattcatggcttgtaaaagattgattgaatgaattggaaatgtatattgaaaagcanatcanagccttgcttttatagactcttcatgtctggtcaagaaaaccatttagaagagttacaacttttagaanaacttanaaccaatttgaaaaagtcaaaaaaccttttgaagagttacatcttttgatttattcagaaacagtcactggtaatcgattaccaaatcagtgtaatcgattacacaaggcttttaagtgaaaggatgtgactcttcacantttgaattgaatttcaacgttcaaaggcactggtaatcgattaccaaaacattgtaatcgattacagctttttgaaaataatttgaaacgtttaaattcaattttgaaaactttnntcaaaacaattttctactggtaatcgattacagcaatctggtaatcgatta

SEQ ID NO: 4797 - DNA, 357 bp, Glycine max
  unsure at all n locations
atgtatatctatattcccttattttactttatttcggagnaaaatatcaagttttatatacttgacataacatattgcccgaattctattcaattatcaatgatccattatattaatgaaagtcaaaatagattcctttggttctttaataaaagccatatattctaaggcagatagttccgttatttaggtcttggctcagtcagtggtctgggatgccatggtgccttcaaaaaagaggacacatgtaggtcgtccaaagcctttgtatgttgagaagctcatgagagacctatgcactattcttcacgaacaacagtcttatttttctgcatcttctgaagaggatcttctttt

SEQ ID NO: 4798 - DNA, 416 bp, Glycine max
  unsure at all n locations
cggtcctgtggaacaatgactgccaagaggtcttctagaagatcaaccagagtctcgcgaatcccncggtgctcatgccacctgtaacaggaagacctcttttcctgtacatgaccgtgttggacgagtctatggagtgcgtgttgggtcagcatgatgattctgggaaaaaggagcaagccatctactatctgagcaagaagtttaccgcatgtgagatgaattactcaatgctggaaaggacgtgttatgctctggtatgggcatcacatcggcttaggcagtacatgctcagccacaccacatggcttatttcaaaatggatcccgtgaaatacatctttgaaaaaccggccctcacgggacgaatcgctatgtggcaggtactattatctgaattcgatatcgtttacgtca

SEQ ID NO: 4799 - DNA, 457 bp, Glycine max
  unsure at all n locations
gcttaacactttgttgatgggtgcaccatntattatgctgggtgcgtgtaacaaagccccattatggaatggacatccatcaactaccatagaatggacttaacttagtttattgggaccgataataatagtcgtttacaacacttgtcataaacttgtaaaaacaaatgtaataaattttgtagggagataattacattattttaaaaattaatatataagtatattttccttcaattatacattgtcgtatatgataaaattgttgattntaataataattattttaaaatcatattgatgatatcttttattaatcaataatgttaataaaaatatatatttacttaacttacatttaaaagattttttaaatgacctatagttntaccttttaaccaaataacgttttctttataaaattctatgcataaggttaactctttttatataaaaa

SEQ ID NO: 4800 - DNA, 412 bp, Glycine max
  unsure at all n locations
agcttcacaattatatnntatctttgtcaagtaagtgacagcttgatattgattttttaggccacattggtgcaagttgctgctacagtacctcttaactgttcaagtcaacaagatggcttaagggtgtggttggataaacaatttaattaattgcttattggataaatacttatcatgcaagcgcttatgtataagctatttctgtaatctaagaggaaataggattaaactcttttaatacaagttgtaagttattttcacaagttatcatggagattggagagcttattgaaataagctgaaaacaaattatggagagatcataagctatgtccatatngctctccaaacacttatacaagttcttatgtcataagataagaccaaacaaactgtaaataagttgttc

SEQ ID NO: 4801 - DNA, 421 bp, Glycine max
  unsure at all n locations
gatgattatgagaaatggtgtgtaaaatatgaacatgtgtataatttataggttacaaaactatttatttattttttntaaaaaatagtaacaacaatgtttttaacattgagtggtccaacattcatagttnttttcctccaatgttcattttaattttttattttttaatttttctctcctgggctattccactttccctctacctttcctctatgtctcttcttttttccatctctctccccgaccgttccacttacccttcctctttatttctcttcctctatcgctgaccctttcacttcccttcttctcttcctctctttttattcttactctcccacataccctcttcctatctcccttttctctttttcctctcccaccacacgactattcctctccctttcctctttttctc

SEQ ID NO: 4802 - DNA, 421 bp, Glycine max
  unsure at all n locations
gctccagtcttgatctgaccctgttaaataatgacatagcaatatcttatatcagcttcagcttaaggtaaaaaaaaatcatttttcanaatttaaacaaaatttgtcccagaatgcaccactggaacaatgaataagaacatgatatgattgaaaaanaaaagcttctgattctggcaacttacagttgctaatccaactgagaggtcagcaatgaaggtatcctcagtttcaccactacaataaacaagatgaaacacattagtgtgcacaaagaataatacaatgtcacaaaacagaacaaatacctcctgtggctagccatgacaccccaaccagcttgtttagacattctcacagcttcaatactttcagttacactaccaatttgattcacctaacaatgatgaaataataataa

SEQ ID NO: 4803 - DNA, 421 bp, Glycine max
  unsure at all n locations
tcgcgatnttatctctctcagactngagtgttggaagaccaattacttagtcttctctatccagatgatgtaaatgatgcatgttaatgtgtactgccctacaatgccacaaccatgaatcatctattttacttacgaaacaactcagctcatgaaatgatgcatgttcaacatttagcatatagatattacctattcccttactaatgcggacaactttaccgaatatggtttcacttataagacaacaatttctgttgaactctatnttgaagcctttatcacaaagttgactaacacattctntatcagagttttctattgagtccctatatttccttctcccattattgttcctttgttattgtctccaaatgtgacatatcctgcattnnttgacacaaaatcaaatagtttggac

SEQ ID NO: 4804 - DNA, 485 bp, Glycine max
  unsure at all n locations
catgcaagcttattgaatatccacgaataacacactgaatatgtgaagagatcgcacactctattcattatatgataatgaaatttataagccttacatacttgactctcagaacagaataacaataaaaacaaaaaccacaaaactgcatgacgcataaaataggattgtttattgacacattaaaataactaacattaatttgtattttaattctcttttaatcactatagtttgaaattgatctttntagttcctataatttgtattttaattaccttttagtccttactgcaataaatatataaaataattagctacaaattagttataaattatcaactatttttttattacaaattatcttgtgataaattagttatgaattacttgctaatattgttgtagctaattataattgataatattaactcatatttgatggtaagaactaaaatgaaatcaaaatataaagtatatggact

SEQ ID NO: 4805 - DNA, 485 bp, Glycine max
  unsure at all n locations
gcttcttagtctcagatgatgccagctgagttgtagctacctcatgcactcctctttgattatggcatcatttctggcactaaactgctgatagttggaagccatcttctcaattaaatttctggcttcagcaggagtcatgtctccaagggctccaccactggcagcatctatcatacttctctccatattactgagtccttcataaaaatattggagaagctgctccgaaatctgatggtgagggcaactggcacatagttttttaaatcgctcccagtactcatacagactctctccacntgagtttctaatacttgagatacctttcctgatggctgtggtcctggaagcagggaanaaattntctaagaatactctcttaaggtcatcccagctcgtgatggaccttggagcaaggtaatacagccagtcctttgccactccctccagagaatgaagaaaagccttcagaaatatgtgat

SEQ ID NO: 4806 - DNA, 382 bp, Glycine max
ctgtgtctcatcgaggagaccgtaacggaacatccttcggagctgtgcctctccctcgaagatccggcgcgggttcttctcgtcgagggtgaggaggttccgcgcgttgttgcggatgcggctgagcgcgtactgcaccctccacagctctctcttgcaccgaagcccgtactcaccaaccagcttcaactccgcgtcgagacgctccttctcgtacggacgacgcggcttcttgaatgtcttcccatctgacaaacagaacaaaatataacagatcaatggcgttgctagggttacggttttcaaaacggcgtcgtgagaaactagaacgtggatcggttcgtggacttacagttcctgtagaaggagacgtgcaccatgg

SEQ ID NO: 4807 - DNA, 347 bp, Glycine max
cctctctagcaacacgtacaatctcggttggaggaatcatcccagccttagatggtcgaatccttcacaatagcagtaacaacaacaacaacaacagcagcaacatctacagccccagatacagcaaacagttgaggctccttcgcaaccttcccttgaagaacttgtgaggcatatgactatgcaaaacatgtattttcagcatgagaccagagccttcattcagagctcaactaatcagatgggacaattgtctacacagttaaatcaacaacagtcccagaattctgacagattacattctctatctgtccagaatcccaaaaatgtgagttccattacattga

SEQ ID NO: 4808 - DNA, 253 bp, Glycine max
  unsure at all n locations
cggaaacccaaacagtaccggatcggctgtcgtcaactccgccattgatatctctggtatggcgacatacttgggcgacgccctcatctgatatatcacctcaatcggcaatgtctccaaaaccctatacagaaccccttccacaccttccactctgtccatgacgatcttcaacctattcaccatccccccatgccgactgagagagacgaccactacgacgacgctgctntacgtgctggcactggcgtgt

SEQ ID NO: 4809 - DNA, 395 bp, Glycine max
  unsure at all n locations
gaacagttcccattttcctactccatactntttgtttgtcaaagcagctgtgtggctcttagacttgtcaaattcagtagcaagttcttcaacaaggcttcttccaacatgaaatgatctatgtgcctctgagaactctttggatgtgacaaatctataaggctgatctttgtctgcccagtactgctcctgatccttccttgatgttacctataacataataattaatggtcaaaattaaatgtatataacattcttttaccagtgcagacagattaaattattgggacagaacacaagaccacttacttcttgcaaaaagtctgccacacctttcctctcangacatttaaaacccattgattnaaaaattccacacatgtcgcggggaccct

SEQ ID NO: 4810 - DNA, 468 bp, Glycine max
  unsure at all n locations
agcttgaacgatgangactatatggagaaggaatggcttcttgagtgatgtatacagacaggtctttcgagcctgagccatgacgaagaaaagaagaagggttttggtaactgatcgcgtgggggaaaaatggatnttgggggtttaagttatgaataaaacaacatcggtttcttaaaaaaaatcgatgttaagatattaatgttaacatcacgttttggaaaaaccaatgttaacatcaacttgttaacatcggtttttttaanatcgatgttaattaagtcaacttatttaccaaaatgtcaccgcgcttttatttacatcgatttttgcgaaaactaatgctaagcttacgaggttaaatcaataaattgtagtagtgaccttctctcactcacgccaatatatgcaatctcccccttctacanatcatgacaactnnntgtgtcatccttttataagtcttta

SEQ ID NO: 4811 - DNA, 352 bp, Glycine max
  unsure at all n locations
ctaaagntactatcatgccaagaagatactgtgtctgatgggtatggagtatcanaagattcatgcttgcccaaatgattgcatactgtaccaacatgaattcaagaaatggccatattcccaaggtgtgnggtatcacagtacaaagtgaacgatgatgacgactgtagtagtgacgaaaactcanagaaaggccccctagcgaaggtgatatggtatcttcccgtcattccaaggttaagcgtctggttgctaatggagacgacgcaaaagaccttaatccggctgattcctcacaatggaagaacattgatcgttngtatctggatttcaacaaagaggcaagaaatct

SEQ ID NO: 4812 - DNA, 372 bp, Glycine max
agcttgcttctacacctttttcaatgcagcagcaacttctacaacaacaaagacaacaagcaactggggcctctcctccaccttccttagaagagttagtgaggcaaatgaccatccacaatatgcaatttcagcaagagataagagcctccattcaaagtctaacaaatcagatggggcagatggctactcagttgaaccaagctcagtcccaaaattttgacaaattgccttcacaaactgtgcagaatccgaaaaatgtgagtgccatcaccttgaggtctggcaagcaagttgaagtgcctccaccagtagcaacacctgcacctgaacctgtcaagcttcattctgcacttgaaaaagaggatgaga

SEQ ID NO: 4813 - DNA, 449 bp, Glycine max
  unsure at all n locations
agcttcacgatatactacgggacacaatcggacatcctattaaaaagntattgtcattntaattntcttagagcttccgttttaattacgagcggctcgatatattacgggactgaatcagacatccgagggaaaacgttttgtcattagaatttgctcagaagctttgttttcaatatcaagcgtctcgttatattacgggacttaattgtacatctgagttaaaatttaatggggtttgaatttgctacgaccttctctttccaattacgagcgcctcgatatactacgggacacaatcggacatccgagatataagttatttttttttgcatttgctcagagacttatgtttcaatttcgagcatctcgatatattacgggactcaatcagacatccgagatataagttattggcctttgaatttgctttcgagcgtctcgatata

SEQ ID NO: 4814 - DNA, 413 bp, Glycine max
  unsure at all n locations
caacgaaatcaaaacatttgttgtggcattgtgcctgctgcaatttatggaagatgagaaatgaggcttatgatgggcaaaaattacttcaacattctaagattatatggcttgngcttatgatggatggcctgtgcaggaaccatatgttgtcggatgcaagaggattgatggatctgatgatgaggaatggggtttacccagatacaattgcttatagtactctcttgcatggatactgcagcagagggaaggtttttgaagctaaaagtgttcttcatgaaatgataaggaatggttgtcaacctaatacttacacctgcaacacattgctccaggaaatggttgtagtaagagtcttcanacttataatgcattgatccagatatttgcagttataacaatattatcac

SEQ ID NO: 4815 - DNA, 397 bp, Glycine max
  unsure at all n locations
agcttctatagaaggttctttcctaatttctctattattgaatcacctctcaataagctagtgaagaagaatgtggcatctacctgnggtgaaaaacaagagcaagcctttgctttgctcanagaaaagcttactaaggcacctgttctagctcttcttgactnttctaaaacttttgagctagaatgtgantgccttggagtgggagttggagctgtattgttacaaggtgggcaccctattgcttattntagtgaanaacttcatagtgccaccctcaactaccccacctatgataaagagctntatgccttaataagagccctccaaacttaggaacattaccttgtttccaaggaatttgtcattcatagtgatcatcaatcacttaagtaca

SEQ ID NO: 4816 - DNA, 410 bp, Glycine max
  unsure at all n locations
agcttcttcaagttccaaggcatagtcttcatgttgctctccctatctctaacaatctctccctttttggctntgatgatgccaaacttgaatntccatttgagtgcatntggagagtcttgagagtagagacttttcttgggaaaacctaaagtttcttaacactaagagaaatgtgtcaattcatatcatcatcatcatcatcattagttggagttatatatgaatgtatgtatgcagtgcactaatcatatgcatctcanatccatgtttcatctgcttgacttgaagtccaaggaagaagttcaactctcccatcatagacatctcanattctttctgcatagaactgganaattccttacacanagtttcattagtagcaccaaaaattatatcatcaacataga

SEQ ID NO: 4817 - DNA, 349 bp, Glycine max
  unsure at all n locations
tagttatgaacagaatccagaagcatccttggacttcgcatnttanctatgttggagaatagttntgatgtttggtgcagttcctgctgcactcacctactactggcgcatgaagatgccagagacagcacgttacactgcccttgtggccaagaatgcgaaacaagctgctgcagacatgtctaacgtgttgcaagtggaacttgaagctgaagaggagaatgtgacaaaattgacagagaatgagagccacaagtatgcgttggtcaccaacgaattagtgaaacgccatggnctgcatattgtgggaaccaccaccacgtgcgtcttggtggacatagcattctac

SEQ ID NO: 4818 - DNA, 495 bp, Glycine max
  unsure at all n locations
tattattgagtggacgctactatctcttattcctgtcttaatgagccaatggctacggagctatcgtccaattgtaaatctgcaaaagactcatctagctctaataattctttatcaggcttatttttgtcaaatcttatatggatagcttcttcaacaactaaggttattgagttgtacactctaaatgcctttgaagtttcaaagtatcaaagaaatattccatagtcacttttcgagtcaaaattttcccagactatcatttgtgttaagaatgaaacacttgcacccaaaaggatgaaaatatgatatgttgggttttcttcccttccacaattcataaggagtctttntcaagatgggtcttatataaattatgttntgaagatagcatataagttcttaggggttaagttatcagttggcatggttctagccatctcttggagagaattgttctttctttcaactactccattttgtagcggagttctt

SEQ ID NO: 4819 - DNA, 393 bp, Glycine max
  unsure at all n locations
agctngaaggtgcgtacccaccatttttataatagagcactggtaatgtgtctactatcattgttatcatttctttctccatcattgagggtgctacctaggctgccaggtctctccacctttgggtgtatactttgaaagatttcatgccccttnttgcacatgttatgtagttgcatcctatccggagccatatcagaattgtactgacactgcctaacgaacgcaaccattagtgatgcaagttccattggagcttgtaggcctaggatcttcttcatcaatggattcctttgcttcttggaagatgaatggcagtggaatggagaaaggaagagagagaggagacgccacttcaaggagaagatgagtctagaagaagctcaccaccat

SEQ ID NO: 4820 - DNA, 394 bp, Glycine max
  unsure at all n locations
acaatatatcttgtcctgtnttcaccaacatacactgcannagtgccctttggcacatcttctggaagaccaccctcttcattgtagccctgctgcttcttcccaaaacttgaacaccttctcacaatttgcttgatcacatctgcttggggtagcttattggattntttgatggccattgtgatatgtgattgtgttacttagtactctttgcacaccttcaaaagggtctcttgagggtgctgaaagtgtgtgattcatggggcgagtttggataggcatttatcattgngacattggtgtaagtggaaatgagaaattgagttttagagaaacagggtcacgtggctgtggggacacatgtagcagaccacacccannatngtcgtacatg

SEQ ID NO: 4821 - DNA, 474 bp, Glycine max
  unsure at all n locations
agctntataagctcaattgaagccatatctctagatgtgtgactaaaccaccacccttaaggctgcaattaaggcaaccacaaagaggctgcaactaaggcgggataggggtgaccatggttatcaaacactcgagttaactcattaactcttacaagtttacaaattcacttaccctctatgagttgactntgtataaactctctttttagtagaccctaggtagactttataaactctaagtaaactcggtagactctggagtttaccaccaagtcaacaagtcatcaagttaaaaaaattagaccaaaatgtaagtcattntgggttattntttgtctgtttagtgttcaacataccttcatttagtttgttattcccaaataanaaaattctcatctttaataacatcaaacccttgatgggaatgatctacgactactataacatctgcaagttattatctagtagtca

SEQ ID NO: 4822 - DNA, 446 bp, Glycine max
  unsure at all n locations
gctatgctgcaacattataatagacccnctcagcttcaaaaccaacaacaccagaataattatgatctttcaagcaacagatacaatccaggttggagaaatcatccaaatctgacatgggcaagtcctccacaacaacaacagcctatccctcctttccagaatgttgctggtccaagcaagccatatgttccttctccaatacagcagcagcagtcacaacaaagacaacaagcagctgaggccccttctcaaccttccttagaggagttagtaaggcaaatgaccatccagaatatgcaatttcagcaagagacaagagcctccattcagagtgtgacaaatcanatggggcagatggctactcagttgaaccaagctcagtaccaaaattctgacaaaattccttcatagactatgcagaatccgaaaatgtgagtgcatca

SEQ ID NO: 4823 - DNA, 208 bp, Glycine max
  unsure at all n locations
gctgatatgatcacacaagctctcgagaaatncaaatggtcataacttgttacactgttagtctattcangcgcataatatatcgagacgctcgaaattgaaccatggtagctctcgagaaattcaaatggtcataacctatcacacgaaagtccgattctggcagatagtataccgagacgctcgtaatcgtacaactaaagctctc

SEQ ID NO: 4824 - DNA, 472 bp, Glycine max
  unsure at all n locations
gctacatctcctaaggatctccttagataatgcttaactcanaaaggcctatccttggacaacataattggagaaatatcaaagggagtttctactcgccctagactcgagctaaatcagtttaaaaggaatgaagtgtgagacttagttcctaaacctgcctctcacatgtcaatcggaaccaaatggatgtttcaaaacaaacttgatgaatcaggcatcatagtaagaaacaaagccagattggttgcataagggtacaaccaagaggaaggcattgactatgatgaaacctatgccctgttacaaggttagaagccattatgctgctggttgcttttgcatatatntatggatttagattattccatatgtatgtgaagagtgtctctctcaatggatacattgaagaagaggtatatgtagactagcctncaggtttcgtgcactatgaacatnctaatcatgttta

SEQ ID NO: 4825 - DNA, 306 bp, Glycine max
  unsure at all n locations
tcggacctcagtgtgaatagttatgagcatctcaacctcgcgagagctttcgttgatgactgtcgagcatctcgacatgttatgcgctcgaatcggacatccgtgtganaagttatgaccatntgagtctctcgagagcttacgtggttcaatttcgagcatctcgacatattatgcgcccgaatctgaccttcgtgtgataagttatgaccattagaatttctcgagagctttcgatgtttaatttcaagcgtctctatgtgttgtaagcctgaatcggatcgtaccgtgaatagatatgaccat

SEQ ID NO: 4826 - DNA, 418 bp, Glycine max
  unsure at all n locations
agtcacctgcngcatgcaagcttactaaggcacctgttctagctcttcctaacttttctaanactnttgagctagaatgtgatgcctctggagtgggagttggagctgttttgttgcaaggtgggcaccctattgcttattttagtgaanaacttcatggtgcgacccttaactaccccacctatgataaagagctttatgccttaataagagcactccgaacttgggaacattaccttgtttcccaggaaattgtcattcatagtgatcaacaatcacttaagtcattagagggcaaagcaagttaaacaaaaggcatgcaaaatgggtagagtacctagagcaatntccatatgttatcaaatacaaaaagggaaaaaaaaatgtggtagctgatgccctctctatgagacacaca

SEQ ID NO: 4827 - DNA, 391 bp, Glycine max
  unsure at all n locations
ttcttcgtgggttgatgggttctatctcgtagaatggcttgatcactggctaacatgttctcaattagctcagttgcttctttcggngtcttcagttntatcttaccccctacagaagcaactaacaattgcttggtttgtggtctcagcccatctataaacatattcaattggattagctcggaaaacccatgagtgggagttcttctcaacaagcctctgaacctctccaatgcttcactcagagattcatcangaaattgattaaatgaagagattgcagctttcccttccgcaatcttggactctgggaagtatttttttaggaactnttcaacaacttcttcccaggttttcaacctattacctntgaatgagtagagccacctct

SEQ ID NO: 4828 - DNA, 473 bp, Glycine max
  unsure at all n locations
agctggcttatacaatctctctccttttgatgatgacatacctganatcaagaaacacatacacattctttttcctagccaatcactcacttaattctccatattctccccctttgtttgtgagtttaagctctacttgaaattaagttattcaatcttgtgagttcttgatttaatccctattttctctccccctttggcatcaacaaaaagccaaagtgcgtaacaaatataaaacatacataaatgactaatcatacacaagacattcattgaanaatctaaaccaatcatgaagcaaaaacatgaataacccaaattaatatataaaccacatagtcatataacataattcataaaaattcagtcatactaaacaaatattaaaagaaatactagatgttcaaatgtcataataatatagccaaatacatggctagaaatcanagtactaataatactaaagaattata

SEQ ID NO: 4829 - DNA, 466 bp, Glycine max
  unsure at all n locations
taataaatctatatatggtttataacaagcttctcgtcagtgtttccttatgtttcatgggataatttcttcatttggttttgatgaaaaccccatggatcaatgcatataccacaaggttagtgggagtaaaatatgctntcttgttttatatgtagatgatattntacttgcagccaatgatcggngtttgctacatgaggtgaaacaatttctctctaagaatcttgacatgaaggatatgggtgatgcatcttatgtcatcggcattaagattcatagagatagatctcgaggtattntgggtctatcacaggacacctatattaacaaaattctagagagatttcggatgatagaatgttcaccaagtgttgctcccattgtgaagggtgataggtttaatttgaaccaatgtccaaagaatgactttgagagggaacaaattgagaacattccttatgct

SEQ ID NO: 4830 - DNA, 502 bp, Glycine max
  unsure at all n locations
gcttatggataagctctntatttagtctcatttanaagaagttatttacagcttgttttgacttattttatgccataagcatttgtgcaagtgtttgagaaaactcttgaaaataacttgtgaaatgtccataagctgtttttaagcttatttctataagctcttcaggatagctaatgaaaacagcttacaacttatatgaaaacagtttaacccgaatttctcttcgattatcgaaacaacatatacaaaattgttacatgataagtacttacctaatatgcctttaattaagttgtttttccaatcaggcctaagagattattgaataaacacttaattaagttgtttacactaagatgctgttcatgtgtgcaggggaaatantcaccaatttgccaaagagctgtcgatacattccaacctgcagtgagtattccatggaggcatataagcgatatggatgcggtgaagggtacagtttaactgcgtggcgtatatg

SEQ ID NO: 4831 - DNA, 496 bp, Glycine max
  unsure at all n locations
agcttgtaaactntatacaagaatgaagctctgataccacttgttagacactcagatatcttaagaaggggggttgaattaagatattgcaaactatttccccaattaaaattctacttcaatttcaatgcaagttacaagttcccttaaaaatgaactcttaaataatgattcaaatagaacaatctgaatataaatataaagcaataataaataaacgagtttaagggaagagaaagtgcaaactcagttttatactggttcggccacacccttgtgcctacgtctagtccccaagcaacccgcttgagagttccactatcttgtaaaatccttttacaagttctaaacacacaaggacaatccttcctttgtgttcagatttctttacaacaagagaacctcggtctctctantccctntgagaatttagaaagaaaagaagaataaatctctcttgaaagagatagaatgtacaatctgagcactcaattat

SEQ ID NO: 4832 - DNA, 467 bp, Glycine max
  unsure at all n locations
tctaatatcaatttcgagcatgtcgatatattatgggtctcaatcggacatccaagtaaaaagttattatcgtttgaattngctctgagattctctttcaatttcgagcgtctcgaaatattaagggactcaatcagacatacgagttaaaatttattgttgtcttaatttgctatgagctttcgttttcaatttcaaacgtctcgatatattacgagacttaatcggacatccgagtaacgagttactggtgttttgaattgctacgagtattcattttcatcttcgagcgttttgatatattacgggacttaattggacatccgaataataagttattgtcgtttgaatntgctcagagcttctgttttcaatttcgagcgtctcgatatattacgggactcaatcaaacatccgaatangatacgtattggcgttgaatttcacagatgttttgtttcaatcac

SEQ ID NO: 4833 - DNA, 468 bp, Glycine max
  unsure at all n locations
ctcgcatgtccgattcaggcgcatagcgtatcgagacgctagatatctaacatatgaagctctcgagaaattcaaatggtcataacttttcactcgcatgtccgattcaggcgcataacatatcgagacgcttgaaattgaacaactgattctctcgagaaattcaaatggtcataacttttaactcgcatgtccgaatcaggcgcataacatatcgagacgctcgaaattgaacaacggatgttctcgagaaattcanatggtcataacttttcactctcatgtgcgattcaggcgaataacttatcgagacgctcgaaattgaacaacggaagctctcgagatattcaaatagtcataacttttcactcggatgtccattcaggcgcatagcgtatcgagacgctagaaattgaacaacggatattctcgagaaatcatatggcataacttttactcgcatgccga

SEQ ID NO: 4834 - DNA, 487 bp, Glycine max
  unsure at all n locations
atactctagcgtcacctgccgcatgcaagcttcacaatcccacaacaccttaattgatgcagtatataagaaattctaaataagattaacaatattctcaggcaaatctgttggatcaagtggcctcagaataattaagaagggggggttgaattaattattcctaaacctttactaattaaaaaattactcttctaaggcttttactaagttgttaagagaataaggagtagaagagaaacttaatagaaagtacaagcggaaattaaatgcacaacggaaattaaaagagtagggaagaaggagacaaatacataagaagttttatactggttccgcaacaacccgtgcctacatccagtccccaagcgacctgcggtccttgagaattctttcaaccttgtaaaacnacctttacaagcaaagatccacaagggatgtacccctccttgttctctttgaaaccctagtggatgtacccttcact

SEQ ID NO: 4835 - DNA, 347 bp, Glycine max
  unsure at all n locations
aagctatagaaattaaatggtcataatctttaactcggatgtccgattctgtcgtataatatatcgagacgctcgaaattgaacaacggaggcattagagaaattcaaatggtcataactattcacacggaggtcagactcaggcgcataatatatagagacgctaaaaattgaacaacggacgccttcgtgatattcaaatgggcataactattcactcggatgtcagagtcatgcgcataatatatctagacgctcgacattgaacaacggaatctctagagaaagtcaaatggtcataactgttaactcggatgtctgattcangcgcataatctatctagacg

SEQ ID NO: 4836 - DNA, 340 bp, Glycine max
  unsure at all n locations
agcttccattgttcaatttcgagcgtctcgatatattattcgcctgtatctgactttcgagttaaaagttatgaccatgtgaatttctcgagagcttccgttgttgaatttggagcgtctcgatatattatgtgccggaatcggacatccgagttaaaagttatgaccgtctgaatttcttataagcttncgttgttcaatttcgaccatcttcatatattatgcgcctgaatctgacactcgagttcaaagttatgaccatttcaatttccgagcgcttccattgttcactttctagcgtctctatatatgatgcgcgtgaatctgacctccgagttat

SEQ ID NO: 4837 - DNA, 456 bp, Glycine max
  unsure at all n locations
agctagtcatttatactatttcttanagttattgtcatataagcaatgcctaggctatatatatatatatatataaggaattntcagatctatttgtttgtaacacaaaagcaagattattattctttatttaaaggcctgaagtaatttgtaaagcgtttattcaatatatgcattcttaagctcttaaataagaacaatataacgttaaggtaattaaattgcttaattaccatgaattcaattaatatttttcagtagtttattattcattataattaaatcattctatctaatactcgctgttaattaacgctaatattctaatcatgcgaatttaattactttaactaaaatcaaataccatcatttatgtttttaattatcataagtttttgctataattcttaaaaaagtagagacaaactcattaattaaagtgatgaattgaattta

SEQ ID NO: 4838 - DNA, 442 bp, Glycine max
  unsure at all n locations
tctctgagtcacctgcggcatgcaagctnggagtggaaggagaccatcaattagacaccttagtagttttgggtacataacatatgcatatgttttagaccaactcaagaagatattggacgacaaaggtgaaaggtgtattttcattggttacgacatagatttaaaggcatacaaactttacaatccatagacaacgaaagtgattatcagttgatatgtgacgtttgatgagaaaggcatgtgggattggtcgacaagatcccagaggaagctagtggtgactcttgacaactatgaagaaaatgataaacaactagatctaacccccgatgaaccaaaatcatctaggaggccacagaggaaacctcaattgctagttagattacatgcttgtatcatgtctaatgataatgatccttccaacaaggagaatatcaat

SEQ ID NO: 4839 - DNA, 390 bp, Glycine max
  unsure at all n locations
gctctcgatatattatgcgcctgaatcagacttccgttacaaaagttatgatcatatgaatntctcgatatattatgcgccttaatcggactntcgtgtgacaagttatgtccatttgaatttctcgatagcattcgttgttcaatatcgagcgtctcgatatattatgcgcctgaatcggacttccgtgtgacaagttatgaccatttgaatttttcgagagcatcacgtgttagatttcgagcatctcgatatattatgcgcctgaatcggacatccgtgtgacaagttatggccatatgaatgtctcgagagcatatcgtgctcaatttcgagcgtctcgatatagtatgcgcgttaatcgaacttccgtgtgacaagttatgacca

SEQ ID NO: 4840 - DNA, 376 bp, Glycine max
  unsure at all n locations
agcttctcgatatattatgtgcctgaatcggacttccgtttganaaattattaccatttgaatctctcgagagcnttggctgttcagtttcgagtgtctcgatatattatgcgcctgaatcggacttttgtgtgacaagttatgaacatttgaatttctcgagacctttcggttttcaatatagatcgtctcgatatgtgatgcgccagaatcggacttccgtgtgacaagttatgaccattggaattatcgagaccttcggtgttaatttgagggctcgatatattatggcctgaatcggctttcggtgaaagtatgaacatggaattctcgagccatacgatgtccattcgagctcttgatatattatgccctg

SEQ ID NO: 4841 - DNA, 462 bp, Glycine max
  unsure at all n locations
agctngtattgatngcgaatntacgaatgtgggcagcttttatatatatatatatagagagagagagagagagctatgttattattacagtaagattgnggcattatttttccttccattgattcacatgcaggctatattgntattattattttttttttgagaaagttatgttattactgggtaaagattggggagttatttttccttccattgtttcacatgcaggctatgtaatatggatatcnattcgcacgtgcagcaagtcatttgctttgctttccatgatagtaggttgctcatggaaacttgtcaagaagcanaaaatttgcggaagattgtgactcttttctacctcgactgacaattnttatccatgtctatgcattatgtctccgcataagagtgggctgngggagagtagtgcttctttttggtttgaattaataatattcagtgata

SEQ ID NO: 4842 - DNA, 440 bp, Glycine max
  unsure at all n locations
ttaaggctgaagttgagaaacaatgtggataacaaattaagaatgtgagatcagatagacggaggatggacaagcacggaggatggacaagcaccaggttcatttgcgaaatttcttcaagaacatgggattgttgcccaatacactatgcctggttctccaaatcagaatggtgtcgtagaacgaagaaatcgaaccttattagacatgatgagaagcatgaggagtaatgtaaagcttcctcaattnttttggattgatgctcttaagatggatgcgtatatattaaaccgagttccaaccaaggctatctcanagacaccttttgagttattcaagggttggaaaccaagtttgcaacatatatgcatttggngatgaccatcttgagtangaattataatccacaagagaagaaactagaccctangactattact

SEQ ID NO: 4843 - DNA, 395 bp, Glycine max
  unsure at all n locations
agcttgttagctngatgacttgtcaganacaatttgtttactagcgtcaaatcagagaattaaacctggacatcttttagaaatgcttgttaagtcaagacaggtagaaatccagtgtctccatttgggacctactgctcagtaaatctgttgagggaaaaattcacagcctccgtcttaacatcattggggttctgaatccattcacactgaataagaattccttgaagaccattataatgtcttctgaaattgatgactttatggaaatacgttgagttgctgtccccttcttttagccatttagctctagatttctgccttaataaagattcataagctattgaggcctcccacaattcttggtgaattctctctaacctttatctcatcat

SEQ ID NO: 4844 - DNA, 345 bp, Glycine max
  unsure at all n locations
gcttganatgaacaacggaagccctcgagaaattcatatggtcataactcgtcatattgaagtccgattcacgcgcatactatatcgagacgcttgaaattgaacaacgaatgctctcgaaaaaatcctatggccatatctgggaccaccggtgtcggattcatgcgcatgatatatcgagacgctcgaaatctaacaacggatgctcttgacaacattcaacgtgcataacttgtcatacggaacaccgatatacgcgcataatatatcgacacgctcgaaattgaacaacgaatgctctccataaattaaatggtcatcacttgagacacggcatacagagga

SEQ ID NO: 4845 - DNA, 436 bp, Glycine max
tgctcctaccataagtgcctcgtggagacaattatagcctctttctgcaccgtcatcgacccgtacctcatcggaaacccaaacagtacctcatcggcggtcgacaactccgccattgttatctctggtatggcgtcatccttgggcgacgccctcatctgatctatcacctcaatcggcaatgtcctcaaaaccctatacagaaccccctccacaccttccactctgtccatgtcggtctacaacctcttcgccatccctccatgccgtctgagagagacgaccactacgacgacgctgctttacgtgctggcactggcgtgtaatgtcacgcgcgcggcattgtctggaagaacatcagcggcagatggcggtgcggtgacatcgggggagtggagcatctccagctttgaaccctaattgggctgagatcatg

SEQ ID NO: 4846 - DNA, 473 bp, Glycine max
  unsure at all n locations
agctngagaatgataatcttctaacactttgtttgttattgtgcagttagtctcaattgtcactattataaaatacatcttctacatcggntatgtaggactntctacatcnggttttaaccaatgttgaaagtattattgttaacatcagttttccaagaccgatgttgacatagaattgacaacgtcggttatctaaataaccgatgttatataataagaattacaccaaaaaaagtgtatgaatggtgatagttgacatcggtttttcacaaaaccgatgttaacttatagattaacatctttgttgtataaaaatcgatgttaacttatatattatcatcagctttttataaaaactgatgttanatggttataggttaacatcagttcttaaacaaaaactgatgttaatctataagttaacatccgttcttatacaaagccgatgttaacggtttgaatataacatc

SEQ ID NO: 4847 - DNA, 439 bp, Glycine max
  unsure at all n locations
tgttaccttgcagtttgtaaaggccattctgccttgtacccttcattacttgtaatgaacctttgaatacctttaaagttccaccttctcctttgaatgaacatccagattaatctagcattcccaaagagagtatgttccttttaagctcaggaacatgcctcacatcagggagcagctttacagatccatcttgtatcttcaatataatagttccaatgccaatgacattacatgccatattgtttcccatgagaacattccctccatctatctccttataagagctgaaccattccatattgggtgtcatatggaatgagcaacccgagtctagaatccattcctcattgtgctnttcagtagagatggagagcacttaatcactttcatatgcatcatccaccactgctatatcagagtcatcattgtatcacca

SEQ ID NO: 4848 - DNA, 440 bp, Glycine max
  unsure at all n locations
tcttcctgtttcgtcttccatgcagctcgctgatattttcacgaagcctctatctccagctctctntcaaggtctctgttccaagctgggaatgatgaacatccattcctagcttgcggtgggctctcaacaatagcttgttagttagaaaaagctgttagagttagttttctctctggtgtaactaactaaccacccgttttctctatccttcatatgtgtataaatatcttacgaattcagtaatanagacatgcaattatttggtcatctcacgtacacttgcgtcgtttctctctcctttatggctgttgatccatttaatatttgttccgtgctttcccctgnacgacgttttcgagtagagaaatgatgcatttcgaccggtgtcgttggaagcgaacgacgaattgtgtagtgaaagagaaggactctcgcgt

SEQ ID NO: 4849 - DNA, 452 bp, Glycine max
  unsure at all n locations
accttaccttggctntcatcanatntgccttttacctcaagataatcccaaacaacttttcacactcatggtggacattacaagtatcatgtgatgtcgtttgacctctgtaatgctccgacaacatttcgagccactatgaatgacattttttgccctctgttgtgcaaaacggtgattgcattttctgatgatattttggtctatagtgctgaccatgatcttcacatatcccatctctcttaagtttttgaaagtttggctcatcattagttnttttctattaaacttgagaaatgtgtgttctatcagccttagttgtctacttaggccatgtcattttttgcgggtttagtggcccttattccttccaaggtccaggcgattcttaagtggccaattcctaagaatattaaaggcttgcacatcctcttatgtttgttgggctttta

SEQ ID NO: 4850 - DNA, 435 bp, Glycine max
  unsure at all n locations
cttcccttttgaagctcgatgtgagccatatctcattggatgtgaatctgctgaaagaattngcttatcttaagaattcgacccttatggaccttatgaataacagattctctggagggttgacattgagtattcaagagatgtattctttagaggaaatggttctgtccaacaatgcaataggtggngatatcatgacccttaagtgggaaaaccttcacaacttgatcattttggatctctctaacatggagttgaaaggggaaattcctgagtctatatcggaattaaagaggttgaggtttttaggccttagtgacaacaacctcacaggcaacctttcaccaaatctatctactcttccttgtctcaatgcactatatgttagtggcaacaattngacaggagagcttatattctctgtgtgagtttatg

SEQ ID NO: 4851 - DNA, 412 bp, Glycine max
  unsure at all n locations
agcttcatgcttatgtatgtatggcanaacttcattattgttgttcaagacatacaagtgagcttgtaaaaaatcttctacacttgaagtgatcacatgcaatcctcttgaacccttaccacccactctgtcatcatgccgagacttatgaaggccaacaggtttagccttctcaatttattctgaacaaaattcaatggcttcttcagcaatgtacctctcaacaatagatgcttctggatgataaagattctttgtataccctttcaagatcatcatgtatcgctcaaccgggtacatccaccatagataaacaggaccacaacatttgatttctctgactagatgcacaatcaagtgaatcatgatgtctaagacagcaggcggagaatacatctccaactgacacagt

SEQ ID NO: 4852 - DNA, 475 bp, Glycine max
  unsure at all n locations
gattcagctatcggcgaagctgttcatggtcatgtntggaaacatgggtttgattctcatgtgtttgtgcagactactctgattgagttttattcaactntcggtgatgtgggtggctcaagaagggtgtttgatgatatgcctgacagagatngttttgcttggacgacgatgatttcggctcatgttcgggatggggatatggcttctgcaggcagattgtttgatgagaatgcctgaaagaatgtagctacatggaatgccatgattgatgggtatggaaaattatggaatgctgagtctgtctgagttttgtttaaccaaatgcctgcaagggatattatttcttggacaaccatgatgaattgctattctcggaacanaaggtataaagaagtgatagcactttttcatgacgtgattgacaaaggaatgattcctgatgaagtgactatgaccaccgtcatttcagcat

SEQ ID NO: 4853 - DNA, 485 bp, Glycine max
  unsure at all n locations
agcttaagtgcttatacaaaanatgggcttcaagatactataatgtggaaaataataaataaagtttctctcgaanaaagactaacaaagaanacatcattggtgatgctagctattttagtttgtcaaattatttatatggaagttatttaataatttagagacaaatgtgtataattgtatattattgtaaaaagatattattcaacattgatttatttttcttcataaaattcttttaaaaatgaaataataaatgaattgctatcgagaactaagaacaactgattaatcgtcttaatacaattgattgatgcaggaaatgtatccctataaccacctaaagggaaacatcattttatataaaaaaactggttctatatntacttgactgagtctttcgttataatctagaaatgtaataaataaatagacacctctttagcatcatagatattttttatatgatatatggtcacattatg

SEQ ID NO: 4854 - DNA, 434 bp, Glycine max
  unsure at all n locations
ctgccaacccatggaagctcctaatatctcccacactntgtgtggtgtgccattcttggatggccttgattttctcatggtccactaggaccccatttctaccaactacaaaccctaaaaaaactatattatctacacaaaacgtacacttctctatatttgcataaagggtgtttttgctaaggaccgaaagaacttgcctgagatgtcctcagagatcatctaagctcctactgtgcactaaaatatcatcaaaataaacaactacaaatctacctatgaaatgccttaagacatgatgcataagcctcataaaggtgcttggtgcattagtgagcccaaaaggcatcactatccattcatacaaaccaaacttggtcttgaaagcggttatacactcatcaccctttttcataccgatgtggtgataccca

SEQ ID NO: 4855 - DNA, 316 bp, Glycine max
  unsure at all n locations
ggaatcatacctcactgtgataagttatgagcgtatgaatttcacgttatcttgcgctgnccaatttgcagcatctcgtcttattatgcgcccgaatcggacatccgcgtgaaaagttatgaccatttggatctgtcgagagctttccatgacgaatttccgacgtatcgatttaatgttatccaccgctcggacatcgcgagtgaatacgttctgacgcatttgaatttcacgagagctttcgttgctcaatttcgagcgtctctatatgtgatgcgccccaattggacatccgagttgaatgttatgaccattt

SEQ ID NO: 4856 - DNA, 303 bp, Glycine max
  unsure at all n locations
agtcacctgcngctgcagcttgcaaaattcaacggttagaacttgtcacttgtatgtccgactcaggcgcatcacatatagaggcgctcgacaaggaacaacggaagatctcaagaaattcaaatggtcataactcttcacacggatgttcgattatggcgaatcacatatctcaacgctaaaaaatatacaacggaagctcttgagaaattcaaatggtcataacttttaactgggatctccgattcacgcgcatcacatatagaggcgctcgaagatgaacaacgaaagctctcgagaaat

SEQ ID NO: 4857 - DNA, 467 bp, Glycine max
  unsure at all n locations
tatnntgaattgtactctattgtataaaggatcgattataagttattntgaacttatttgtataaaggatcgattatgcatgattcacaaacataaatctatggaaatataaaacttaagattgtttatccaataccatataatttacttattttaaccaacatttatatcgagaacttgtttaataacaagttttagtgaaataatatttatttattacactttacggcaattatagatcctaaaatgccttcttaatagctgctgccaattcatcataggctacttcccaagcactgctcaactcgtcactccatttgtccccaactgtcttcttaatagcatatgccaattcatctcaatttccttccacccaatcaatggggaacagtgacaggacgactactagtcctagatgggtatatgtatatngcttaattaacttcattntattctttaattacata

SEQ ID NO: 4858 - DNA, 301 bp, Glycine max
  unsure at all n locations
tctggtgggacatcttgacttgctttccaatctgacattcaccacagattctgccttcttctattntcagattgggaatgcctctaacagcatctttgtcaatgattttcttcatgcctcttaagtgcagatgtccaaatctttgatgccatattctgacttcatcttctttggagaatagacatgtggaggagtagctggtttcttgaggtgtccataagtaacagatgtactttgatctcctgcccttcattaggacttcactcttctcatttgtcaccaagcattctgatctttgtga

SEQ ID NO: 4859 - DNA, 276 bp, Glycine max
  unsure at all n locations
agctngaatcggacatccgngtgaaaagttattaccatttgaatttctcaagagcttccgttgttcaatttcgatcctctcgacatattatgcacccgaatcggacatctgtgtgaaaagtcatgatcatttgaatttctcgagagtttccgatgtttaatttcgagcgtatcgatatattataaccctgaatcggacctcagtgtgaaaagttatgaccatttgaatttgacgagagcttccgttgttcaatttctaatatcactgtatgtgatg

SEQ ID NO: 4860 - DNA, 403 bp, Glycine max
  unsure at all n locations
agcttatgctgcaaacatttataatagacctcctcagcagcaaaaccaacaacaacagaataattatgatctttcaagcaacagatacaatccaggttggagaaatcatccaaatctgagatgggcaagtcctccagaacaacaacagcatgtccctcctttctagaatgctcctggtccaagcaagccatatgttcctcctccaatacaacagcagcagtcataacaaagacaacaagcaactaaggctcctcctcaaccttccttagaagagttagtgaggcaaatgaccatccagaatatgcaatttcagcaagagacaagagcctccattcagagtctaacanataagatggggcagatggctactacagtgaaccaagctcagtcccaaaattatgac

SEQ ID NO: 4861 - DNA, 325 bp, Glycine max
  unsure at all n locations
tctagatgagttatgtctgcgaatcggacatcctgtgaaattgtttttctcatttgaatttctcgagtgcttccgttgtttaatttcaagcgtctcgatattntatgtcctcaaatcagacatcggagcgaaatgttatgaccattcgaatttgtcgagagcttccgttgttcaatttcgagcgtctagatgagttatgtcaccgaatcagacatctgagtgaaatgttatgaccattcgaatgtgtcgagagcttccgttgttcaatttcgagcgtctagatgagttatgtcaccgaatcggacatccgtgtaaaaagtatgac

SEQ ID NO: 4862 - DNA, 314 bp, Glycine max
  unsure at all n locations
ggaatcggacatccgtgtganaagttatgaccatttgaacttctcaagagcttccgctggtgagtttcgatcctctcgacatattatgcgcccgaatcggacatctgtgtgaaaagtcatgagcgttcgaatgtctcgagagttttcgatgtttaatttcgagcgtatcgatatattataaccctgaatcggacctcagtctgaaaagatatgaccatttgaatttgacgagagcttccgttgctcaatttcgaatgtcactgtatgtgatgcgcctaaattggacattcgagttaaaagttatgaccatttga

SEQ ID NO: 4863 - DNA, 318 bp, Glycine max
agcttttgagaaattcaaatggttataacttttcacacggatgttagattaaggcgcatcacatatagagacgcacgaaaatgaacaacggtagctctcgagaaattcaaatggtcatcacttttcacactgaggtctgattcgggcttataatatattgatatgctcgaaattaaagatcggaagctctctagatattcaaatggtcataacttttcacacggatgtccgattcgggcgcataatatgtcgagaggctcgaaattgaacaacggaagcactcgagaaatacaaatggtcataacttttcacacggat

SEQ ID NO: 4864 - DNA, 332 bp, Glycine max
agcttcctatggatttaatagtgtcaccatttttcaccaagtaaaccagcaaagaggggatccctcttgctgtctgattttcaattggacaagcacgtgaattggaattgtgagcttagcaccaattacaatgttgacaagagcataataattctgacccatcattgcctgacatgtggtgaggccttggaaggtttcttttaccaactcataataagtgtcattcttgcttgtagagtagggtgtgttatactggtaaatgtttcctgaaacaaaacatatgaacaatgattgacttatcggactttttaaatatacattataaaactaat

SEQ ID NO: 4865 - DNA, 351 bp, Glycine max
  unsure at all n locations
agctntctaaacagttaaaattgagaagagatacaactgcataaagagtcatctatttttgaccaaactcaaattttgattttttataaattatttcttgttataaatttgattttgtataaattctctattgttattttgattttgtatgaattctctcttgttatantttattttcattaaccttgatgcgtacgatttgntttagcttgttctttttcctttatgtgaggtaaatttcctacaaataaatcattatttgatccagatattatcaagactaataggaagaacaagaaggaaaagaaacaaacaacaactaagccaccgggtgaatcttcttgtactaat

SEQ ID NO: 4866 - DNA, 428 bp, Glycine max
  unsure at all n locations
agctntagcaactctttctttntgtttagtcaaaacctctaatgctcttaatctctcctcatctaaatcaaccaactcatctaacatcattttccaataatggtcgattggaatgtccatttgtttttgtaccctggctgattgcaaatgtatttcgaccggaagtacagcatcatgcccataagtcagtcgaaatggggtagtattagttgattccttaggagaatttctacatgcccatagaacttgatctaacgtcttattccaatttcttggcttttgggcaatgtgatttttaatcaagttaattacaatcttattggctgcttcgacctgaccattagtttgcgcgtaatatggtgttgaggttaataatccaaagccaatttttgggcaaattcttttattttctgtcacgaaaaactgaa

SEQ ID NO: 4867 - DNA, 316 bp, Glycine max
tctcgatatattatgcgcctgaatcagacttccgttacattatttatgaccatatgaatttctcgagagccttcgttgttcaatttcgagcgtcttgatatagtatgcgcctgaatcggacttccgtgtgataagttatgaccatttgaatttgtcgagagcttccgattttcaatttagagcttctcgatatattatgaacctgaatcggacttccgtgtgacaagttatgaccatttgaatacctagatagcattcggtgttcaatttcgagcgtctcgatatattatgcgcctgaatcggactttcgtgtgac

SEQ ID NO: 4868 - DNA, 370 bp, Glycine max
agcttctcgatatattatgcgcctgattcttattttcgtgtgaaaagttatgaccattggaatttctcgagagcttccgatgttctatttcgagcgtctcgatatattatgcacctgaatcggacttccgtgtgacatgttatgaccattttagtttctcgagagtttctgttgttcaatttcaagcttctcgatatattatgtggctgaatcggactttcgtttgaaaagttatgaccatttgaatttctcgggagctttggttgttcaatttcgagcgtctcgatatattatgctcctgaatcggactctcgtgtgacaagttatgaccatttgaatttcacgagagcattccgtgttcaaattcgag

SEQ ID NO: 4869 - DNA, 406 bp, Glycine max
cttgaaatctgaagtttaatattcaaatgatcaatgttcttataaaatgcacacacatgacctctatttatagcctaagtgtcacacaaaattggagggtttgaaattgaatttgtggagccaaactttggagccaaaatttcactaattatgattagtgaattttatttatggttcagcccactaatccaagatcaaatataatattctccactaagtgtgcttaggtgtcatgaggcatgaaaagcatgatggacatgcacaaagtgtgactatatgatgtggcaatgatgtgtagtaagcaaatgctcacctgcccctctaaaatttaattggatggagcttctaccaattcaattaaatttatttccaaccacacacattatatatccacttaatgcatgtg

SEQ ID NO: 4870 - DNA, 308 bp, Glycine max
ctgtcaaattgctgggattactattgctgcgaccataactctatgcaattcctctcatgatacccagatatgtaagaattgtaagataggaaaacaggttccgcgtcagccaggactatgtggagcaattgttcctcgatcctgtgatcatgttccataagtttagtccttgctttagttcgctttgcttgactcatgatatgctctactcttttattactattttgggatgtctcttactaggtaaaggatatttgcaacctggtgtagaaacatgtccaattgatccctggctcgtggatcctgac

SEQ ID NO: 4871 - DNA, 419 bp, Glycine max
agctagcatggggctttggcttgtgtgatatggccattcactccgccacagtggatggagcttgaacattttgctaatttagttgatgaacaattatttagttattaatacatagcttttttgttttgttaataatataattctcaccattatttagttattaatatttagttttttatgcattaacactagattgctttttaatggtatattgcatattaaaaaacgacccgtgcgttacgcacgggtttatattataataacgatattgtgatagcaatataggtcattttaaacttattaatactatttagtttttggattggactacataaaccaatcattttatgtctaaaaatatttctttttaaatatgataatagtgtcataatgattttttaattcatagcctcctcctt

SEQ ID NO: 4872 - DNA, 321 bp, Glycine max
agcttcaacatcagaccactttttggtgctggaactacttcacatggacttgatggggcctatgcaagttgaaagccttggaggaaagaggtatgcctatgttgttgtggatgaatccttcaaatataaacgtgacgagactatccttatcttctagtggcacaacagtctagtccaaagattactcctattaagtcaaagagaaagcgactgtgtgatcaagagaaccaggattgaccactggcggaacttagagaacacaggatgaatctacttttatcatcctgaggaagcgcatggttaaacaatcactaattctta

SEQ ID NO: 4873 - DNA, 325 bp, Glycine max
agcttaccaaagactacatgtttcctgcataatggccacataactgtacagtcaggcattttaccttgccaacccccacaatcaaaaatcaaaatagaacatccatgtaagaagtaaaatgctgccaataattaaccagacacacaaacctatcaagatgatgatcagctttcaaagtgataatgaaatgggaaccgagtgtgtcacggtctgcaattgccattgataaaaggccagtagcatcatgctttagcctatgtgaactcatctaaacaaatcacagatacataatacattaattattaaatacaacactacagtacta

SEQ ID NO: 4874 - DNA, 301 bp, Glycine max
tatttcagtacaatacccaaagcttgttgattttctccttcattctgctcccaattccaattcttttgttcttcaaagattacatctttgctaattataatatttctgttgactggatcaaataatctatatgccttggattcatcactgactccaaacaaaacacattgcttactcttgtcatccaacttaacccgctgttggtctggtgtatgaacatgagctaggcaatcaaatacccaaaaataattaacagaaggcgtaattccactccatgcttctttaggagttttgtcttgca

SEQ ID NO: 4875 - DNA, 452 bp, Glycine max
tctcatcaatggtattataatttccatcaagtcattacctcatatggttttgaggcaaatgtagttgatgattgtgtgtatcataagttcagtgggagtaaatacatattattgctagcaatgatataggcttcttggaagaggccaaaagatttctaacgaaaattttgaaatgaaagattttggggaagccttttttgtgatttcaagatactaagagatcactctcaaggtatcctaaggttgttacacgtgaactatatcgataaggccctagatagattcagcataaaagatagtaaataaggagattccccaatagctaaaggagataaatgcagtctcaaacaatgcctcaataatgacctttaaagaattgagatgcaagagatttcatatatgtcaacagtaggaggtctaatgtacacctccagttgtactcatcccgacat

SEQ ID NO: 4876 - DNA, 421 bp, Glycine max
gacactatgaaactaagcttaacattcaatttcgagcatctcgatatgttacgggactgaatcttacatccgagtaaaaagatattgtcgtttgaatttgctcagagcatcaacattcaatttcaagcatctcgatacatgacgggactgaatcagacattcgagtaaaaagttattgtcgtttgaatttgctcagagcatgaacattcaatttcgagcgtctcgatatattacgggactcaatcaaacatccgagtaaaaagatattgtcgtttgaatttgcttagagcatcaacattcaatttcgagcacctcgatatgtgacgggactgaatcagacatccgagtaaaaagttattgtcgcttgaattggctcagagcttcaacattcaatttcgagcgtctcgatatgtgacgggac

SEQ ID NO: 4877 - DNA, 369 bp, Glycine max
  unsure at all n locations
agcnttgagccaattaagacgacaatatctttttactctgatgtctgattgagtcccgtcatatatcgagacgctcgaaattgaatgttgaagctctgagccaattcaaacgacaataactttttactcggatgtctgattgagtccgataatataacgagacgctcgaaattgaatgttgaagctctgagaaaattcaaacgacaataactttttactcggatgtctgattgagtcccgtaatatatcgacacgctcgaaattgaatgttgaagctctgagccaattcaaacgacaataaatatttactcggatgtctgatttagtcccgtcatatatcgagacgctcgaaattgaatgctgaagctc

SEQ ID NO: 4878 - DNA, 393 bp, Glycine max
  unsure at all n locations
ntactgaaagagatcactcctcgatgtaccaaggttgaattgcatgatcctcaatggttagatacaatgaaggaagaatacatggttctgacgcagaataaaacatgggatctcgtccctttgcctcctcataggaaggctattggttctaaatggatatatcggttgaaatacaatgttgatggctctgtagccagacataaagctagactggtagctcaggggtattctcaacgaccaggacttgattataatgagacattcagtcccgttatcaaacacgtaaccattcgaacggtcttgagcattgctgtcaccagaaaatggaatatacgacaagtagacgttaacaatgctttcctaaatggttccattcaagaggaagtatatatg

SEQ ID NO: 4879 - DNA, 430 bp, Glycine max
  unsure at all n locations
tgagccaactcanacgataataactttntactcggatgtctgattgagtcccgtaacatatcgagacgctcgaaattgaatgttgaacctctgagccaattcaaacgacaataacttttttcacggatgtctgattgagtcccgtaacatattgagacgctcgaaattgaatgttgaacctctgagcaaattcaaacgacaatatacttttactcggatgtctgattgagtcccgtaacatatcgagacgctcgaaattgaatgttgaagctctgagccaatacaaacgaccataactttttactcggatgtctgattgagtcccgtaacatatcgagacgctcgaaaatgaatggtgaagctctgagccaattcaaacgaccataactttttactcggatgtctgattgagtcccgtacatatcgagac

SEQ ID NO: 4880 - DNA, 338 bp, Glycine max
agcttcaacattcaatttcgaccgtcttgatatgttaagggactcaatcagacatccgagaaaaaagttattgtcgtttgagttggctcagaacttcaacattcaatttcgaccgtctcgatatgttaagggactcaatcaaacatccgagtaaaaagttatggtcctttgtattggctcaaagcttcaacattcaatttcgagcgtctcgatatgttacgggactcaatcagacatccgagaaaaaagttatcgtcgtttgagttggctcaaagcttcaacattcaatttcgagcgtctcgatatgttacgggactcaatcagacatccgagtaaaa

SEQ ID NO: 4881 - DNA, 308 bp, Glycine max
agcttgtaggaaattcaaacgacaataactttttactcggatgtccgattgaatcgggtaatatatcgagacgctcaaaattgagactagaagctctgagcaaaatgaaatgacaatatacttatacacggatgtccgggtgagtcccgtaatatatcgagacgctccaaattgaaacggaaactcttagaaaattcaacgacaataactttttactcggatgcccgacagattgccgtaatttatcgagagatgctccaaattgaaaacagaagctcgtatcaaatacaaacgacaataacttttta

SEQ ID NO: 4882 - DNA, 285 bp, Glycine max
tcagctgtagaagtcaatttcgagcgtatactagattctttactcaagcagacatccgagcaatacattactgtcgttggaattagctcagagcttcagaattcattttcgatcgtctcgatatattacgggtctcaatcagacatctgagtaaaaaagttattatcgttcgaatatgctgagagcttcatcattcaatatcgagcgtctcgatgttctatgggacttaatcagacatgcgagtaaaaagctattgccgattgaatacgctgagagctgcaacat

SEQ ID NO: 4883 - DNA, 238 bp, Glycine max
agcttttgagaaattcaaatggtcattacttttcactcggttgtcagattcaggcgtataatatatcgagacgctcaaaatagaacagtggaagctattgagcgagagaaatggtcataactgttcactcggaggtccgattcaagcacataatatatcgagaggcccgaaattgaacaacagaagctcttgaaaaattcgaatggccaattctttacactcggatgtccgatcaggc

SEQ ID NO: 4884 - DNA, 466 bp, Glycine max
  unsure at all n locations
ngcaactttctcagcagccacgtaacacaacacttcatggccttcatccttctcttccaccttaacctcaaccctcttcttcttctgctcacattccccatacacctcttcctcagcttcatcatcatcttcatcaatttcaacaacctcaaaaggaccatcatcctcactctctcccagaaactcaaaacccctttccatagatttttcaatcttcgcactcgcaccttcacctccacccttgagttctttcacgaaaaccaattcatcatcatcgtaatccaccactctcctcctcttccgactcctgatcaaaccaccccgaacctcgactcctttgcttcgcgtcctacgagctggtccagtatactcattcatttcaaacaacaaaaccaacacanaaaaaagacccttttctntcctgtttcttcgaacaataatcagaaacaccccacaacgcaagatc

SEQ ID NO: 4885 - DNA, 346 bp, Glycine max
tctcgatatattacgtcccaaattcggacatccgtgtgatatgttatgaccattcgaatttctctagagcttccattgttcaatttcgagagtctagatgagttatgtacgcgaatcggacatccgtgtgaaaagttatgaccattcgaatttctcgagagcttccgttgttcaatttctagcgtctagatgagttatgtacgcgaatcggacatccgtgtgaaaagttatgaccattcaaatatctcgagtgcttccgttgtgcattttcgagcatctcgatatattatgtcccccaattcagacatccgtgtgaaaagttatgaccattcgaattctcgagagc

SEQ ID NO: 4886 - DNA, 454 bp, Glycine max
  unsure at all n locations
taacataaggcatgtgaagtgggtggaattcctatagcaattcccttatgttatcaaacataaaaagggaaaaggtaatattgtagccgatgctctttctcggcgtcatgcattactttctatgcttgaaacaaaattgattggtcttgaatgtttgaaaagcatgtatgaaaatgatgaaactgttggagaaatttgtaaaaattgtgaaaaatattcagaaaatggtttctttagacatgaaggctttcttttcaaagaaaacaaattgcgtgtgcctaaatgttctactagaaatttgcttgtttgtgaagcacatgaaggaggtttaatggggcattttggggtccaaaagactctatanacattacaagaacatctttattggcctcatatgaaaaaggatgtgcagaaatattgtgaacatcgcattgtattgtaaaaggcaaagtct

SEQ ID NO: 4887 - DNA, 333 bp, Glycine max
tccttaagaagattcctaaagaagctagagcttagctacacttacctctctaatagctaagctcacctccttgagatgagaagctagaacttagctacacaccccctataatagctaagctcacccccatgacaaaaaacatgaaaatacaaaaaaaaagtccttactacaaagactactcaaaatgtcccaaaatacaaggctaaaaccctatactactagaatggccaaaatacaaggctaaaacgaaggaaaaacctattctaatatttacaaagataagcgggctcatacttagcccattggctcgaaatctaccctaaggctcatgag

SEQ ID NO: 4888 - DNA, 399 bp, Glycine max
  unsure at all n locations
tacggacactataaaactcaagctngtaaacgattctatgaaccataccaagttttggaccatattggctaggttgcatacaaacttctattgcctgagagatcccgcattcatcctgctttccattgttccttccttaaacccttccaccaaacatctgaagaatattgtgtcccactagcattgacttccaatgatgttgaaaatcaaccagctatctctcttttagccattctgggcactcattatgcctctgagtctactgatccaaagctaaggtattagttcaatgggcagggttgtctcttgatgacattacatgggaagattgggaagaactcaagactgtctatcaccttgtggacaaagtgtttttggatggcgcaagggatgatagga

SEQ ID NO: 4889 - DNA, 463 bp, Glycine max
  unsure at all n locations
tatacaaactgactcattacctttgttatgcaaacgctattattattatcaagttcagaaggatcaatctcatactccgggacttcacgagcattttgcacatgcatgggagccatctaccaaaaaaaaaaaagaagttcacaattgaaacagatatcataaaccaactattctaaaaagagtttaacaattatgcaatgtcagttgaattgttttatacgtaaaaatcaaccctttttttttactctctaacagtaattccgatattattatagtctttttagtgaataatacaaaagaaaataatagaagaaacttttttgaataatagttacaaattccttcatatntttagagacaaccaacttatatgataatttgtaactaaacatatatcanaaactgctggtatgtgtgttgactttcataatcattatcttaaaagtcatacaaaactactaaa

SEQ ID NO: 4890 - DNA, 343 bp, Glycine max
  unsure at all n locations
agcttctggtgggacatcttgacttgctttccaatctgacattcaccacagattctgccttcttctattttcagattgggaatgcctctaacagcacctttgtcaatgattttcttcatgcctcttaagtgcagatgtccaaatctttgatgccatattctgacttcatcttctctggagaatagacatgtggaggagtaactggtttcttgaggtgtccataggtaacagttgtcctttgatctgttgcccttcattaggactttactcttctcattngtcaccaaacattctgactttgtgaagtttacattgaatccttcatcacacagctgactgatgc

SEQ ID NO: 4891 - DNA, 392 bp, Glycine max
  unsure at all n locations
cttgtcctctnttcgtctggaacatgggtataggcaatgctttcaaacactntgaggtgagagatcccgggcttccttccactccatgcttcttgtggtgtcttctcatgcacgctttttgttggggaacagtttgttaggtaaactgcacatgccactgctttagcccaaaactccttcggcatcttcttgctcttgagcatgcttcgcaccatgttaagtatggtccggttctttctctctgctactccattttgttgtggcgatcttggcactgtcagtgggcgacggattccatggtcttcacaatatttgttgaacttaattgaagtgaactctcctcctcgatcagatctcatggccttgatggaaagaccagtttctttctccac

SEQ ID NO: 4892 - DNA, 299 bp, Glycine max
  unsure at all n locations
ntctcttttgtgcagctatctcatctctcttttctagtgtataatgaagctcgacaggttcatgtgcatgtgctgctactaatggaggcacttgaatatggttgccagacctcaaggtgatggcactcacatttttcggattttgcacaatatgtgaaggcaatttgtcaaagatttgggactgagcttgattcatctgagtagccatctgtcccatctggtttgtcagactctgaatggaggctcttgtctcttgttgaaattgcatattctggatggtcatttgcctcactaactct

SEQ ID NO: 4893 - DNA, 463 bp, Glycine max
tcttaggtgttattccttccaatctctttgaagggctcttattctaaatgaagacagctgtagacactgcctctccccacaagtacttgggcagactcttgcctttcaacatgctccttaccatattcattatggttctgttttttctttctgcagctccaatatgttgaggtgtgtagggaggagtcacttcatgaattatgccttcttgatcacaaaattcttgaaattctgtagaaacatattcaccaccaccatctgttctcaatatcttgattaatgagtcactttgcctttctgccatatttttgaacttctcaaagacttcaaagacatcactcttccttcttattaggtaaacccatactttcctagtcaattcatcaataaaggatatgaagtatctgtttccacccagagattcagtttgcatagggccacacacatcagagtaaatcacctc

SEQ ID NO: 4894 - DNA, 460 bp, Glycine max
  unsure at all n locations
tagtaaagctaagcactaacaatctcccnncttggcaaattttgtctaaaacatacttagacacttcctgagcaggtacgagcagttatgcaagtgggatcagcaactttcattatcagagtaatcaagcacagcggaaattctgcaagttgcaaatctacaagtcttctccaggatgtcaagacatctcacgtgacatcagctntctgctcctgctccccctgtctccatgcttactgcagcatcttctatcagctactagtcttttccaggatgtcgagacttctcatgtgacatcagctntttgctccccctgtcttcatgctcttactgcagcatcttttatcagctagtagcttacaccaatcatcagcagcagtctccccctcaaagtcatatacatacaactccccctcanaatcatgaatcatgcgtacatcgtatcctactgccatacatc

SEQ ID NO: 4895 - DNA, 369 bp, Glycine max
agcttcacagtggtagcagccacgatcctcatcgatccaatgagccttcgcctactgtgccgtcgccttcgtgcgccaccgatcagtctgagagctccgccgccactccgccgagtccttcttcggcgtcgacgtcgtcgtcgccgtccacgctggtggtaactcccagctgcggcggcggcggcgcgagtccggtggtgaatcggcaggactttttctcgtcggaggaagagtttcaggtgcagctagccctagctatcagcgcttccaattcggagttccgcgaggatcctgagaaggatcatatccacgcggcgacgctggtgagcttgggatgccatcggatcgattcgacgaggaacacggacg

SEQ ID NO: 4896 - DNA, 223 bp, Glycine max
agcttccatcaagttatgactcatttgaattctcgagatcttccgtggttcaatttcgggcgtctccatatgtcatgtgcctgaatcggaccttcgtaagaaaatttatgaccatttggacctctcttgagcttccgtggttaatttcgagcttttctatatctgatgtgcctgaatcgggcatccgagtgataagttgtgacaatttcaatttctacagagc

SEQ ID NO: 4897 - DNA, 301 bp, Glycine max
ctcttttgtgcagctatctcatcctctttttcaagtgtataatgaagcttgacaggttcaggtgcaggtgctgctactagtggaggcacttgaatttggttgccagacctcaatgtgatggcactcacatttttcggattttgcacaatttgtgaaggcaatctgtcaaaattttgggactgagcttgattcatctgagtagccatctgtcccatctggtttgtcagactctgaatggaggctcttgtctcttgttgaaattgcatattctggatggtcatttgcctcactaactctttct

SEQ ID NO: 4898 - DNA, 353 bp, Glycine max
gggtcttagggaagaacctagctagcccaaagtctctaatcttatgctgaaacttctcatcaagaagaatgttgcttgctttgatgtctcggtgaacaattcttaaatgtgaattctctgggaggtattgtaatccccgtgctacaccaagaataatttggaatctagagctccaatgtagaaattgatcactcttttctgacatcacagaaacatcctaataaggaattattctcttaaaactactttcagttctttgaattactcatgacacattggacatggtgtacattttcacaagatctactacttctaggaaagcacttatctttacatatgataaacaccatgct

SEQ ID NO: 4899 - DNA, 467 bp, Glycine max
  unsure at all n locations
tatataacatggccatcattcacaaactntgtatacatgcatctattagcatcactactagaagaaccatcaacaagttaagtctcattaaacttttcatgccattgtttaggaacttgttttaaaccatatagggatttcaaaagtttgcacattttgttctcttgaccatccaccacacaccccttaagttgagtcatatatatcctcttcgctatatcaccattcaagatagttgtcttaacacccatctgatgaatcactaacttatggattgtagctaaggctatcataatcctaatggaggaaatccttgtaatatgtgcaaaggtataaaaaaaatctatgttaggtttctaagtaaaccctttagcaatcaaccttgctatgttattatctatagattcatcacgattatacattctcttatagatccatttacattcaataggattagcacccttaga

SEQ ID NO: 4900 - DNA, 429 bp, Glycine max
gaatctcagcttccatttcaatttcgagcgtctcgatatattacagggctgtttaggatattcgagttaaaacttattgtcatttcattttactcagagcttccgttttcaattacgaacgtcacgataccgtacgggactcaatcggatatccgattgaaaagttattgtcgttagaatttactcagagcttctgttttcaatcacgaacgacttgatattctacgggacacaatcggacattcgagtcaaaaattattggcgtttgactattcttagagcttccgttttcaattctaagcgtctcgatatattagagagctcaatcggacatctgagttaaaagttattgtcgttcgacttttcttagaggttccgttttgaatttcgacggtctcgatataatacatggctcaatcggacatccga

SEQ ID NO: 4901 - DNA, 298 bp, Glycine max
  unsure at all n locations
agctntgagaaaaatcaaacgacaataatttttaacgctgatgttcgantgagacccgtaatatatcgagacgctcctaattgaaaaccgacgctctgagcagatttaaaggacaataaattttcactctgatgtccgattgtgtcccgtaagatatcgagacgctcttaattgaaaacggatgctcttagaaaattctacgacaataacttttaactccgatgtctaattgagccgctaaatatatcgggacccctgaaaatgaaactgagctctatgaaagttaacgacataactt

SEQ ID NO: 4902 - DNA, 215 bp, Glycine max
ccttactactttcttgatgtacaactccactagcgttgccattctatacttcatccgagtgaaatgttatgaccattcgaatttttcgagagcttccgttgtgcaactatgagcgtcatgatataatatgggctcgaatcgaacattcgagtgaaatggtttgacaatttcgaattttcgagagacttcgttgttcaatttgagcggctagaaga

SEQ ID NO: 4903 - DNA, 460 bp, Glycine max
gctctggactgagcaccagatcgtcgctgtggcagaaactacgctgctcactctcttgaattaggcaacgccgttcccaaggttccttccttctctgattctgtctgataagttgttatcttaattgaagaatctaagcttttgaattttcatgagccggtgttgtttctgaaaccgacgtcgtcttacttgaaaaacggcggaaccatccaaattccacacaacgagggctctctgcatcacgaggttgagctcgctgtggtcatcgccaagaaagcacgtgacgtctccgaatcctctgcgatggattatgtcgccggtattcactattcatttatcttatgccttatcctgctgttaaccgtgaaaatcgttaatagatttcttaaagtattttttatctctaagaagttaattctcactgctgattttatctagagtgagatattatattcatttt

SEQ ID NO: 4904 - DNA, 450 bp, Glycine max
  unsure at all n locations
ctgagngatgcaagctttgacaagacagnacacactgttgtcttcttcaacaagattaattttggaaatctactctaaagatacgtgtaattatacccataattatacacactccccctcaagctggagcatataaattatatgcaccaagcttggaacatataaactgaattctaggcccccttaaggatttagtcaaaatatctgctggctgatcattggaattaatgaattcagtaacaatctctttagacagtagcttctcccgaataaagtgacagtcaatctctatgtgcttggttctctcatggaagactggatttgaagcaatatgcagagcagtctgattatcacaatacaacttcatttgcatcactttgcagaatttcaactcttcaagaaattgtttganccacataagttcacatgtgactacagccatagatctat

SEQ ID NO: 4905 - DNA, 369 bp, Glycine max
  unsure at all n locations
tgctggaactacttcatatggacttgatgtggtcctatgcaagntgaaagccttggaggagagaggtatgcctaatttgttgtggatgatttttccagatatacctgggtcaactttttcatgatagaaatcagactccttcgaagtattcaaagagttgagtctataacttcaaagagatatagactgcgtcatctagagaatatggagtgaccattgctgagagtttgataactgcaagtttactgaattctgcacatctgaaagcatcactcatgagttctctgcagccattacaccacaacaaaatggcatagttgaaaggaaaaacatgactttgcaaaaanctgctagggncatgcttcatgc

SEQ ID NO: 4906 - DNA, 431 bp, Glycine max
  unsure at all n locations
agcttgcaacttttataaccgncgatcaaatttttaatttaataacaactcttgatttaatttaatcatgattagccattgatcaaaaattacaattaaaaattgtcgttcattaagtgttaccatatttaacattaattaaagattaaattgatcatattcatactacttttaatgatttataatgttttactctacttattaagaaatatttaaacacacataagtctattttttaaattaatgtactttaaaatatattttatgagcaataataattaaaaacaatgattctataatataaaaataatacattttatattaacgaacagtaattatagtatgtgttataaatgaattacagatacgtaatatatttaaacaatcataataagctacgtattttttaataactatatatatttttaaaa

SEQ ID NO: 4907 - DNA, 410 bp, Glycine max
ttactatgcagagaatatccaaagagaatacctccatctttcttagcatcatattttcctaaattatcttttccattattcaatacaaagcatatacaaccaaagatatgaatatgtgagatgtttggttttctgtcactgaacaaatcatatggagttgtctttaagatggggcttattaaagcccttatttaatgatgtagctatgcgagtgttaacgactttaacccaaaaatattatggaagacgtgtatcatttaataaagttctagcaatcttttcaaagatctattatgtctttcaacaacaccattttgttgaggggatcctggtgcagaaaagttagctcaatcccatgcttatcacacaataagtcaaattctatatttcatactcaccctcatgattac

SEQ ID NO: 4908 - DNA, 460 bp, Glycine max
  unsure at all n locations
ntcagaaagcgtngatgtcgagtgtatactatntttcttgcatgttgttcgtagcttgtgtcttcttcatagatagggcatgcatgatggcccttaacactgtatccactcaaattcccatatgttggaaagtcattaatgatacaaaatatcattgcacacaacttgaatgtttcattntgatacggcaaccccctcgtcccacaactttgtcaagtcttcaatcaagggactgagatgaacatcaatgtcatttcttggttgtcttgggcccgatatcatcatacacaacatcatgtattttcgcttcatgcacaactaaggaggcaagctatacattactagcaaaataggccacgaactgtgttgagtgcttaaactgccatacagatccattccatcactggcaagtccaagcctaggatntcttgcctctttttcgaattctggatacaaacta

SEQ ID NO: 4909 - DNA, 420 bp, Glycine max
tacgtctctaaataagtcgattctgagtggaaaccttatctccggagtgatcccggagacgctggggctgtgtaaggctttgcagttgctggatataagtaacaataggatcactggttctattcctgatgagatcggttatttgcaagaattagatatcctcttgaacttgagttggaattctcttactggccccattccagagaccttctcaaatctctcaaaactatccatcttggatctctctcacaacaagctcacaggtacactcacagttctggttagtcttgacaatctagtgtctctaaatgtctcctacaatagcttttctggttctcttcctgatacaaaggtcttccgggatctacccactgctgtcgttgctggtaaccctgtaccttgcattagcatgtgtcatgc

SEQ ID NO: 4910 - DNA, 439 bp, Glycine max
  unsure at all n locations
tatatcnncccttttaatgattataaagcaaattccaacttatgcaatgcatgaaaaacaaaatgaaaggaatcagaactgggttgcctcccaggaagcgctcttttaacgtcattagcttgatgcatatacctcaataggtgatattaaatttggccctcactttcaggacctcccttacctgtaagcaaacattttgttctggcacaggcttgtcttctacaaataaatcaaaatcaattctttgatcttcaaaacccatttctagtttctttcttcccaagattaagggaatgtcattatcttcacagatatccattacaacaaagtctgttgggaagataaaatgttttactctgacctaaacatcttcaattactccgtatggtctggtaatggagcggtcaaccaactgtagagtcattctagtgggcatgat

SEQ ID NO: 4911 - DNA, 347 bp, Glycine max
  unsure at all n locations
agcttaaaggaagtgaacgaattagcatggttataattgtctccacattgattggtaaatctgctccccaaattcctgaaaaatgtaaagatccaggtacattcagcataccttgtattatagggaatagtaagtttgacaatgccatgctagatttaggagcttctgttagtgttatgcctctgtctatatttaattctctatctctaggtcccttgcagtcaactgatgtggtaattcatttagctaatagaagtgttgcctaccctgttggtttcatagaagatgtcttagttagagttggtgaactggattttcctggtgattnttatatattgaatatggaa

SEQ ID NO: 4912 - DNA, 471 bp, Glycine max
atacaatactcaagcttatgagataggactaccattcattaaaaagcctggcccataacacaagaatgacttcatagagtctcaagctttaccagtccttgataaactcctagaagatgtaagcatgcatctctacagcactattgtccctatcacgtttcatatcagatgcgtgagtgtgcatcttaattagcaatagaaataggtaggtttgttagtaaaatacctgtctacacattaaattaacgcaatgtggggaggaactgtttccttgcctgaaaaggcattttcggaatcgaaacgagaatggagacgattatcacttgtttcaacaaagccatttcaaatgattggcgtgtcgaaattgctcttgtttcaatatgtgacagagtcattatctgcagacgtcttcgctgaaatgatatgaccaatatatttaagccactccagaacataattaaaatacatttt

SEQ ID NO: 4913 - DNA, 406 bp, Glycine max
agcttcaaaggcttagacaagggactatgagtgttgtttaatatagacaaaaaatggaattactccttttaagagctggacttagggaggaggaaagaacaagcatagctaggttccttagtgggcttaatatggaagtgagggacaaggttgaactccttccatatagggacctagatgagctagtccaactttgtataagagtggagcaacaacttaaaagaaagccttcttcaaaatcttatggctctcactcttatccaaggaaggaccaagcctatggaattttaggggctgcaccttcaaaacccaaggaagaatagggtaagaccatagagaaatacacccctaagactagttcccaagaaaggactaacaacattaaatgctttaaatgtcttgggag

SEQ ID NO: 4914 - DNA, 465 bp, Glycine max
taagcaaaagtttcatttaaactactcttccaaaacttttatataaaagtaaataaatgatattgtctattgtacttaaatataaataaatttaattaattttatgccatttaatgttatcattcctaaaatattattctttcgtctaattctttttctatcttgaatgactctcttatttatgataataagtttcaaatgaaagatattttaaaagaaaagaaaattattatttttactttttcacgtaagattaaatgatggtaggagatgtggagtggacttgagaatagatatgttttgcttaccttcataggctagttttttctaaaagataatttattctttggtacagagactcctttgtcatgtatatgatagcattacttaaaagtaatgcatgtattatctcatggaattcaagataatgatatatgatagtttattcattctttgatatcatac

SEQ ID NO: 4915 - DNA, 378 bp, Glycine max
  unsure at all n locations
agcttcatctggaaaagtatcatagatattgttctccttggaagtgactttttcattcacaagtctagataggtggttagccactaaattntcacttcccttcttatcctttatttcttgatcaaattcctacaacataagtatccacctaataagtatttgtttggaattaggcttagttaagaggtacttaatgttagacaagtggcctcagatatcttaagaagggggggttgaattaagatattccaaacttttctcctaattaaaaatctatcttactttntacttaagttatgaattcccttaatgacaatcttcttacatattaattcatatgaagcaacttgaattatgaatattaagcattaatatata

SEQ ID NO: 4916 - DNA, 325 bp, Glycine max
  unsure at all n locations
agcttcattcactaatccttccttacacaatgtttctataattctactatacataaccacattgngtttaacattaaaaacacaatgttgtatcatcctcaacaatctaacagcgacttttgttnttcctgcatcacagagtccgttaattaaagtcccgtaggtgatttcgttgaattcgaatccatccgcgagcatttcgtcgtgaaatttgagcgcggtggaaacggcgccgttgaggcagatgccgttgatgagggtgttgaccgtgacgacgtcgtacgggagaccgcgctngagaagcttcccgaagacggagaatgcg

SEQ ID NO: 4917 - DNA, 305 bp, Glycine max
agcttgcaaactaggtacttatttgcaacctgaaagctaggaggacgctgtgtcataaatactgactcctcaagaaacccatttagaaaagcattgttcacatcaaactgaaataactctcacccatgtgaaagagcaagagtgagaacaatacgaattgtgacaggcttgaccacaggagaaaatgtctcatgaaagtcaaaaccccatgatgaaaacccttagctaccaaccttgctttaaacttgttgatggaaccatcaacattttcttttactctaaaaacccacttacactcaatggca

SEQ ID NO: 4918 - DNA, 474 bp, Glycine max
  unsure at all n locations
acggaccttgaaactaagcttaaggaagtgaaagaattagtatgggcagaaatgtctccttattgattggtaaatctgttccccaaatccctgaaaaatgtaaagatccaggtacattctccatacctagtattatagggaacaataagtttgacaatgccatgctagaattaggagcttctgttagtgttatgcctctgtctatttttaattctctatctcttggccctttgcagtcaactgatgttggaattcatttagctaatagaagtgttgcttatcctgctagtttcatagaggatgtcttagttagagttggtgaactgatttttcccgttgattnttatattatgaatatggaggagggattttcttaaggatcagttcccatcattctaggcagacctttatgaaaactgctagaacttagatagatgtatatgtaggcacactatctatggagttttgtgatat

SEQ ID NO: 4919 - DNA, 350 bp, Glycine max
  unsure at all n locations
agcttatcattctctacgtnganttattagttaactgtcttncgcctctcacattcttggttcttacttccctctaaatttggcttagagctttgctcatactcattgcttcttattttcctttccgaacaagaaattcctaataccaacaacacaaattttatgagttggaaaccttgattttttgttagcatgtctccaacaaaaaacaattagaaaagaattgcattttagaccttagaaagcattatcctcgctccaacatgcttgttatcccatccaaaggtattgtcagaatctgcagcccccagtgtctgtccattaatcttaatgtagtttaggtacattgg

SEQ ID NO: 4920 - DNA, 587 bp, Glycine max
  unsure at all n locations
agctttgaatgcactatttaatggagttgactagaacatcttcagactgatcaacacttgcacagtggccaaagatgcatgggagatcctgaaaatcactcatgaaggaacctccaaagtgaagatttccagattgcaactcttggctacaaaattcgaaaatctgaagatgaaggaggaagagtgtattcatgacttccacatgaacattcttgaaattgccaatgcctgcactgccttgggagagaggataacagatgaaaagctggtgagaaagatcctcagatccttgcctaagagatttgacatgaaagtcactgcaatagaggaggcccaagacatttgcaacatgagagtagatgaactcattggttctcttcaaacctttgagctaagactctcggatagggctgaaaagaagagcaagaatccggctttcgtgttcaatgatgaaggagaaaaaaatgaagttgacctggatactgatgaaggtctgacaaatgcaggtgtgcttctttggnagcaggtcaacaaagtgctaaacagaatggacaagaggcagaaaccacatgtccagaacatccctt

SEQ ID NO: 4921 - DNA, 534 bp, Glycine max
agctttgagccaattcaaacgacaataactttttactccgatgtctgattgagtcccttcatatatcgagacgctcgaaattgaatgttgaagctctgagccaattcaaacgacaataactttttactcggatgtctgattgagtcccgtaatatatcgagacgctctaaattgaatgttgaacctctgagctaattcaaacgacactaactttatactcggatgtctgattgagtgccgtaacatatcgagacgctcgaaattgaatgttgaacctctaagccaattaaaacaacaataacgttttactcggatgtctgattgagtcccgtcatatatcgagacgctcgaaattgaatgttgaagctctgagccaattcaaacgacaataactttttactcggatgtctgattgagtcccataatatatcgagacgctcgaaatgaatgttgaagctctgagccaattcaaacgacaataactttttactcggatgtctgattgagtccccgtatatatcgagaccctcgaaa

SEQ ID NO: 4922 - DNA, 337 bp, Glycine max
  unsure at all n locations
agcttgcagcaaatgcaaaccacaagaacttttaactccaatatccgattgagtcccgtaatatatcgagacgctcgaaattgaaaacagaagctctgagcaaattaaaacaacaattactttttactcggatgtccgaatgaatccagtaatatatcgagaactagaaattgaaaacagaagctcgttacaattgcaaaccacaattagttntaactcggatgtccgaataagtctcgtaatatatcgagacgcttgaaattgaaaacagaagctttgagcaaattcaaatgacaattactttttactcggatgttcgaatgaatcccgtaatata

SEQ ID NO: 4923 - DNA, 311 bp, Glycine max
agcttgcaaaccaaatgctcatcactgctagaggagaagccttcaagttgtttcatataaatctcctcctctaaatcaccattaagaaagattgttttcacatccatttgtttcaactgaaggtcaaaatgagaaactaatgcccacataatacaaagagaatattacttatatacaagagaaaaagtcttaatgaaatcgattccttctttggagtaaatcccttagcaacgagtcttgccttgtatctctcaatgatgcctaatgaatcctttttggtcttaaagacccatttaataccaatatacttt

SEQ ID NO: 4924 - DNA, 539 bp, Glycine max
agcttgaggatgtgctcgaggtttttggggtctcacgtgacagtcaccaggcactgttttcgggcgaggaaggggagggcgcatatgcaggtctggtacgtgccgccgcacgcgcggaggttgtcagcgatccagtcgtgcatgcggttggcgtgttggatgaggccagggaggctgcccaataggggccagacacgtggacctttgagggagcgagtgaccaaggtgaaccatattaaataggccgctattgctgataggatcattaaagccgttgctgcgtccatgtgagtgctgggcccaactcccaaaacaaaaaattaaacctttattgcttgcaccttccctcaccggaggagctagaggctgctattaccatcaccacgcaaattcaattggatccattgcagcttaaatgaggaaagtaaaccctagctgtgtagtattcaagtgggggctaaaacgggagtgatagatgaaattattgtgttcaactaaaaaatgtgcaagtggttttgattggtgaataattgagatct

SEQ ID NO: 4925 - DNA, 537 bp, Glycine max
agcttgtgcatccaataccctgatgaggatgtcccatatgttcttaaaactgggctgattcatttgcttccaaagtttcatggccttgcaggtgaagacccgcataaacatttgaaagaatttcacattgtctgctccaccatgaaacccccagatgtctaagaggatcacatatttctgaaggcttttcctcattcattagagggagtggcaaaggactggctgtattaccttgctccaaggtccatcacgagctgggatgaccttaagagagtatttttagaaaaatttttccctgcttccaggaccacaaccatcaagaaagatatctaaggtattagacaactcagtggagagagcctgtatgagtacttggagcgatttaagaaactatgtgccagttgccctcaccatcagatttcggagcaacttcttctccaatatttttatgaaggactccagtatatggagagaagtatgatagatgctgccagtggtggagccccttgagacatgactcctgtgaagccaggaatt

SEQ ID NO: 4926 - DNA, 543 bp, Glycine max
agcttgtttatcccatgttgaatttgcttctttagagctgttcatagcaccactaattgttctccttttgaagttgtttatggttttaacccactaactcttcttgatcttttgcctatgcctaatgtttctgtttttaagcataaagaaggtcaagcaaaggtggactatgtgaagaagcttcatgagagggtcaaagatcaaattgagaggaaaaataaaagctatgcttaacaagccaacaaagggagaaagaaggttgtcttctaacccggagattgggtttgggtgcacatgagaaaagaaaggtttccggaacaaaggaaatcaaagcttcaaccaaagggagatggaccatttcaagtgcttgaaagaataatgacaatgctatcaagttgagctacccagtgagtataatgttagtttcaccttcaatgtctctgacttatctctttatgatgcagatggagaattccgatttgaggataaatccttctcaagagggagagaatgatgaggacatgaccaagagcaagggccaag

SEQ ID NO: 4927 - DNA, 409 bp, Glycine max
agcttctcgatatattattcgcctgaatcttacatctgagtgaaatttatgaccatttgaatttctcgagagcaattgttgcccaatttcgtgcgtctggatatattattcccctgaatcggacatctgagtgaaaagttatgaccatttgaatttctcgagagcttccgtttttcaatttcgagcatctagatatattatttcccggaatctgacatccgtgtgaaaagttatgaccatttaaatttcttgagagcttccattgttcaatgtcaagcgtcctgatatgttatgcgcctaaatcggacatccgagtgaaaagtcaggacaatttgaatttctagagagcttttgttgtttaatttcgaccgtgtcgatatattatgggccggaatcgaatacctgagta

SEQ ID NO: 4928 - DNA, 488 bp, Glycine max
agcttgtcttgacatattagaagtttatactcatgataaaaacattctgaagaattgcttatgattaatagcatgttttcgttatatttcttttaataaaaagagattttaagtgaattagtaattagtgaggatagaagtaaaaagaaaaaaagaaaaaggaaaaaagccagtaatatgtaagttataagctagttgaagtaataagccaaaaattacataaataaaatagcataatgtatatctaataaatttattttgattaaaataactagtcaaactaacttatactagagtgttgtgttaaacacaattggaaaaaattgttgacggtaattattatttaaatacgtttatgatttatattattatcaaaaattataatcttaatagaaggaaaaaaaaaacaccttaatggttctaaagctattgaaagcaaagaaaatattgatgaaaaaaaaaagaagtgaagttgaccggttcaaaca

SEQ ID NO: 4929 - DNA, 386 bp, Glycine max
  unsure at all n locations
agacctcctcaacctcagcagcaaaatcaaccacagcagagcaattatgacctctccagcaacagatacaatcctagatggaggaatcaccctaacctcagatggtccagccctcagcaacaacaacagcagcctgctccttccttccaaaatgctgctggcccaagcagaccatacattcctccaccaatccaacaacagcaacaaccccagaaacaaccaacagttgaggcccctccacaaccttccctcgaagaacttgtgaggcaaatgactatgcttaacattcagtttcnnnnngaaatcagagccttcattcagagcttaaccaatcagatgggacaattggatacccaattgaatcaacaacagtcccagaattctga

SEQ ID NO: 4930 - DNA, 510 bp, Glycine max
  unsure at all n locations
agcttcgtgaagaggttttgaatgaccgggatttgatttgaatcaagggggctttgcattccaacccagcagccatgtctgattatactttgagagatggtttaatgtttttcaagggcagacttatattgtctaagagctccaacttgattcctactttgttgattgaataggaggacactccagatttaccaagactaacaaacggatggcagcaaccttctattggaaaggtatgaaaaagacaataatggaatatatccttcgttgtgatgtgtgccagtggcataagtatcaggccatgtcaccaaccgatctgctgcaatccattcccatcctagaggtggtttggacagatatctctatggattttattacaggattgccccttttacagccaaaacagttgcagaaaagttcatcagagatgtggccaaactgcacgtgtntcccaaattctattattgatcgagaaccccctctttctgagtaaattttggggaaactttt

SEQ ID NO: 4931 - DNA, 605 bp, Glycine max
agcttggccataagaatcaaagatgtcttttataacgacacggtctctatattatctaccttgtaaaatagaaaacaaaaggtgtgtgaggatatgagttcctttacacatctttactctatgaatgtcacatttcatttcatgatattttaaaagtgtagaaagataatgagtcatcctacctaagttctctcctgagaaaaatttgtccaattgagtatccattaataatcatagcatattggacaatctgaagacatatattaatccaactaagtcatttttcatgaaagcccatttttttattactaccaaatagccccaattaactctatcaaaagctttgctaatgtcaatttcaaagtaacttgcccaatttttcctttgtacttacacctcatgtgatgaataatttcataagctaaaagaacattgtaaagaatggatcgatcctctacaaaacattattgctcttcataattatgcaatttggaaagagaagttaaagacacttggctaaaactttggacacatgatttttgttaggacattgcacggagagattgaccaaagtcttttatacaaacagggtttttaattttgga

SEQ ID NO: 4932 - DNA, 512 bp, Glycine max
agctttgagaatatggttgcagccattggtcaatatgggccacatttgcccattcctagctatcatgacatcagagttccactcttgaagaaggaagttgaatatactgaaaatttgatgaaaggccataaggagcaatgggtcaagtatggatgtactattatgtccgatgcatggactgatcggaaacaaagatgcatcattaattttttgattaactctcaagctggtacgatgtttttgaagactgttgatggctctgattttgtaaagacaggtgaaaagctttttgagttgcttgatgccattgtggaggaagttggagaagagaatgttgttcaagttgtaaccgataatgggagcaactatgttttatcgggtaagttgttggacgagaaaaggaaacatatttattggactccttgagcagctcattgtattgatttgatgcttgaagatattgggaagcttcccttgatgaggaagacaattagaacgaattaatctagttg

SEQ ID NO: 4933 - DNA, 574 bp, Glycine max
agcttttctttgagcaaagcaaaggcttgatcttgtttatcacccaaggtaaatgccacattcttcttcaccagctcattgagaggtgatgcaattgtagagaaattaggaatgaaccttctatagaagcttgctaacccatggaagctcttaatatctcccacacttttcgggatgggccattcttggatggccttgattttctcagggtccacttgaaccccatttctaccaactacaaaccctaagaaaactatattatctacacaaaaagtacacttctctatatttgaatagagggtatttttcctaaggactgaaagaacttgcctgagatgtcctaagtgatcatctaggctcctactatacactaaaatatcatcaaaataaacaactacaaatctacctatgaaatcccttaagacatgatgcataagccttgtcgcaacctaaccttcggcgggagggcaacgcgtgactcgcggatgcgtgttccaagaaaggaatacgtgcggagtcgccaccaacgtttattcgaggagaacgttcggaaaacccgaaaagacgtgatcta

SEQ ID NO: 4934 - DNA, 644 bp, Glycine max
actaaactttgacatattaaatgcggtcaatttttcccccacatttcaaatttatgttctacgagtataaaaatatatctacccaaatgaagctcattttatattaataatattatttttttaaccaaaaattaaaattattatcattaattattaaatcttaattttgaatttcaagtaaggattaggtttgctttattaattaaaatattattttttgagattataatagttcaacattatgattaattaattaaatctttttgtatcccgtagtttgatgtattttctttatacatttgacattttaaataagtcattcatccttatttgaaatacacactaatagcattaatttcaataactgaaattaatctaacagcccaaccgatgaattaatatggaaacaatattttaaaattttactttaaactaatttattcactaaaatatatgtataatttattcttacttactgcccaattcaaattgaacaacttacacaaatgttaagaaaaatgttaaatccaaaagtcattgacttccaatcaactattgtttttaacaatagaataaaatgactctaaatatttttgaaaacctcggaaaatatcaaattttatctatgaacccctataaaaaaa

SEQ ID NO: 4935 - DNA, 493 bp, Glycine max
agcttgataatcatatcaggctttcattctgaaatgaaagatttggcacatttactcactccactccaaaaacctattgaggcaccatgcattatcattgcctcctcaatgaccctagcaaagatatgtgcaagaggaaggtatgataggtatacatctttttcattcaactgcaagcaggaaaaaggagggtaagtcaaagagaggatagcaaaatattcattatcctaaaactgaaaacatttctagagactagagctctcaaaataccaacactagcttactttttcattacaactcttcagcaattgctgaatcccagctaagagtgtaataatgctttcgttggttatcaacactcccttgggatcacctgtagttccactcgtatacattattgtacacacatcacttttctttttaacaggaagatcaaaactctgattatgaccctgctctagacataaaaaactggaatgagtattgagaaatg

SEQ ID NO: 4936 - DNA, 337 bp, Glycine max
agcttctagagctttctttgctgcatcaatgacatagaatgcatgcaaagaaacatttggtggcccgtctttttctgctttgttgtttccttttgaatttagcagcacagaggcatcacaccccttcaagagtataggaaaaaagaaaacaatatgatttgatttcatgatgcatcaaatgaggcggaagcagtcaagaggaaaggagggaggaggggtcaaaatagcattacccgaacgaaacaatcatggaagtgcattcgcagaattgctgctggaacagttttgtccctagcagtggcatcctttactgccttggcaacaatgaactccacat

SEQ ID NO: 4937 - DNA, 412 bp, Glycine max
agcttgtaaacatgattaggatgttaaaagtctacaaaacttgaagactggtctacatgtatctcttcttcaatgtatccattgagaaaagcactcttcagatccatttggtataacttgatatccataatccatgcaaatgcaagtagcaatctaatggcttccaaccttgcaatagggacataggtttcatcatagtcaatgccttcctcttggttgtatccttttgcaaacaatctagtcttgttccttaatatgatgcgtgattcgtcagggttatttcgaaacactcatttggttttgattgacttatgagaggcaggtttagttccacacttcatccgtttaaactgattagttcttcatgcatagccagcaaccaatgctcatcgtacaaagcttcatctatgtt

SEQ ID NO: 4938 - DNA, 597 bp, Glycine max
agcttcatctggaaaagtatcatagatatcgtgctccttggaagtgactttttcattcacaagtctagataggtggttagccactaaattttcacttcccttcttatcctttatttcttgatcaaattcctacaacataagtatccacctaataagtatttgtttggaattaggcttagttaagaggtacttaatgttagacaagtggcctcagatatcttaagaagggggggttgaattaagatattccaaacttttctcctaattaaaaatctatcttactttttacttaagttatgaattcccttaatgacaatcttcttaaatattaattcaaatgaagcaacttgaattatgaatataaagcaataataaataaaggagattaagggaagagaaaatgcaaactcagttttatactggttcggccacacccttgtgcctacgtccagtccccaagcaacccgcttgagagttccactaacttgtaaattccttttacaagttctaaacacacaaagacaaccccttccttttgtgtttagagattctttacaacaagagactcacagtctcttaatcccttagagaatgaga

SEQ ID NO: 4939 - DNA, 533 bp, Glycine max
  unsure at all n locations
agcttgcaagaggattggtagaggggatctcatccaaggcttttatgtcttagacctcagggacactcttgattgtaaatttactttttttgttatcaattcacatacaacttccattccttgtaaaaatgctcatatttggcattctagatttggtcatatctcagacaaagttttcaaacatttgaataataaaattggtctacacctttctcccaatttctcttcttctaattgttttgtttgccctcttgctaaatttagaagattatattttcctaactctaaccatttattagaattatcatttgacttaattcgctgtgatatatagggtccctatgctcaccctacctatgagggaaagagaattttccttacattggttgatgactactcaagattcacttgactatttctgcttaagcacaaatctgaagctttaatctatgtgcaacaatttttcaccatggttcagactcagtttggtgtatctatcanatgccttcggtctgataatgctaaggaacttg

SEQ ID NO: 4940 - DNA, 552 bp, Glycine max
  unsure at all n locations
agcttatcaaatatgctttcaggtgataaacttttatcaattaagtaattaattaagttgtttatccaaacgcaccctttgcataaaaacttttactactctctagctgatataagtgaatgtttattgcaggctgtggtaaaaaggttgatgactgatgttccctttggtgttttgctctctggaggtttggactcttcattggttgcagccgtcacggctcgctacctggcaggcacaaatgctgccaagcaatggggaaccaaattacactctttctgtgtaggccttgaggtatgtaagcgtacatattcttgaattagcagtggatgtttttaatataagaaggaagccatgaaatttgtcttaatctttaatcatcttatgttgagtagggtgcacctgacctaaaggcagcaaaggaagtagcagactacataggtactgtacatcatgaanttcactacactgttcaggtatatctaaatgagatagtgttgttactgctaagaaattcggggggtttgatgcctaaaattataatttgtaaat

SEQ ID NO: 4941 - DNA, 559 bp, Glycine max
  unsure at all n locations
agctttcaaattactatacgagtaattttcaacttaaaataatattgagtattttatttttattaacaggaataaactaaacgtaatgtttgaaattgaaaaaatataaagtttgatgaagagatattatgttcaattgatgtgatgtgtcaaaaattaatattaaaaaaactataaatttaatttaagattaacttatattataataattttactttcacttcatctagaaaaagaaatactttcaatatattaagattcacattttaaaatttaaagaaaaattaaaatgattgattaagaaataataattataaataaaaaataaaaatgaaatacccaatgcaataaaagtcacaaacttaatatggaagaaaaagattgggctaattattggacagaggaatcaaagtacgcatcagactcaactcccagagtgttatgaagagtttttcttttatcgataaatattacgatattagtttaatttggttggttttattaataaagaatcttnggtccatcacttaattttttataattctaaattttttatatg

SEQ ID NO: 4942 - DNA, 556 bp, Glycine max
agcttctattgctcttattcatctttacttgggctatctcagaccttttatttttgttgtctaagattttgcatacacctccttcaaagtgaagtgtgtagcctctctccatcatttggccaatgcttagaagattttcttttaggctgggaactagtaagacatcatggatgagtcgcgtacctttatttgtctccaccatgacagtgcctttgccttttgattcaaccacacttctatttcccagtcgacctttgactttgacagactcatcaatacatttgaaaatagtctcatccttggccatgtgattgctacatccactatccaagtaccagcttcctcccttttcttttattgagtcttgagtggcgtagaatgtacattgttcttgatcatgctcctttgtgatatgcttgatgcctatttttgttgcgacaatttttctctacgtgcccgaacttctttgcatggttgcattgtggcatattacagaaccaacaatttttctctacgtggcctttgccttttgcatatattgcatggaggattttta

SEQ ID NO: 4943 - DNA, 446 bp, Glycine max
  unsure at all n locations
tctaaactntatacaagactgaagctctgatatcacttgttggacaagtggcctcagatatcttaagaaggggggttgaattaagatatcacagactattccccaattaaaaaaattctacttttaatttaacccaacaacccaagatttcttttaaacaagaactcctagataattatgcaaattaatcttactaaatagaaataataaccaataaaggagtttaagggaagagaaaatgcaaactcagatttatactggttcggccacacccttgtgcctacgtccactccccaagcaacccgcttgagagttccactatcgtgtaaaatccctttacaagttttgaaccacacaaggacaacccttcctttgtttcagatttctttacaacaagagaccctcggtctcttaatcccttttgagaaatagaaagaagagaagac

SEQ ID NO: 4944 - DNA, 393 bp, Glycine max
actggatgcattggttaacttggtaacccagctggccttgaaccaaaaatctgtacctgtcgcaagggtctgcggtttgtgctcctctgctgaccaccatacagacctttgcccttccatgcagcaacctggagcaattgagcagcccgaagcttatgttgcaaatattttcaatagacctcctcaacctcagcagcaaaatcaaccacagcagaacaattatgacctctccagcaacagatacaaccctggatggaggaatcaccctaatctcagatggtctagccctcagcaacaacaacaacagcctgctccttcattccaaaatgttgctggcccaagcagaccatacattcctccaccaatccaacaacagcaacagccccagaaata

SEQ ID NO: 4945 - DNA, 400 bp, Glycine max
agcttccttaagaagattcctaaagaagattgagcttagctacacatacatctctaatagctaagctcacctccttgagatgagaagctagagcttagctacacaccccctataatagctaagctcacccccatgacaaaaaacatgaaaatacaaaaaaaagtccttactacaaaaactactcaaaatgccccgaaatacaaagctaaaaccctatactattagaatggccaaaatataaggcccagacgaaggaaatacctattctaatatttacaaagataagcgggctcatacttagctcatgggctcgaaatctaccctaaggctcatgagaaccctagggccttcccttggatctctagcccaatctacttggagtcttctacccaatgccctt

SEQ ID NO: 4946 - DNA, 452 bp, Glycine max
  unsure at all n locations
tcatgcttaactatgtatggcaaaacttcattactgttgttcaagacatacaagtgagcttgtaacaaatcttctacacttggagtgatcacatgcaatcctcttgaacccttaccacccactctgtcatcatgccgagactcaagaaggccaacaggtttagccttctctaagtattatgaacaaaattcaatggcttcttctgcaatgtacctctcaacaatagatgcttctagatgatatagattctttgtatacctttttaagatcttcatgtatcgctcaaccgggtacatccaccgtagataaacaggaccacgacatttgatttctctgaccagatgcacaatcaagtgaatcatgatgtcaaagaaagcaggaggaaaatacatctncaactggcacagtataattgcggcctcattttccaactcataanacatgactggatc

SEQ ID NO: 4947 - DNA, 395 bp, Glycine max
  unsure at all n locations
ntgcctgactccttcatttcctatgacccattcttctatctatgtccctttctttntacatttaattgttcatctttctatagctctttatttattttcttgctttattgaaatcattttcaaaaatacttagtcgaatatatctcataaaaaattacatattttatattcaaatctgtattttcatgaaaaggtgccaagaattgttatatttcttcaaatctagctgttattggaaatcaacttttagtacattgtcttttcaataaagattactacaaaatttgaataacttgattttttgctgatttgaataaaaataatttgctgatttgaataaaaataattcacatctttgaatcttgcgattctaaatcttaagaactcaagaatac

SEQ ID NO: 4948 - DNA, 352 bp, Glycine max
  unsure at all n locations
nttcgttcactttgcatgagntttgccaccatatgttcccatttccatggatggtaccaccacctttaactgatagtttctcaacactgtcgaaagtaagccagtgagtgagatcttcgctgtaatctgataggttttctgatgcttcaatggttccagaaatctgaaaaacaaaacaatgaaaaatcatcccaaattcatatatacagatatcgaacaattgaagatctcttcaatgtttataattcaatttttaaaaatatttgaactagcaaatttaatttgttccaaactataacctgcacttcgatgttggatctgcaagggccagacaatctgaatggcttgagta

SEQ ID NO: 4949 - DNA, 444 bp, Glycine max
  unsure at all n locations
agctggtcacgaagntgctgcatttctccctataagaatgcaacnttttaataagcggaaagcgaagccaaatgtgggaaattaatataaaagaagaaatataagcaaaaagagtcatggaagtcaagaactcaaccactaaattcagatgaattggcagagtaaagcaaaaaaatattacctgcaagaatcgacgttcttcaagccactgtttgacaggcatcactttatcattagcatctttccattcatttgcaaccacaacagctactctggttgctgttaccttggcacgagccaactccctgtctagagtctntctttcctcctaaagaatgtcaaataaaccgcgcaaaaataaatatgatcttaactagaggcagtacaatcaagaataaagcaaatgtgagtttgaacatgctgaagacttttcacacaatacat

SEQ ID NO: 4950 - DNA, 452 bp, Glycine max
  unsure at all n locations
tgtgcctcctcacgtctggaatatgaatgtagcttatattattcaaagacccttaggtgctttgttgatggcttcttctcgttccaagcttcaattggagtcttgtcttttacagacttagttggacatctgttgagtatgtaaacaacattgtagactgcttcagcccaaaatgtgttaggtagtcccttctccttgagcattcatctagccatttccataactgtgcgattctttctctcggacacttcattttgttgaggagaatatgcgactgtaagttgtcgctcaatgccttcatcctcacaaaatctttcaaactcacgagagatgtactctttgtcgngatcacttcttagtacttttattcgttttccactttgatttcaacaagggccttgaactttttgaatactccagagacttctgattnttcttttaanaaatatacc

SEQ ID NO: 4951 - DNA, 417 bp, Glycine max
agctctcataaattcacgaaactattccaaatgctctgcttctccatggctaccgcaccaaaagaaacctcagctcctggatcaccctctgtaccatcatccaccatagcaccatcaaaccaggaacaacctgaattccatatccaacccatacaaatgattcctggtcaagctcctgtccttgagaaactggttcccaaacgacaacagggagtgaagacttctgaaaaccctagccttgcaacaagtcctatggaagtagacacggagatggacaagaaaatccgcagtattgtgagtaacattctgaaaaaagcttctgtccctgatgctgatgaagatgttccaacatctttcaccccgaatgtttctgtgcctgatgctgagaaagaatgttcaacatcttccactccaaat

SEQ ID NO: 4952 - DNA, 363 bp, Glycine max
agcttgtagggttaatgtctcacgattatcacatgcttatgcaacaattgttagtcgtggctatacgagacatcttgccatacaaagtcaggttaacgataactcgcctgtgatttttcttccatgctatatgtagcaaagtcattgatccagtcatgtttgatgagttggaaaataaggccacaattatactgtgccaattggagatgtattttccccctgctttctttgacatcatgattcacttgattgtgcatctggtcagagaaatcaaatgttgcggtcctgtttatctacggcgaatgtacccgattgagcgatacatgaagatcttaagagggtatacacagaatctatatcatc

SEQ ID NO: 4953 - DNA, 369 bp, Glycine max
agcttcttggggttgtttggctattatagatagttcattgaaggattttctaaattggcattgcccctaactaagttgactcgtaagaatgagaagttattctggaatgagaagagtgatcaaagtttccaagagttgaagaggcggttgacgacagctccagtgttaattttgcccgaccctaagagaacatatgaagtgtattgcgatgcaagcgggcaaggcttggggtgtgtgttgatgcatgagggaagagtactggcttatgcttcgcgtcaattacgtgctcatgaatttaactatccgactcatgactaggaactagcggcggtggtcttagccttaaagatttggaggcattatttgtac

SEQ ID NO: 4954 - DNA, 440 bp, Glycine max
  unsure at all n locations
agcttgttaatccatggaagctcctaatatctcccacactttntggggtgggtcattcttggatggccttgattttctcaggttccacttggaacccatttctaccaactacaaaacctaagaaaactatattatctacacaaaaggtacacttctctatatttgcatagagggtgtttttcctaaggattgaaagaacttgcctgagatgtcctaagtgatcatctaggctcctactgtacactaaaatatcatcaaaataaacaactacaaatctacctatgaaatcccttaagacataatgcataagcctcataaaggtgcttggtgcattagtgagcccaaaaggcatcactagccattcatacaaaccaaacttggtcttgaaagccgttttccactcatcaccctttttcatcctgaattggtgataaccactt

SEQ ID NO: 4955 - DNA, 431 bp, Glycine max
  unsure at all n locations
agcttgtanggttaaagtctcacgattatcttatgcttatgcaacaattgttagtcgtggctatacgagacatcttgccaaacaaagtcaggttaacgataactcgcctgtgatttttcttccatgctatatgtagcaaagtcattgatccagtcatgtttgatgagttggaaaataaggccacaattatactgtgccaattggagatgtattttccccctgctttctttgacatcatgattcacttgattgtgcatctggtcagagaaatcaaatgttgtggtcctgtttatctacggtgaatgtacccgattgagcgatacatgaagatcttaaaagggtatacaaagaatctatatcattcagaagcatctattggtaagaggtacattgcaaaagaagccattgaattntgttcagaatacttagag

SEQ ID NO: 4956 - DNA, 365 bp, Glycine max
tagtaaatctccgtatggcctcaaacaatctcctttgtgttttgacaggctaacaaaagttgtcaagcaagatgattttgcttaatgccaaacaagccatactatgtttgttaagcatttcttggatggaaagatagcttttttattgtctatgtagatgatattgtaattacaagagacgattatgatcaaataaatcatctgaagaatcttctagccaaggaatttgaagtcaaggatctaggccaacacaagtattttctaaggatggaaattgctcggacaaagaatggtatttttgttcattaaaggaagtacactttggatttacttcaagaaatatggatgcttggatgaaaagcagc

SEQ ID NO: 4957 - DNA, 449 bp, Glycine max
gcttaggtctgcttaatataacactttttagtttattattttcttagttgcttcctgctattagtgcaaaccattttgctatgtttcatgtttttctgtttgtgttgtggttttgagtttgaaagttgaacgattgtgcctagctttttgaactttaggggacattgttgttgttgaatggcactatatcacatgaatgcattttggtttgcaacctgctgagtttgcaaggggttgtgaagcaaatttaataataaataaaaataaatgttttctctctggctctctttgtatatttattgaaaaagtatacaatatttatagagtatcaatacttaaaaaaattaagtattataataaaaaaaatatttacattaagtgacttaaatatattttttaatccaaagttttacgatacttaggtagacgtaggcacttacctttgatat

SEQ ID NO: 4958 - DNA, 443 bp, Glycine max
  unsure at all n locations
agctttcatnntttaattatttttattatatttgatattgatacaaaatatttgtctaaatagttatttttgtctttgattgtgtaattcgttgacaaatgtgggatgaaaatacaaaatttaggattcaagagtgtaaaaagtgcgataaaaatatatctggccgttaaaaaaatagtctacttaacttttgtttgtcatagttaataaaataatctacgtggtatagagagatgaatttctcaatgaaatgattaccaacgtggttatatttatatttaattgtcagtataggagcatatttgtcatataatattttttttattttttgtcttctaccttattggtaaattgtgattaattatcataatttgaaaaaaaattataatgattgtggcaaaattttttagcanactctaaaataaattaagtttaaaagaaaa

SEQ ID NO: 4959 - DNA, 443 bp, Glycine max
tccattgttcaatttcgagcgtctcgatataatatgcgccttaatcttacctccgagtgaaaagttatgaccattagaattgctcaagagcttccattgttcaatttcgagcgtctcgatatatatatacgcctgaatcggatctctgagtgaaaagttatgaccttttgaattgctcaagagcttccattgttcattttcaggcgtctcgatatattatgcgccagaatcggacatccgatttaaaagttatgaccatttgaatttcttgagagcttccgttgttcaattttgagcgtctcgatatattatgcgcctgaatcggacctccgagtgaaaaggtatgaccatttgaattactaaggagctttcattgttcactttcgagcgtctcgatatattatgcgcctgaatcggacgtccgagtgaaaagttatgaccct

SEQ ID NO: 4960 - DNA, 398 bp, Glycine max
  unsure at all n locations
agcttgctgccacggagttntccgactatgctcttgtgtggtggatcaagctacaaaaggagagagcaagatatgaagagccaatggttgatacatggacggagatgaaaaagatcatgaggaagcggtatgtgccggctagttactcaagggacttgaaattcaagctccaaaaactaacccaaggcaacaagggggttgaggagtatttcaaggaaatggatgtgctcatgattcaagcaaatattgaagaagatgaggaggtaactatggctcgatttcttaatggtttgactaatgatatccgtgatattgttgagctgcaggagtttgttgaaatggatgatttgcttcacaaagcaatccaagtgtgagcaacaataaaaaggaagggagtg

SEQ ID NO: 4961 - DNA, 435 bp, Glycine max
  unsure at all n locations
agcttagtaaagctaagcactatcaatctcctcttcttgtgcaaatttgtctaaaacatacttagacacttcctgagcaggtacgagcagttatgcaagtgggatcagcaactttcattatcagagtaatcaagcacagcggaatctgtagtttagacaagttgcaagtcgtttccaggatgtcaagacatctcacatgacatctgctttctgcttctgctccccctgtttccatgcttactgcagcatcttctaacagctactagtcttctccaggatgtcaagacatctcctgtgacatcagctatctgctccccctgtctccatgctcttactgcagcatcttctagtagcttccatcagtcatcatcagcagcagcagtctccccctcagaatcgtatacatacaactccncctcaaaatcatgaatcatg

SEQ ID NO: 4962 - DNA, 417 bp, Glycine max
  unsure at all n locations
ntgaacatgagacatccaagccctctagctcataacatcttttcaaattcaaatcttcaagagccctacatccaacatgaaggtattttaaccccaaacacgaatcgaggtttagggtcttgagaagagggaaagatgattccgagaacaaatcaggaagagaaggttggttgttcaaaatgactagggaaagagatagggtttgtagggattgaaagccatgtctcataaccgatgaaggaggcaaacgaaaccctgattttagtttcaaaaccctaagagtttcacttccaataacacacctaggaaagttgaagtaatcatctgtacacactgtggaagctccaatatcaagctctctaacgttgtgcctaatggccctacggatcaaactattcagccgcgaaaaactcaaac

SEQ ID NO: 4963 - DNA, 436 bp, Glycine max
  unsure at all n locations
agctntataatatagtgcaaaagtttttttctgccatttgtaatttttatttacaataatttttttcatgcaggattatcaaactataacatcaccacccgtctatattagtccacttgacttaggtcccaagtatgctgacaaattgggagcaggatttcaggagtatcgaaagatatacggtgaaaattattgtttagggcaactgattttttggcataatcagagtaacgcggagccagattgcaccctggctagaataagcaggggttgcttgtcattaccagacatcagttccttttatgccaaagctcagaagccttcacgacatcgtgtttatggtccaaggactgtcagatctatgctggcaaggatggatagttattctgtatttatgaagctctcattcctaactttcttttttgtggtggggggg

SEQ ID NO: 4964 - DNA, 297 bp, Glycine max
atggacatgatggggcctgagctagatgaacgccttggaagaacagaagtgtgcactctgttgtatgagcatgatatcttcagaattacctgagtcgacttgtgtctagagatatcagacacctttgagagtttcaaggagttgagtctaagactatgtatatacctagagtggggaatgaagagaatcatgagtgaccatggcactgtatgctgcacatctgaaggcatcactcatgagttctgtgcagccattacaccacatcggaatggcatagatgagaggatagacaggact

SEQ ID NO: 4965 - DNA, 330 bp, Glycine max
agcttctcgatatattatgcactctgaatcttatttccatttgaaaagttatgaccaattgaatttctggagagcttccgttgtgcaatttcgagcgtctcgatatattatgcacctgaatcagacttccgtttgaaaagttatgaccatttgaatttatggagagctttcgttgtgcaattccgagcgtcttgatatattatgcgcctgaattggacttccgtgtgatatgttatgaccatttgaatttctcgacagcttccattgctaatttcgagcgtctcgatatattatgcgcctgaatcggactttcgtgtcataagttatgac

SEQ ID NO: 4966 - DNA, 446 bp, Glycine max
tcaagaaaaagatggcctcagcaaattccttatttttcagaaggaattctatcaatagacctccaatctttaatggagagggttaccactactggaaaacccgaatgcaaatttttatcgaggcaatagatctaaatatctgggaagccattgaaatagggccttatatacccaccacagtagaaagagtttcaatagatggtagttcatcaagtgaaagcataaccatagaaaaacctatagatagatggtctgaagaggatagaaaacgagtacaatacaacctaaaagccaaaaacataataacatctgccctaagaatggatgaatatttcagagtttcaaattgcaagagtgctaatgaaatgtgggacactcttcgattaacacatgaaggaactacagatgttaaaagatctatgataaatgcactaactcatgagtat

SEQ ID NO: 4967 - DNA, 418 bp, Glycine max
  unsure at all n locations
tatcattngactcaacttgcatacccacttctaaaacaatctagatacgggagcatagtattaaatccatccaatgcagctataaacggttttcccattttatctgcttattcagcctctaaaggtatgcatttctagctagtttttttttcatatcccagtatcccaacattgtaagtaaatataacctttgaatttgaatgacactactaaaaaaccctttttttacgtttctagggaactgtcttanaatgtgactcagtggcatttgtgtaattaatgcaaatataactacgatgatctctcacacccgtctttgtaggtaggacgcaatgaaactttttaaattgaagacttcattaaagatgggatatagaagcaaatcgtcattgtaattaagaaaataattaaaaataag

SEQ ID NO: 4968 - DNA, 404 bp, Glycine max
agcttccatcaagggagtgatgtctaagatgtgacctatgccttccttcgtaatagtcacgaagttcttcacttaggttcttgcaagagttatgactactattggaggcatgtttttctcttttcatttctttcattatttttcttctttcttcctctcttattttctttctttcatcttgacttatttcttctacttttgtttttcatttttcttttctctcttgtttttcttttcataacctgagggaactcaactcatctaagattctagataaagggtctttatgactagtaccctcgccattaacactagatgaatgatgactcatgttggctcctaagttgttgttctttcttgttggaggtttgaaaacataaggaaaaagaaactatggttgaaac

SEQ ID NO: 4969 - DNA, 343 bp, Glycine max
  unsure at all n locations
nttaactcggaggtccgattcaagcgcattatatatcgagacgctcgaaattaaccaacggaagctctcgagaaattcaaatggtcataacttttaactcggaggtccgattcaggcgcataatatatcgagacgctcgaaattgaacaacggaagctctcgagaaattcaaatggtcataacttttcacacggaggtctgattcaggcgcataatatatcgagaccctcaaaattgaacaacggaagctctcgagaaataccaatggtcataacttttcactgggatgtccgattcatgcgcataatacattgagacgctccanatgaacaacggaagctct

SEQ ID NO: 4970 - DNA, 448 bp, Glycine max
cttttattgtaatcttgaaattcaggacagcactctaatttctgaaatttttgggataaaaatggtcattgaccagtcccttttccatgacttaaccaaattacccagtgacggtgtaccatttgaaggttcactgaatgacgactggaaatttgatttctctgcccatgatgcccgccagttggtttgcaccaacaatgcggatatgaccggacgtcttcttgccgggtcattggcttttgaaagccgcatccttcactatttaattgtgcgtattttgcttccacggtcttccaaccttgccctggtttctgaggaagatctaattatcatgtgggcctttcatacagggcgtcaacttgactgggcacacttagtcaaatatcgcatgcataaggcattgcgattaaatgctccactaccatatccacagcttgtcactctcttt

SEQ ID NO: 4971 - DNA, 437 bp, Glycine max
  unsure at all n locations
agcttgttgtcaacaaacaaatcanaatcaattttctgatcatcaaaacctagctccaacttcctcttccccatatcaactatgcagcttgcagtcaacatgaatggccttcccaatattacagggatgtcagtatcttcagagatatccattaccacaaagtctgtcaggaagataaaatgtttttctctgaccaacacatcttcaattactccatatggcctggtaatggaacagtcagctaattgtaaagtcattcgagtgggcattatttccaactcccccaatcttctgcacatggagagtggcatcaaattgacactggctcccaggtcaataagagcttttcccacattgacttctccaattgaataaggaatagttacactcccaggatctttatgcttgggtggaaggatcttttggatcatagcact

SEQ ID NO: 4972 - DNA, 434 bp, Glycine max
  unsure at all n locations
gggatttcctttagtagggaatctatccttcctaagatggagccattcttaatcaccctcattaagaactagcttgtttcttcctctattgcttttagttgaatacacctttgtttggttctctatttggntcttaaccctctcatgcaacttctttacaaactctgacctagattccccttctttatgtataaaagaagtgtctagcgggaggggaataaggtctaacagtgttaggcgattgaacccatatacaacctcaaaaggggactgcttggtggttctatcaacccccctattgtatgaaaattctacatgaggaagatactcatcccatgacttatggttgcctttcagaagagcccttagaagggtggataaagacctattcactacctatgtttgcccatcagtttgtggatgacaagtggtag

SEQ ID NO: 4973 - DNA, 299 bp, Glycine max
tatctcagatggagtgatctgattcgtcctgagcagaacatccaagatgggaaaggtcaagagactgaagcttctgctttcagaaatgcagatatttgtgacaataaacttgtcgaggggaaaagttgttatggaataacttttgggagccaaaaacatcttccttctcgggtgatgaaaaatgttgttcaagtggagcacgatccacacggaaaggaaaagtattgaggttttgaaacacgcattccattatattagataaaagagtatgaagaacgtcatggaaatatgccatgtaa

SEQ ID NO: 4974 - DNA, 409 bp, Glycine max
  unsure at all n locations
tcattggagcttgtaggcctaagatcttcttcatcaatggattccttcntttcttggaagataaatggcagcggaatggagaatgaagagagagaggagacgccacttcaaggagaagatgagtctagaagaagctcaccaccatacgaggccatggataagagcttggaggaagaaggagatgaatgaagggagagggagagaagagcacgaaattttgtgctcaaaaggagctctgaaatctgaagttaatattcaaatgatcaaagttgaaaaaaatgcacacacatgacctctatttatagcctaactgtcacacaaaattggagggaaattcacatttcacttgaatttgatattgaatttgtggagccagactttggagccaaaatttcacgtaatatgacta

SEQ ID NO: 4975 - DNA, 450 bp, Glycine max
  unsure at all n locations
gacactatgatactcagcttaancattcaatttgagcgtctcgtaatattacgggactctttcatacatccgagtaaaaatttattgtcgtttggattggctcagagattcaacattcaatttcgagcgtctccatatattacgggactcattcagacatccgagtaaaaagttattgtagtttgaattagcttagagcttcaacaatcaatttcgagcgtctcgttatatcacgagactcaatcagacatccgagtaaaaagttattgttgtttgaattagctcagagcttcaacattcaattttgagcgtctcgatgtatgacgagactcaatcagacatccgagtaaaaagttattgtcctttgaattggctcacagcttcaacattcaattttgagcgtctcgatatatgacgggactcaatcagacatccgagtataaagttatt

SEQ ID NO: 4976 - DNA, 428 bp, Glycine max
  unsure at all n locations
agctntgagccaattcaaacgacaataactttttcatggatgtctgattgagtcctgtcatatatcgagacgctcgaaattgaatgttgaatctctgagccaatccaaacgacaataactttttactcggatgtctgattgtgtctcgtaatataacgagactctcaaaattgaatgttgaagctctgagctaattcaaacgacaataacttttaactcggatgtctgattgagtcctgtcatacatcgagacgctcgaaattgaatgttgaagctctgagccaattcaaacgacaataactttntacttggatgtctgattgactctcgtcacatatcgagacgctcgaaattgaatgttgaagctctgagccaattcaaacgacaataactttttactcggatgtctgattgagtcctgtcatata

SEQ ID NO: 4977 - DNA, 447 bp, Glycine max
tatcaattctcaagaagcataagaaggctataggctggactctggcggacattcctggtattagcccatccacatgtatgcatcggataaatttagaggatggggctaaaccagtaagacagccatagagaagactcaacccggtgattcttgatgttgtgaagaaggaggtaaccaaacttttgcaagctggaatcatctatcctatctccgacaaccaatgggtgagtcccgtccaggtagtcccgaagaaaaccggcctcaccgtgataaaaaaatgagaaggaggagttgattcctactcgggtgcagaacagttggagagtctgcatcgactataggaggctgaaccaggttaccaaaaaggaccattttcccctgccattcattgaccagatgcttgaacgcctggcaggtaaatctcactactgttaccttgatggtttt

SEQ ID NO: 4978 - DNA, 440 bp, Glycine max
  unsure at all n locations
tgaaggtgtgtagcccaccatctggtaatgtgtctactattattgtcatcatttttttttcgtcattgaggtgccacttgagctgccaggtctctccacctttgggcgtattctttgaaagatctgtgcccctttttgcacatgttctgttgttgcatcctatccggaaccatatcaaaattgtactgatactgcctaatgaaggcaaacattaggtccttccaagagtggactcgagaaggttccaggttggtgtaccaggtaacagctaccccagtaagattttcttggaaggaatgtatcagcaattcctcattttttgcgtatgcccccatcttccgataatacatctttagatggttcttggngcaagtagtccccttgtacttgtcaaagtcagctccttgacttgggaggggatgatattgggtctaggacaa

SEQ ID NO: 4979 - DNA, 449 bp, Glycine max
  unsure at all n locations
ngaaatngaacaacggaagctctcgagatattcaaatggttataacttgtgacactttagtcctattcaggcgcataatataccgagacgctcaaaattgaaaacggaagctctcgagaaattcaaatggtcataacttatcacacggaaggccgactccggcggatagtatatcgagaaggtcggaattgaaaaccgaaagctctcgagaaattcaaatggtcataacttaccaaacgaaagtccgattcaggcgcataatatatcgagaagcttgaaattgatcaacggaagcactcgagaaattcaaatggtcataacttatcacacggaagtccgattcaggcgcataatatatcgagacgctcgaaattgaacaacgaatgctctcgagaaaataaagtggtcataatttgtcacacggaaagtcgattcatgcgcatactata

SEQ ID NO: 4980 - DNA, 404 bp, Glycine max
tcacagtctgagtcatgaataaggggtcatttaatttttttattggataagttattaaggttttttttttactcaaatgcataggagtagtaagttaattaagttgataatcacgaaaagagacataccgacagtggcagctctataagtgttcgttccatctatgaagtttttgttaccagatattcgtgtctttttccccccttcaccaataaacaccacatgggtcatttattttgtaacttcaacatactcttggaaaacgccttccttgatgtagatcacaaatggctttctgtgtttctacggcacttgcttcaatgcctcattgatgcttttgaaatctccactaccatctatggctcagtaacattacgcttgcggtttaatggacttgcattttc

SEQ ID NO: 4981 - DNA, 360 bp, Glycine max
agcttttaatggaagtcaggagaatgaaagtgcgctgcaaccattagctggaaacgaagttcatgattgggtgatgacctaaaagaagacaccatctgacacaaacatatggaagaaaagctcaatattctttgatcttccatactggtctgatctacatgtgcatctagatgttatgcatatcgagaaaaatgtgtgtgatagtttaattggtacccttcttaacattaaaggcaagacaaatgatggtttgaaatgtcatcaagacctggttgacatgagaatacaagagcagttgcatccgatatcacatgatcgttaaacgtatcttcccccagcatgccacacaatgtcagcaac

SEQ ID NO: 4982 - DNA, 413 bp, Glycine max
tccgttgttcaatttctagcctctcgacatcttatgcgctcgaatcggacatccctgtgaaaagatatgaccatttgaatttctcgagactttccgatgtttaatttcgagcgtatcgatatattataagccagaatcggacattcgtgtgaaaaggtacgaccatttgaatttctcaaaagcttctattggtgaatttccagcctctcaacatcttatgcgcacgaatcagacatccgtgtgaaaaggtatgaccatttgtatttctcgagagtctccgatgtttaatttccagcgtatcgaaatcttatgagcctgaatcggacctccgagtgaaaaggaatgaccattcgaatttctcaagagcttccgttgttcaattgcaagcctctcacatactatgcgcccgaatc

SEQ ID NO: 4983 - DNA, 412 bp, Glycine max
  unsure at all n locations
agcttataatatatcgataggctcgaaattttacatttaaactctcgcgaaattcaaatgggcataaattttcacacggatgtccgattcgggcgcataatatgtcaagagtctcgaaattgaacaacggaagctcttgagaaattcaaatggttataaaatttcacacggatgaccgattcaggcaaatcacatatcgagacgatcagaattgaacaacggaagctcttgagaaattcaaatggtcataacatttatctcgaatgtccaatttaggcgcatcacatatagtgatattcgaaattgaacaacagaagctctcgngaaattcaaatggtcataacttttcacactgaggtccgattcacggttataatatatcgatacgctcgaaattaaacatcggaaactc

SEQ ID NO: 4984 - DNA, 402 bp, Glycine max
  unsure at all n locations
tccatcaagagccatcaacaacatcacggtaaatatatacatcccattcctaggctagacgatatgttggatgaattgcatggagcctgtgttttctctaaaattgatttgaaaggtgggtaccatcaaattaggattagagagggggatgaatgaaaaacaactttcaaaactaagtatgggctgtatgaatcgcttgttatgccctttgtgctaaccaatgctcctaacactttcataagattaatgaaccatgtgttaagggaatttctaggaaaatttgttgtggttattttgatgatatcttgatttacagcaaattccatgatgaacatcttgtgcatctgagaagagttttagaggcctttangcgtgagagcttgtatgctaacatggataaat

SEQ ID NO: 4985 - DNA, 402 bp, Glycine max
  unsure at all n locations
tggatttcctcttagtagggaatctatccttcctaagatggagccaaacccagncccccctattaagaactagctcctttcttcctctattgcctttagttgcatacacctttgtttggttctttatttggttcccaaccctctcatgaaacttctttacaaactctgacctagattctccttctttatgtataaaagaagtgtcaagtaggagggtaattaggtctaatggtgttagaggattgaacccataaacaacctcaaaaggggattgcttggtggttctatggacccccctattgtaggcaaattctacatgaggaagatactcattccatgacttatnggtgcttttcagaagagcccttataagggtgtatagagactattcactacctttat

SEQ ID NO: 4986 - DNA, 349 bp, Glycine max
gtgcctgtatattgatgcacgctgaatcagagatccgagtgacgagtgatgaccattcgaatttgtcgagagctgtctatgtttaatgatcagcgtctcgatatattattcgcctgaatcgaagctaagggtgaaaagctatgaccattcgaatttctctagagcatccggtgttcattttctagcgactatatatgtgaggcacctgaatcagacctgcgtgtgaaaaggtatgaccattagaattactcgagagctgacgttgatgaatttgcagcgtctacacatgttatgctccgtaatctgacatccttgggaaaaggtatgagtattcgaatttatgcgagag

SEQ ID NO: 4987 - DNA, 423 bp, Glycine max
  unsure at all n locations
agcttgaaatgttatgaccatttgtttntctttagggctttcgatgtttaatttcgagcgtatgaatatattataagcctgaatcggacctcagtgtgaaaagttatgaccatttgaatttctcgagagcttccgttgttcaatttcgagcgtctctgtatgggatgctcccgaatcggacatccgagtgaaaagatttgaccatttgaatttctcgagagctttcgttgttcattttcgagcgcctctatatgtgatgcgcctgaatcggacctcagtgtgaaaagctattactgtttgaatttctcgagggctctcgatgtttaatttcgagcgtatcaatatattataagcctgaatcggacctcaacgtgaaaggttatgaccatttgaatttctcaagaacttccggtgttcaatttc

SEQ ID NO: 4988 - DNA, 354 bp, Glycine max
  unsure at all n locations
agcttcctcccttcatcaaaccatttatatatcaaaggaccacaaattctataaaaaaaaaatggagatttatacaccggactcatgctactaataacatcaatcataggttgataatatgtcgagttaattgcattaaatggcactatagcatctatcatccattttgcaatggctttgtcacacttttctacaattttcttattttgcaagacactcttcaagctaggttgagctttaggagttgttctaggcatgaaatagtcatctacatgaatagtgttctttcctttntgagacttggaagaaacaggtgaatttggagttcttcttaattcctcaactattctcaca

SEQ ID NO: 4989 - DNA, 323 bp, Glycine max
ctggatgcgatgggcaacttggaaacccagttggccttgtatcatacatctgaacctgtcgcaagggtttgtggattgtgctcctctgctgaccaccatacaaacctttgccctgccatgcgagaatctataacaattcgaccatccctgtagctgatgcaccaaatatatacaatatacctcctcaacctaagcagcaaaatcaaccacagcagagcaattatgaccttttcagcaacagatacaaccctgcatggaggaatcaccctaaccttaaatggtccaggcctcagcaacaacaacaacagcctgctccttccttc

SEQ ID NO: 4990 - DNA, 452 bp, Glycine max
gtataaataacaaataactcgtgattattcattattcctttggagatacaaatatgaccaagtttcagaggatagaatgacactggccgtttacctaaagttcaatatgtaacacactaaacgactcagttcaccagatatatacaagtttatagctttaggaactcaaacctacacaacactaaacacgatagctcattcaacttccaacatgctgtatatgattcacaagatggattccttatctcactgataaacatcttacggtcttcttccagagacattcctttcattgttatttataagattcaaatttaaaatgatatgttttaataacactcaatctataatgttccttatataaattatgtttacaccagagatatttctctctaaaaaaataaatataatgtattaataaactattagaagagtagaaagaagcactaatg

SEQ ID NO: 4991 - DNA, 386 bp, Glycine max
gtgcctgtatattgatgcgcctgaatcggacatccgagtgaaaagttatgaccatttgaatttctcgagagctctctatgtttaattttgagcgtctcgatatattatacgcctgaatcgaacctcagtgtgaaaagttatgaccatttgaatttctttagagcatccggtgttcattttcgagcgtctctatatgtgatgcaccttaatcggacctccgtgtgaaaagttatgaccatttgaatttctcgagagcttccgttgttcaatttggagcgtctcgacatattatgcgcccgaatcggacatccatgggaaaagctatgactatttgaatttctggagagcttccggtgttcaatttcgagcgtctgtacatgttatgc

SEQ ID NO: 4992 - DNA, 432 bp, Glycine max
  unsure at all n locations
agcttcttagttncagatgatgcatatgggtttgtagctacctcatgcacttctctaatgactatggcatcatttctggcgctaaactgctgggagttggaggccatcttctcaattaaatttctggctttagcaggagtcatgtctccaagggctccaccactggcagcatctatcatacttctctccatattactgagtccttcataaaaatattggagaagaagctgttctgaaatctgatggtgggggcaactggcacatagtttcttaaatctctcccagtactcatacaggctctctccactgaattgtctaatacctgagatatccttcctgatggatgtggtcctggaagcagggaaaaaatnttctaagaatactctcttaaggtcatcccagctcgtgatggaccttggagcaaggtaatac

SEQ ID NO: 4993 - DNA, 302 bp, Glycine max
  unsure at all n locations
agcttagagaaatcgattatgtcgaccctgatatagttttgttcctctacattcaatcctacaagagtttcctcctacgcacgcacaagaactctgtcgttgtcgctgatgtatggccttccatcttcaccttcgacgactacttgctgctctctcgttgcttcaggtgaattcttttttcgagctggtgttcattgctattttttttgttcgttatgattcttttttgatttctatattaaattgttggcgagttcattttgagtgattttgntgacttgatacaaaagatattagttcta

SEQ ID NO: 4994 - DNA, 369 bp, Glycine max
  unsure at all n locations
tccttaagaagattccttaagaagctagaagctanctacatatactcttttaatagctaagctcacctccttgagatgagaagctagagcttagctacacaccccctataatagctaagctcacacccatgacaaatacatggaaataactaataaaaggccttattacaaagacaactcaaaatgccccgaaatacaaggctaaaaccctatactacttgaatggccaaaatacaaggcctggacgaaggaataacctattctaatatttacagagattagcgggctcatacttagcccatgggctcaaaatctaccctaaggctcatgagaaccctagggcgctttgttggatctctagcccaatct

SEQ ID NO: 4995 - DNA, 288 bp, Glycine max
gcattggatcaaagacctcaacaagattatgctagagatgcaggacaaggccctaaggctctcatgatccgtagggtacattatgagtccatggactaagtacgagtccacttatccttggacaactgagaataagatttcataactgttggacctcgcatttacggctccatagtataaagagggcaccctagtaatgcaggtattttagcccttatatttgagaacacagagactaatttttgtattacgggtagctttgtaatttcacatacattaagtgcacta

SEQ ID NO: 4996 - DNA, 361 bp, Glycine max
  unsure at all n locations
agcttaattaacttgtgttctgaacatntgttatcatttaattttaaatacaataccatgtaaaatattcctaattgtgccattggggctcctccacatagacttcagtccaaattctctcactcgggtctcatctgaaaatttggaagggttaagataatatcagttctgcacaaaaatgataaatcatgattatgcactagttgccacttgcagtgcactatgtaatatgaacaaaccagtacactaaatctagcataacttctgactatggaacaaagtagtctattaattcatgagtcatgatacagaattaacacatttatagagaagaaagattgagtgagaagatattcgtatt

SEQ ID NO: 4997 - DNA, 420 bp, Glycine max
  unsure at all n locations
ctaagcttgccatttggctccacagatggactgtgtaagactcttcttgtctctcattatagctgatcaagttgcccacgtgtatgttaagttctttggatggtggactaagatcattntgcattttgttctttctactgctttgaagactccagttttgttccaccactgatttatgctgacatgggtagctctcgtgatattgctataggaccagaggcagtggtttctctcttgttggggacgttacttattaatgagatcgatgcctatacacatccagcaaaatatcagcgacttgctttttcagccacttttattgttgggattacttaaacaacgcttggtgttcttaggtatgatactactactactatatctatatgtatatatatctttatatatgatatagatatttat

SEQ ID NO: 4998 - DNA, 420 bp, Glycine max
ctgcagctaggaagcatctggagaggcttattttattttgagatccaccctggagcgactaatatgtactaagaccttaggttgatgttttggtggccgggtgtgaacaaagaagttattgagcttgtccttgcatgcctagtgtgtcagatagctatgatagatcaccagatgccttcagggaagttgcaacctttatagatacccgagtggaagtgggatagtatctacttggatttcgtggtggggttacctaggaccctcaaaggtttagattccatttgggttattgtatacatgtcgaccaaatctgcttcctttatccctatttacatcagatattctttatagaggttgatgatcttgttcgtctgtgagattgttagaccactcagcgttccttctaccataatctttgat

SEQ ID NO: 4999 - DNA, 364 bp, Glycine max
ttaagcacgcgctgcacttctttgtactgcttggattttttatctggcactctacactttgtcatataaatagtcgatgcatatctaacatgagtaacttatgttttattccaaagctatcttcaaatcactttgaaaaatgtgtgtcttgcagtcaatctacaaaaactaagaaatcacatcaatcagtagctaaagaacttgagccattggatttaatacattctaatatatgagaatttgatggaatgttgaccaaaaatggaaaacgatattttatcactattattgatgactgctctgattatacatatgtatatcttatgaaatataaaagtgaagcgcttgacatgtttaagttatt

SEQ ID NO: 5000 - DNA, 371 bp, Glycine max
agcttctcattctctctcataaggtatttattgttttttctttatataatacattaacattaaaattatcaattaaaaacaacattatataatctgttttagtagttgatggattactctatggcttaatataattctttaacattgcttttttttttttttgtggtgtgtctgcacactatgcttgggttgtctttgtactcaagtggtctgcaatagccacactcttgcccaagagaacggacaatgatatcaagaactaccggaacacgcatattaagaaaaggctaactaaaatgggaatcgaccctgtgacacacatgcctaaaaacgatgcacttttctctagtgacggtcattcctaaaccgct

SEQ ID NO: 5001 - DNA, 310 bp, Glycine max
  unsure at all n locations
aaccccatggatcaatgcatataccacaaggtcagtgggagtaaaaaaagttttccttgtttatatgtagatgatantttacttgcagccaatgatccgggttcgctacatgaggtgaaacaatttctctcttagaattttgacatgaaggatatgggtgatgcatcttatgtcatcagcattaagattcatagaatagatctcgaggtatttgggtctatcacaagacactatattatccaaattttagagagaattcggatgaaagattgttcaccaagngttnctcccattgtgaagggtgataggt

SEQ ID NO: 5002 - DNA, 407 bp, Glycine max
  unsure at all n locations
ancttaagcagtgatcaaactcgctctttgtttctggttttgcgaacatatcagtaggattatgcagagtgctaatcttatgaactttggttcttctttctgaccgaatgaagtgatatctaacatctatatgcttggctctatcatgatgaacctgatccttggccaagcatatagcactaaggctatcacaatagatgtcagcatattcttgattaattccgagatcatatatcaaacctcttagccaaattcctttctttgcagcttcagaaagagccatatattcagcctcagtatttaagagggcaacagaacgttgaagtgttgccttccaactcaccaagcagccaccaagggtgtaagcatatcctgtnatggaccttctcttgacaagataagctgca

SEQ ID NO: 5003 - DNA, 414 bp, Glycine max
  unsure at all n locations
agcttagcaaatggacctgngaggngttcattttcatcatatcttccgtaatactcatcacctctatcatatctaataattatcacatttatgtctaattgcccatttatttcattgtagtaaatttctaaggcatccattgcctaagaaatcttgggcagtaagtagacataacccgaacatgaataatcatcaataatggtgataaagtatctttcctttctgaaagaactaacatctaatggtccacaaatatcagtatgcacaacttcaagaagctgagtgcttcttgtagcttctttctttgaatgtttagcttggtttcccttaatacatcccacacaaatatttagattcatataatctagataacgaagagattcattctttattaatctttccatcctttctcta

SEQ ID NO: 5004 - DNA, 385 bp, Glycine max
atatattagagggactcatggtcactatgaatgacaaattccttaagataaaggtagagttgccatgttttcaaagcgcgtactaaggcatacaactccttatcatacgttgaatagttatgggtaagaccacttaacttttcactacaataggcaattggatggccttattgcatcaacacagccccaatcccaacatttgaagcatgacactcaatttcaaaagattttttacagtttggcaacgcatacatggggcattagttagctattgctgaagaacattgaaagcttcttcttgtttctctccccatttgaaaccaacatttttcttgagcacttcattgagaggcgctgccaatgtgctaaaatccttcacaaatcg

SEQ ID NO: 5005 - DNA, 419 bp, Glycine max
  unsure at all n locations
actaagcttacatattatatatataatgatatgatggaaaaattatttataatgaatacttagtacacaatattttntttcttaaaaaaacataattacaatattatatgttcaaatattctatatttgtctcttataattatcccatactccaatataataatatttaacaagcttacatgttaaaattaactcatttaaataagtgaatcaaacttcagatacaatatatttttntaatccatgcttgagacttaagtgctcgaatcaactcaaatcgtttacacaagggttctctaatacacacacaaatgcatataacttctaattataagaaaatttcaagtacagtataaaatatttatgaattagtatattaantacttaataattcaaagattggattgctaaatatcatg

SEQ ID NO: 5006 - DNA, 430 bp, Glycine max
  unsure at all n locations
agcaattcaacgacnaagcttttacttgatgtttatgaggcccgcaaatatggagacgctcgaaattgaatggtgaagctttgagcaaaatcaaacgacaacaactttttactcggatgtctgattgagtcccgtaatatatcgagacgctcgaaattgaatgctgaacctctgagccaattcaaacgacaatcactttttactcggatgtctgattgagtcccgcaatatattgagacgctataaattgaatgttgaagctttgagcaaattcaaacaacaatcactttttactcagatgtctgattgtcgcccgtaatatatcgagacgctcgaaattgaatgttgaagctctgagccaattcacacgacaataacgtattactcggatgattgactgagtgccgtatataacaagacgctaaaattg

SEQ ID NO: 5007 - DNA, 660 bp, Glycine max
  unsure at all n locations
cttatagaggccttttggatctcatgcctcacacaattttaaaagcatgttcatgaaaacctgtaaatacagttccactatcaaatatcatataaactaactaatacaaatgataagaaatgcctaatggtgccttgcctcaataaaatttgcatcaggtaacatggcacggcaagtgtctcggtctcttctgtaaggagatatcagactagcaacacatattaagccagcatcagcaaacagttttgccacttctcctagattaaataatttttttatcagtaaaaccaagttgatatgcatcagattttttaatacactacagctatatacaataactttgaaggattaatagattatttttcatcatggaactaatccaaatacactaatattgattagaagtttttttcatgtaataagttggccaagagtagattgcaatattgtgtagactgcaaaccaaccattttgagaaaggtgaagtgtgtcccacaagaaagaaagattcgggttctcacataaactgtatttctttgatccttcgtcatccacacttncacatgaatcttccacttgtttccctcacagcatggttgcaacggattcatcagtgtagacttttctgcataatgtagaaagaaaaaaaactgtcatcat

SEQ ID NO: 5008 - DNA, 500 bp, Glycine max
  unsure at all n locations
agcttttaaaattaaggatcttggtgatttgaaaattttccttggtttctaagttgcaagaagtaaagttggtattaacatttctcaatgcaaatatgcacgtaagctattatataatgctggtttattgggttcttgccctgttagtactccaatagattacaacactagaattcatcacaattcaagattacatttgcctgatccttcatcatatagatgcctaattggtagattgatctatttgaccaatactcagtctgatattacatatgttgtacaacatgttagtcaatttatttatactcccactactgcacatcagcaggtagtagcttgtatccttcgttacattaagggtgctcctagtttcgatctcttctaaccagcaaataatactgctaaactcaaagcctttagcgactttgattgggctagctacataaagactagacattccatcattggattntctatttatcttgggtcttgtcttattt

SEQ ID NO: 5009 - DNA, 456 bp, Glycine max
agcttcatggggcaacattgaattattccccgtatgacaaagttgtgtatgctttggtaagagctttatagacatggcaacactatttatggccaagggaattcataattcattttgaccatcaaagtttgaagtttctaaaatctcaaggtaagcttcaaaagagacatgccaagtggttggaattaattaagatgtttccttgtgtgatcaagtacaagaatggtaaggaaaacatagtggttgatgctttgtccagaaggtatgttttgcttacttctttgcaaactaaattgcttggttttgagtttgtgaaggacttgtatgctactgattctaactttggcaaagtatgagattcttgttctaaacatgcttttggaaattatatagacatgatggtttattgtttaaaaaaataaattgtgtgtgcctatgtggtccttgtgtgaaatg

SEQ ID NO: 5010 - DNA, 640 bp, Glycine max
  unsure at all n locations
tccttcaattggacaacagtggtgtgcctcttaatatcaccacctaagtagtgtttggttctactgccacgctgtccatgtccttttggtggttgggtcctccaatatcaccactccaagtggcataacttcattgatgaagaatggtctagaccacttggatttcagcttacctagaaacaatctcaatctagaattaaataacaaaacctgttgaccaggctgaaaattcctttctgaaagctttttatcatggtaaattttaactctttgcttataaatcttggaattctcataagcttgaaacctcagttcctcccattcatgaagttggagcttcttattttcactagttgcatttgagtcaaaattcagaaacttcaatgcccaataagttttgtgctccaactcaacaagtaggtgacaagatttgccatagaccaattggaagggagtgcatcctgcatgagccttgtatgttgttctgtatcccccacanagcttcttctagtacttgngaccaatctttccttgattgagcaattgttttctctaagatcttcttggcttccctgttagaactntagctngtccattggtctgggggtggtaaggagaagctaccttgtgtctaacacta

SEQ ID NO: 5011 - DNA, 295 bp, Glycine max
cttctagctcactccaaatagcacctccaaggtgctgttgctacaacacatggacttggtcgggcctatgcacgtaccaaaccttgaaagaaacaagcaggccacaaatgctggggcagatttttaccgatgcaccttgatgtatttttctctagaaacttcattacgatgcttgcttctcaagctttatttctaagactttaacacactacagacattgtcttaaagataacaacggacagatcatggagaggagtttggagcagcaggatacctgaattcgagacaattgaac

SEQ ID NO: 5012 - DNA, 608 bp, Glycine max
  unsure at all n locations
tctcgatatattgagcacctgaatcggacttccgtttgaatagttatgaccttttgaatttctcgagagcttccgttgtttaatttcaagcttcttaatatattatgtgcctgaatcggacttctgtgtgataagttatgaccatttgaatttctcgagagcattcggtgttcattttcaagcttctcgatatattgtgcacctgaatcggacttccgtttgaagagttatgaccttttgaatttctcgagagcttccgttgtttaatttcaagcttctcgatatattttgcaccttaatcggacttccgtgtgacaagttatgaccattttaatttctcgagagctttcgttgttcaatttcgagcttctcgatatattatgcacctgaatcggacttccgtgtgaaaaggtctgaccatttgaatttctcgagagctttcgctggtcaatttcgagggtctcgatatattatgcgcttgaatcggacttccgtttgaaaagttatgaccatttgaatntctcgagagctttcgttggtcaatttcgagggtctcgatatattatgcgcctgaatcggacttccgtgtgataagttatgacccattg

SEQ ID NO: 5013 - DNA, 335 bp, Glycine max
agcttgaaattgaaaaacggaagctctcggaaaattcaaatggtcataacttatcacacggaagtccaattcaggcgcataatatatcgagacgctcgaattgaacaccgaatgctctcgagaaattcagattgtcataacatgtcacagggaagtccaattcacgaacctaatatatctagactcttgaaattggacaacggaagctgttgagaaattcaaattgtcataacatgtcacacggttatccaattcaggcgcgtaatatatcgagactctcgaaattgcacaacggaagctctctagaaatttaaatgagcattacatttcacacg

SEQ ID NO: 5014 - DNA, 501 bp, Glycine max
tgaaattgaacaacggaagctcttgagaaactcaaatggtcataacttgtcacacggaagtccgattcaggcgcataatatattgagatgctcgaaattgaacaacaaatgctctcgagaaattcaaatggtcataacttgtcacacggaagtccgattcaggtgcataacatatcgagacgctcgaaattgaacaaccaaagctctcgagaaattcaaatggtcataacttatcacacggacgtccgattcaggcgcataatatatcgagacgctcgaaattgaacagcgtatggtgtcgagaaattcaaatggtcataacttgtcacacggaagtccgattcaggcgcataatatatcgagaagctcgaaattgaacaacagaagctcttgagaaactcaaatggtcataacttgtcacacggaagtccgattcaggcgcataatatatcgagacgctcgaaattgaacaacgaaagctctcgagaaatcaaatggtca

SEQ ID NO: 5015 - DNA, 327 bp, Glycine max
agcttgaaattgaacaacggaagctctctatatattcaaatggtcataacttatcacatggaagtccgattaaggcgcataatataccgagacgctcgaaattgcacaacggaagccctcaagaaattccaatggtcataactatcacacggaagtcccaataaggcgcataatatatcgagaatctcgaaattgaacaactgaagctcttgagaaatttaaatggtcataacttatcacacaaaagtccgattctggcgcataatataactagacactctaaattgaacaacggaggctctctagaaatataaatggttattattt

SEQ ID NO: 5016 - DNA, 500 bp, Glycine max
agcttgttcaagatatgctccgcaacttttgtctagccacggggctagaggtcaatgtttagaaatctaaattctctgtctctaaaaatttgaggaggtagaaagttgataaattcaccaccattctagatttcctacacactcaacatctggggaaatatttgggattccctttattagttgggcagaacaaagaatacttaattttctttcattttggacaaaattgataaaagaattgttgggtgaaagagcaaagttcttaacagagctgggaggatcactcttgcaaactcagtcatgtttgcaatccctacctatcctatgcaaaatttgtagattccttaaggtatttgtaatacaatcgatgctataagaagctttatatggtggactggtcgactattacaaaaccgcgccacatagggggttttgacataagcgagagtacgccattccacattgtcttactatgaaaacatgtttgggctctcatgaac

SEQ ID NO: 5017 - DNA, 522 bp, Glycine max
  unsure at all n locations
agcttcaagaaaaaagatggcctcagcaaatttcttatttccagaagggaattctataaatagacctccaatcttcaatggagagggttaccactactggaaaacccgaatgcaaatttttattgaggcaatagatctaaatatctgggaagccatagaaatagggccttatatacccaccacagtagaaagagtttcaatagatggtagttcatcaagtgaaagcatagccatagaaaaacctatagatatatggtctgaagaagatagaaaacgagtacaatacaacttaaaagccaaaaacataataacatctgccctgagaatggatgaatatttcagggtatcaaattgtaagagtgctaaggaaatgtgggacactcttcgattaacacatgaaggaactacagatgttaaaagatctaggataaatgcactaactcatgagtatgaattatntataatgaatgcaaatgaaaatattcaaaacatacaaaagagatttacacatatagtaaatca

SEQ ID NO: 5018 - DNA, 639 bp, Glycine max
ttggagtttccaagtgccaattcgtcttcttctttagtccagtcttcttctggcttcaattcatcagtgggctttccttctgtgtccaacatcttgggatgttcccagcctttgatgacagctttccaggttctgctatccagtgatttgaggaaggccaccattcttgctttccagtattcatagttggttccatcaagaattggtggtctgttcactggtcctccttctttctccatgttcatcagaatttatctccctagatctcactctgtgatttcgagtgttggctctgataccaattgaaattctgataccaggggacagatgtcgtacaggatgtcacgacatcacgcttcagaacatgcagtttatatgtgtctgtatgaacagattaaacaagtaaataacacaagagaattgttaacccagttcggtgcaacctcacctacatctgggggctaccaagccagggaggaaatccactctcaatagtgttagttcaaggtctaacagcccctgtttacaaccttctcacctaaccactacccgtgcgatctctacctaagagccactcttagatatgagaacctctgctcactccctctcactcacactcccgtgtttacaattaagtca

SEQ ID NO: 5019 - DNA, 564 bp, Glycine max
tctgcttattagtgcacaactctttcaagaatttagcatatcttggaatttgctttattgcatccagcagaggtatgtttacctctacttttctaaatgtttccaatatctccttctcagtatcttccatttttttgttggaaattgctcttggagggaatgaaagagggatatgttgcttctctttagattcacctgcatagaaattgttaggtaacttactctttaaatttttgtcatcatctttttctggagtagagtgaagttgggcaggttcatttgcagatgaggaagatgttgctggttgaggttcttgacactgctttcctgacctcaatgaaatgacactcacatttttgggattctggacagattgagaaggcaatatgtcagaattctgggactgttgttgatttaactatgtagccaattgtcccatctgattagttaagctctgaatggaagctctggtatcttgttgaaactgcatgttttgcatagtcatttgcctcacaagttcttcaagggaaggttgcgaaagagcctcaactgtttgctatttct

SEQ ID NO: 5020 - DNA, 567 bp, Glycine max
tctacagaaggtttgttcctaatttctctacaattgccttacctctcaatgagctggtgaagaagaatgtggcatttacttggggtgaaagacaagagcaagccttttttttctcaaagaaaagctcatcaaggcacttgttctagctcttcctcacttttctaaaacttttgagctagaatttgatgcctctggagtgggagttggagctatattgttacaaggcgggcaccctattgcttattttagtgaaaaacttcatggtgcccccctcagctaccccacctatgataaagaactttatggcctaattagaacccttccaaacttgggaacattacctggtttccaaggaatttgtcattcatagtgatcatgaatcacttaagtacattagatgacatagcaagttaaacaaaaggcatgcaaaatgggtagagtacctagatcaatttccatatgttataaaatacaaaaaaggaaaaacaaatgtggtagctgatgccctctctaggaggcacacattgtttttctccttgggaactcaaattttaggatttgataaca

SEQ ID NO: 5021 - DNA, 523 bp, Glycine max
  unsure at all n locations
agcttctccacttgtaacttgggcctaaattcaaatagcatggttaacacttgttgaagagcttccttggccttctttgatctagcccttggcataggtcctccaagtccttctaaaggttccttgcccttagtccttgcatgtcctcatcacatgtggaaaaaaatgtgtgtgatagtgtaatcagcatgcttcttaacattaaaggtaagacaaaggatgatttgaatactcgtcaagatctagctgagatgggtatacgtgaccaattacatccaatgttttaattaaataaagagtcttgttaaccagtgcctttaacgtattggttaaggaattaaaaaagaaatgtatttattatgtaaattataggagagtgtaaaaaaagatcatgggcaacacaatttttcacctctcaataaaaacattcctattttatgttttttaaccattacccttangacactagttagcatttaacttaaataacaatgaaaacattaatttcattatgtgtgagact

SEQ ID NO: 5022 - DNA, 459 bp, Glycine max
agcttatgctgctaacatctacagtagacctcctttttctgagcagcaaaatcacccacaacagaacaattatgacctctccagcaacaggtataatcccgggtggaggaatcatcccaaccttagatggtcgaatccttcacaatatcagcaacaacaacaacaaccttattttcagaatgctgctggcccaagcggaccatacgttactacaccaatccagcaacaacaacagctacaacatctgcagctgcagccaccccagaaacaacaaatagttgaggctcctccgcaaccttgccctgaagaacttatgacgcaaatgactatgcaaaacatgcagttttaacgagagaccagcaccttcatttatagcttaactaatcatatgggacaattggctacacagttaaatcaacagcagtccgagaattctgactgattactttctcaatctgt

SEQ ID NO: 5023 - DNA, 538 bp, Glycine max
  unsure at all n locations
tccttaagaaaattcctaaagaagctagagcttagcaacacacacatctctaatagctaagctcacctccttgagatgagaagctagagcttagctacacaccccctataatagctaagctcacccccatgacaaaaaaaagatgaaaatacaaaaaaaaaagtccttactacaaagactactcaaaatgccccgaaatacaaggctaaaaccctatactactagaatggccaaaatacaaggcccaaacgaaggaaaaacctattctaatatttacaaagataagcgggctcatacttagcccatgggctcaaaatataccctaaggctcatgagaaccctagggccttcccttggatctctagcccaatctacttggagtcttctacccaatgcccttgcgggataagatttcatcattccctccaccttggaaaggatttgacctcaaatcccaaggttcttcatactctgggctccttccctcaacacctgtaaaaagaaaaaaaacatatgtattantggtgtttggtatgtt

SEQ ID NO: 5024 - DNA, 397 bp, Glycine max
agcttctcggtatattatgcacctgaatcatacctccgggtgacaagttatgaccatttgaatttctcgagagcttccgttgttcaatttcgagcgtctcgatatcttatgcgcttgaatcggacctccgagtgagaagttatgaccatttgaattgctcaagagcttccactgttcaatttctagcgtctcgatatattatacgcgtgaatcggacctccgagtgaaaagttgtgaccatttgaatttctctagagcttcggttgttcaaattcaagcgtttcgatatttgatgtgcgtgaatcagacctccgagtgagaagttatgacgatttgaatatctcgggagcttccgttgttcaattgcgagcgtcactatatgtcatgcgccggattc

SEQ ID NO: 5025 - DNA, 544 bp, Glycine max
tactttgaaatttgtgattcaatatgatgtatgctagtttatatatagagaagtagttatttatattaataatttatgtaaatagtattgtagagtgttatagtatgattccaaaaattattaagtgttggagtttgagaatattatggttaaatttgatgaacatgtgtatgttgtaccttacgaatatcattaggaatgttatgagatggttgatgtgatgttatgagatgttaaagtgtggacatgatatttgattgtgaataagtggatgtgtttaacacttgatgttacattaattatattttgagctatgaattatacaataactcgaccagtgtttatgcgcagtgttaaagagaaagtgtaggttcctagttaggaaccagtgttaaattgtagcgcaatgtgttaaacatgtttgaaacataagtgtgaggtcgtggtattgtgtaattcatgagttgtgtttataaatggaatatgtgatgaattgtggaataacatgttgctttgagattttaatattggtattgagattgag

SEQ ID NO: 5026 - DNA, 507 bp, Glycine max
ttaaaatttgaattaaaacgttcacaaactgttggtaatcgattaccatatatgtgtaattgattacacagggcaaattttgaattcaaattttaatagctgttgtaaatccgttttggccactggtaatcgattacatcctctggtaatcgattaccagagagtaaatttgttgaagaagactttttaacttgtaatccttggccaaaccttttgctacttcaattggaattcccttcctatttaatataccctttctaagactctatagactgtcttgatcatccatcttgaatatctttaatttctttgtcttgagtaaatctttgagaagcatatgattcatgtaatcctttggcatcatcaaaacattcagcttaatcctttgtctacacccacgttctactatgaaaagctgattggctacatgccagctaactttgcggatctcgtcttcgccggagaaaggattgaatcccgactacaaaaaggcaagttcgaatatgc

SEQ ID NO: 5027 - DNA, 497 bp, Glycine max
tcttagtttcagatgatgcagatgggtttgtagctacctcatgcactcctctaatgactatggcatcatttctggcgctaaactgctgggagttggaggccatcttctcaattaaatttctggcttcagcaggagtcatgtctccaagggctccaccactggcagcatctatcatacttctctccatattactgagtccttcataaaaatgttggagaagaagctgttctgaaatctgatggtgagggcaactggcacatagtttcttaaatcgctcccagtactcatacaggctctctccactgagttgtctaatacctgagatatctttcctgatggctgtggtcctggaagcagggaaaaaattttctaagaatactctcttaaggtcatcccagctcgtgatggaccttggagcaaggtaatacaaccagtcctttgccactccctctaatgaatgaggaaaagccttcagaaatatgtgatcctcttggaca

SEQ ID NO: 5028 - DNA, 502 bp, Glycine max
agcttgtgtcacactttcaattgtctaatctgaatacatagctgcaagaagttgttgtgctcaaagtctttggatgaagcaacaatgatgtaagctccattggagcttgtaagcctaggatcttcttcatcaatggattcctttgcttcttggaagatgaatggcagcggaatggagaaaggaagagagagaggagacgccacttcaaggagaagatgagtctaaaagaagctcaccaccatatgaggccatggataagagcttggatgaagaatgagatgaatgaagggagagggagagaagagcacgaaattttgtgctctacatgagctctgagatctgaagtttaatattcaaatgatcaaagttgaaaaaaatgcacacacatgacctctatttatagcctaagcgtcacacaaaattggagggaaattcagaattaacttgaatttgaaattgaatttgtggagtcaaactatggacccagaatttcactaaatat

SEQ ID NO: 5029 - DNA, 614 bp, Glycine max
  unsure at all n locations
tgtgtggaatcgacaagcaaggacaaaaaggaatcttcaagtgacgtgacgaggaatccgtggggtagctcactataggtaaggggagtttattataaaatttaccattttaacaccatagttaggattaaggaacctagctatgaggatatctgcctgtccttgtgcatgctgatttttcttcaaagaaaattacgttttaactaatgggatgcgatatatatattgtgatgaatgatattgttttggctgtttgaaggctgtgcgtgaggaaatgatattgttgtgtttgtttgaattgttgttgatgttgctattgaggattttaattgatatgtgatgataatgatgattatgatgatattgatttgagatgacattgttaataaagaccatgtcaacatgaattgttattattgatgaatatgtgaatatgaaatgatgttgttgttgttgttgataacgtcattgagatgagatgatatttatgttgtgaatgacatggaaatacgatttgttcattgatgttggaaatgcattggcatgtgcatgttgtgtatgttcgtggggggcactgtgcactgacctttcannggtctttggcattagctttt

SEQ ID NO: 5030 - DNA, 595 bp, Glycine max
  unsure at all n locations
agcttgcttcttgcgattccaagacacaagatatcttcctaataggtggcatgtaatttgcaacctgcacaatcagaatctctatatcttgactcatccactgatttacctttctcatctaagtcaaggtatgttgaagtggtcgttggagtatatggttctttgcattttttatgccaaatttcttaattagttctatagagtatttggtttgacataggaaggttccatgtttcatctactgcacttggagtccaaggaagaaatttaactcacccatcatagacatctcagattccttctacatacaactagaaaattccttacacaaaatttcattactagcgccaaatataatatcatcaacatatatttgaacaatgaacaactcactatttactttcttaataaacaatgttttgtcaacttggcctctagtgaaagattgcttaattataaaactgtttaatctatcatacgatgaccttggtatttgtttcaaaccatacanagccatttttagtgtatagacatctttaggatgttcatagtccacaaaacctggggatgacctatatatacttctttttcaatg

SEQ ID NO: 5031 - DNA, 647 bp, Glycine max
agcttgtgcttcaagcataaagggaaataattaaatatgacaccatattcatttttgtgttaaggttgtttgcatacatatattcataaattcttcactgtattcagtgtattgcatatttgcattgaatacactttaagtttgttaagtatatgtcgaactaaatgtatcattgcattgtttgctaaaaaaatgtttgagctaaagtaactctcttaaaaagggtttgttcaacttaattaaataataaatatgataattgactagttagataagatacatcaattatgatctagtttaccgcgcactttaaggttaagctgcgttcgtcctgcttaatccgcctgataaaacattacaaccgaataaatgacaagcataggtacatgttctaattcatttcaccaacaaaatattgcgttttttcttcttattttacgcttcggctaatgcatttataaaagattaagagattattttgtttcacaaaacatattttgttttaagttgatatacgaaaattgaaacacaaaattgaaacggatataatagaaaattatttacactattgtcataagtgtttaaaaaaaagaaataaagtgaaaaaattgtgacattttttaattaaaaagaaaaataaatttttt

SEQ ID NO: 5032 - DNA, 447 bp, Glycine max
tccaatttcattttggagcgtctcgatatattacgggactctattgggcatccgagtaaaaagttattgtcgtttgaatttgatacgagcttccattttcaatttggagcgtctcgacatattacgggactcaatcggacatccgagttaaaagttaatgtcgtttgaatttgatacgagcttccaatttcaatttggagcgtctcgatatattacgggactctattggacatccgagaaaaaagtcattgtcgtttgaatttgatacgagcttcccttttcaatttggagcgtctcgatatattacgggactcagtcggacatccgagaaaaacttattgtgctttgaattttctaggagtttctgttttcaatttcgcgcgtgtcgatatattataggactcaatcggacatccaagttaaaagttattgcggttttcatttgct

SEQ ID NO: 5033 - DNA, 444 bp, Glycine max
agcttgtatcaaattcaaacgacaataagttttttctcggatgtccaatagagtcccgtaatatatcgagacgctccaaattgaaattggaagctcgtatcaaattcaaacgacattaacttttgacttggatgtccgattgactcccgtaatatatcgtgacgctccaaattgaaaacagaagctctaagacaattcaaacgacaataactttttattcggatgttcgattgagtcccgtaatatatcgagatgctccatattgaaaacggaagctcgtatcatatgcaaaccacaataactttttactcggatgtccgattgagtcccataatatatcgagacgctccaaattgaaaacggatgctcgtatcaaattgaaaccgcaataacttttaactcggatgtctgattgagtcccgtaatatatcgagacgctccaaa

SEQ ID NO: 5034 - DNA, 479 bp, Glycine max
agcttatgaccatttcaatttctcgagagctttcgttgttcaatttcgagcgtctcgatatgtgatgttcctgaatcaaaccttcgtgtgataacttatgaccatttgaatttctcgagagcttccgttgtacaatttcgagcatctcaatatatgatgtgcctgaatcggacatccgagtgaaaagttatgacaatttcaatttctcaagagctttcgtggttcaatttcgggcgtctccatatgtgatgtgcttgaatcggacatccgagtggaaagttatgactattttaatttctcgagagcttccgttgttcaatttcgagagtctcgatatataatgcccctgaatcggacctccgtgtgaaaagttatgaccatttgaatttctcgagagcgaccgttttttaatttctagcggtctgatatttgatgtgcctgaaacggacattccagtgaaaagtttgaccattttaact

SEQ ID NO: 5035 - DNA, 513 bp, Glycine max
agcttgcagaccagggatttatctgcaacttcaaaactaggaggctgagtcataaatacatatccctcaagcaacccattaagaaaagcattgttgacatcaaactgaaataactcccacccttgagaaagagcaagagtgagaataacacaaattgtgacaggcttgaccacaggaaaaaatgtctcatgaaaatcaaatccatgaacctaatgaaacaaaccccttagcaaccagtttggctttgaacttgttgatagaaccatcaacattttcttttactctgaaaagccatttgcacccaatagcttgcctattaggaggtaggggaaccaagtcccgagttctgttttacagtaaagcatcatactcctcttgcatagctgtagaccaatctgaattttccagggcctctttgacagtcttgggttcaaaatgagcaaggaacagtgaaggatgtaggctaggattatgaattccagacttggacctaatttgcataggatgagtgtt

SEQ ID NO: 5036 - DNA, 433 bp, Glycine max
tatcgtcattggaaagagatcattaaaatcaccaaatatgcaccaagcaccaatagaggaatgagctaaagatcacaaaagattccatgaaccttttctcttatctctcttttggaatccatagtaaactattaacttcgagacaattttgacaagatggattttcatgttgataaaattaaaatagtagtttaagagacaacaattaaagggggttttccaaaacatagtcagcccaccactccggcctttagcatcaacaaaaaaaaaagcataaatcaaaaccaatttgaatacaaatatcatcaatatgctaagagtaaacacgagtttcacataataaaatgatattccaatgagatcttttagggtaggaattgtgctcgggttgcccaagccctgacagtttcaactttgagactaatcttccctg

SEQ ID NO: 5037 - DNA, 694 bp, Glycine max
  unsure at all n locations
ttgagccaaaatcctgactcaccataaaccttgacccagggtgagaatgtcaatccttaccttcggaagcgaaaagaatagaagggaaatttccaatcaaagaaaaggaaagaaggaagatttccaatcaaagagaaagcaaaaaaagaaaagaaggaaaattcccaatcaaagagtgggagaaagcaaaaagaaaagaaagaaaattcccaatcaaagaatgggagaaagaaaaaagagaaaaggaggaaagaaagctcctgatcaaggatcgaaagaaaacagaagaaatgtgcagagaagtctttggaccggacaatatctgaacaatacagaattgtcaccaaatgaacaaaaagggaaggaaaggaaaccacgacctaaaatggtcttctccctttgattaccaaccaaaatcccgtgcgctagcgacttttttttctcgccccgcactaaacaaaaaaaaaacagaaaaagaaaaagccagaaaaatcaaaagccaaaaacacacaaaagccgaaaaaaaaaaccaccaaaagaacccattcccaagggaagccctattgatccataatcgcgcatgtaatttttgatttgataggaaataattngcaaagtcaagtcatgacatatctatggttcggaattaggatgaaacacttacctgtgcaagattgatacactttgagtgatt

SEQ ID NO: 5038 - DNA, 347 bp, Glycine max
ttggagtgtccaagcgccgctccttcctcacccttaatgcatttttcttcaggcttcatttcatcaatgggcattccttctgtattccgcatcttgggatgtccccagccattgacgacacacttccaggttctgatatcctaggccatcgcgaaggccaccatactcagctctccaatatccacactatgtgtcatgaagagacggaagtctgcacactgagcctacgtctttatccatgtttatcagaatatatctccccacacctcactctgagaatacaaagaaggctcttaaaccaataggaaccctgataccaaagtacatatgtagttcagaacgacaca

SEQ ID NO: 5039 - DNA, 387 bp, Glycine max
agcttttctttgaccgaagctaaggctgaatcttgtttttcaccctatacacatgccatgttcttcttcacccactattagaaaggtgacgcatttgaataaaagataggaactaaccttatatataagcttgctaaccaatggaagctcctaatatctccgacacattattgggtgctccattctagaatagtcgtgattgtctcatggtgcacttcgaccccatttctaccaactcctaaacctcagagaactatattatctactcacaatgtacacttctctatatatgcatagagggagttttctctattgactgaaacaacttgcctgagatgtactcattgatcatataagctcatatggcccactaaaatatcttaaaaa

SEQ ID NO: 5040 - DNA, 570 bp, Glycine max
atactcaagctttgagccacttcaaacgacattaactttttactcggatgtcttattgagtcccttaatatattgagacgcttgaaattttatgttgaagctcttagccaattcaaacgacaataactttttactcggatgtccgattcagtgacgtaatatatcgggacactcgaaattgaatgttgaaactttgagccaattcaaacgatgtctgattgagtcccgaaatgtatcaagacgctcgaaattgaatgttgatgctttgagcaaattcaaaagacaaaagctttttactaggatgtttgattgagtcccgtaatatatccagccgctcgaaattgaatgttgaagctttgagcaaattcaaacgactatatttttttactcggatgtctgattgagtcccgtaatatatcgagacgctcgaaattgaatgttgaacctctgagccaattcaaacgacaataactttttactcggatgtctgattgagtcccgcaatatatcgagatgcttggaattgaatgttgaagctttgagacaattcagacgacaataactttttac

SEQ ID NO: 5041 - DNA, 491 bp, Glycine max
agcttcaaaattcactttcgagcgtctcgatatattacgggactcaattagacatccgagtaaaaagttattgtcgttggaattggctcagagcttcaatattcaattacgagtgtctcgatatattacgggactcaatcagacgtccgagtaaaaagttattgtcgttggaatttgctcatagcttcggcattcaattttgagcgtctctatatattacaggactcaataagacatccgactagaaagttattgtcgtttaaatttgctcaaagcttcaacattcaacttcgagcgtcttattatattataggactcaatcagacttccgagtaaaaagttattttcgtttgaatttgctcaaagcttcaacattcaacttcgagcgtctcgttatattataggactcaattagacattcgagtaaaaacttattgtcgtttgaatttgctcagagcttcaacatcaatttcgagcgtctctatatatta

SEQ ID NO: 5042 - DNA, 651 bp, Glycine max
  unsure at all n locations
tggaacatatatactgaatcctagttcctcttaaggacttatttagaatatttgccggttggtcattagaattaatgaactcagtgataatctccttggacaatagtttctctcgaatgaaatgacaatcaatctctgtgtttagtcctcttatgaaagactgaatttgaggcaatgtgaagagctgcctgattatcacagtataacttcatttgcacaacttcacaaaatcccaactcttggagaaattgtttaatccacataagttcgcatgtaaccatagtcatagatcgatattcagcctctgcactggatcgagcaacaatagtttgtttcttgttcttccaagagataatatttcctccaataaaaacacaatatcctgaggtagatcttctgtctatgggacaaccagtccaatctgcatcacaatatccagagacttgagtgttacccttgttttcatacaacaatccttgtcctagagccttctttacatatctgagaatacgcatgacgacattccaatgatcaacatgaggattntgcataaattggttaacaaccccaacaacaaaagaaatattangtcttgtaatgtaagataagtgagttttcccacaagtctcttatatctctcgggtttgatct

SEQ ID NO: 5043 - DNA, 451 bp, Glycine max
agcttggctgaaatggtacttggctgtttcatctttatctcttaattactatctaatcattatttgattagatagtaattagtgatttagtccttattacacattatttgattgatactatgtaatgaatactgatcccatttactcgttataaataaaggcttggtgtggccatccaagacacaacattacagaaaaacactgttataggtagcataaaataaagacttttgaggggtactaaggactaactcaaggtgttgtaagtgctcttgccatgtcttgctatatataagtgtgttataaaaaaacaccaaaacaaatgtactaagatacagctgcaagcgtgagttcattgtacattgaaatgtggcaaagacattggttatagcccaaaaggaataaccaagaactcaacaacaagttccgaatgagcttcattcccaacaca

SEQ ID NO: 5044 - DNA, 529 bp, Glycine max
tatcactgcctcacgaatgcccaccctggtctaaatggtacgtgatagaacatgcataatcacatagaaggtggtttctagtagaagaaaaaatgtaatccaagtaagtgcaattggtttatctggagctacagaggggtggcactgaatcatgcagactgccttctgttatagcgattaattgaagttttctttcatgccctgaacgtgaaatacagtgggtcttataatacttttataatattatgccatgtgagtataatgacaaccttttcatatcctttcagtggtttcggtcatgtcatttaaagttttatttgaaaagaaaatttataaaattgtttttatagagaaggaactatattggaattatacattaatgtgggattttgttaattaccaaagatgaaatctatggagtttgtaattctaaattatatggtttattgatataacgatgctatgaaatatttatatttggatttaataaaactgttaattataagatatatatatatatatgaattat

SEQ ID NO: 5045 - DNA, 470 bp, Glycine max
agcttatcgatgttgggcaagggatatgcgttcttggggcatgacttgttaaggtaggtgtagtcagtgcacatatgccatttgccattggccttttctaccatgacaatgttggctagccaagttgaatatctgaccttctaataaactaagccttgagtaacttgtcaatctcttgtctgaccaccttttgtcgctcttctcccatcttttttttttcttttgtgagactagtttggtcagaggatagatggccaatttgtggcatatgatgctagcatgcatacttggcatattagacaactgtcatgcaaatagatttgtgtttcttcgtaagacttctgctacatgtttgtacttgtcgctaatgaagtccttgctgagctaaatacactacccaggtttgggtccaagtgtaacttgacaagctctttgattgttttgggcctttataaatatgtcatcacgca

SEQ ID NO: 5046 - DNA, 470 bp, Glycine max
agcttgtcaatgttgggcaagggatatctgatgtaagctccattggagcttggaggcctaagatcttcttcatcaatggattcctttgcttcttggaagatgaatggcagcggaatggagaacgaagagagaggagacgccacttcaaggagaagatgagtctagaagaagctcaccaccatagaaggccatggataagagcttggaggaagaaggatatgaatgaagggagaggaagagaacagcataaaattttgtgctctaaaagagctctgaaatctgaaatttaattttcaaatgatcaaagttccaaaaaatgcacacacatgacctctttttatagcctaagtgtcatacaaaattggagggaaatttgaatttctattgaaactttacttgaatttgaaattggatttgtggagccaaattttggagccaaaatttcactgattatgattagggaatttagc

SEQ ID NO: 5047 - DNA, 511 bp, Glycine max
tcaggttgctcattgactccagattgctgcaaagaaggacagagatctgtatggtgatctacagaagaacatagaccatagactcttgcaacaggtgcagatgcagatttttgattcatggcaagctgagttactaggtagaccaaggcatcaagttttccctcaagcttttttattttcagtagatgaagatgaatctatggccacctcatggactcctctaaggacaatagcatcatttcttgcggcctcagttgcttgttgtctttgttgttgctgctgctgtattggaggaggaacatatggcttgcttggaccagtagcattctggaagggagggacaagctgatgttgttgtggaggacttgtccatctcagatttggatgattcctccaacctggattgtatttgttgcttgaaaggttataattattttgttgttggtggtttttctgctgaggggatctattataaatgtttgcagcatgagcttcaggttgctcattgact

SEQ ID NO: 5048 - DNA, 575 bp, Glycine max
  unsure at all n locations
ttgagcaaattgaaatgacaataactntatacacggatgttcggttgagtcccgtaatatatcgagacgctcaaaatttagatccgaagctctgagaaaattgaattgacaataactttatacacggatgtccggttgagtcctgtaatatatcgagacgctccaaattgaaaacggaaactcttagaaaattcaaacgacaataactttttactcggatgcccgacagagtgtcgtaatttatcgagggatgctccaaattgaaaacgaacgctcgtatcatattcaaacgacaataactgtatactcggatatctgattgagtcccgtaatatatcgagacgctcaaattttagatccgaagctctgagaaaattgaattgacaataactttatacacggatgtccggttgagtcctgtaatatatcgagacgctccaaattgaaaacggaagctcgtagaaattcaaacgacaataacttttacttcgatgtccgaatgaatccgcaatatattgagacgcttcaaattgagactagaagctctgagcaaattgaaatgaccataacttttt

SEQ ID NO: 5049 - DNA, 493 bp, Glycine max
agcttttgttttcaatttcgaccatctcgatatattaccagactcatccggacttccgtatataaacttattgtcaattaaattttctcagagctttggatcaaaattttgagcgtctcgatatattacgggattcattcagacatccgagtaaaaaattattggcgttagaatttgatacgagcttccgttttcaatttggagcatctctcgctaaattgcgataggctatcgggcatccgagaaaaaagttattgacgtttcatatttctaagagtttccgttttcaatttggagtgtctcaatatattacgggactcatccggacatccgtgtataaagttattgacattttaatttgcgcaaagcttctagtctcaattttgagcgtttcaatatattacccgattcaatcggacatgctagtaaaaagtaattgtccgttggaatttctacgagcttccgttttcaatttggagcggattgacatttt

SEQ ID NO: 5050 - DNA, 550 bp, Glycine max
agcttgtaggttaagtgacagtgattgtactggagatgaagatgatcggaaaagtactagtggatttgtgtttttcatgggggaacacaaccttcacttggatgtcaaaaaattagtcgatagtcactctttcaacttgtgaggcacaatacatagcaactacttcatacatttgtcatgcactctggcttaggaatttgttaaaaaagttgggcatgtcacaagaatagccgaccaagatctttgttgatagtaagtcagccattgttcttgcaaagactccactgttccatgatcgaagcaaacatattgatacatgttaccactacataagggagtgcatatcaagaaaggatgtacatgcacaatatgtgaagtctcaagaccaagtagctgacatcttcaccaagctgctcgagtaagaagacttaatcaagttaagaagcttacttggaatggtaaatcaagtttaaggggggggtgttgaataatataaacttgatttatcccattaatcatgtgttaagtcccataagtttgtgctactact

SEQ ID NO: 5051 - DNA, 434 bp, Glycine max
tcaaacttgcaacaaaggagttgagcaggtaaaaaagattcgtcttcaaactcttagaggtgactttgaacgtttgtttatggaggagtccgagtcaatttctaattatttttctcgagtattggtcgtagtcaatcaacttaaaagaaatggtgaagatgttgatgaggtgaaggtcatggaaaaaatacttcgaactttaaatccaagttttgacttcattgttaccaacattgaagaaaacaaggatttaaagaccatgactattgagcaactcatgggttccttacaagcatacgaagaacaacaaaagagaaaaattctacaaaaggaggctacggagcaactactacaactcaacatatatgaagcaaactatgcatattacaacagccaaagaggacgaggtcgcggccaacatcgtggacgtggac

SEQ ID NO: 5052 - DNA, 671 bp, Glycine max
  unsure at all n locations
ttgagccaaaatcctgactcaccataaaccttgacccagtgtgagaatgtcaatccttaccctcggaagcaaaaaaagaatagaggggaaatttccaatcaaagaaaaagagaaggaaaatttccaatgaaagcaaaaaaagaaaagaaggaaaattccccaatcaaagagtgggagaaagcaaaaagaaaagaaaggaaaattcccaatcaaagaatgggagaaagtaaaaaaaggaagaagaagaaggaaagaaagctcctgatcaaggatcgaaagaaaacagaagaaatgtgcagagaggtctttggaccggacaatatctgaacaatacagaattgccaccaaatgaacgaaaaaagaaggaaagggaaccacgacctaaaatagtcttctccctttgattaccaaccaaaatcccgtgcgctagcgaccctttttttctcgccccgcactaaacaaaaaaaacagaaaaagaaaaagccaggaaaatcaaaagccaaaaacacacaaaagccgaaagaagagaccaccataagaacccattcccaagggaagccctattgatccatgatcacgcatgtaattnttgatttgataggaaataatttgcaaagtcaagtcatgacatatctatgggttcgaattangatgaaacacttacctgtgcg

SEQ ID NO: 5053 - DNA, 442 bp, Glycine max
ggagaaccaagccaatcggaatgctatactatttatatatgggaatataggtaacaatggcggttatgacggaccgaggcataaccgggttgagggagtaaagctcaatgttcctcccttcaaaggtataagtgatccagatgcctacctgtactgggaaatgaagactgagcacgtatttgcctgcaatgactacactgatgcgcataaagtcaagctagcagcagctgaattctccgactatgcccttgtttggtggcataaataccaaatagaaatgttgagagaggaacggcgagaggtatatacatggactgagatgaaaagggtgatgagaaaaaggtatgtgcccactatctataacaaaaccatgcgacagaaacttcaaaggctgtcccaagggaatttaaccgtggaatgattttaataaagaaatggaaat

SEQ ID NO: 5054 - DNA, 492 bp, Glycine max
ttcaagaaattcaaatggtcataggttatcacacggaggtcctattcaggaacatcaactatttagccgatcaaaattaaacgacggaagctctcgagaaattgaaattgtcataacttttcacacggaggtccgattcaggcacatcacatatggagacgcccgaaattgaaccacggaagatctcgagaaattcaaatggtcataacttttcacacggaggtccgattcaggcgcatcatatatcgagacggtcgaaattgaactacggaagctctcgagatattaaaatggtcataacttttcactcggatgtccgattcaagcacattacatatggagacgcccgaaattgacccaccgaagatctcgagaaattcaaatggtcatagcttttacacggaggtccgattcaggcgcatcatatatcgagacgctcgaaattgaacaacggaagatcttgagaaattgaaattgtcttaacttttcact

SEQ ID NO: 5055 - DNA, 582 bp, Glycine max
tgttgtcctcattagtggacgcctctattaaacaagtggcctcaataacttaagaggagggaggggggtgaattaagtttaaaaatttctccctaatcaaattttaattctctcttgaaatagaatatgcacacttaatatgaatgaagtaaagagctattcaaatgatacttctttaaaataagcaaagcaaaaataaaatgtaataaattaaagaagtttagggaagagagaaatgcaaactcagtttttatactggttcggccacgccctatgcctacgtccagtcctcaagcaacctgcttgagattttcactaacttgtaaattccttttacaaattctgaaccccacatggatacccttttcttgtgttcagagatccttacaaatcaagatacccactgtctcttgaacaacagttgtttgctttaaagtaagaagaatatttctctcttgtagagaagaatgttacaagatgaagatcttattagaattcttattgattttgcaagtgtttgaccaatgctttcttttgagaagaaaaaacaattattgttctgaaaaactttcgagaaatttg

SEQ ID NO: 5056 - DNA, 621 bp, Glycine max
  unsure at all n locations
tcttgcagaggctgaagaatcagctctcggtgaaatcctttttatgatttcgttctgttttaggtcgaagaagttggttgaactgatgaagatgtgtagagatctgaggcacaaggtcccagagatattggaggtggaggtggatccaaagggagcaccaaggattcaagaggcgataatgaagctctacgtttcaaagagcgcgttcgagaagattcacttgttgcaggcaatgcatcttagaatttcctctctataaacataatttagaattccaaaattttagttaattaaaaattatctattaaaatactgaaatttcaaatttcagtgaacaagacatccaaaagaaaattttagacttagaaattttaaatcctctaaaaaattactttctttgctttaaatactccatccaaacagattctgaagagaaaaaaaacattttcttaaagtatcttttgtttgaaattaattttaaaaataaaaaagaataattaaaaatagaatttcaattaattgaaatatatttttaaaataatatcattaaatagggtgaaaaatggttaaatttatttatatttaagtttaanaattacttttggtttatttaagtcaaga

SEQ ID NO: 5057 - DNA, 465 bp, Glycine max
agcttcaacatcagaccacttccagggtgctggaactacttcacatggacttgatggggcctatgcaggttgaaagccttggaggaaagaggtatgcctatgttgttgtggatgatttcttcagatttacctgggtcaactttatcagagagaaatcagaaacctttggagtattcaaagagttgagtctaagacttcaaagagaaaaggattgtgtcatcaagagaatcaggagtgaccatgacagagaatttgaaaacagcaggttcactgaattctgcacatctgaaggcatcactcatgagttctctgcagccattacaccacaacagaatggcataattgaaaggaaaaacaggactctgcaagaggctgctagggtcatgcttcatgccaaagaactttcctataatctctgggctgaagccatgaacacagcatgctacatccacaacagagtcacac

SEQ ID NO: 5058 - DNA, 492 bp, Glycine max
  unsure at all n locations
tgtaatcgattacacacatactgtaatcgattaccagaggagtttttcaaaaaacattctcaacagtcacatctttttatctgattcttaagtggccatcaaaagcttatatatatgtgactagagacacgaatttaacaagagtttttaagaacaaaaaggtcttatcctcttaaaaagcaaaatcattttaccctcttacaaattccttggccaaaactcttgtgattcaataaggaattatttgagtgctcaaattgttcaatctatctctttcaagagagatttcttcttttcttcttcttcattctgaaaagggattaagagaccgagggtctcttgttgtgaaagaattctaaacacaaaggaagggttgtccttgtgtgtttagaacttgtaaaaggaatttacaagatagtggaactctcaagcgggttgcttggggactggacgtangcacaagggtgtggctgaaccagtataaatctgagt

SEQ ID NO: 5059 - DNA, 446 bp, Glycine max
tcacaaaattcttattcaatgcaattccagcctttgcatttaaaatacttgatctagaacaataatttaaaaaaaaggttaacagaccaatcactaacaagaaaatgaataatgtcaagttgtcaacttaaaaaaggcaattgtgttcaataactttacagctgttaacataatttatacctgttatcaccaacaaagtcggtggagaccacatcatcttcagtgtaaccaagaattcccttcaacttgccctctgattcctccctgagaaagacaacattatataagacaatacaattgagaaggaccaatcccaaaatggaggcctttattaataacaagtaatgaaaatttgctttaagacccaataatacacaacatatatcattagaggagaatcaaagaattctgtcattacttgatagcatttttaatttcatcatatg

SEQ ID NO: 5060 - DNA, 441 bp, Glycine max
taaacattcaatttcgagcgtctcgatatattacgggactcatatcttacatccgagtaaaaatttattgtcgtttgaattggctcagaggttcaacattcaattttgagcgtctcgatatattacgggactcaataagacatccgagtaaaaagttattgtcgtttgaattagctcagagctttaacattcaatttcgagcgtctcgatatattacgggactcaatcagacatccgagtaaaaagatattgtcttttgaattggctcacaggttcaacattcaatttcgagcgtctcgatatattatgggactcaatcagacatgcgagtaaaaagttaatgccggttgaattggctcataagttcaacattgaatttcgagcgtctcgatatattacgggactcaatcagacatcccagtaaaaagttattgtcctttg

SEQ ID NO: 5061 - DNA, 407 bp, Glycine max
agctttgagcaaattcaaacgacaataaccttttactctgatgtctgattgagtcccgtaatatatcgagacgctcgaaattgaatgttgaagctcagagcaaattcaaacgaccataacttttttctcggatgtttgattgagtcccgtaatatatcgagacgctggaaattgaatgtttaagctatgagcaaattcaaacgacaataactttttattcggatgtctgattgagtccagtaatatatcgagacgctcgaaattgaatgttgaaactttgagcgcattcaaacgacaataactttgtactcggatgtctgattgaatgacgtaatatatcgagacgctctaaattgaatgttgaacctctgagccaattcaaacgaccaaaactttttactcggatg

SEQ ID NO: 5062 - DNA, 521 bp, Glycine max
agctttgaatgcactattcaatggagttgacaagaacatcttcagactgatcaacacttgcacagtggccaaagatgcatgggagatcctgaaaatcactcatgaaggaacctccaaagtgaagatgtccagattgcaactcttggctacaaaattcgaaaatctgaagatgaaggaggaagagtgtattcatgacttccacatgaacattcttgaaattgccaatgcttgcactgccttgggagagaggataacagatgaaaagctggtgagaaagatcctcagatccttgcctaagagatttgacatgaaagtcactgcaatagaggaggcccaagacatttgcaacatgagagttgatgaactcattggttctcttcaaacctttgagctaggactctcggatagggctgaaaagaagagcaagaatctagctttcgtgtccaatgatgaaggagaagaagatgagtttgacctggatactgatgaaagtctgacaaatgcagttgtgcttcttggaa

SEQ ID NO: 5063 - DNA, 619 bp, Glycine max
  unsure at all n locations
tatctgtaaaatcttctagtcctccatatatgtgtgctttctctcctcatatgtattgcttaaattaagggatttattttatgcattatgctctatattaaaccttcttcaagattcatttgcatttatcaatattcattatgcttactacctctggactgatataaacaaccaaaaaaatgactgacgtaaatataaacaaatttaactacttttgccctattataatgatatcataccaaaaatacccttcaattaaaagatatcatattttcaatgactcctttttattcttgattcaagttccaatgaaggagactttatgaaaaacatttttttaaatgtgattagtaggattaaattatgttaactaaatggtgtgaagttagttaatttttcttgtatttcagtcccgagggaatattatttactgtgtagcacgaattcctttntaacccaaggttgtcaattttaagagagtatgtataagcgcaaccttttaggagcttagcgcatatccttgcggcagatgttcaacttagcgggcactttccagcanagtcaattctgcagaagctgaatttctgtaacttccgcttagtggctccacatatctcta

SEQ ID NO: 5064 - DNA, 528 bp, Glycine max
gcaagctttgaatgctgtatataatggagttgactataatatcttcagactgatcaacacatgcgcagtggccaaagatgcatgggagatcctgaagaccactcatgaaggaacctccaaagtgaccatgtccagattgcaactcttggctacaaaattcgaaaatctgaaaatgaaggaggaagaatgtattcatgacttccacatgaacattcttgaaattgccaatgcttgcactgccttgggagagagaatgacagatgaaaagctggtgagaaagatcctcagatccttgcctaagagatttgacatgaaagtcactgcaatagaggaggcccaagacatttgcagcatgagagtaaatgaactcattggttcccttcaaacctttgagctaggactctcggatagggctgaaaagaagagcaagaatttggctttcgtgtcccatgatgaacgataagaatatgagtatgacctggacactgatgaaagtctgactaacgcagtttggcttcttggaaaaca

SEQ ID NO: 5065 - DNA, 504 bp, Glycine max
agcttgtgcctcttcacgtctggaatatgaatgtagcatatagatccaaagacccttaggtgctttgctgatggcttcctcccgttccaagcttcaattggagtcttgtcttttacagacttagttggacatctgttgagtatgtaaacagcagtgtagactgctttagcccagaatgtgttaggtacttgagcatcgatctagccatctccataactgtgcgattctttctctcggacactccattttgttgaggaggatatgcgactgtaagttgtcgctcaattccttcatcctcacaaaatctttcaaactcgcgagaggtgtactctttgtcgcgatcacttcttagtacttttatccgttttccactttgattttcagcaagggccttgaactttttgatactccaaatacttctgatttttcttttagaaaatatacccatgtcattctagagaagtcatcaatgaagagtatgaagtacctggttgttccatgtga

SEQ ID NO: 5066 - DNA, 576 bp, Glycine max
tgaaccttgaggaagaaatttcagtgtcacatgcatgtcattgaaacgttgatttggcaccaaatgaccctatgctttctttagtgggagggaagttccatgcatgtggcattaagagctatgaccgtggagttatttgttggggatttatcatcaaaccaagttcaccatctcctaaagggattaaggtttttgaagttgctgctggtgattactttacttgtgcagttcttgctgacaaatctcttatgcctttatgttggggtgttggctttcccacttctcttcctttagctgtttcaccaggaatgtgccaaccttctccatgtgctcctggctcctatgcaattgataagcataagagtctttgcaagtcaccggattctcgtgtttgcatgaagtgcagtggtgcttgtcctcctgaaatgtatctgaagagtgcatgcaattttgcatatgatagaatgtgtgaatataactgttcctcttgttcttcatctgaatgcttcttgaactgctcctcttcatattccaatgctgctgcttctactgagaaaaaaagtgaaaaaattgggc

SEQ ID NO: 5067 - DNA, 559 bp, Glycine max
  unsure at all n locations
tcaacatcagaccacttccagggtgctggaactacttcacatggatttgatggggcctatgcaggttgaaagccttggaggaaagaggtatgcctatgttgtgttggatgatttctccagatttacctgngtcaactttatcagagagaaatcagaaacctttgaagtattcaaagagttgagtctaagacttcaaagagaaaaagactgtgtcatcaagagaatcaggagtgaccatggcagagaatttgaaaacagcaggttcactgaattctgcacatctgaaggcatcactcatgagttctctgcagccattacaccacaacagaatgggatagttgagaggaaaaacaggactttgcaagaggctgctagggtcatgcttcatgccaaagaacttccctataatctctgggctgaagccatgaacacagcatgctacatccacaacagagtcacacttagaagaggcactccaaccacactgtatgaaatctgganagggaggaagccaactgtcaagcacttccacatctttggaagtccatgttacatcttg

SEQ ID NO: 5068 - DNA, 247 bp, Glycine max
  unsure at all n locations
tctatacctgttgcaagagnttgtggtctacgttcttctgcagatcaccatacagatctctgtccttctttgtagcaatctggagtcaatgagaaacctgaagcttatgctgtaaacatttataatagacctcctcagcaacanaactaacaacagcagaataattatgacctttcaagcaatagatgcaatctaggttggaggaatcatccaaatctgagatggacaagtnctccgcaacaacaac

SEQ ID NO: 5069 - DNA, 250 bp, Glycine max
  unsure at all n locations
ccttcacccgacgaagacactgacananacttatcttctccttcttggacaaagtatggcaggctgnggggcaagtaaatttcttcccatcagaccttggatgcaactatgatcgtatacccatatcagctacatcttgacnggtattcaagccatcctttgtcttgcctttgaatgtaaggaacgtcccaatgacactatcacagacattnttctccacatgcataacatcaatacaatgtctaacgtc

SEQ ID NO: 5070 - DNA, 377 bp, Glycine max
  unsure at all n locations
tctataaatctataaagttctntcaaatattttataattttaaaatatatatccattaaaatccanacctaaaaatcttaatcctaaaagtcnttttaaaaatctaataagtcaaaatatttctacataatcttttaatatctaaaagactnnttttatactanaatagtcttttaaaatcctataccccttttatattccttcanagttttttaanattcataaaattttaataaaacattaaaataatattttanaatcatatggaatacattatgataaaataaataaccatgatacacgaaccattacacagtaacatccacccatgagccacctacctatgtggacatttttaaatcattcaattagttttt

SEQ ID NO: 5071 - DNA, 236 bp, Glycine max
  unsure at all n locations
caccatcaataagtatacatcgttcataagggtccaccacttgaaagagggctngcaccagcgtagaatttccattctctgtcctgtctactataccaattgtcttttgtcctgcgaagatacaagtaacatctttgaggaccatangagcagcagggtcattctgtatatgaagggtatgaagttcaactnttccctcctttggccactctggttcatgcctgcaatcttgaatg

SEQ ID NO: 5072 - DNA, 395 bp, Glycine max
  unsure at all n locations
actcggatgtccgatgagtctctgttatatatcgacacgctcganatngaatgttgaagctctaggcctattcaaacaacaataacgtnttactcggatgtccgattcagtgacgtaatatatcgggacgctcganattgaatgttgaacctctgagccaactcanacgacaataactnnttactcggatgtctgattgagtcccgtattatatcgagacgctcgaaattgaatgttgaacctctgagccaattcaaacgacaataactntntactcggatgtctgattgagacccataatatatcgagacgctcgaaattgaatgtngaacctctcagccaattcaaactacaantaacttttactcggatgtccgatcagtgacgaatatatc

SEQ ID NO: 5073 - DNA, 240 bp, Glycine max
  unsure at all n locations
tgtccgattcggggacataactcatctagacgctcgaaattgaacaacgcaagctctcgagaaattcgaatggtcataacatttcgcacaaatgtccaattctgggacataatatatcaagacgctcganactgaatagcggaagctctcgggaaaatcagatggtcatnaactttcacatggatgntccgattgtgaaaataatatatcgagatgctccaaatcgaacaacgaaagcta

SEQ ID NO: 5074 - DNA, 307 bp, Glycine max
  unsure at all n locations
gcgatccttgagtcacctgcngcatgcaagcttgtaatcgattacacatatactgtaatcgattgccagagcatattttcagaanatattctcaacagtcacatctttttatatggctcttgaatggctatcaaaggcctatatatatgtgacttgagacacgaatttgctaagagttnttcagaacaaaaaagtcttatcctcttataaagaaaaattgttttatcctcttacaaattccttggccaaactacttgtgattcaataaggaatttttgagtgctcaaactgttcaatctatctcttt

SEQ ID NO: 5075 - DNA, 265 bp, Glycine max
  unsure at all n locations
caacttccgtttgcccatcggtttgtgggtgacaagtggttgaanataacaatttagtgcccaacttgctccacatagtcctccaaaaatggcttatgaacttagagtccctatcactaacaatgctccttggcaaccatggagtctcacaatctccttgaanaacaaatcagccacatgggaagcatcatcaactttnttacatggaatagaatgagcccatttagaaaacctatcaacaaccacaaaaatggaatctctacca

SEQ ID NO: 5076 - DNA, 251 bp, Glycine max
  unsure at all n locations
caacacgaacaacaggtgagacaganaacttcatagctctaatgggatgggcatcaacttccttttcattagtcaaagtagcattctttggtatgaactgatccataccaaccatagcaacagtgttaccacaggggacatcttccacagtttcctgtctttttcccatccacatgacagttctttgaacacttttaacatacaaatccttcttctccccacggacataatatggtcccataatcctcacc

SEQ ID NO: 5077 - DNA, 294 bp, Glycine max
  unsure at all n locations
atccacgtcgattaccaatccttngaaacatagcacgagacctatcagctatgcttctttctatagtaacatctgagtctgcatttagcatacgtggaagggtgctcgatccatttcgtagttctctatcacatgaaaagccagaggcccttatctgtacacaagaatggctcanagatacaccttcacgcaccattttagacttcgatttggaagagcttcaaagtttcgacaaacgtatattgttttcccaatttgtagtaataatataattaaaatatttattgagtaaca

SEQ ID NO: 5078 - DNA, 309 bp, Glycine max
  unsure at all n locations
aactcggatgtccaaatgaaacccgtattatatcgagacgctcgannattgaaacagaagctcgtagcaaatgcaaaccacaataactntttactccgatattcgactgagtcccgaattatatcaagacgctcgaaatngagaacagaagctctaagcaaattcaaacgacaatacactttaactcggatgtccgaatgtgtgctatagtatatcgagacgctcgtaattgagaacagaagctcgtagcacattcaaacaacaacgtaattttacacggatgtcctgtngagtcgcataatatatcga

SEQ ID NO: 5079 - DNA, 345 bp, Glycine max
  unsure at all n locations
acatgggaaacatntataatcttgaatattntataataaaatatattntggtaggtctctatctaaaaatatattatattttttttcacaaaccacgaatatctntcctaaaagccagtggttaatgaatattgattcctatgactcanatctgatgtcactggttaaattaaaataatgttatgtcaatggattcaagcactctatnggtntatataatatctttgttatcatttcggaaacatataattatgaaatttttatcatattctatcttaatatatctggtagataacatttaattttctcacaaacaggatatataaatcttaatttctattattt

SEQ ID NO: 5080 - DNA, 341 bp, Glycine max
  unsure at all n locations
ccatgctaacatctgaatcatatcagcatatcacanaaactgtttattcacaatctgagtcacatgttgtaagtggacattctttaatgtattcatactatacagtatccatggcagccagaattcattcatgagaccaaccctcttgtctgtctgtngcagtccttcctttgtcagttntcgcactttgctaatcacaaatgtctgctctcaaaacaactaaattattttattattggatcaatacctataagaaaaaagagagcagttattgttaagaataggaacaacataccaaatatatcagtttcaactatactaaattcacaactctctaacat

SEQ ID NO: 5081 - DNA, 231 bp, Glycine max
ctcaatagctcttgcaacatggtgagtcagtcccattggtggctttggctgtatcatctgtagaagcatgatccccagtgaataaatatcagatttgattccagcatgctcgtttgctgatactcagggtcaatgtaaacagaaagtccagcagttgatgtcatgcgatactgtgtcactgtgtctgcaactgtaggagggacaagccttgccaatcccacatcactgatc

SEQ ID NO: 5082 - DNA, 318 bp, Glycine max
  unsure at all n locations
tctgacattcaccacagattctgtcttcttctatnttcagattgggaatgcctctaacagcacctctgtcaatgatattcttcatgcctcttaagtgcagatgtccaaatctttgatgccatattctgacttcatcttctttggaggatagacatgtggaggagtaactggtttcttgaggtgtccataagtagcagatgtcctatgatctgctgcccttcattagaacttcactcttctcatttgtcaccaagcattctgacttttgtgaagttacatttgaatccttatcacacagctgactgattgctgatcaag

SEQ ID NO: 5083 - DNA, 432 bp, Glycine max
  unsure at all n locations
agcttgcttaagaaacttctatgaaggttggatctttaagcttcaatgaggtccttcaatggtgattttccaccatggagatgcagcggaagataaaggagaagaggtgagaggaggcgccatctactatgatgcaagctccattggagcttgtaggcctaggatcttcttcatcaatggattcctttgcttcttggaagataaatggcagcggaatggagaaggaagagagagaggagacgccacttcaaggagaagatgagtctagaagaagctcaccaccataggaggccatggataagagcttggaggaagaaggagatgaatgaagggagagggagagaagagcacgaaattntgtgctcaaaaggagctctgaaatctgaagttaatattcaaatgatncaaagtgaaaaaaatacacacacatga

SEQ ID NO: 5084 - DNA, 413 bp, Glycine max
  unsure at all n locations
agcttagactaagtttatcctaccatcctcagactgatggtcaaactgaacgaactattcagtccctagaggaccttttgagggcatgtgtcttagagaaaaagggaatttgggagagttttcttccattgatagagttcactcataacaatagttttcactctaccattggcatggctccctatgaagctttgtatggtaaaaggtgtatgacacccctatgttggttagagcccggagaagacctcaccttatgacctgaagtggtataacaaaccatcgagaaggtcaagttgatccaagaaaggatgaggactgcttanagtanacagaaaagttatcagaataagaagaggaaagacctggaattcgaggttggtgatcatgtattcttgagagtcactccatggact

SEQ ID NO: 5085 - DNA, 475 bp, Glycine max
  unsure at all n locations
ngctntaagactgtatattgatttctttagtttgcacaccatgtgttcctttcctttaactgagaaccccattagttggtccatataaatattctcctctaaatctccatttagaaaggcagttttcacatccatctgatgtagctccaagtcataatgggctactaatgccatgataatcctgaaagaatcctttcgtgagaccggtgaaaacgtctctttataatcaatgtcatctttctgagcaaattccttagcaacgagtctagccttgtaacgttcaaggttgccatgagagtcacgcttagtcttgaagacccacttacaaccaactctcttacaatcctttggtaattctacaaggttccaaacaccattatgttccatggaaattatctcttctttcatgacattaaaccacttctcagaattatcacannatatagctngtgaaaacaaaacttgatcattatca

SEQ ID NO: 5086 - DNA, 411 bp, Glycine max
  unsure at all n locations
gtcattaatcgtaatgaanaataacaattaaacaacaattaataaaagagaagtcaagcttattgaaaagctagtaaatacttggaaaatatccatttgcaacatgttggtataaaaaagtaacaacgataataaaattaattaaggcgtacccaacaagctttctcttgctttgaaaagtcattaatcgtaatgaaaaataacaattaaacaacaattaataaaagagaagtcaagcttattgaaaagctagtaaatacttggaaaatatccatttgcaacatgttggagtaaaaaagtaccaattatctcactaatgaaacttatatataaaaaacattaataaattaatcaacatgcacctttcaataagcgataataaattaatcanagcgtataactagagacatg

SEQ ID NO: 5087 - DNA, 437 bp, Glycine max
tggaaatgaacaacggaagctctcgagaaattcatatggtcataacttatcacatggaagtccgattaaggcgcataatataccgagacgctcgaaattgcacaacggaagccctcaagaaattcaaatggtcataacttatcacacggaagtccgataaaggcgcatagtatatcgagaatcttgaaattgaacaacggaagctgtcgagaaattcaaattgtcataacttatcacacggaagtccgattcaggcacataatatatcgagacgctcgaaattgaacaacgaaagctctcgagaaattcaagtggtcataacttttcacacggaagtccgattcaggcgcataatatatcgagacgctcgaaattgaacaacagatgctctcgagaaattcaaatgatcataacttatcacacgtaagtccgattct

SEQ ID NO: 5088 - DNA, 426 bp, Glycine max
agcttgaaattgaacaacagaagctcacgagaaactacaatggtcataacatgtcacacggaagtccgattcaggtgcataatatatcgagacgctcgaaatagaacatcggaagctctcgagaaattccaatggtcataacttttcacacggaagtccgattcaggcgcataatatatcgagaagctggaaattgaacaacgaaagctctcgagaaactcaaatggtcataacttgtcacacggacatccgattcaggcgcataatatatcgagacgctcgaaattgaacaacgtatggtgtcgagaaattcaaatggtcataacttgtcacacggaagtccgattcatgcgcataatatatcgagacgcttgaaattgaacaacggaagctctcgagaaactcaaatggttataacttgtcaca

SEQ ID NO: 5089 - DNA, 382 bp, Glycine max
  unsure at all n locations
agcttgagaatggaggatttccttgagggtcctctcttatgcaatcatggaacacagctccaaactcaaaaatggaggacacatgaatgacaacgcaattcattcatggggctccgaaaaagggtaagaatggaggatttgcttgagggtcttctcttangcaatcatggaacacagctccaaactcaaaaatggaggacacatgaatgacaacgcaattcattcatggggctccgaaaaagggtgagaatggaagattgccttgagggtcctctcttatgtaatcatggaacacagctccaaactcgaaagtggaggacatatgaacagccctcagcaataacattcatgtggccctggaaaagaatgagaatggaggatt

SEQ ID NO: 5090 - DNA, 397 bp, Glycine max
  unsure at all n locations
agctngggtccaattcaaacagccctaacttttgacattgagatgctagaaattgagaaatggaagttcttgagaaattcaattggtcataacttttcactcggatgtcagattcaagagcaaaatatacagagacgctcgaaattgaacaacggatgctctctagaaatttaaatggtaaaattttttcacatggatgttatattcagacacataatatatcgagacgttcgaaattcaagaattcaaaaattaaagttctcaagaaatatagagatgaaaaattatgaccatgggtgtacgattgagacccatgatatatcgatatgctcaaaattcaaaaattggtccaattcaaaaattcaaagagccctaacttttgacatgggtgtacgat

SEQ ID NO: 5091 - DNA, 471 bp, Glycine max
  unsure at all n locations
ntcgcaaggcggggatgttcatgagcatatcagttcgttgtcgtgtagtcatgatctacataatgtcagatcatattactttgtatgtatgacaaaaatgaaaccaagatttttggacctctcatttatagttatacaaggttgcatacctccatgcttgttccatccttagctatctgttgtgatggagcaaattcaacaatataatcagttacagatagaagccactcaatttcttttctccacctggcctttctttctgaggacattggctccagctttgattgttctccgaaaacagatgctgcattgaatcaggaaacaaattattgaatggaaatttcattgagacttgagagatcacatttcagttagtcacagttataatatgcatgtgcttgaatntgaattgagatgactacactatctattaattntatagaaatcaagccccatgatngaaatcacact

SEQ ID NO: 5092 - DNA, 464 bp, Glycine max
  unsure at all n locations
taagctccttcaactgcacaaggctcttaatatttgaagagtatccttgtggaaccttcacccgatgaagacactgacaaaaacttatcttctccttccttgacaaagtatggcaggctgggggcaagtaaattttcttcccatcaaaccttggatgcaactgtgatcttatacccatatcagctagatcttgacgggtattcaatccatccttcgtcttgccttgaatgttaaggagcgtcccaatcacactgtcacaaacatttttctccacatgcataacatcaatacaatgtctaacgtcaagatcacaccagtacggaagatcaaagaaaatggacctcttcttccatatgcaactctgacntttatccttcttttgggtcttcccaaatacaatgttcaagtgttgaacccgctgatatacctgctcaccanngaacggtttcggcgtaatatcatgc

SEQ ID NO: 5093 - DNA, 429 bp, Glycine max
tctattggatgtgatgacaataagtatatcactaattattttataaaaatcgcggaaaaggattatagactcacaaatttaatccgaattgattatatataattgagcttatttggtttaagttttaactttctttcttgttcattatagaagattattatatatttttaagtcttttatctatattcattgcctttatatataaacttttaaatctatattaatatagcggcaaatatattttactcattaataatactcaaatatattttatttaacatctagtattatttgtgcttatcagtgctatcacattacatgtctcattatttttttaatccaaaatatgatagaattattaccgaacttatcagtgatatcactatacgtgtctctttattaaactaaaactagagcatattaataaac

SEQ ID NO: 5094 - DNA, 316 bp, Glycine max
agcttgcttattcaaatttcaagatacaagtgaactccccaagaagtgacatggcccacttgtggttttccaatctagcttacattctgcaaagttagaatatgaaaatccaattaaactcaaggaggtacctttggggtaccttaaaccaacattggttgtgcccttaaagtacttaataatccttttgacaacatttaaatggtattccttgggattttatttatatctttcacatatgcacacacttagcatgatgtcaagttggcttgtagtcaaatatatgagataaccaatcatacctctatactttgac

SEQ ID NO: 5095 - DNA, 456 bp, Glycine max
aagaactattactattgaagaattaattcatgttattttttatgagactaactctattaggccaagaaaggatatacttgatgatattacagatactttagaagatacgcatattcatgaagaagtccacaaagacaaagaagatggaaatagtagagactctcaatccaaagaaaatcaaataaacgtggatcttccaacggagtggagaacttcaaggtatcaccctcttgataatatcataggtgacatctcaaaaggggtaacaactcgacactttcttaaagatgcatgcaataacatggcttttgtctctttaattgaacctaaaaacataaatgaagccataatcgatgaacattgaattattgctatgcaagaagaattaaatcaatttgaaagaaatcaagtatgggaattagttgatagacccaatgatcatccaattattggaac

SEQ ID NO: 5096 - DNA, 423 bp, Glycine max
  unsure at all n locations
ntctgcagggaagctaagtgtgaagtatgcaatcctgcatatgattggcgctgcaaactgggtacccaccaatcatacttccactgttgccacaggtttgggtaaatttctgtatgctgttggaaccaagtccaaatttaattttggaaactatatttttgaccaaactgttaagcattcagaatcttttgctgtcaaattacccattgccttcccaactgtattgtgtggcattatgttgagtcaacatcccaatattttaaacaacattgactctgtgatgaagagagaatcggctctgtccctgcattacaaactgtttgaggggacacatgtcccagacattgtctcgacatcagggaaagctgctgcttcaggtgctgtgtccaaggatgctttgatngctgaactcaaggacacatg

SEQ ID NO: 5097 - DNA, 442 bp, Glycine max
  unsure at all n locations
agcttattctttatctagagtagttgagcacaacaacttactactgacatatattcgactttagtagtggacaatgtagttgagccttgcatcttgcatattcatgttactaagttagcaccgataaagtaatagcttccactagtgctttttctttcaactttatcaccaacatagtcaacatcataatagcttgtaagtctgaaactttctcttcttttgaacataagaccaagattagaagttccaattaaatatctacaaatatgtttaattttagttaggtgaacttccctttgttctttttgaaatcttgcacatagataaacattgaacataatatcagaaatggatgcagtgagatagaccagtgagttgcatccactttnnttgatccttgtccaatccaaggtatgtcatggtgtgcatnggagtcttcatt

SEQ ID NO: 5098 - DNA, 467 bp, Glycine max
  unsure at all n locations
tcttattcacataacaccaatagtattccatttataagcagagattgacgattcanattacatatttataagagaccaaccaaacacaaagcaaccacagcttataacacccgtaacaaatcctagaacatttgaatttgcaaaggcgggccatgaccactttattctaaaacttcaaacacaacacatacttattatttattgatacatgtattacagctatctctgcttgaaggttatgcatgttgatctcacttgcagctgcatgggtcgcaagtgcagtttgatccacagttgcagccaccgttctcagctgcaacacccatttcagcaccctcgaattgggccttcaccggcccaacacccaaaactagagtctcatttgtgatcttctcaacgtagtcaaaagagtacttgttgcaactgcaatacatganaaattaacatacataaggttggggaaaaca

SEQ ID NO: 5099 - DNA, 351 bp, Glycine max
tcctttacttgtactcatttttattgcgtgcggttgtaatccaactgccgggcatgttcagaacaaccagttgaatccagtatggaatgagcactttgaattcattattgaagatgcgtcaacgcagcacttgacagtaagaattttcgatgatgaaggcgttcacgcttctgaacttattggctgtgcccaagcttccttgaaggatcttgaacctggtaaagtcaaggacgtatggcttaagctggttaaggatttggaggtccatagagataacaaatacaggggtgaggtaagatagtatgttcttagtgtcttcgcaactttcatctagcattctagctgatcaat

SEQ ID NO: 5100 - DNA, 416 bp, Glycine max
  unsure at all n locations
agcttnttagttttagtagatgaagatgaatctgtggccacctcatggactcctctaaggataatagcatcatttcttgcactgaattgttgggagttggaagccatcttctcaatcaaattcctagcttcagcaggggtcatatcaccaagagctccaccattggcagcatcaatcatattcctatccatgttgttaagtccctcatagaaatattgaagaaggagttgctcagaaatctggtggttaggatagcttgcacacaatttcttgaatctttcctagtactcatacaagctttctccactaagttgcctgatgcctgaaatgtcttttctgatggcagtggtcctagatgcagggaagattttcttcaagaacaccctcttaatgtcatcccagctgaaaacggacct

SEQ ID NO: 5101 - DNA, 398 bp, Glycine max
  unsure at all n locations
agcttcacagaggagatagagttagggtccttnggagcggtttatagaggcacaattggtgacactaacacaagtatcgccgtcaagagattatagacaattgctgatgaaggggagagggaatctcgaactgaaattactgccattgctcgaacacatcataagaatttggtgaagctcattggtttttgcatcaatggagctaggaagcttcttgtttatgaatatgtcagcaacgggtctcttgcaagtcttctcttcaatgatgagaagcacatgtcttggagagacagactaaaaatcgccttggatgtcgctagaagagtcctatatctacatgaagagtgtgagggccgtattattcattgcagataaatcctctaaatatacttatggat

SEQ ID NO: 5102 - DNA, 419 bp, Glycine max
agcttggggagctaggaagactctctgcattattgaagaagttagagaaagatctcaagaacaagaataaatacgatgtatgttatccattcttgtggataaattcttcaaactttctgttatgggtttctttggactgtgattgccttacttttgtatgtgtattggttacctatatatggctgcaggatgagcaataccgtgccaaactaaacaagtcaaatgagaggactctatcacttatcaaagcaggaattgatactgtggtagcagtaggactgcttcaattggcacccaagacagttactcctcgcgtaactggggcttttggatttgtttcgtctctaatatcttgctatcaggtacctgctagtataattgtagtttaattccgttgtgcttctattttcctatcctat

SEQ ID NO: 5103 - DNA, 437 bp, Glycine max
agtcgctccaacaatttatatacttaactcctacctccttagccaatcttaggtgggctaagagggtttcatactcaactttattattcgtcatctcaaactcgaaccttagggattgctctaggattacttcacctatgctttctaggatgactccagccctactcccttttttcattggatgaaccatctacgtatagcttccacctctcagattatggttctgtagtggttgtcattttggctatgaagtttgctaggcactacgccttcattggacctattggctcatatttaagcctaaacttggacaacttgatcgatcaggctatcattcgactcgtgagttctggtttcttcataactgttcagatagggtggtcagttcaaaccacaatctaatgactttggtaggaagtatgggtctagtctcctac

SEQ ID NO: 5104 - DNA, 357 bp, Glycine max
  unsure at all n locations
agctnttccatctatctatatgtgagtcgataaggagtttcattggttgctatctggagtgtacagtggtacgcccagggtatgttgtagagttcttctttccataggcccttagacttatcgagtctagtacgcagggccctgaggatgactctgttagctgcctctgcttagctgttagtatgaggatgttcgacagaggtgactaggtccttgatgcctagccttgttaggaagtcttcataagtgtgagctctgaattgaggttgttgtcggtgacaatggtgtatgtgaggtcgtacctgcatatgaggggtttctaggtgactatttccacctcgttggctggtaatttac

SEQ ID NO: 5105 - DNA, 394 bp, Glycine max
agcttgagctaaaaggtttctccacataattttattaataagaggctcagttctacccactggccttttctccattaactcctttgtaggcctttctgtagctagtgccaatgctcctagagtatccataatgagatttacccataatagttgaactgttgttaggggaacgtctcccgaagaaactgctgcaataaaattgatcactagtgctgcaacattcacggttagttgaaactggatgaatttctggatgttgttatagacacatctcccccaccttaagacagtggcaacagaattgaagttgtcatctaagatcacaatgtcagaactctccttggcaacttcagttccttggatccccatagagagtccaatatcagcttctttt

SEQ ID NO: 5106 - DNA, 428 bp, Glycine max
  unsure at all n locations
tctcgagaaattcgaatggttataactnttcccacaaatgtccgattcggggacataactcatctagacgctcgaaattgaacaacgcaagctctcgagaaattcgaatggtcataacatttcgcacaaatgtccaattctgggacataatatatcaagacgctcgaaattgaatagcggaagctctcgggaaattcaaatggtcataacttttcacatggatgtccgatttgggaaaataatatatcgagatgctccaaattgaacaacgaaagctatcgagaaattcgaatggtccgaacttttcgcacggatgtccgattcggggacataactcatctagacgcacgaaattgaacaatggaagctctcgagaaatttgaatagtcataagatttcacacggatgttcgatttggggaaatatat

SEQ ID NO: 5107 - DNA, 492 bp, Glycine max
  unsure at all n locations
tattacggacacttgaatctcagcttcaagacaactctccttgttgttgtctacctcaacctctatttcatatattggcttgcctagtatagttgctactgttaataataactcttgtgtggtttccaattctgttgtttcttcttctagtactcctagcctttggcattctagattaggtcaccctaatggtcatgtaatgaaactagtcttcaatcattgtaacatttctccatcaaataaaaatttctcaggtttttgttcttctagttgtatgggaaagtctcatagattaccatctcacacttttgtttttgtttactctcctttggagcttattttcacatatttgtggggaccttctcatttgacttcatatgctggttataaatattatgtatcctttattgatgnttttntccaagtacacctggatatttcttatcaagtctaanggtgaaactctnntgttttcaagcttntaaatctatg

SEQ ID NO: 5108 - DNA, 473 bp, Glycine max
  unsure at all n locations
tcttatccaggcaattctnggtggtgaagctccttcttccttggcttattccctagtggatggtgcctcccctatcctcttctcctttgccttccgctgcatctccatggtgaaaaatcaccattgaaggacctcattgaagctcaaagatccagcctccatagaagctccacaagcaagcttccatcatgaatgaagtgatttctaatgttagtgtgtttagtcctctcatgatggacttgatccttggcaaaacaaaatgcatttagacagtggcaaaaaatgatatgcctctttttgtggaaacccaagattgctaattagacccttcagccaagttcattcctttactggttcttccaacgccatgtactctacctgtgtaatggataaagccaccatgggttgaagtgtagtcttccaactgagtagagtgttgcttccatgtncttcatctcaaattactacttagt

SEQ ID NO: 5109 - DNA, 133 bp, Glycine max
tattgcaagagaatgaatttagcacctgatcaatgaattatacaagcaacttctcaccacgatcacgctccccggatagggaggctgtctccatggcatctttgtaaggtaatccttctttgacaaacaatat

SEQ ID NO: 5110 - DNA, 432 bp, Glycine max
agcttcttagtctcagctgatgaagatgaattcatggctacttcatgcactcctctaatgacaatagcatcatttctggcactaaattgctgggagttggaagccatcttctcaattaaatttctggcttcagcaggggtcatgtctctaagggctccaccactgacagcatctatcatacttctctccatgttaccgagtccttcataaaaatattggagaagaagctgctcagaaatctagtggtgagggcaactggcacatagttttttaaatctctcccagtattcatataggctctctccactgagttgcctaatgcctgaaatatcctttctgatggttgtgatcctggaagcaaggaaatttttttctaagaatactctcttgaggtcatcccagctcgtgatggaccttggagcatggtaatat

SEQ ID NO: 5111 - DNA, 161 bp, Glycine max
agcgttgagccattgaatttctcgagagctttcgttgttcaattttgagggtctcgatatattatgcgcctgaatctgacctccgcgcgaaaagatatgaccatttgattttcatgaaagctaccgctgctcaatatctagcgtcttgatatattatgcgc

SEQ ID NO: 5112 - DNA, 412 bp, Glycine max
agcttgtgcatccaataccctgatgaggatgtcccatatgttcttaaaactggactaatccatttgcttccagagtttcatggccttgcaggtgaagacccacacaaacatctgaaagaattccatattgtttgctccaccatgaaacccccagatgtccaggaggatcacatatttttgaaggcctttcctcattctttagagggagtggcaaaggactggctatattaccttactccatggtccatcacgagctgggatgacctcaagagagtattcttagaaaaaaatttccctgcttccaggaccacgaccatcagaaaggatatttcaggtattatacaattcaatggagagagcctatatgaatactgggagagatttaaaaagttatgtgtcatttgcccgcacc

SEQ ID NO: 5113 - DNA, 415 bp, Glycine max
  unsure at all n locations
tcaagaattatggcctcatcaaactacttgtttcccgagggaaattctataaatagacctcccatctttaatggagtgggttaccactactggaaaacccgcatgcaaatctttatagaggcaatagatttaaatatttgggaagccatagaacaaggaccttatgttccctctatagtggccggaagtgcaacaatagaaaaacctagagcagattggactgaggaagaaagaagattagtacaatataatttaaaggccaaaaatattattacatctgccctaggaatagatgaatactttagggtttcaaattgtaaaagtgctaaggatatgtgggatacactacaagtaacacatgaaggcacaacanatgttaaaagatctaggataaacactttaactcgtgaatatg

SEQ ID NO: 5114 - DNA, 271 bp, Glycine max
agcttaagctccttcaactgcacaaggctcttaatatttgaagagtatccttgtggaaccttcacccgatgaagacactgacaaaaaattatcttctacttcttggacaaagtatggcaggctgggggcaagtaaattttcttcccatcagaccttggatgcaattgtgatcgtatacccatatcagctagatcttgacaggtattcaagccatccttcgtcttgccttgaatgttaaggagcgtcccaatcacactttcacaaacatttt

SEQ ID NO: 5115 - DNA, 386 bp, Glycine max
agcttcaagaataatggtctcatcaaacttcttattcctagaaggaaattcaattaataggcctcctatttttaatggagaggattaccattattggaaaacccgaatgcaaatcttcattgaggcaatagacttaaacatttgggaagccatagaagtagggccttatgtacccactatggtggctggaaatgcaacaatagaaaaacctatagaagagtggactgaagatgaaagaagattagtgcagtacaatttaaaggctaaaaacatcattacttttgccctaggaatagatgaatattttagggtttcaaattgtaggaatgctaaggatatgtgggacactctacaagttacacatgaaagcacaactgatgttaaac

SEQ ID NO: 5116 - DNA, 436 bp, Glycine max
agcttcttatccaaagctcatcttggtggtgaagctccttcttccatggcttattccttaatggatggcgcctcctctcacctcctttcctttgtcttccgctgcatctctatggtggaaaatcaccattaaaggaccccattgaagctcaaagatccaacctccatagaagctccacaagcaagcttccatcatagggtgacgaaagtggtcttttccacatcttcgggtgccatttttatttggttataccctgagaaaccatccataaatgagaaaagggcgaacttagctgtattatctactagtatatcaatgtgtggtaagggaaaattgtctttaggactggctcggtttaaatcccgatagtcaacgcacatttgcactttgccatctttttttgggacagggacaatgttggctacccactccgggt

SEQ ID NO: 5117 - DNA, 428 bp, Glycine max
  unsure at all n locations
tcttaacattcaaggcaagacaaaagatggtttgaatactcatcgagatctagctgggatgggtatacgagaccagttacatccaaggtctgatggtaagaaaatatacttgcctctagcttgtcatactttgtctagaaaggagaagataagtttgtgtcattgtttttgccatgtcaaagtgtctcggggattctctggaagcaatgtcttccaaggttattttgatgatgtcaaagaatcaagagttaagcaaagtttcaagcaaagattcaagaatcaagtttcaagattcaagactcaagaatcaagtttcaagaatcaagattcaagaataatcaagatcaagattcaagactcaagattcaagaatcaagaagaagactcaatcaagataagtattaaanagtttttgaaaacattgagta

SEQ ID NO: 5118 - DNA, 438 bp, Glycine max
agcttttccatctagctatatgtgagtcgataaggagtttcattggttgctatctggagtgtacagtggtacgcccagggtatgttgtagagttcttctttccataggcccttagacttatcgagtctagtacgcagggccctgaggatgactctgttagctgcctctgcttagctgttagtatgaggatgttcgacagaggtgactaggtccttgatgcctagccttgttaggaagtcttcataagtgtgagctttgaattgaggttgttgtcggtgacaatggtgtatgtgaggtcgtacctgcatatgaggggtttctaggtgactatttccacctcgatggctgtaattttacgaagtgatcttgcttttatccacttggtaaagtagtcgatggctactagtaagtatttgacagctcttgcggattatggca

SEQ ID NO: 5119 - DNA, 372 bp, Glycine max
  unsure at all n locations
agcttaactctcaaattccncttcatcccatgctcttttgatataggcattccttcattagggacaacaacctcagcaccaggtttgacaatatctgtcaatgggatcatgagactccttccgtccaaggtggtgagatccaacgttttaccagtaagggcctcaagaagggttatctcttggttgatcaccaaatcattaccatcccttctataaagagcatgcggcttctcatctatcacaaaaatgagatctgctgggatgacaccaggctcacggttacctttctctgggaaggtaatttttgttcctttcttccagccaggttttatctcgatagtcaaaatctcctccacatccccacatttgctg

SEQ ID NO: 5120 - DNA, 464 bp, Glycine max
tagtaaagctaagcactaacaatctcctctcttggcagaatttgtctaaaacatacttagacacttcctgagcaggtacgagcagttatgcaagtgggatcagcaacttccattatcagagtaatcaagcacagcggaatctgtagtctagacaagttgcaagtcgtttccaggatgtcaagacatctcacatgacatctgctttctgcttctgctccccctgtctccatgcttactgcagcatcttctatcagctactagtcttttccaggatgtcaagacatctcatgtgacatcagctttctgctccccctgtcttcatgctcttactagtagcttacatcagtcatcattggcagcagtctccccctcaaagtcatatacatacaactccccctcaaaatcatgaatcatgcatacatcgtatcctactgccatacatcatacatagtatcctactactc

SEQ ID NO: 5121 - DNA, 416 bp, Glycine max
  unsure at all n locations
agctngatccctcaaaaaaggataacgttaatgaaaatagtgaaaacaaaataattaaagagatagtttaccttgatgtggtttttgtagtatcccttcaccacaggatttgtaaaaaagtcatcctcagaatttatggactgtccctgactccttgcccattccacatactgtttctttccacccatgttctcatagttattcaccaaactcaacaccatcttgatcccatattttcttgcttcggctattgcgaaatccaagccctttttatttccaatccaagaaaacaacagagttaacaaatgggaaatgaagttttgttctatacactattagaaaaaatacaattagatagaaaaaaaaagtaattttccgtcactaaatttgatcattaatccattggtatgaaaatg

SEQ ID NO: 5122 - DNA, 451 bp, Glycine max
  unsure at all n locations
nntgcttncattgtagccacttaacctcaggacttattgagggtgatgaattaagaagaaattctgatgtgatggagattcttaagaagacaaggtttctacgtgtacatgatgctgacaatgagaagtctcccgagacaatcctcgagcatgagtatgaatttacttgcatacatcttagtataactaatactcttaacatgtttatgtaatttgaggccctccttgcattttcctgttttgcattacatgttctaattttggatccatttattttagtcgaattatatggcttggagacttgaattatcggattgccctctcctaccgttttgctaaggcacttgttgagatgcaaaactggagagcattgttggagaatgaccatgtacgcctatataactctgttcttttaatatctaattttctatcttttaacttcaactggatt

SEQ ID NO: 5123 - DNA, 426 bp, Glycine max
agcttatgttgcaaacatctacaatagacctcttcaacctcagcagcaaaatcaaccacaacagaacaattatgacctctccagcaacaggtacaatcccgggtggaggaatcatcccaaccttagatggtcgaatccttcacaacagcagcaacaacaaaaacagccttattttcagaatgctgctggcccaagcaaaccatacgttcctccaccaatccagcagcaacaacaacaacaacaatagccccggaaacatcaaacagttgaggcccctccgcaaccttcccttgaagaacttgtgaggcaaatggctatgcaaaacatgcagtttcaacaagagaccagagcctccattcagagcttaactaatcagatgggacaattggctacacagttaaatcaacaacagtcccagaattctga

SEQ ID NO: 5124 - DNA, 343 bp, Glycine max
  unsure at all n locations
agcttatacgacctatgatgtggttntgtgactaaattcaatttagacacaagtctttcacttgccatattggtacaactccctccatcaatgatcaccatgcaaactttgccattgatcaaacatctagtgtggaaaatgttttctctttgactttcctccatagatttcaattgatggccaagtaaccgcctaatcatcaacaattctccctccggtgttttctccacttcctcctcatcatcctcactctcttctcccttttcaacttcggactcactaatgtaatctccatctctaagaatcatggctntcttgttagggaactcatatagcataatgt

SEQ ID NO: 5125 - DNA, 348 bp, Glycine max
tgacgatccctgtttatacatcaaaagcaaacatattggtgacaaaaatcactacataaaaaagataaatcataaaaaatgcgaataaataataatctaaaagatttaaaccagataaagaaactaccaccttctataaaatccaacaaaagtaagtcggttatcaatataaagatttttatatcaactaataataaatccttctagatataatccacctgttgttagggtcaatctcaagcgctttcttaatatcaaattcggccaagtctaaatcagccaactggatatatgcctgggcccttctatagagagccttcacattagtactctcaaggtccagtacct

SEQ ID NO: 5126 - DNA, 430 bp, Glycine max
ttaagtcacctgcggcatgcaagcttccagattagtgtaccaaatgaccgctgctccagccaagctatcttggaaaaagtgcattaacaacttttcatccctagaatgcacccccatcttgcgacaatacatcttgagatggttcttaggacaagtcgtccctttgtacttgtcgaaatcaagtaccttgaattttggggggatgacgacgtctggtactaagcaaagattcgccatgtccgcgaacggataatcaccaaagccttcaacagctctcaatctctctttgatgagatcgagtttccttctttcttccgttgccggggatggtccttctatggacaagaatattggctgtgctgggaggttgggctgaggcagtatgttgggtgccggcccctcgatggggaccagggggtagaaatcgatg

SEQ ID NO: 5127 - DNA, 416 bp, Glycine max
tatacttcatcactagattgctgatgtgcatttccagcactgtcgctgcgtggaagttcatctcttacaaacactgctcagaagcataagccagggcttggatacagaagcgcaaacactgctatcttggactgaggcaaccttttaaagatctcacataggcattcatctggcaaagactcaatagatgtcttatgcttctgctcaaaccattctccactgatatcaaatggaacactgaagcgagacctcttctgaagaggaaggataacatgaacttgactgtcaagagacaagatgagacacggctccttcgggttaggataaataggaccaccatgactacaatcatcattttctgacaaaccaaacatgtctaaagtcaagatggcgacaaaactgcacataaataaata

SEQ ID NO: 5128 - DNA, 435 bp, Glycine max
  unsure at all n locations
ntggagtttccaagtgccaattcgtcttcttctttagtccagtcttcttctggcttcaattcatcagtgggctttccttctgtgtccagcatcttgggatgttcccagcctttgatgacagctttccaggttctgctatccagtgatttgaggaaggccaccattcttgctttccagtattcatagttggttccatcaagaattggtggtctgttcactggtcctccttctttctccatgttcatcagaatttatctccctagatctcactctgtgatttcgagtgttggctctgataccaattgaaattctgataccaggggacagatgtcgtaccggatgtcacgacatcacgcttcagaacatgcagattagatgcgtccgtatgaacagattaaacaagtnaataacacaagaggattgttaacccagttc

SEQ ID NO: 5129 - DNA, 438 bp, Glycine max
agctagaactcttgcacctccttgaagatcaactcatgacttctcccaaactttggctgcataaaccttctttggcccaccatctttggcctccaaagtgatggtgtacaatgaaccagaaaccacttgctgtttcgcagttaccaccttttcaaactccaaaagggcattctgcatagccatttacaattcaataaaaataaaatataattcatatataccacagaataaaaagataatagaagcccgttcgtggttattgaaattgaccctaccaatctatttattccttgacagtaatggaaatgcaaatttatcctaacaatcaattaatttttggtgaacaaaattttgggggaggggtgatgccccagaacaagacagataaagcctccgagctcaaagaacattcacagaagaacttacatttaccccact

SEQ ID NO: 5130 - DNA, 459 bp, Glycine max
  unsure at all n locations
ctatctactactcaagcttatgctgcaacatctgcgatgnacctgctaaacctcagcaacaaaatcagccaccacagaacaattatgacctctgcagcaacaggtacaatcccgggtgaaggaaccatcccaaccttagatggtcgaatccttcacaacagcagcaacaacaacaacagccttattttcataatgctgctggcccaagcagaccatacgttcctccaccaatccagcagcaacaacaacaacaacaacaaccccaaaaacagcaaacagttgaggctcctccgcaaccttcccttgaagaacttgtgaggaaaatgactatgcaaaacatgcagtttcaacaagagaccaaagcctccattcagagcttaactaatcagatgggacaatttgctacacaattaaatcaacaacagtcccaaaattctgacagattaccttctcaatctg

SEQ ID NO: 5131 - DNA, 426 bp, Glycine max
  unsure at all n locations
taagctccttcgactgcacaagactcttaatatttgaagagtatccttgtggaaccttcacccgacgaagacactgacaaaaacttatcttctcctttttggacaaagtatggcaagttgggggcaagtaaattttcttcccatcataccttggatgcaactgtgatcgtatccccatatcagctagatcttgacgggtattcaagtcatccttcctcttgccttgaatgttaaggagcatcccaatcacactgtcacaaacatttttctccacatgcataacatcaatacaatgtctaacgtctagattagaccagtatggaagatcaaagaanatggacctctgcttccatatgcaactcttacttttatccttcttttgggtctttccaaatacagtattcaggtgttgaacccgctgatata

SEQ ID NO: 5132 - DNA, 413 bp, Glycine max
  unsure at all n locations
tcttagtttcagatgatgcagatgggtntgtagctacctcatgcactcctctaatgactatggcatcatttctggcgctaaactgctgggagttggaggccatcttctcaattaaatttctggcttcaacacgagtcatgtctccaaaggctccaccactggcagcatctatcatacctttctccatattactgagtccttcataaaaatattggagaaaaagttgttctgaaatctgatggtgggggcaactggcacataatttcttaaatctctcacagtactcatacaggctctctccactgagttgtctaatacctgagatatccttcctgatggctatggtcctggaagcatggaanattntttctaagaatactctcttaacgtcatcccagctcgtgatggacctt

SEQ ID NO: 5133 - DNA, 429 bp, Glycine max
ctgttttcaatcttgtgcatctcgatatattacaggtctcaatcagacatccgagtaaaaagttattgttgttagaagttgcacagagcttcagttttgcattttgagggtctcgatatattacgggactcaatcggacatctaagttaaaagttattgctgtttgcatttgcttcgagctttcattttcaattacgagcgtctcgatatattacaggactcaatcggacatccgagtaaaaagttattgtcgttagaatttgctcatagcctctattttcaattttgagtgtgtcgatatattacgggactccgtcgtacatccgagtaaaaagtaattgtcgttagaattttctcaaagcttctgttttcaatttcgagcgtctcgatatattacaggactcaatcggacctctgactcaaaagtta

SEQ ID NO: 5134 - DNA, 440 bp, Glycine max
  unsure at all n locations
cggttacctccttcttcactacatcaagaattactgggttgcgtcttctctgtggttgtcttactcgtttagccccatcctctaaatttatccgatgcctacatgtggatgggctaataccaggaatgtctgccagggtccagcctatagccttcttatgcttcttaagaactgataacagcttctcctcttgctcatcaacaagggaggcaaatataattactggaaaacttttgctctcatctaagtaagcatattttaaatttgatggcagaggcttcaattctggtgtgggcggctggatagtggtagaaagagatggtttctcagcctgtacctcataaagaaagtcagaggtacgtgtacttcctgaaacatggttagttctatctgactntataaaatcaatctcaagaggtaaaacatcagacatgtgatca

SEQ ID NO: 5135 - DNA, 422 bp, Glycine max
  unsure at all n locations
tcaacattcaatatcgagcgtttcgatatgttacgggactgaatcagacatccgagtaaaacgttactgtagtttgaaggtgctcagagctaaggcattcaagtccgagcgtctcgatatactacgagactcaatcagacatccgagtaaaaagctattgtcgtttgaatttgctcaaagcttcggtattcaatttcgagcctctcgatatattacaggactccatcagacacccgagtaaaaaagttattgtcgtttgaatctgcttggagcttcaacattcaatttcgagcgttccgatattttacaggactcaatcggatagccgagcaaaaagttattgtcgtttgaatttgctcagagctttngtattcaatttccagcatttggatatattacgggtctcaatcagacattcgatt

SEQ ID NO: 5136 - DNA, 349 bp, Glycine max
agcttgccgccacagagttttccgactatgctcttgtgtggtggaacaagctacaaaaggagagagcaagaaatgaagagccaatggttgatacatggacggagatgaaaaatatcatgaggaagcggtatgtgccggctagttactcaagggacttgaaattcaagctccaaaaactaacccaaggcaacaagggggttgaggagtatttcaaggaaatggatgtgctcatgattcaagcaaatattgaagaagatgaggaggtaactatggctcgatttcttaatggtttgactaatgatatccgtgatattgttgagctgcaagagtttgttgaaatggattattt

SEQ ID NO: 5137 - DNA, 417 bp, Glycine max
  unsure at all n locations
agcttcatacttgcaacanaggagttgagcttgtaaaaaagattcgtcttcaaactcttagaggtgactntgagcatttgtttatggaggagtccgagtcaatttctgattatttttctcgagtattggccgtagtcaatcaacttaaaagaactggtgaagatgttgatgaggtgaaggtcatgaaaaaaatacttcgaactttaaatccaagttttgacttcattgttaccaacattgaagaaaacaaggatttaaagaccatgactattaagcaactcatgggctccttacaagcatacgaagaaaaacaaaagagaaaaattaaacaaaaggaggctacggagcaactactacaactcaacgtataggaagcaaactatgcatattacaagagccaaagaggacgaggtcgtg

SEQ ID NO: 5138 - DNA, 436 bp, Glycine max
  unsure at all n locations
agctngtaggttaagtgacagtgattggactggagatgaagatgatcggaaaagtactagtggatttgtgtttttcatgggggaacacaaccttcacttggatgtcaaaaaattagtcgatagtcactctttcaacttgtgaggcagaatacatagcaactacttcatacatttgtcatgcagtctggcttaggaatttgttaaaaaagttgggcatgtcacaagaatagccgaccaagatctttgttgatagtaagtcagccattgttcttgcaaagactccagtgttccatgatcgaagcaaacatattgatacatgttaccactacataagggagtgcatagcaagaaaggatgtacatgcagaatatgtgaagtctcaagaccaagtagctgacatcttcaccaagctgctcgagtaagaagacttaatcaa

SEQ ID NO: 5139 - DNA, 409 bp, Glycine max
gagcgtctcgatatattacgggactcattcagacattcgagtaaaaagttattgtcctttgaatttgctcagatctttgaaattcaatttctagcatcttttatattacgtgactcaatccgacatccgagtaaaatgttattgtcgtgtgaatttgctcagagctttaacattcaatttctagcatctcgatatattacgtgtctcatccgacatccgagtaaaaagttattgtcgtttgaatttgctcagagctcattattcaatttctagcgtctcgatatattacgggactgaatcagacatccgagttaaaagttattgtcgttacactatgctcaaaacttcaacattaaatatcgagcatcttgatatattacgggactcaatcatacatccgagtataaag

SEQ ID NO: 5140 - DNA, 437 bp, Glycine max
tgttgtcattaaatcttacatgaattgcctcttccatagtcaaggtttttgatttgtacactctatatgccttggatgattcaaagtatccaatattccaaaatcacattttgagtcaaactttccaaggttatccttggtgttgaagatgaaacactggcatccaaatgggtgaaagtcagaaatgttgggcttatgtccctcccacaattcataggaagtcttttttaagattgaccttatataaattatgttctgtaaataataagcagtgattgctgcttcagcccataagtgtttcagagttaagtagtcgttaagcattgttcttgccatttcctgaagagaatccattttcctctcaacaactccattctattgtgatagtcttggagtagaaacaatattatgaataccattctcttcatagaattttt

SEQ ID NO: 5141 - DNA, 419 bp, Glycine max
  unsure at all n locations
agaatcggacatccgtgtgaaaagttatgaccatttgaatttctcaagagcttccgttgttcaatttcgatcctctcgacatattatgcacccgaatcggacatctgtgtgaaaagtcatgatcatttgaatttctcgagagtttccgatgtttaatttcgagcgtatcgatatattataaccctgaatcggacctcagtgtgaaaagttatgaccatttgaatttgacgagagcttccgttgttcaatttcgaatgtcactgtatgtgatgcgcctaaattggacattcgagttaaatgttatgaccatttgaatntctcaagagcttccgctgttcaattctgagcgtctcgatatgtgatttgcctgaatcggacatccgtgtgaaaagttatgaccatatggaattctcaagagc

SEQ ID NO: 5142 - DNA, 421 bp, Glycine max
tcttgagtgggaagcacaatgagcctataaacattgtgcattatgctgacgacacggtctttgttggagaggcctcttgggataatattctagtgttgaaatccatgcttaggggatttgaaatggtctctggtttgagaatcaactatgcaaaaagccaatttgggggcgtcggttttcaggccaattggactcagcaagcagcccaattcctgaactgtagacagttggatacccctttctactatttatgcatgcctattgctgttaaagcttccaacatggtggtttgggagcctttgtttaacaaattacaagccaagctctcatagtggaatcagaaaattttgtctatgggtggtaaggttaccttgataaaagctgtcctgagtgcactcgctatatatcttctatctttctt

SEQ ID NO: 5143 - DNA, 321 bp, Glycine max
agctataccagctggtttattacaacctttttccattccacaaagaatttgggaggacattgctatggatttcatcactaatctacctccctcacgcggttatgctactatatttgttgtggtggatatactttcataatttgctcattttataccattgaaggctgcttttaatagcaaatctgatgcagatgctttcatttctaattatgacaagatgcatgggtattcaaatacattagtctttaatagagatcgtatttttatcatttcatttcggcagcagttgctcatagcacatggaactatataggctatgat

SEQ ID NO: 5144 - DNA, 410 bp, Glycine max
cggaagctctcgagagattcaaatggtcttaacttatcacatggaagatcgattaatgcgcataatataccgagacgctcgaaattgctcaacggaagccctcaagaaattcaaatggtcatatcttatcacacggaagtccgataaaggtgcatagtatattcgagaatcttgaaattgaacaacggaagctgtcgagaaattcgaatcgtcataacttatcacacggaagtccgattcatgcgcataatatatcgagacgcttgaaatagaacaacgaaagctctcgagaaatacatgtggtcataacttttcaacggaagtccgattaggtgcataatatatcgagacgcttgaaattgaacaacagaagctcttgagaaattcaatcgatcattacttatcacacg

SEQ ID NO: 5145 - DNA, 287 bp, Glycine max
agcttgatattgaacaacagaagctcacgagtatactacattggtcataacatgtcacacggaagtccgattcatgtgcataatatatcgagacgctcgaaatagaacatcggaggctctcgagaaattccaatggtcataacttgtcacacggaaggtcgattcaggcgcataatatatctagaagctggaaattgaacaacgaaagctctcgagaaacacaaatggtcataacttgtcacacggacattcgattcaggcgcataatatatcgagacgctcgaaat

SEQ ID NO: 5146 - DNA, 373 bp, Glycine max
  unsure at all n locations
tcatctatnttcctttagtttctgttacgtgatctctccgttttctaacttgaatatcaatatagacagtaataaacacatttaaatattaaatagtaatacctgagacaggaatttatatagcgattccccttggtagctgcatcaagcactgcaaaaccacaaaatatgaatgattattatgattttttttatgaatttttaattagagagagatgtgattgggaaattacagcaccagattcctgaaggcgaccggtggcatcggtgaagcactgcatgtgatggaaagaggtggatgtggattcggagagggccaatcggagggaagcgaagagagaagtgaaactctgagcgatggccaacgagtctc

SEQ ID NO: 5147 - DNA, 377 bp, Glycine max
tggaaggtagtcataccttacaaaacatatatatgtatgtttaggtagtgaaaataccttagatatgcatgtatgtaaacaaaaaaacacttcacaaaatatatatatgtatgtttaggtagaaaaataccttagatatgcatgtatgtaaacaaaaaacacttcacaaaatatatatatgtatgtttaggtagaaagataccttagatatgcatgtatgtaaacaaaaaatacttcacaaaatatatatgtatgtttaggtagaaagataccttggatatgcatgtatatagcaaaaataccttacaaaacatatatatgtatgtttaggtagcaagataccttggatatgcatgtatatagcaaaatacctcatg

SEQ ID NO: 5148 - DNA, 344 bp, Glycine max
  unsure at all n locations
agctntatgataggagtgtgaagcatgtgttcattggttatgatgcaagttcaaaaggctacaagttgtacaatccatacaatggaagattgttgtaagcataaatgctaaatttgatgaagaagagacatggaattgggagaaaaaagaagccccctatgatttattttcttattttgaagaaaatgatgaattaagtgtagcaccaaatgagatttctactccacctcctatacaaactcattcaattcatgaagcatcatcttctgaagggagttaaagtgaaagaccaagaaaaatgagaagccttctagacatatctaatggattgtttgaggtttatt

SEQ ID NO: 5149 - DNA, 410 bp, Glycine max
agcttaactctcaaattccccttcatcccatgctcttttgatataggcattccttcattagggacaacaacctcagcaccaggtttgacaatatctgtcaatgggatcatgagactccttccgtccaaggtggtgagatccaacgttttaccagtaagggcctcaagaagggttatctcttggttgatcaccaaatcattaccatcccttctataaagagcatgcggcttctcatctatcacaaaaatgagatctgctgggatgacaccaggctcacggttacctttctctgggaaggtaatttttgttcctttcttccagccaggttttatctcgatagtcaaaatctcctccacatccccacatttgctgaaatggaattgcatgtgtcaaatattgtcaaaaaacac

SEQ ID NO: 5150 - DNA, 431 bp, Glycine max
  unsure at all n locations
agcttcctcttatgagtgcatagctctttcataaatttagcatatcttggaatatgctttattgcatccagtagaggtatgtttacctctactcttctaaatgtttccaagatctccttctccgcctcttccattttcttgttggaaattgctcttggtgggaatggaagagggatatgctactactgtaagtcagaattaccagtagaagattcacctgcatagaaattgttaggcaacttactctttaaatttttgtcatcatctttctctggagttgagtgaggttgggcaggttcatttgcagatgaggaagatgctactagttgaggtccttgatactgttttcccaacctcaatgtaattgcactcacanttttgggattctgtacagattgagaaggtaatctgtcagaattctgggactgttt

SEQ ID NO: 5151 - DNA, 433 bp, Glycine max
tctcagatctggtcatggaaagacttggctactgccttcattaggaagtaccaatacaacacggatatggctcctgatcggaaccaacttcagagcatgaccaaacgggaacatgagtccattaaagaatatgctcaaaggtggagagacctagcaatccaagtcatcccacctatgacggagaaggaaatgatcacaattatgataaatacgttgcctacgttctactacgagaagctgataggatatatgccggctaactatgcaaacctcgtctttgccggagaaagaatcgagtccggactgaagaaaggcaagtttgaatatgactccaacgctgcccccacaacaatagaagagccccattggtgggcacacgcgaaaaggaaggagatacccacgcagtcaccactcgcccaacatggatgaaaac

SEQ ID NO: 5152 - DNA, 394 bp, Glycine max
agcttaaaggaagtgaacgaattagtatggtcagaaatgtctccgcattgattggtaaatctgttcctcaaattcctgaaaaatgcacagatccaggtacattcagcataccttgtattatagggaatagtaagtttgacaatgccatgctagatttaggagcctctgttagtgttatgcctctgtcgatttttaattctctatctctaggtcccttgcagtcaactgatgtggtaattcatttagctaatagaagtgttgcctatcctgttggtttcatagaagatgtcttaattagagttaatgaactgattttccgtgttgatttctatatcttgaatatggaagatggattttctcaaggatcacgtcccatcattctaggcagaccgtt

SEQ ID NO: 5153 - DNA, 426 bp, Glycine max
  unsure at all n locations
ntgagccaattcaaacgacaataactntttactccgatgtctgattgagtcccttcatatatcgagacgctcgaaattgaatgctgaagctctgagccaattcaaacgacaataactttttactcggatgtctgattgagtcccgtaatatatcgagaccctccaaattgaatgttgaagctctgagccaattcaaacgacaataacgttttactcggatgtctgattgagttccgcaatatatcgagaccctcgaaattgaatgttgaatctccgagccaattcaaacgacaataactttttactcggatgtctgattgagtcccgtaatataacgagacgctcgaaattgaatgttgaacctctgagccaattcaaacgacaataactatttactcggatgtctgattgagtcccgtaatatat

SEQ ID NO: 5154 - DNA, 361 bp, Glycine max
agcttcaacattcaatttcgagtgtctcgatatatgacgggactcaatcagacatccgagtaaaacgttattgtcgtttgaattggctcagagcttcaacattcaatatcgagggtctcgatatattgcgggactcaatcagacatccgagtaaaaagttattgtcgtttgaattggctctgagcttcaacattcaatttcgagagtctcgatatatgatgggactcaatcagacatccgagtaaaaagttattggcgtatgaattggctcagagcttcaacattcaattgcgagggtctcgatatattacgggactcaatcagacatccgagtaaaaagttattgccgcttgaattggct

SEQ ID NO: 5155 - DNA, 415 bp, Glycine max
agcttaataaatctatatatggtttaaaacaagcttcccgtcagtggtaccttaagtttcatgggataatttcttcatttggttttgaggaaaaccccatggatcaatgcatattccacaaggtcagtgggagtaaaatatgtttccttgttttatatgtagatgatattttacttgcagccaatgatcggggtttgctacatgaggtgaaacaatttctctctaagaattttgacatgaaggatatgggtgatgcatcttatgtcatcgacattaagattcatagagatagatctcgatgtattttgggtctatcacaggaaacctatatcaacaaaattgtagagagatttcaaatgaaagattgttcaccaagtgttgctcccattgtgaagggtgataggtttaatttgaa

SEQ ID NO: 5156 - DNA, 428 bp, Glycine max
  unsure at all n locations
agctngaaggtgtgtaacccaccattttccatagtataatactggtaatgtgtctactatcagtgttatcattttttctccgtcattgaggtgccacttgagctgccaggtctctccacctttgggcgtattctttgaatgatctgtgcccctttttgcacatgttctatagttgcatcctatccgaagacattatactagcactgcctaacgaaggcaaccagtaggtccttccaagaatggactcgagaaggttccaggttagtgtaccaagtaacagctaccccagtaagactctcttggaaggcatgtatcaacaattcctcatcttttgcgtatgcccccatcttccgataatacatctttatatggatcttggggcaagtagtccgcttgtacttgtcaaagtccaacaccttgaacttggg

SEQ ID NO: 5157 - DNA, 289 bp, Glycine max
cgcataccaaatgttcaccactactagaggatataccttcttcatgttgcatatgaatctcctcctctaaatcaccattctgaaagactattttcacatccatttgttgcaactcgaggtccacatgagcaactaataccaagatagtctgaagagaatctttcttagatataggagaaaaagattgtgtgtagtcgattacttctatttgagtaaattctttagcaacgagccttgccttgtatctctcaatgttgcctaatgaatcccttttggccttaacgactca

SEQ ID NO: 5158 - DNA, 431 bp, Glycine max
  unsure at all n locations
tcaacatcagaccacttccagggtgctggaactacttcacatggacttgatggggcctatgcaagttgaaagccttggaggaaagaggtatgcctatgttgttgtggatgatttctccagatttacctgngtcaactntatctgagagaaatcagacacctttgaagtattcaaagagttgagtctaagacttcaaagagaaaaagactgtgtcatcaagagaattaggagtgaccatggcagagagtttgaaaacagcaagtttactgaattctgcacatctgaaggcatcactcatgagttctctgcagccattacaccacaacaaaatggcatagttgaaaggaaaaacaagactttgcaagaagctgctatggtcatgcttcatgccaaagaactttcctataatctctgggctgaagccatgaaca

SEQ ID NO: 5159 - DNA, 375 bp, Glycine max
  unsure at all n locations
tgctcttctgctgtcaaatatgaacttcagttcatcttctgctcatgtactaacanagaancttgcaattcatcaagggagggtgcatctatatctttggactcttcaattgcacaaacaacataatcaaacgttggtgttacggatcgcaaaatcttttctacaatggtgacatctttcatcttctcgccatggaatcacatcatgtttcttatctccattgttcttgcaaaatagctagaaatagattcaccatccttcattgctaatgtctcaaaatctcttcttaagctctgagctgtgcacgcttcactctagcagaaccttgatactttttcttcatagaatcccanatgtccttgaaagtttctctgc

SEQ ID NO: 5160 - DNA, 359 bp, Glycine max
agcttgtaatcgattacacatatactgtattctattaccagagcagattttcagaatatattctcaacagtcacatctttttacgtggttcttgaatggctatcaaaggcctatatatatgtgacttgagacacgaatttgctaaaagtgttttagaacaaaaaggtcttatccttcttatagagcaaaatcgacttatcctcttacaaattccttggccaaattacttgtgattcaataacgaattatttgagtgctcacattgtacaatctatctcttttaagagagagtacttgttctcttcttcttcattctgaaaagggattaagagactgagggtcttcttttgggaaagaat

SEQ ID NO: 5161 - DNA, 423 bp, Glycine max
  unsure at all n locations
agctnnttagaaatattttaataagtattagaaaataatattactagagattaggtgtgttaaagttagttggactattttgtatacagaaatattttatataaaggacgtcgaagtattgcttatattcttaattatatatttcttatattctaaaaaatgtgtgagattaatttctttattattcaatttataaattatttgaaatacatgcatggatcggaatgcaagttgaatacccaaaatgttagttatataaacataaaatggtttataacacttctattacttacttgacttaatgtttaacactttaactaaaggatatttcaaaaagtgtcaatgaataaacaaatagataagatcacgttcgagttctttaattactcggaagtgcacaacagaaagtangtttgactgttg

SEQ ID NO: 5162 - DNA, 439 bp, Glycine max
tgtgttgcaaaagttggtggtattcatacaaagatgggtttgagcttagatgtcattactaggtggaattctaattttgtgatgcttgagagtgcccttgtatattgatgtgctttttgtagtcttgcaattgatgataggagctattcaagttgtcctattaatgaagaatgggagagaggacaaaaaatgtgtgattttttgcatcctttttttcaaatcacagagttgatatctggttcctcttacccaatgtctaatttgtatttcatgtaagtgtggaaaattgaatgtttattgcttcaaaatttgagtaataaagatgagttgattagaacaatggcaattgatatgaaaacaaagtttgataaatattggagtgattatagcaatgtgctttcctttgggtgcattctagatccacgctctaaaataaaaa

SEQ ID NO: 5163 - DNA, 440 bp, Glycine max
cgtcttgacatattagaagtttatacacatgataaaaacattctgaagaattgcttatgattaatagcatgttttcgttatatttcttttaataaaaagagattttaagtgaattagtaattagtgaggatagaagtaaaaagaaaaaaagaaaaaggaaaaaagccagtaatatgtaagttataagctagttgaagtaataagccaaaaattacataaataaaatagcataatgtatatctaataaatttattttgattaaaataactagtcaaactaacttatactagagtgttgtgttaaacacaattggaaaaaattgttgacggtaattattatttaaatacgtttatgatttatattattatcaaaaattataatcttaatagaaggaaaaaaacaacaccttaatggtttaaagctattgaaagcaaagaaaa

SEQ ID NO: 5164 - DNA, 435 bp, Glycine max
tgttcttaagcaaaagctaactaatgcccccatacttgcgttgccaaactttcaaaaatcttttgaaattgagtgtgatgcttcaaatgttgggattggggctgtgttgatgcaagaaggccatccaattgcttattttagtgaaaagttaagtggtcctacccttaactattcaacttatgataaggagttgtatgccttagtacgggctttgaaaacatggcaacactacctttatcccaaggaatttgtcattcatagtgaccatgagtccctcaaatatatcaaggggcaaggcaagcttaacaaaaggcatgcgaagtgggtggaattcctatagcaattcccttatgttatcaaacataaaaagggaaaaggtaatattgtagccgatgctctttctcggcgtcatgcattactttctatgcttgaaac

SEQ ID NO: 5165 - DNA, 397 bp, Glycine max
agcttgaaattgaacaacggaagctctccagaaactcaaatggtcataacttatcacacggaggtccaattgaggcgcataatatatcgagacgctcgaaattaaacaacgaatactctcgagaaattcaaatggtcgtaacttatcacacggaagtccgattcaggtgcataatacaccgagacgctcaaaattgaaccacgaatgttctcgagaaattcaaatggtcataaattttcaaacggcagtccgatttaggcgcataatacatcgagaatcttgaaattgaacaacggaagctatccagaaattcaaatggtcgttactcgtcacacggaagtccgattcaggcgcataatatatcgagacgctcgaaattgaaaatcggaagctctcg

SEQ ID NO: 5166 - DNA, 461 bp, Glycine max
  unsure at all n locations
ggatccttaagtcacctgcggcatgcaagcttcanattatggtggttcagccgaacagtacgaggctgcagaagatcaatttacaaaattgtgaatattatgacatcaccaacatcatatacatctgcaaatttcttgtgagtagatcaaattcattctgcccaaaattttagcacaactcaaagtgtgcagactgcagaagcaagccatacctgaaaaagtgtcattggaaaagagtggtgaatttccctgcctttgatttcatctggcacaatgtttctactaatggatatgttaaggtaactatacatcaaagccaaaaacttggcaatgaccaaagcttcataacattctttaactgactccaaaaaggtgaaaaactccttgcttcctctgatatccaagagacccacaaaggagacagctgcatagattggagccatgaggatgataatgataat

SEQ ID NO: 5167 - DNA, 409 bp, Glycine max
  unsure at all n locations
ntaccctctcttataacatgcagaattcgaaaattccactacataaagacaaatgatctaatatggttgaccagatgagcataaatatgacaggaactcactccaagggaaatcatgtccacaacaagctnggagtcatattcacaaatgatgcttgtaacacccttatcccacgcaatctgcaacccttgagcaatggcaagcaacttcgcattcagactcattgtgaagcggcaacaaccaaaaaaactgagaaatcaattacccaaattatcacgaatcaatctgtcaattccagcctgactcggattgcctaaggagcttctatcagtgttgagtttgtaatcaaaatcaaccggaggagaccaacacaccatacgactaggaagacttgagatattgtgatgag

SEQ ID NO: 5168 - DNA, 424 bp, Glycine max
agctttagaactagcatgatatgccatgaattcttcatacacactttcaagatcaggagctctttcttcttcataattgaaattctgataccaggggacagatgtcgtaccggatgtcacgacatcacgcttcagaacatgcagattatatgtgtccgtatgaacagattaaacaagtaaataacaccagagaattgtttacccagttcggtgcaacctcacctacatctgggggctaccaagccagggaggaaatccactctcaatagtgttagttcaaggtctaacagcccctgtttacaaccttctcacctaaccactacccgtgcgatctctacctaagagccactcttagatatgagaaccttcgctcactccctctcactcacactcccgtgtttacaattaagtcaaagacacacca

SEQ ID NO: 5169 - DNA, 430 bp, Glycine max
  unsure at all n locations
agcttggacaggaggataaggatgatacctgataactttatgcccaccccggatttcgacattttcaacttgaaaaagggtttaggggtgggggagtttaaaaaaagcatttaatcggaatgcattgatagtttaggtattttataatgaaatgcaatatatagtaatattgttgctttttctaacaattcttttaaaagttatatttgagatgattttgtaaaaatcattatagtaaattagtaatgtatcaaaattaaaattttaaaaatatgttgaggcatgatttaatttatgttattntatcaaaataaactctaaaatttattttaagaagctttaaggtcaaaattataatataaactttttagtgatactaaactcgttcattcatgattttntgttgtgtttcaaaattcacttttactaa

SEQ ID NO: 5170 - DNA, 398 bp, Glycine max
  unsure at all n locations
cgaggttaatcgtaaaactgcaaagacatgaccttgtgagaggtttaccaagaatgtcatacaaagttgatttactttgtgaagcatgtcacgagaggaaacaaattaaaacctctttctcaagcaaaaactctatttccacctaaagaccacttgaattattacatatcaatttgtttggtccaactagaacaacctctgtcagtcgaaagagatatagtctggtagtagtggatgactactcaagatggacatgggttatgttccttgctcacaagaataattccttagagatcttctttaaattctataaaaggattcaaaatgaaaagggagtatgccttacttcaataagaagtgatcatggtggagagtttgaanatgagaactttcatcta

SEQ ID NO: 5171 - DNA, 423 bp, Glycine max
tagctccatactcgaaggtggaggacacatgaacagtgctatgcaatgacattcaaggggcttcgaataaagtggagaatggaggattgcacttgagggtccacacttatgcaatcatgaagtatagctccaaactcgaagatggaggacacatgaacaacgctaggcaatgacattcatggggcttcgaaaaaagtggagaatggaggattgcacttgagggtccacacttaggcaatcatgaagtatagctccaaactcgaatgtggaggacacatgaacaacgctaggcaacgacattcaaggggctccgaaaaaagtggagaatggaggattccactttagtgtccacactaaggccatcatgaagcatagcttccaactcgaagatggaggacacatgaacagcgctaggcaatgaca

SEQ ID NO: 5172 - DNA, 440 bp, Glycine max
tgagactgagtgaacgatccatgatatcaccatattattgcatcttttccatgcagaatgcagaggatgggtaatgactggttgtgagatagttccatccacaaattcaaccttgttatttgcactcagagtagtaagcattgaacgactccgaggattataattcggtggatcaagaaatggagatacaagcgttattgctgaactttcactagggtgaaggtaataggaactatgaacattcaaagattggtcagtttctgtgttcatgttcaatcaatagagtagagattctcttgaaattgaggaagatagaaagaaatttcaaagaatcgaacaaaccgaaaatcgcagaagcagagaatggaccacataagcgaaaacagagtgtgaaaaaaaaatgatgcgaagagtggcacatcagacctcttcaatcgaag

SEQ ID NO: 5173 - DNA, 369 bp, Glycine max
cttgatggttgtgttgaatgcattaaaggtaatcaaaccaatagcaagaaattaagtgcatatagggctacaaacatcttggaattgatacatacgaatatgtgtgggctatttcatacaccttcgtggaatggtcaacaatattttatatcattcatagacaattactccagatatgcatacttggttcttatacatgaaaagtcacaatctctggatgtgttcaaaacatctaaagttgaagttgaaaatcaactcaacaaaagaataaagtgtgtcagatcttaccgtggtattgctccaagaacatgaggaaaataatggtatgatggaaaatgacccataaaataagggtagaaactttgtctt

SEQ ID NO: 5174 - DNA, 427 bp, Glycine max
  unsure at all n locations
ntggccgatccatatcctccaccaagaatatttnttgatagatattcttcacctcccatttcactttcttaggatccacctcctaaatcccatcaatatgtagacccctatgtagatttttccttctcctccaattaatagtaccatggaagaatattgagttgttgtctccttccactaaccatctagatctagatttttgtcttagaaatgactcattcctccttgccaatatccaaaattgctctttcaaatctatcttcatgttcaattcactctccaccaaaactctagcctcctcaagcttatccaactcattcattttcaaggcaatctctttctgtgatgaatgaaagtcttcaaaacatgtagcattccactctctaagcaccttctagaggccttttagatttcactgaggacatat

SEQ ID NO: 5175 - DNA, 430 bp, Glycine max
  unsure at all n locations
agctngctccatataaatatatatatatatatatagaggtatatatatatattgaggagaaagataattcaaggaaacaattcctatgatgagataagtagattatgattatgatgatggcaagttcaagagaaggtcgtcaagcaaagcaagagggtgacaccactaatattgacaagttctcccaggcatcgtccacttcaagacaatggtcagctttcataaatccaagaattgtgagagtgtcacgttcttttggagggaaagataggcatagcaaggtttgcaccataagagggttgagggacagaaggattatgctctcagttcccacagcaatacagctatatgatcttcaagacaaacttggactaagccaaccaagcaaagtgattgattggttgcttgaagccacctaaattgacattga

SEQ ID NO: 5176 - DNA, 426 bp, Glycine max
agctttaagagaagttgcaagagaaaagactacagcctcaatgtggctgaaactagagtcattgtatatgacaaagtcccttgcaaatcgactatgcttgaagcaacaattgtactccttcaagaagacagagtcaagaacagccactgaacaattggctgatttcaacaagattcttgatgatttggaaaatattgaagtaaagcttgaagaggaggataaagctcttttgcttttgaattccttaccaaaatcctttgaacatttcacggatgcaattctttatggcaaagatcaagacattgccctagaagaagtccaaacctcaataaggaccaaggagatgcaaaaacagcaagactccaaatctgaggataatggtgaaagcctgaatatttcaaggggaaggagtgaaaagaaggaaca

SEQ ID NO: 5177 - DNA, 531 bp, Glycine max
tatgctgcaaacatttataatagacctcctcagcagcaaaaccaacaacagaaaaataattatgacctttcaagcaatagatacaatctaggttggaggaatcatccaaatctgagatggacaagtccttcacaacaacaacagcttatccttcctttctagaatgctgctggtccaagcaagccatatgttcctcctccaatacagcaacaacagtcacaaaaaagacaacaagcaattgaggctcctcctcaaccttccttagaagagttagtgaggcagatgaccatccagaatatgcaatttcagcaagagacaagagcctccattcagagtctaacaaatcagatggggcagatggctactcatatgaaccaagctcaatccaaattctgacaaattgccttcataaactgtgaaaaatccaaaaaaatgtgagtgtcatcaccttgaggtctggcaaccaaattcaagtgcctacaccagtagtagcagctgcacctgaacctgtcaagctatattctacacctg

SEQ ID NO: 5178 - DNA, 564 bp, Glycine max
tcatgatgaatcaagattgattcaaagagttttgatgataacaaagatgatgaacacttcatgataacaaagatgatgatcttaagaatcaaagaatgagttcaagattgaatcaagtacacttcaaggatcaagaggaaagttgagttcaagaatcaagaatcaagtttcaagattcaagttccaagaatcaagatcaagattcaagacttaagattcaagaatcaagagaagacttaatcaagataagtattaaaaagttttttcaaaaactgagtagcacatgaatttttctcaaaacctgttcaccaaagagtttttactctctggtaatcgattactagattattgtaatcgattaccagtagcaaaatgcttttcaaaaagctttcaactgaatttacaacgttccaattgatttcaaaaagctgtaatcgattacaatgttttggtaatcgattaccaatgtgcttgaacgttgaaattcaaattcaaatgtgaagagtcacattctttcacaaagaaactttgtgtaatcgattacactgatttgggaatcgatta

SEQ ID NO: 5179 - DNA, 542 bp, Glycine max
ttataccgatatgggctcaaaacggcagcaggtatcttcagtttccgagtaagtggtctccagggtctgctcatcaattcagttggctgaacaacatcatcctctttttcatttccaaaaccaccttcctttggccatatagcattgccatagccataggtgccctttgtttcaaagagccacctattatgatcaaaatctccagtttggctcctcattagtgccgactttgttgatttcatcatggacaatctcctctccattttagacattccacttggtggaggaagtggaaggggacgtccattatctacagccacttcatctagctctgtgttcttgtatggctccttgcatcctgggcatataccacctcctggttttacagcatctatataacaatctctgcatatcttgaaatcacactcacatgggagaatatcagcaccacgttcatcgctcatcaccttagaatcacaaccaggaattgcacatgaagatcctcttgcaccagccatctgcggatgatttgcttcagattc

SEQ ID NO: 5180 - DNA, 510 bp, Glycine max
  unsure at all n locations
agcttggcaacaggtgaaaaagtgtctgaaaaatctattccagcttgttgtgtgtaggctttagctactaattgagctttgtatctgtccactaccattaggtttatatttgagcttgtaaacccatctatatccaatacagtgcttgtcagtaggtaaaaagactagagacaagtgttatttgcttctaatgcttaaatttcttcagtcataacttgtctccacttagggtatggaattgcttgatgataaaaccgtggttcataagtagtggagatttgattgatgaagttgtgataagatgagctaagtcgagccatgaaacaataatgtcatattagatatggttgagaagacgcgaagtagatgaaattagacaagtaaaaaggtctcttatgctttctggatgaccttctaagaattttttgtggtggcatagactcaaaaactctanttgaagaagtggtaggaagagggacaggatttgaccgagtctttgttgattgagca

SEQ ID NO: 5181 - DNA, 478 bp, Glycine max
  unsure at all n locations
agctttcaacttattgtgatgtattaaaccatccaaaaagttggtgtgatgatgcttttccaaaatagattatggtcaaaaatcctgcatccactatatacattattattatcaacaagatttaatgtcctgattaattgtataaagatttaaaaagattagcacgtactacagattttgaaatacttccttgaaaatcacattggtagntatatttcatagttttccttctttatcatgaatcagaattttcaatatacttttactttgaactcttgagaatgccacataaagttggccatgactgaaaactggtttaggtagatataacccaaccgattcaagagattgtccttgagatttatagattgtcatgacatatgaaactataattgagagtngcttctaatcatcttgaaaggccaggagaatgagatggtgataatgacattcatggaacatacaccaaactacctat

SEQ ID NO: 5182 - DNA, 426 bp, Glycine max
cttgcacttgagtgatgtagctccttgtagagcttgtaagcctttttttttcttcatcaacggagtcctttgcttcttgaagattacatggggtggaatggagatggaataatgatgacttggagatgccactttctggagaagattagtcaagaagaagctcaccaccatatgctgccattgataacatctttcaagttatatccttggactgctggactgggtttatttgtgcacaatatttcatgcgtctaaagcttgctgcactttgcccattttgtctcctatgatcggggttgaattaaggctcacacctgaccactatttatagcctcagtgtcacacaaaattctacggatagcttaatttctatccaaagttcacttgagtttgaaattgaatttgtgcagccaaattttggaacca

SEQ ID NO: 5183 - DNA, 519 bp, Glycine max
agcttatcatgagagatatgtcctaacctattatgccaaacattgcatttattgaaagggatggtattgattttacaagtgtaggacaactgagttggtgatgaagataggatgtataagccaacacttaattcagctgctccaatcgtcctcaaggaggagttgtcctgtatagaacaaccagtagggtgaaaaatcatactacaatgtagattagctatgagtcttgaaactaaaatcaagttgaatgtgaaagaaggaatatacaagacatcagtgaggtaaagttgatcattaaaatgtatagtgcctgccaaattggtttgaatttgagatccatcaggtagtttaacaagtataggtctaatttgcttaaggcattgaaactgagtttgggaaaaacacatatgatcagtagctccactatccaaaccccaagagtttatgttggaactataagcatgaagagtggcacagaaaatacctgaattctcattcttatgagagctaaccaactga

SEQ ID NO: 5184 - DNA, 319 bp, Glycine max
tgcacttgaggtatcaaaaccagtgggaggatctacatatactttctcttggataaaaccattcaagacggcactttttacatccatttggcaaagccaaaaatccattatcgatgcctatgctaataatatccttatcggcttctaatctaccaaccggagcatgtgtttcctcataaaccaacccttctaggagactatatactcggactacataacccatattgatttgcaaggactatagaaaactaataccactagctgataaatacccattttgctacgataacaggataataagcaggcttctcgactaatt

SEQ ID NO: 5185 - DNA, 597 bp, Glycine max
tcaagatgtgatgtagctccttgtagagcttgtaggcctcggatcttcttcatcaatggagtcctttgcttcttgaagattaatggcagtggaatggagatggaagaatgatgattggagatgccacttcaaggagaagattagtcaagaagaagctcaccaccataggaagccattgataagagcttgaaagtaagagaaaaggagtggagggaaagggagagaaggagcacgaaattttatgcgtcaaaagtagtctgaactttgaagtttaattctcaaatgatcaaagttgaaaaaatgcacacacatgaccactatttatagcctaagtgtcacacaaaattcgagggaaatttgaatttctattcaaattttacttgagtttgaaattgaatttgtgcagccaaattttggaaccaaaatttcactaattatgattagtaaattttagctatggttcagcccactaatccaagatcaagtccaagattctccactaaatgtgcttaggtgtcatgagacatgtaaagcatgaaggacatgcacggagtgtgactatatgatgtaacaatggggtgtagcaagcaaatgctc

SEQ ID NO: 5186 - DNA, 463 bp, Glycine max
  unsure at all n locations
agcttctatttcaactgagctctttatatttcgggaagagaaatcaactgctgagagaaaggtaattctatgttataattgaaattaaaccaatttacagttatctgttcaatattgaaatccccaacctagttaccctaaaattattgtacattggtagattctatattatgtttatcgcttaccaacttttgtaccctacttctgattctgctgcgttttgcatgccatttcaaatgaggacttgtacaaaagatcacaagagtataatatgagtctgctacagtacaatagtcgccttcagtcggatcttgaaataactaatgaggcacataaacgattggagacggagaaagcaaccattgttgaaaacctancaatgtgagaggccacaacaaggcattacaggaccaggtgccatctcttaaagtaagttgttttgtttgattattgattttaatgc

SEQ ID NO: 5187 - DNA, 559 bp, Glycine max
tggaggtaaactagatgccttggttaacctggtaacccaactggccatgaataaaaaatctgcacctgtcgccagactctgtggtttatgctcctctaccgaccatcacacaaacctttgcccttctgtgcaacaatctgaagcaattgaacagcctgaagcttatgctgcaaacatctacaacagacctcctcaacctcagcagcaaaatcagccacaacagaacaattatgacctctccagcaacaggtacaatcccgggtggaggaatcatcccaaccttagatggtcgaatccttcacaacagcatcagcaacaacaaccttattttcaaaatgttgttgaaccaagcagaccatatgtctccaccaatccagcagcaacaacaacaacagccccagaaacaacaaacatttgaggctcctccgcaaccttccattgaagaacttgtgaggcaaatgactatgcaaaacatgtagtttcaacaagagaccagagcctccattcagagcttaactaatcatatgggacaatgggctacatagttaaatcaacaaca

SEQ ID NO: 5188 - DNA, 563 bp, Glycine max
  unsure at all n locations
tgaccaggaattatttggatgggttggatgtggaattcaggttgttcctggtgcggagatgatggtactgtgggtgaaccagaagctgcagtttcttttggtgaggtagccatggaaaagcagagcgtttgaaatgatttcgtaaatctcagaaggctattgggaaatgctggtaaaaacacgaatgccaagcagatataaatttgaatgaagaatgtagaggggcgtgtgaagcaacggtcgaatttgctttgtagtgaacgtgctattaatgttaagtgattcgtttgggcacgttcagattgcagtagctgctataattcctctagcagacaaatgcccagcttgcccctcagtttttcaaactgatttgcatccaaagcctttgtgaaaatatctgctatttgttcctcagtgtcaacatgcttcagtgtgatcactttatcatcaacaagatctctgatatagggatgtctaatgtcaatgtgcttggttctgctgtgttgaacaggattcttaganatattaatagcactcatgttgtcacagtacaatgtcatgac

SEQ ID NO: 5189 - DNA, 497 bp, Glycine max
  unsure at all n locations
agctngtagaaaattcaaacaggaataactttttactcggatgtctcattatgtcccgtaatatatcgagatgcttgaaattgaaaacggaagctcgtagcaaatgcaaaacacaataactttttactcggatgtccgattgtgtctcgtagtatatcgagacggtcgttattaaaaacataacctcgtagcaaattcaaatgacaataactatttactcgaatgtttgattgtgtcccatagtatatcgagacgctcgtaattgaaaatagaagctcttagaaaattttaacgacaataactttttactcggatgtccgattgggacccgtaatatatcgagacgctggaaattgaaaacataagctcttaggaaattctaaagacaatgactttttactcggatgtacgattgtgtcccgtaatatatcgagactctccaaattgaaaacaaaagctcctagcaaattcaaactacaataacttttactcagatg

SEQ ID NO: 5190 - DNA, 620 bp, Glycine max
  unsure at all n locations
tgtgactcttggcaatttctttaaaactagtcacttaaaaagttgaattttgaaaaaatcttcagaaacaagtcacttgaagaattgtgacttttggaaatttatttttcgaaatcaaacactggtaatcgattaccattaaggtgtaatcgattacacatcagcaaacgtgactcttcattttaaattttgaaaattaaaacatttagaagctctagtaatcgattacacaagtttaaaatgatttgaaaatgtttaaacacaagttgtaactcttgaaatttgaaatcttaacattttaaaacactagtaatcgattactaccttctggtaatcaattaccagagagtaaaactctttggtaatgattttgtgaaaacttcttgtgctactcaatgttttgaaaaactcttttagtacttatcttgattgagtcttctcttgatttttgaatcttgatcttgattattcttgaatcttagatcttgaaccttgaaacttgattcttgaatctttgctagaaactgtgcttaactcttgattctttggcttcatcaaaataaccttggaagacattgcttncacaatctccccctttntgatgatgacaaatctgaaat

SEQ ID NO: 5191 - DNA, 577 bp, Glycine max
tctttgagaaaacttccttgagaagctggagcttagctactcacacccctgtcataactaagctcacctccttgagaagcttccttaagaagattcctaaagaagcttgagcttagctacacatacctctctaatagctaagctcacctccttgagatgagaagctagagcttagctacacacccgctataatagctaagctcacccccatgacagaaaacgtgagaatgccacaaaaagtccttactacaaagactactcaaaattccccgagatacaaggctaaaaccctatactactaaaatggccaaaatacaaggcccagacgaaggaaataactattctaatatttacaaagataagtgggctcatacttagcccatgggctcgaaatttaccctatggctcatgagaaccctagggccttcccttggatctctagccaatctactcggagtctcttacccaatgcccttacggggtaggattgcatcagtatgtttgtccctgtgtatgttggttttcaagagaaattgagtttttaactaagtggatgtgatatatttgttattgatga

SEQ ID NO: 5192 - DNA, 480 bp, Glycine max
agcttctgtccctgaaaaactggttcttatatgacaacagggagtgaagattgctgaaaaccctagccttgcaacaagtcctagggaagtagacctggagatggataagaagatccgcagtattgtgagtagcattttgaaagacgcctctgttcctgatgctggtgaagatgttccaacatcctccaccccgaatgtttctgtgcctaatgttgataaagatgttccaacatcttccgctccaaatgctgaagccctcccttcacccagtgaagaggaatcaacagaagaagaagatcaagccacagagaagacccctgcaccacgggcaccagaacctactccaggtgacctcattgacctagaagaggtagaatctgatgaggaacccattgccaacaagttggcacctggcattgcagaaagactacaaagcagaaagggaaaaacccccatcaagaggtctggacgaatcaaaac

SEQ ID NO: 5193 - DNA, 555 bp, Glycine max
ttcttgagaaaccttccttgagaagcttctttgagaaaacttccttgagaagctagagcttagctacacacacccctctcataactaagctcacctccttgagaagcttctttaagaagattcctaaagaagctagagcttagctacacatacctctctaatagctaagctcacctccttgagatgagaagctagagcttagctacacaccccctataatagctaagctcacccccatgacaaaaaaaacatgaaaatacaaaaaaaagtccttactacaaagactactcaaaatgccccgaaatacaaggctaaaaccctatactattagaatggccaaaatacaaggcccaaacgaagaaaaaacctattctaatatttacaaagataagcgggtcatgcttagcccatgggctcgaaatctaccctaaggctcatgagaaccttagggccttcccttggatctctagcccaatctacttggagtcttctacccaatgcccttgcaagataggattgcatcacatgtcatgatagttttgaaagcctcatttg

SEQ ID NO: 5194 - DNA, 521 bp, Glycine max
  unsure at all n locations
agcttatggttgaaggaatagctcgcccaagcgagctggttgcttaggcctgaaggcatttcatggcctangcgagccatatgctagcctgggcaagcttaggtccagaaaaatccacaaaaggacccttttgccccctttcccttgtatctttttgctttcttgatcaaaactcggagtgatccctggcttcgcactgtaactagtgccaaacaccgtaattcaactagcaatgatcaaaacatcatattgaatgatatttcccggatgaaattagggtctgacaacttgttatcatgataacttttgcattgactttttgttgatgaatgaaattagttaaatgtgttttagaaaaaacaagcttaaatatgtttaaggtcactgataaatgactaaattttattttgggtccctaataattattttggtgttttaagtgtttgatatatttaaacttttgttttgattccctattgtcagctaagtgatgatatgacaccatcacaatcgttaataat

SEQ ID NO: 5195 - DNA, 615 bp, Glycine max
  unsure at all n locations
tgagcttagctacacatacctgtctaatagctaagctcacctccttgagatgagaagctagagcttagctgcacaccccctataatagctacgctcacccccatgacaaaaaacatgaaaatacaaaaaaaaaagtacttactacaaagactacttaaaatgccccgaaatacaaggctaaaaccctatactactagaatggccaaaatacaaggcccagacgaaggaaatacctattctaatatttacaaagataaacgggctcatacttagcccatgggctcgaaatctaccctaaggctcatgagaaccctagggccttcccttggatctctagccaatctacttggagtcttctacccaatgcccttgcggggtaggattgcatcaaaaccttctcattacccaccacccagtcatccacaaaggccatccctaaaatgaaccacaaagtgtacctaccgcacttgcaatgacaaacaccacctttagcataaaccaaaacaccaaccaagatnatgaatttgcaacgaagagcctgtagaattcaccccaatttcagtgtcctatgctgacttgctcccatatctacttgatattcaatggtatcataac

SEQ ID NO: 5196 - DNA, 454 bp, Glycine max
  unsure at all n locations
agctttgcctctggttgctctgctagggttttcaagcattagagagaaggagaagagattagagcctcaatttcactgtctctgtgtgaggggcgtttatctccctacaaacattattttttaaatcccaatggtgggaatatgtgaaaatgagttttgaacccgatgtccaaatttgaaaatgatccaacagttaattagtctgctattatagttttattggaatagatttggatgtatgtgggaaaaagagaggattttgggagaggggaagggagaacgaatttgtgaggaagacatagcgtcaacaacagcagcctgctccttccttccaaaatgctgctggcccaagcagaccatacattcctccaccaatccaacaacagcaacaacctcaaaaacagccaacagttaaggcccctccacaaccttccctcggnaaaattgtttcgcc

SEQ ID NO: 5197 - DNA, 457 bp, Glycine max
agcttagtgacttaagtgtctccaaactgtaattgtaggagaagttgcctaagccatgtaattttgaatgcagcaacttccatggcatggcatttagcttcgatgctgggtctagcaactatattttgcttcttacttctgcatgagaacaaatttccttccaagagtcagaggtagacctcctatctgatggtgatcctacccaatcagcatcagagtaagaaacaatcttcgcattgcctttgtcttcatgtaagagtctacaacctggtgcatacttgatatatctaaggattgatatatctaaggatgcgcatgacagcatcccaatggctatcacaaggggcattgaggaattgacttaccacacttactgcaaaggtgatgtctagtctagtgatagtgaggtaattgagtttaccaataagtctgtgatatcttcccgggtcattcagta

SEQ ID NO: 5198 - DNA, 632 bp, Glycine max
tggcaaaggtagttttaggcctgtatacagggggtatgcgagctatgtggctattgataattaagctcaaaatttgttattaaccacatttaattttctttcccacaaatttggtgctaaggaaacactacaacatggacaagagatcgctgctaagaggctttcacaaacatctggacaaggtttaaaagaatttaagaatgaggttctgttatgtgccaaacttcaacattgagatcttgttaaagttcttggatgttgcattcaagaagatgagaaattgctcagatatgaatatatggcgaacagaagcttagacttctttctttttggttagtctcataatcagcttagaactgctaatatttggaacgatagaagccgtgcttggaaagcagacggttaccaagcattgtcttaaagggggaaaaaacacacgtgtctttcgtacatatataatttacttttatcattttgccacttttccaactaaaataaagaaataataaaagattgtattggaatttgaaatctttgtattatttctgtactatgttaataaataattgaactaaaaatcttacattaattttattctaaattattaaattctatgttttttcattcttttc

SEQ ID NO: 5199 - DNA, 466 bp, Glycine max
agcttcttattcaaggctcatcttggtggtgaagctccttcttccatggcttattccctagtggatggcgcctcctctcacctcttcttctttgtcttccactgcatctccatggtggaaaatcaccattaaagaacctcattgaagctcaaagatccagcctccatagatgccccacaagcaagcttccatcaggacgtgtaatcctctgaaggtgagggcatgtagccctctgaaggcaaggatgtgtagtcctctaaaggcgagggcgtgtagccctttaaaggtgagggcgtgtagccctccgaaggtgagggcgtgtagccctctgaaggcaagggcatgtagccctctaaaggtgagggcgtgcaaccctctgaaggcgagggcgtgcagccctctgaaggcgagggcgtgcaaccctctgaaggcgtgggcgtgcagccctctgaaggcgaggacgtgt

SEQ ID NO: 5200 - DNA, 550 bp, Glycine max
  unsure at all n locations
agcttgccttgccccttgatatatttgagggactcatggtcactatgaatgacaaattccttgggataaaggtagtgttgtcatgttttcaaagcccgtactaaggcatacaactgcttatcataagttgaatagttaagggtaggaccacttaacttttcactaaaataagcaattggatggccttcttgcatgaacacaaccccaatcccaacatttaaagcatcacactcaatttcaaaagatttttgaaagtttggcaacgcaagtatgggggcattagttagcttttgcttaagaacattgaaagcttcttcttgtttctctccccatttgaaaccaacatttttcttgagcacttcattgagaggtgctgccagtgtgctaaaatccttcataaatcgtctataaaaacttgttaagccatgaaaactccgcacctcggtcacggacttaggtgtaggccattcttgaatagccctaaccttctcctcatcaacttgcactccttttgaactcacaacanaaccaagaaacacaacatggttag

SEQ ID NO: 5201 - DNA, 569 bp, Glycine max
  unsure at all n locations
tgaccctggtagaaaaatgaagataatgagcttacaaggcttaagctctatagcttgagctcaacctttgaataaaaataaagaaaagactctagcaaaacttaagcattagagcttaagctcgagcctataattaaaagaagaaaaatcacttacaaggcttaactcgaggctcaaagaaaaattaagaaaataggcttaagattgacccttgaagaaaaatgaagaaaagactccgacaaaacctaagctttggagattaaactcgaccacacaagaatgaagaaaatgaacttacaaggcttaagctttacaacttaagcttgaacttgaaagaaacatgaagaaaagactttaacaaggcttaagctctatagcctaagtttgatccttgaagaaaaatgaataaaataggcttacaaggcttaacctctatagtttaagcttaggcctagaagaaaaatgaagaaaataggcttacaaggcttaagctttgtggcttanacttgacctttgaagaaaaatgaagaaaatactctgaaagaggttaagctntagggcttaatctc

SEQ ID NO: 5202 - DNA, 618 bp, Glycine max
agcttcttttgttaggttttgcttacgtttatgagtgtatcgcgattttgtgcttctttttgggttgctcccgttggctgacctttctgctcctattcattctctcttttcttttctttccggttactcttacattgtatctgggttttttatagcttcttttcttaggttttgcttacattcatgattgtttatcaatttttgttgccaggttgttctcctatccaggtgtcattctgcgattttgtgcttctttttgggttgcttttgttgtccaggtttgtatttccctcccagtggctaacctttctgttttgttttttggttccttttcattctctctattcttctggatctttcttttgggttcctctttaaccttttttggttaggttttgctaacgtctgttgctattttgttctcctatccaggtctgaaactgtgattttgttcgtcttttccgtttgcttttgttgtccaggtttgaattttcgtctcggtgtctgacctttcttttttgcattggttctctcattctctgaaggttgtgggtttttaaaacgtctgctacatttgtgctatgcctccattgccgagcgattttatatataaaaaaa

SEQ ID NO: 5203 - DNA, 462 bp, Glycine max
tcaacatcagaccacttccagggtgctggaactacttcacatggacttgatggggcctatgcaagttgaaagccttggaggaaagaggtatgcctatgttgttgtggatgatttctccagattcacctgggtcaactttatcagagaaaaatcagacacctttgaagtattcaaggagttgagtctaagacttcaaagagaaaaagactgtgtgatcaagagaatcaggagtgaccatggcagagagtttgaaaacagcaagtttactgaatactgcacatctgaaggcatcactcatgagttctctgcagccattacaccacagcaaaatggcatagttgaaaggaaaaacaggactttgcaagaggctgctagggtcatgcttcatgccaaagaacttccctataatctctgggctgaagccatgaacacagcatgctatatccacaacagagtcacact

SEQ ID NO: 5204 - DNA, 582 bp, Glycine max
agcttgttaagtattaagtggttatttaagcacgggtacttgacatgtgtgtagggttcaacaagtaacatttatatattagaacagttaaaataaaatatatttatgaatgacatgaaaaaataagcaatatacaatgacgaattcatttaagatgtgtaaaaaatttaaaagagagatattaagcgcatgtttgctttagactcatatttatctctagttatttgatgtgattttccacgtggattcgtgaatccaaacatagtctaagagaataatattacttaattgtaagaggtaaaaatcatttgtataatagtaagatttatttaagacatctaaaaagtggaaagaaatttaataagatgaagatagcctaaagacatctcaaaatatgtgtttattttgtcatttcttatttagtactagtgtgtaataatttttttttaaaaaaaaacaatagaacttattaaacactcataaaaaatatgcttacataagtctttctctaacagtagagtcttaaaaaatttgtgggttcttcatagactattaaacatcatataaatgtgagatgaagtt

SEQ ID NO: 5205 - DNA, 405 bp, Glycine max
tctgttttcaattttgagcgtctagatatattacgggtatcaatcggacatccgagcaaaaagttattgtcatttgaattttgtgtattcattttttagcatcaagaattattaaatgactcaatcggacatccgagtaaaaagatattgtcgattgaatttgctgacagcttgtgtattcaatttcgagagtctcgaattattaaatgactcaatcggacatccgagtaaaaagttattgacatttgaattctcttagagcttctgatttcaatttcgagcatctagaattattagaggactcagtcggacatcccagtaaatagatatggtcatttgaatttgcttaaagatactggtctaaatttcgtgcgtctcgatatactataggactcaatcggactt

SEQ ID NO: 5206 - DNA, 627 bp, Glycine max
  unsure at all n locations
agctttatatggacgaaagtgcaaaagtcctatttgttggtatgatgatggagaagcagtacttcttggacctgaaatgctacaacaaattaacgaacaagtgaagttgattcgagagaagataaaagcatctcaggataggcagaagagctattatgatagaaggaggaagccactagattttcaggaaggagaacatgtgtttatgaaggtttctcccgtaaccggagtcggaagagctcttaaggctaggaagttgacacccaagtatctaggtccgtatcagattttgaagaagattgggcctgtagctaggaattgcccacagctccagcagacgacaataacttttaactcgaatgttcgattaagtcacgtaatatatcaagacactagaaactgaaaacgcaagctcgtagcaaattcaaacgataataacttttaactcggaggttggattgagtcccggaatatatcgagacgctcgtaattgaaaacggaagctcgtagcanatgcaaacgacaatanacttgaactcggatgttcgattgaatcccggtatatatcgagacgctcgaaattgagtatagaagctcagagcaaatgcaacgacaataaattttact

SEQ ID NO: 5207 - DNA, 640 bp, Glycine max
  unsure at all n locations
tggttcccaacgctctgttcaagctctcccaaaatctagaggtaaatctaggatctctatcagatactatgctagatggcacaccatgtaacctgacaacctcacttatatacaaggtggtcaacttttccaaggaaaatcttatattaatgggaatgaagtgagcagacttagtcaatctatcaacaataatccagatagaatctaaacctctaggggttctaggtagtcctaccacaaaatccatggaaatattgtcccacttccactggggtatctctaagggttgtaacatccctgaaggtctctgatgttctatcttagccttttgacagactaggcatgcatacacaaactcactaacctctctcttcatgttgggccaccaaaacatcgtctttaaatcatgatacatcttggtagcaccagcatggatgctcanattattcctatgtccttcctctaagatcatcttcctaagttcaggcacattgggaacacaaatcctatcttggagtcttcaaactccatctgatccaatattgaaactactgtcctttcctgactctatagcctctaactgagtccttagaaaaggatcaatcttctgacctttcctgatatcacctagtaactcact

SEQ ID NO: 5208 - DNA, 527 bp, Glycine max
agcttgaagagatcttcaatggctacgaacaacaacgcatttcattttgcttcttctttccccaattacatatcacataaagtagaagattcaagctttcttttatggcgtcaactagttaagcctattatcaaatcaaacaaacttcaatgattcattgctaatccgcaaattccactttgatttctctttaaagaagatcatgaagttggacgtgaaaatccagtttatgaggcatgggagtagcaaaattaggtgttattaatctggcttcaatccattctttctacactgattttttctcatgtaatcggttataatcactcctatgaagtctaggagcacatccatgattacttccacaagcagagcatcgccacaacgcgtcagttgcacattcaacttcgagcaatgaaacttggaagcaagttgatgcaatagtttctatctcaaatcaaggtactcgctgatgctcttgcttcattaggaagccctataatgattcaagagctcgttgattcaattct

SEQ ID NO: 5209 - DNA, 583 bp, Glycine max
agcttcttttagaaaacttccttgagaatctagagcttagctacacacacccatctaaaaactaagctcacctccttgagaagcttccttgagaagctagagcttagctacacacacccctctaataactaagctcacctccttgagaagagaagctagagcttagctacacacccctataatagctaagctcacctccatgacaaaatagatgaaaatacaaaaaaaaagtccctactacaaatactactcaaaatgctatgcacacacatgacctctatttatagcctaagtgtcacacaaaattgaagggaaatttgaatttcaattcaaatttcacttgaatttgaaattgaatttgtggagccaaactttggagcctaaatttcactaattatgattagtgaattttagttatggttcatcccactaatccaagatcaattccaagattctcaactaagtgtgcttaggtgtcatgaggcatgtaaagcatgaaggacatgcacaaagtgtgactatatgatgtggccatggggtgtagtaagcaaatgctcaccctccccttctaaaattaattgga

SEQ ID NO: 5210 - DNA, 365 bp, Glycine max
tttgttctcaatatcgagcgtctcggtgtattacgagacttaatcggatatcggagttaaaagttattgtggtttgcatttgctacgagcttctatttttaattacgagcctctcgatgtattataggactcaatcgaacatctgagtaaaaatttattgtcttttgaatttccaacgagcttttattttcaattacgagcgtctccatatattatgggatacgatcggacatccgagtaaaaatgtattggcttttgaatttactacgagcttccgttttcgattgctagcatctcgagatactacaggacaccattggacattcgagtaaaaatttattgtgcgttgaatttgctcagaattt

SEQ ID NO: 5211 - DNA, 442 bp, Glycine max
agcttcaaccaaggggagatggaccattttctagtgcttgaaagaatcaatgacaatgcttacaaagttgagctgcccggtgagtataatgttagttccaccttcaatgtctctgatttatctctttttgatgcagatggagaatccgatttgaggacaaatccttctcaagagggagagaatgatgaggacatgaccaagaacaagggcaaggatccacttgaaggacttggaggacctattgatgaggacatgaccaagagcaagggcaaggatccacttgaaggacttggaggacctatgacaagggctagagcaaggaaagccaaggacgctctttaacaagtgctgtccatactatttgaatacaatgccaagtttcaaggagaaaagtccaaggttgtgagttgtatcatggccccaatggaggacttaatgacac

SEQ ID NO: 5212 - DNA, 478 bp, Glycine max
agcttcccgccaatggtatttgaagtttaatgataccattgttttctttgaatttaaggaaaatactgttgatcggtgtatatatctgaatgtcagtgggagtaaggttatttttttaatcctatatgttgatgatatattgcttgcaattaatgatctttgtaatatcccattttttgtaaactaatttaaaaagaatttttatttataaataaatagagttttagaaaaatgatgaggtttttgtaaataaataaataatgagaaataatgatttgaaggaaaaaaaaaagaaaagatatttgatttattcatttgatagggaataaaatagagttcctttttataaaatattaaaaataaataaatagagtaataataagttgtgtataccccaggtataaatagttctgttaagtcaaatttcagactgacgatgcctcatcttttcctcaatttcggttttctttattctcct

SEQ ID NO: 5213 - DNA, 581 bp, Glycine max
agcttatgctgcaaatatttacaatagacctcctcaacctcagcagcaaaatcaaccacagcaaagcaattatgacctctccagcaacagatacaaccctggatggaggaatcaccctaacctcagatggtccagccctcagcaacaacaacagcagcctgctccttccttccaaaatgctgctggcccaagcagaccatacattcctccaccaatccaacaacagcaacaaccccagaaacagccaatagttgagggccctccacaaccttccctcgaagaacttctgaggcaaatgattatgcagaacatgcagtttcaacaagagaccagagcctccattcagagcttaaccaatcagatgggacaattggctacccaattgaatcaacaacagtcccagaattctaacaagctaccttctcaagctgtcccaaatcccaaaaatgtcagtgccttttcattgaggtcgggaaagcaatgtcaaggacctcaccccgtacacctttcttatctgaaatgaacctgccaaacttcactctactccagaaaaaggtgatgaccaaaatttacctaacaat

SEQ ID NO: 5214 - DNA, 533 bp, Glycine max
  unsure at all n locations
agcttcctcttattagtgcatagctcctttaagaattcggcatatcttggaatttgctttattgcatccagcagaggtatgtttacctctacttttctgaatgtttccaagatctttttctctgcctcttccatttttttgttggaaactgctcttggagggaatggaagaggagggatgtgttgcttctgcaaatcagaattaccagtggaagattcacctgcacataaattgttaggtaaatttttgtcattacctttttctgggttagagtgaagttgggcaggttcatttgcagatgaggaaggtgctacgggttgaggtccttgacactgctttcccgacctcaatgaaatggcactgacatttttgggattttggacagcttgagaaggcagcttgtcagaattctgggactatttttgattcaattgtgtagccaattgtcccatctgattggttaaagctttaatggaggctctggtctctntgtgaaactgcatgttctgcatagtcattttgcctcaaaattc

SEQ ID NO: 5215 - DNA, 475 bp, Glycine max
  unsure at all n locations
ccttatgaccctgcatgaaccttgaaattatggcttcagacgatatcccatatatatatttgcacgtgtgcctgttgacgattgcttcacggacttcacgatctattgcctgtaaaaagaaatactttacctttaagaccttcaactcctgctcctcgatcaattagcattgcgccttcgcacgctctattccatctaccaccatctatatcccattctcaatgagatcccaagatccttggagtggagaaaatacttcatcaacattgcccagtggctataaagaccattaaaccttcggattgcaagctgcacaatactgctactcccacctgctgctattgaaatgaactcgttctactcgaaagatagaaaaactgcagtttcgttcttgactcgcactcattgttgttgtcacacactcactgctntcctcacgtgcactcaatatcaagcgcctactgaggatctctga

SEQ ID NO: 5216 - DNA, 609 bp, Glycine max
  unsure at all n locations
agcttcatgcttaagtatgtatggcaaaacttcattaatgttgttcaagacatacaagtgagcttgtaacaaatgttctacacttggagtaatgacatgcagtcctcttgaacccttaccacccactctgtcatcatgccgagactcaggaaggccaacaggtttagccttctctaagtattctgaacaaaattcaatggcttcttctgcaatgtacctctcaacaatagatgcttttggacgatatagattctttgtatacccttttaagatcttcatgtatcgctcaaccgggtacatccaccgtagataaacaggaccacaacatttgatttctctgaccagatgcacaatcaagtgaatcatgatgtcaaagaaagcaaggggaaaatacatctcaaactggcacagtataattgtggcctcattttccaactcatcaaacttgacaggatcaatgactntgctacatatagcatggaagaaaaagcacaggtgagttatcgctaacctgactttgtttggcaagatgtctcgtatagctacgactaacaattgttgcatgagcacgtgacaatcatgagactttaaccctacaagcttaagctc

SEQ ID NO: 5217 - DNA, 605 bp, Glycine max
  unsure at all n locations
agcttatgcatgcttaagcgctataactagaacaaatgaagttgtttctaaatttgcgcttaagcaaaaaattagtggtgcaagcgagaaaacacgtttcaaacttgattagaatggcttccaaatggaattcaattagaattgtcactgttatgtgaggatcatttccattgtttaagatatctatgatttgaagaagagaattattttttatattgtaagactttaaagggaaaattgatatttaatatacctttgtcttcaagtttctatttacctataaaggggagaaatgactattttattgttgattaagacacttatagtatttgttgagaaatattttttgttgttaagacgaaatcattttgaaaagataatgatgatgtattgattgatcacttgtagtttagtatttttctattcttcttagctcaattaacatctctttgagccttattttctcactttaacttagttttggtcttagacaaatgaatgagcttaattgataattatggcttattttcatatttttgtgcttacttgacctatttgggtttgcanggactattngatactacaaagatgaaatggatcgtgtg

SEQ ID NO: 5218 - DNA, 722 bp, Glycine max
tctggagaagagaagagccatttcatcaagttctattttattaattgtttttcaatgttgtagtattaactaagcatgatttgatttccattgtttgtgggtgggtttatgacggtggaggaatggaaggagaagtggacaacattgatattacagacagaaaacatagggattcctgaatcttctccaccttacatccatcaatgtgatcatgctgtctttgtattacctcccaaaaaataaaaagcaaataaaatctacttaaatttgtgaagtagaacaactaactataagataaacaacaacgtgcttgctaacgtattaaaatataatcaatttaattagaatgtattcttttcttttatataataataataatattaatgcatttgttaatttttttagtatttaaaatttattaaaaatataaataaataagagataataatcataccatttggtgattaaatttcaatcaataaaaaaatgtattttaaatagggggttttttatattctctatcatttataataactgctttttatacctcaattaccttttattagttaataatgtaaatgtttttacactaccaatacataaagtaaaaaatttcttgatatattttagaattaattacattgttatcatcttctaattaatttttaaatttattggatcatcttattatttaaaaattaattaggtctatgtttttaaaa

SEQ ID NO: 5219 - DNA, 595 bp, Glycine max
  unsure at all n locations
tcttagtttcagatgatgcagatgggtttgtagctacctcatgcactcctctaatgactatggcatcatttctggcgctaaactgctgagagttggaggccatcttctcaattaaatttatggcttcagcaggagtcatgtctccaagggctccaccactggcagcatctatcatacttctctccatattactgagtccttcataaaaatattggagaagaagctgttctgaaatctgatggtgagggcaactggcacatagtttcttaaatcgctcccagtactcatacaggctctctccactgagctgtctaatacctgagatatctttcctgatggctgtggtcctggaagcacggaaaattttttctaagaatactctcttaaggtcatcccagctcgtgatggaccttggagcaaggtaatacaaccagtcctttgccactccctctaatgaatgaggaaaagccttcagaaatatgtgatcctcttggacatctggnggtttcatggtggagcagacaatatgaaactcctttcaatgattgtgcgggtcttcacctgcaaggccatgaaactttggaagcacatgaat

SEQ ID NO: 5220 - DNA, 508 bp, Glycine max
  unsure at all n locations
agcttctatagaaggttcattcctaatttctctacaattgcttcacctctcaatgagctggtgaagaagaatgtggcatttacctggggtgaaaaacaagagcaagcctttgctttgctcaaagaaaagcttactaaggcacctgttctagctcttcctgagttttctaaaacttttgaactagaatgtgatgcctctggagttggagttggagttgtattgtaacaaggtggacaccctattacttattttagtgaaaaacttcatggtgccaccctcaaccaccccacatatgataaaatgctttatgccttaataagagccatccaaacttgggaacattaccttgtttccaaggaatttgttattcatagtgatcatcaatcacttaagtacattagagggcaaagcaagttaaacaaaaggcatgcaaaatgggtaaagtacctagagcaattccatatgttatcanatacaaaaggggaaaacaaatgtggagctaatgccc

SEQ ID NO: 5221 - DNA, 540 bp, Glycine max
agcttagactgagttcagcctaccatcctcagactgatggccaaactgaacggaccattcaatcattggaggaccttttaagagcgtgtgtcttaaagcagaagggaagctgggagagttttcttccattgatagagttcacttataataacagttttcactctaccattggcatggctccctatgaagctttgtatggtagaaggtgtaggacacccctatgttggttagagcccggagaaggccttaccttagatcggaagtggtaaaccaaccacagagaagatcaagttgatccaagaaaggatgaggactgctcagagtaggcagaaaagttatcatgataagaggaggaagggtttggaattcaaggttggtgatcatgtattcttgagagtcactctgtggactggggttggtcaagcattgaaatcccgaaaactcacacctcgctttattggtcctttcccaattcttaagagagttggccctgtggcataccaaaaggccttacccccgtctctttctaatcttcacaac

SEQ ID NO: 5222 - DNA, 485 bp, Glycine max
tgaaggcaaactggatgcgttggtcaacttggtaacccagctggccttgaatcagaaatctgtacctgtcgcaagggtttgtggtttgtgctcctctgctgaccaccatacagacctttgcccttccatgcagcaacctggagcaattgagcaacctgaagcttatgctgcaaatatttataatagacctcctcaacctcagcagaaaaatcaaccacagcagagcaattatgacctttccagcaacagatacaaccctggatggaggaatcaccctaacctcagatggtccagccctcagcaacaacaacagcagcctgctccttccttccaaaatgctgctggcccaagcagaccatacattcctccaccaatccaacaacagcaacaaccccagaaacaaccaacagttgaggcccctccacaaccttccctcgaagaacttgtgaggcaaatgactatgcagaacatgcagtttcagcaag

SEQ ID NO: 5223 - DNA, 561 bp, Glycine max
tcttagtttcagatgatgcagatgggtttgtagctacctcatgcactcctctaatgactatggcatcatttctggcgctaaactgctgagagttggaggccatcttctcaattaaatttatggcttcagcaggagtcatgtctccaagggctccaccactggcagcatctatcatacttctctccatattactgagtccttcataaaaatattggagaagaagctgttctgaaatctgatggtgagggcaactggcacatagtttcttaaatcgctcccagtactcatacaggctctctccactgagctgtctaatacctgagatatctttcctgatggctgtggtcctggaagcagggaaaattttttctaagaatactctcttaaggtcatcccagctcgtgatggaccttggagcaaggtaatacaaccagtcctttgccactccctctaatgaatgaggaaaagccttcagaaatatgtgatcctctttgacatctgggggtttcatggtggagcagacaatatgaaattccttcaaatgtttgtgcgggtcttcac

SEQ ID NO: 5224 - DNA, 434 bp, Glycine max
agctttacttcactgcttcaagtagtgcacgagctgcttccagagggaaacacgttgcctaaaagctactagcaggacaagaagatactgtgtccgatgggtatggagtatcagaagattcatgcttgcccaaatgatgaggactgcaattctaatgaggcatgaattcaaagaaatgtccaaatgcccttggtgcgaggcatcatggtacaaggtgaaggatgatgaggactacagttctaataaaaactcaaagaagggccctctagagaaggtgttgtggtatcttcccatcattccaaggtttaagcgtctttttactaatggagacgatgcaaaagaccttatttggcatgcaaatgggagaaactctgatggaatggtccgtcattcgactgattgctcgcagtggaagaagattgatggtttgtatt

SEQ ID NO: 5225 - DNA, 404 bp, Glycine max
agcttgaaggcaaactggatgcattggttaacttggtaacccagctggccttgaaccaaaaatctgtacctgttgcaagggtttgtggtttgtgctcctctgctgaccaccatacagacctttgcccttccatgtagcaacctggagcaattgagcagcctgaagcttatgctgcaaatatttacaatagacctcctcaacctcagcagcaaaatcaaccacagcagaacaattatgacctctccagcaacagatacaaccctggatggaggaatcaccctaacctcagatggtccagccctcagcaacaacaacagcagcctgctccttccttccaaaatgctgctggcccaagcagaccatacattcctccaccaatccaacaacagcaacaaccccaaaaa

SEQ ID NO: 5226 - DNA, 612 bp, Glycine max
tagtgtaagccttataaaattcttatttaatttaattatttatttttaaatttatatactttttaaaaaggggaatggtcatttaaaaaaatgttctaaaaatttatttaaaaacaaaatttgtaataatatattctaattaaataaaatgacaactctaaaacaagataataaatctaaatttaaagttaagacagaaggtgtgtaatcatttaaataaattaataaatatataatttcaaagtattgtgataaaatactaaaataacagcaataatggtatttatgtagataatgtaatttattaaatataaaataatttttgaataacttcaaatttaaccataataattagttttttttaaataaaaaaaaaacctaatttatttaattactctaaaaaacctaatttatcatggtagtataaacactatagaaacatttaacacgtcccataatctttattatgaaagtattttggaaagcataaaaacagaaacagaactataatataaactatctatagcataatcttattacaaatttgtcaaaattaacaaaattataatctttgatgatataccacagatcatagatgaattaaataaaact

SEQ ID NO: 5227 - DNA, 552 bp, Glycine max
agcttttctttgtggattcattttgctttcattccattaaaacatgtcaatgattcttcaaagcgttatcagttctaccattaaagagtttcgtaatggttgtccaccttgccccataaagctcgcaagccacaagttgctctcatcttccttttttgtaaagggaattttgttaagttgagaatcaagatgattgtgccacctaaatttgtagcttttacctagacaaaagtaatgaaaacccattattcaaaatacattacaaaaataaaattagaacataaggtactacaatataatatatatatatatatatatatatatatatatatatatatatatatatatatatatatatatattaatcttctataccaaagcaatggtttcgtagtactattatctcatttgtaaactctctctagtgaaataagaacaacacgaacatgattctaactaaataatcatacataagttgattatgattaaatataaataaaatatccaagctccgatgtcaaatctatcaaagatatacaaaccccaaccaat

SEQ ID NO: 5228 - DNA, 460 bp, Glycine max
ggatcggacatccgtgtgaaaagttatgaccctttttatttttccagagcttccggtggtcaatttcgagcctctcgacatattatgcgcccgaatcggacatctgtgtgaaaagttatgatcatttgaatttctccagaggttccgatgtttaatttcgagcgtctcgatatattataaccctgaatcggacctccctgtgaaaagttatgaccatttgaatttgacgagagcttccgttggtcaatttcgagtgttcctgtatgtgatgcgcccaaattggacattcgagttaaatgttctgaccatttgaatttctcaagagcttccgttgttcaattctgagcgtctcgatatgtgatttgcctgaatcggacatccgggtgaaaaggtatgtccatttgaatttctcaagagcttccgttggtcaatttcgagcctctttacataattatgcgcc

SEQ ID NO: 5229 - DNA, 522 bp, Glycine max
tctagaagctgggcttatctaccccatttcccatattgcttatgtaagcccagttcaggtggtactaaagaaaggggcatgacagtcatttgaaatgaaaagaatgacctaatcccaacgaggaatgccactagctggagaatgtgcatcgattaccgcaagctcaatgaagccacaaggaaatatcattttcctttgcctttcatggaccagatgttggagaggcttgtgggacatgcttattactgcttcttggatggatactttgggtacaatcagattgttgtggaccccaaggataaggaaaagatgaccttcacatgcccttttggtgtctttgcctatagacggatgtcatttgggctatgtaatgcacctgccacattttagaggtgcatattggccatttttgcagatatggtggagaaaagtattgaggtattcatggacaacttctcggtatttacttgttgatagctttggcaagcataccaactgtcgttgtacgtttcacatttataa

SEQ ID NO: 5230 - DNA, 584 bp, Glycine max
  unsure at all n locations
tctcaaagctatgttataggcgctctgataagagcatcacccttgttcataacagcctcaaattagtagctttgtggtgcatccttgctgcttacgtaacaccattctttatcattcctcacacggttcaccctcttctgggttggatcctgtatttgcttgctacttttgcactttgctcaattgcaatcaatatctttatgctaccaatgttaccagttttggtaccatggcttggaattgttggggtccttatggtcatggcatttccttggtatcctgatggggtagtgagagcactgtttgtctttgcttatgccttctgctctgcaccatttttgtgggcctctatggtgaggatagttcaaggtcttcagttatctctataaagggaagcttttctgccagcaagattgngagagtcttcgccaaattcatggtttaacaagttatattgagctgtctagttgggcacaccaatacaaggctgggacaaagagggaccttcttggcaagctcagccaacatagaagggagcatgatacattaaataccaaacatgcccagtaggcttcacaatgaat

SEQ ID NO: 5231 - DNA, 361 bp, Glycine max
agcttccaagagttgaagaggcgattgacaacagcttcagtgttaattttgcccgaccctaagataccatttgaagtgtattgcgatgcaagcgggcaaggcttggggtgtgtgttaatgcaagagggaagagtagtggcttatgcttcacgccaattgcgtcctcatgaagttaactatccgacccatgatttggaactagcagttgtggtctttgccttaaagatttggaggcattatttatacggtactcgttttgaagttttcagtgatcataagagtctcaaatacttgtttgatcagaaggaactcaatatgaggcaacaaagatggatggagttcctcaaggattatgattttg

SEQ ID NO: 5232 - DNA, 462 bp, Glycine max
  unsure at all n locations
agcttaagtgtgattcctttctttttcttatcattctcctcatgttgattcagtctcattagttccatttcgtgttcctataactntccaaataaagttgcaagagacatgttagaaagatcccttgattctgtaatagttggtacctttggctgtcattccctacttaaacatcttagaactttattaataagatcctcattgngaaatatctttcctaatgatgcaagatgatttactatgtgtgtgaatctcttttgcatatcatgtatagtttcattttggatcaatctacacaattcatattcatgggttaaggtatttattctagacctctntacatctattgttccttcatggggtactngtaanggatcccacatatcttttgcactctgcaattngtactctaaagattcatccattcctaaggagatgtaattatatttggctctaaatata

SEQ ID NO: 5233 - DNA, 390 bp, Glycine max
  unsure at all n locations
tgtagaactgtccaatatcgcgaagtgaacctcggatccctgtctgatacaatactggaagggaattcatgcaaccttaccacttctttgatatacaactccactagctnnttccatttatacttcatattcaccggaataanatgagcagaatcggtaagtcgatctacataatcagccacattcttcttcatgccatgccaccaaaaacttctcttcaaatcttggtacattctagtcattccaggatggaaactaagacgacttntatgcgcttcttccaagatcttaactttcaaatcatctaaagatgacacgcatatccttcccttgaatctaattaacccgggtgtgtccttctcanactctnacatccttatccccattaca

SEQ ID NO: 5234 - DNA, 302 bp, Glycine max
  unsure at all n locations
tggagctgacccatcaactgccctagctcttttatactggtgattcctangctcttgaccttgacttgatagaacctctttntaagcgaagtcatttgacttgatcccatgttntactaaagtgaacaaaattggtgcgaatcanaactctgacatctatcatgggtggaatggatgaatgcatgaagtggtagtgcttatctctacccgagtttaaaagattggctcagaatttgtaaaacataagcacttatacaatgaaggaaagctggagttgctgcacatgatgtccaacgttatgt

SEQ ID NO: 5235 - DNA, 247 bp, Glycine max
  unsure at all n locations
cctggagcaaatgagcagcccgaagcttatgttgcaaacatttacaatagaccctcctcacctcagcaagcaaatcaaccacaacagaacaattatgacctcttcagcaacagatacaaccctggatggaggaatcaccctaatctcagatggtctagccctcagcaacaacaacagcagcctgctccttcctcanaaatgttgtggcccaagcatacatacatttctcacaatccacaacagcaca

SEQ ID NO: 5236 - DNA, 308 bp, Glycine max
  unsure at all n locations
gcttctcgatatattatgcacctgaatcagacttccgtttgataagttatgaccatttgaatntctcgagagctntcgtggttcaatttcaagcttctcgatatattatgcacctgaatcggacttccgtgtgacaagttatgaccatnttaatttctcgagaacattcgttgttcaatttcgagcgtctcgatatattatgcatctgaatcggacttccgtgtgataagttatgaccatttgaatttctcgagagcttnncgttgttcaattcaagcttctcgatatattatgcacctgaatcagac

SEQ ID NO: 5237 - DNA, 363 bp, Glycine max
  unsure at all n locations
agctntngagcaattcanatggacattacttntctcatggatgttatatntatgcgcataatatatcgagacgctcaaaattgaacaacggaagctctcgagaaattcaaatggtcataacctttcactcggaggttcgattcatgcgcataatatatcgagacactcgaaattgaacaacggaagctctcgagaaattcaaatggtcattacttntcactcggaggtccgactcangcgcataatatatcgatacgctcganattgaacaattgaagctctttagcaattcaaatggtcataacttnttccctcggaggtctaattcacgcgcataatatatctacacgcacaaaattgaac

SEQ ID NO: 5238 - DNA, 310 bp, Glycine max
  unsure at all n locations
cttccttcatcaatgatcatcatgcanactatgccattgatcaaacatctagtgtggaaaatggtatctctttgactttcctccatagacttcaattgatggccaagtaaccgcctaatcatcaacaattctcccttcgatgttttctccacttgcttctcagcatcctcactctcttcttccttntcaacttcggaatcactaatgcactcttcgtctctaagaatcatggcattctatgtaaggcactcatatgcataatgatccaagccatggcaccgaaaacacttcacatcttgacttttttatt

SEQ ID NO: 5239 - DNA, 335 bp, Glycine max
  unsure at all n locations
tatgaagatgtagcatcctacagaagattgnatgggaaacttctgtacttgaacaacactaggcctgacatcacatntgccactcaacaacttagtcaattcttaagtaaacctagtatgacacactacaatgctgcctgtagggttgtaagtacctcanaggcagtcctggccgaggcctgttcttcccaagaaagccagaaatccagctactangaatttctgatgttgattggggtggttgcttagattcaaggaggtccatttcaggatattgcttcttcttgngagcatctttgatctcttggagagctaagaagcagcaaacagtctca

SEQ ID NO: 5240 - DNA, 347 bp, Glycine max
  unsure at all n locations
tgcagcttgagcanattanacgacaaaactttatctncggagttcgattgtgtcccgtagnatatcgagacgctcgaaattggaaacagaagcactgagcaaattcaaacgacaataactttntactcngatgaccgattgagtcccgtaatatatcgagacgctcgtaattgaaacagaagctctgagccaattcaaacgacaatatactttaactcgggtgtccgatggtgtctcgtagtatatcgacacgctcgtaattgaaaccggaagctctaagaaaattcanacgacaataacctttgactcggatgtccgattgagtcctataatatatcgagacgctc

SEQ ID NO: 5241 - DNA, 345 bp, Glycine max
  unsure at all n locations
agctnntgagcaaattaaatgacaataactntatacacggatgttctggtgagncccgtaatatatcgagaacgctccaatatgaaacggaaactcttataaatatcatacgacaataactttntacttggatgcccgacagagtgtcgtaatttatcgagggatgctccaaattgaatacggaagctcgtaccaaactcaaacgttaataacgttttactaggatgtctgattgagtcccgtaatatatcgagacgctcacaatttagatccgaagctctgagaaaattgaatagacaataactttatacatggatgtcccggtgagtcctgtattatatcgag

SEQ ID NO: 5242 - DNA, 271 bp, Glycine max
  unsure at all n locations
cggtagaattcaatgaatgtccttttaagtggggcctctatcttgntcttattttttctgctgaaaacaactagctctgtattgctatggaaactgagaacaccttttatagtcgaacgtggagttacatagntgtgtgtgaaatgcactcgatcaagtatttccaaacgggctggtctagtcaccctggtattctttggcttctctgcctcaacttttgggtttacactggtctgattatctgattgttcattatgactgttgctctctt

SEQ ID NO: 5243 - DNA, 352 bp, Glycine max
  unsure at all n locations
ctgcagctatgctganatattacaatagaccttctcaacctcattatcatatcaaccacagcagaacaattatgaccctctcagcaacagatacaaccccggatggaggaatcaccctaacctcagatggtccaaccctcagcaacaacaacaacagcttactcctttctttcaaaatgttgctggcccaagcagaccatacattcctccaccaatccaacaacagcaacaaccccagaaacagccaacaagtgaggcccctccacaaccttccctcgaagaactngtgaggcaaatgactatgcagaacatgcagtttcagcaagagaccagagccttcattctgagctta

SEQ ID NO: 5244 - DNA, 370 bp, Glycine max
agcttcactaccaacaaatgcttgtgctcatgctcaattggaagacaacaaacttaccataaaccaatcaaaagggagacattatcagaggtttgtaagctatgcagtaactgcataaagcatcaccaagcttcaaggaccaatcttttcttaatcaaaaaataatcttttcaagaatggcctagatctctctataagagacttccacttgacctcttgtctgaagatggtcatgtgtagcgtgagcgactccatacatcttcaatataaattcaatctgcctctcaatgaaatgagaaccaccattactaatcacagatcgtgggacccccaacattggtgaaattatctacttgaacagctggatcac

SEQ ID NO: 5245 - DNA, 438 bp, Glycine max
  unsure at all n locations
ttaacatcagaccacttccagggtactggaactacttcacatggacttgatggggcctatgcagttgaaaagcctggaggaaagaggtatgcctatgttgttgtggatgatttctccagatttacctgggtcaactttatcagagagaaatcagacacctttgaagtattcaaagagttgagtctaagacttcaaagagaaaaagactgtgtcatcaagagaattaggagtgaccatggcagagagtttgaaaacagcaagtttactgaattctgcacgtctgaaggcatcactcatgagttctctgcagccattacaccacaacaaaatggcatagttgaaaggaaaaacaggactttgcaagaagctgctanggtcatgcttcatgccaaagaacttccctataatctcttggctgaagccatgaacacagcatgc

SEQ ID NO: 5246 - DNA, 502 bp, Glycine max
  unsure at all n locations
ttgagcaaattcaaacgacaataactttttactcggatgtctgattgagtcccgtaatatatggagacgctcgaaattgaatgttgaagctttgagccaattcaaacaacaataactttttactcggatgtctgattgagtcccgtaatatatcgagacgctcgaagttgaatgttgaagctttgagcaaatttaaacgacaataactttttactcggatgtctgattgagtcccgtaatatatcgagacgctcgaaagtgaatgttgaagatctgagccaattcaaacgacaataacgttntactcggatgtctgattgagtcccgtaatatatcgagacgctcgaaattgaatgttgaagctctgagccaattcaaacgacaataactttttactcggatgtctgactgagtcctgtaatatatcgagacgctcgaaattgaatgttgaagctctgagccaatttaaacgacaataacctttttactcggatgtctgatt

SEQ ID NO: 5247 - DNA, 534 bp, Glycine max
  unsure at all n locations
agcttcaacattcaacttcgagcgtctcgttatattatacgactcaattagacatccgagtataaagttattgtcgtttgaattttctcagagcttcaacattcaatttcgagcgtctcaatatatgacgggactcaatcagacatccgagtaaaaagatattgtcgtcttaattggctcagagcttctacattcaatttcgagcgtttcgatatatgacgggactcaatcaggcatccgtgtaaaaagttattgtcgtttgaattggctcagagcttcaacattcaatttcaagcgtctcgatatatgacgggactcaatcaggcatccgagtaaaaagttattgtcgtttgaattggctgagagcttcaacattcaatttctagcgtctcgatatatgacgggactcaatcagacatccgagtaaaaagatattgtcgtttgaattggctcacagcttcaacattcaattttgagcgtctcgatatattacgggactcaatcangcatccgagtaaaaagtattgtcgtttg

SEQ ID NO: 5248 - DNA, 487 bp, Glycine max
gagcaacatttaacgacaattactttttactcggatgtttgattgagtttcgtaatatatggagacgctcgaaattgaatgttgaagctctgatcaaattcaaacaacaataactatttactcggatgtctgattgagtcctgtcatatatcgagacgctcgaaattgaatgttgaagctctgagccaatttaaacgacagtaactttttactcggatgtctgaatgagtcccgtaatatatcgagacgctcgaaatcgaatgttgaagctctgagccaattcaaacgacaataactttttactgggatgtctgattgagtcccgttatatatcgagacgctctaaattggactgtgaagctctgggccaattaaaacgacaataactttgtactcggatgtctgattgagtcccgtatattacgagacgctcgaaattgaatgtggaagctttttgccaatataaacgacattatctttttactcg

SEQ ID NO: 5249 - DNA, 474 bp, Glycine max
ctcaagcttgcctaattaacctgaaattgagagaaaattattattaaagacacaaaatgaaaatactaagtatttattacctatacttaacataaaatacttataacattacaaaataaccataaattgggagagtttaatacaatttatacaagttttatacacaaaagttagtcgttttcaccgactaacatgtaatcgattacacaatacttgtaatcgattactagtgtttctaaatgtttttattttcaaatttaaacatgaagagtcacatctattgatgtgtaatcgattacaccttgatggtaatcgattaccagtgactgatttcgaaaaataaattaccaaaagtcacaattcttaaagtgacttgtttttgaagagtttttcaaaagtcacaacctttgagtgactagttctaaaagagtcacaacttttaagtgactagttttaaaagagtcacaattttaa

SEQ ID NO: 5250 - DNA, 433 bp, Glycine max
agcttgtaatcgattacacatatactgtaatcgattaccagaggagattttcagaaaatattctcaacagtcacatcttttttgtgtggttcttgaatggctatcaaaggcctatatatatgtgacttcagacacgaatttgacaagagtttttcagaacaaaaaggtcttatcctcttaaaaagcaaaataattttatcctcttacaaattccttggccaaaactcttgtgattcaataaggaattattttagtgctcaaattgttcaatctatctctttatagagagatttcttcttttcttcttcttcattctgaaaagggattaagagaccgagggtctcttgttgtgaaaggattctcaacacaaaggaaggattgtccttgtgtgtttagaacttgtaaaaggaatttacaagatagtggaactctc

SEQ ID NO: 5251 - DNA, 568 bp, Glycine max
  unsure at all n locations
taatacctattaaacagttgccatgctgattgttgtctgtttttatgaaagctgtctgcctctcatcaataagaccaaatatcacttgtctcaatctatttgcttataacttagctatcaccttgtacatacatccaatcaaggagattggtttgtagtcatcaaatgactgggggtgtttggttttgggaattagagctatgaaagaagcattactgcctctatggaagctgccatgcacatggaattcatctacaaattttctgaagtcagttntcatcatttcccaaaattctctaatgaattttgaagttgaagccatcaggtccaagacatttgtccccatcacaactccacactgcttctttgatctccaaatccgaaaaaggaacagcccaaaactccctctgctcctggtttattgaaaagaattgcactctatcaagagtgggtctacaaaactactgctcaataatcttgtgaggaaaaattcacaacctccttcttaacatcattgggttctgattccatcacccttaatgaaaattccttgagaccattttatgtt

SEQ ID NO: 5252 - DNA, 511 bp, Glycine max
agcttaagctttgaattgagtgccattaccattgatgatggcataagggagaccatatctgtagatgaggtgtttccaggtgaacttttctacctccctaactgagatttcttgtaatggccttgcctcgatccacttagtgaaatagtcgatggtgaccaataagaacttgaccactcctagggcttttggcaatggtttcaatatgtccatgccccatatggcgataggccaagtggaactcaagctatggtggttgttgggaggggtgcgtggaacatctgtgaattcttacctccttgtaaagttgagggtgtcagccaataatatccgatacacaacactttggttgctagggaacgacctccgatatggaggccacatattctttcatgtagttatcgcatgacatagtctgcttgttggttgttcaagcatttgagtaagggtgttgtcaaccttactttcaatagttcatcgtcaaagatgacatagtaactatccttccttt

SEQ ID NO: 5253 - DNA, 412 bp, Glycine max
tattgaaaagctagtaaatacttggaaaatatccatttgctacatgttggtataaaaaagtaacaacgataataaaattaattaaggcgtacccaacaagctttctcttgctttgaaaagtcattaatcgtaatgaaaaataacaattaaacaacaattaataaaagagaagtcaagcttattgaaaagctagtaaatacttggaaaatatccatttgcaacatgttggagtaaaaaagtaccaattatctcactaatgaaacttatatataaaaaacatttattaattaatcaacatgcacctttcaataagcgataattaatttaataaagcgtattactagagacatggtgaccgaaatatttatcctcatctattattgattttatttataaaaaacttgtatgaaaa

SEQ ID NO: 5254 - DNA, 565 bp, Glycine max
  unsure at all n locations
agcttgcttctcctgaatatcaaatgcattttgggaaaaagaaatggacaaattaggattggttagaagagcactaactgaaattaaattgaatttgaatttaggaatgtaggcaacattatgcaagaataaggtattggttaagcaaaccgaaccaatggcaatgataggtataacatcattgttaggcagagtgacagttttatcagaaacaagttggtaagatcaaaaatgatgaagagaacaagaaatatgaatgttggcaccagaatctaaaagccaacaatcatgaagaaaattagaagtggatatagaaaggatcataccactggcagaagaaacaccttgaggaatgacagcattggtagcatgactttctaaaagattcatcaattggctatattgttgggcagtaagttgaaactgggaacctgagtcaccagaggaagatggtgagtgagacatatcaacagatacttgttgagcaaccttgtgtggtggtcaaaagatgaagaatgtttcttgacttctgangaaaactagtccctagataatttggaggata

SEQ ID NO: 5255 - DNA, 358 bp, Glycine max
tccttaatcacctcattaaggactagaacaccatgtaggatgtgtctgttttttatgaaagctgtctgcctctcatcaataagaccagatatcacttgtctcaatctatttgctaataacttaattatcaccttgtacatacatccaatcaaggagatgggtctgtagtcatcaaatgactggggatggttaattttgggaatgagagctatgaaggaagcattactgcctctagggaaactgccatgtacatggaattcatcaacaaatcttttgaagtcagctttcagcatatcccaaaattctttaatgaatttgaagatgaaaccatcacgtccaggacatttgtccccatcac

SEQ ID NO: 5256 - DNA, 521 bp, Glycine max
  unsure at all n locations
agcttgtgaatgtacctatgaattgtttttttgctatgtaaataagccaaccctgagagaatatggcgagtgaaattccgaatgacagattctattagggcaccacaatgatcacggacatatttattaattgaaccaagatgaacatattccagataaatataaaaacggtcctcaacctgcaagcacatatgttaaggttttaatgctgttacagaataatgattattaatcttgagtagctaattatgaagtaggagattgcttactatttcactgccaaaatactgtacgatgtttgaatgttttagattgctaagaancttaatttcctggagaaaaagaataaactattaagaaggataaagaggatatagaaaataacatatcttcaaaactattacggaacgataaatatatatagccaagcagcccaagccattattaagtaaaaccaaccttataagtattcaactacagtggacactaaaacgaaatgaggagcgtcactgcaaaatata

SEQ ID NO: 5257 - DNA, 538 bp, Glycine max
agcttttctaaactcattcacactaaacaggccattcaacaactcattatacgttctggtatcaggcaaacacccatatctctgcatctgatcaacaacatgcattgcccaccgtactctcccaccatgacacaagcccttgataaacgtgatgaatatgacaacatttggaggacaaccatcagccaccatattatcaataagccgataagcctggtcaagcatagaattcttgcaaagcacatccaccatgggcgtgtaaaccacaacatgaggctgaacctcacaattcaccatcctgttccacacttcaaaagcaccctgcaaatccccagccttggcaaacccgtgaacaagagtgctattagcagacacattcagcgggcaaaagcaatccttcctcatccgatcacaaactgccacaggctcagccacattcccactgcagcacaaaccattcaagagtgtgtggtaagcaacaacattcgggctaaccccctccctaaccataaccccacaagcagcttgcaggcagcat

SEQ ID NO: 5258 - DNA, 550 bp, Glycine max
  unsure at all n locations
ctaagcttgaataggatccttatatgccgaacccagaaactcttcacccttcctctctagcaactgccaaacattagtcaaagcagcactttccctaatcacacagcaaacaaggttttaaaaaaaaaatcactaacctttcatttcatgactaaaactaatacagacatacttcaatcaatcatcaattcacataattgaagaaataaagcacacaaactaatacacacatacttcaatcactcataaaaaattagtaactaccacacgttgataaaaaaaacacagacacacatgtctttgtaagtaacataccggttgggtatccaagcgggtgggtcgggaccgtaatccttgtagcaaccatagtacagcatctgatgaaaggagaagggaagttcanggttgaggatgctgttgctgacgtgctgccacatggcgggggtgccattgctgtgagtttcaatgatttctgcgagacccctgtggagagtggcagcgtcttctcttgcaattccatgggaatcaatatccgacacagtgatggaac

SEQ ID NO: 5259 - DNA, 354 bp, Glycine max
tgtaagttatatattcaatatattttatatgttttatttatgtagatgtttatattttgataaatgaatagttttaggtagtataagataacaattttgtatagtttagtttgaattgttaatgttatatatgccagattattttttgataaatgaatagttttaggtagtataagataataattttgtataatttattttgaattgttaatgttatatatgccagattatattttgataaatgaatagttttaggtagtataagataataattttgtatagtttagtttgaattattaatgttatatggtagattagatttaggtttatttgataaattattgttgcaaccta

SEQ ID NO: 5260 - DNA, 464 bp, Glycine max
aacttagagaagtgaaggcaggctattatggaacttgggcagcacatcctggtctaattccagtctgcatggagattttcaacaacaacatgggcaatgctcccaaccaaaataaagacaatgaaacgcgaagatggcgcaaacataaccgagcaagacctcttgcagataccaagaggagcctgcaccatggaaggtctcagatttatggttatatgcttcttaatttaattattaaactcttaataaatatcttaagtcacttgagccttttttcaatttaattaatttttttttattaaaacattggcactagtatgtgattaacctatctcttttgtattgatacaagattaagctattcttatctcaagttattttattaactatgctcttattgggacaaggaaaaaaggaactacttaaagacacttgacaaagggaatataaatactattcaaaca

SEQ ID NO: 5261 - DNA, 242 bp, Glycine max
tttgtggaaactgctctttggaggaatggaaaaaggggaatgtgctgcttctgcaaatcagaattacctgtggaaaaagattcacctgcacagaaattgttaggtaaatttttgtcatcacctttttctggaatagagggaagtttggcaggttcatttgcagatgaggaaggtgctaccggttgaagtccttgacactgctttcccgacctcaatgaaatggcacttgcctttttggggat

SEQ ID NO: 5262 - DNA, 421 bp, Glycine max
agctttcgagaaatttaaatggtcatcacttttcactcggaagtccgattcaagcgcatcacatatagagacgctcgaaattgaacaacggaagctctcgagaaattcaaatggacatatcttgtcactcggaggtccgattcaggtgcataacatatcgagacgcccgatattgagcaacggaagctcttgagaaattcaaatggtcattacttttcactcggaagtccgattcaggcacataacatatagagacgcccgaaattgaacaatggaagctcttgagaaattcaaatggtcattactttttcattcggaggtccgaatcaggcgcttcaaatatggagacgctcgaaattggaacaacggactcctctcatatattcaaatggtcataacttttcactcagaggtccgattc

SEQ ID NO: 5263 - DNA, 562 bp, Glycine max
agcttgtaacaaacctaattcataatattctcatgttaaaaataaacaaacaaaaatatcatttaaattgtgtctaactacattaaattgtattaaattgaatttaggtttaattactcatttgattcttatagtttcatatttgtaccttttagttcatatagttttaaaataatttttttagttcttataatttacattttaattctcttttagttcttgtagtttgaaattgatatttttagtccttataatttatattttaattctcttttagtccatataatttgaaagtgattttttaaatccttatattttatattttaattcccctttagtctttaccatcaaaatatgagtaatattatcaattacaattaactacaaaaatattaataagtaattcataactaatttattataacataatttgtaataaaaaattattgataatttataattaatttgtagctaattatttttatatgaaggagtgtaaatgatgagaactaaaaagatgacttttaaactataggagttaaaatgaaattaaaatttaatt

SEQ ID NO: 5264 - DNA, 468 bp, Glycine max
agcttctaaaagagtttggtagatctctaggttcagtggaaaaccatcagcccaatggcatgtctcagagatagacccatcagatgatctgcaagaaagagacataacaacagttcgaaaggtttgcattgattcaccattctttccaatatccatgggtttctcaaatgctccgcggattatgtgccgtagactctgtgcagaagggtctgatttatctaagggaagatgaggatgcaagaggagtcctgcttcaagaaccttcaaatttcttctcaaccaagcttcatactcttgttgacttggaaaatctgaactcctgaacagttgtataagctctagtggaagaaccactgactccatgcgtctttcaagctatttcatgaacagagacctagtcagttttaatattgtgattaaacagatgtaagaaagaaccattatgcagatgttcaaacatgacatttt

SEQ ID NO: 5265 - DNA, 484 bp, Glycine max
ttttatttttagtagataaggatgaattcgtggccacctcatggactcctctaagaacaatagcgtcatttcttgcactgaattgttgggagttggaagccatcttctcaattagattcctagcctcaacaggggttatatcaccaagagctccaccactggcagcatcaatcatactcctattcatgttgctaagtccctcatagaaaaattgaagaaggagttgctcagaaatctggtggtggggacagcttgcacacaatttcttgaatctttcccagtactcatacaagctttctccactaagtttcctgatgcctgaaatgtcttttctgatggaagtggtcctagatgtagggaataatttctccaagaacaccctcctaaggtcattccagctaaaaatggacctgtgagccaggtagtatagccaatcttttgccactccctccagagaatgaggaaaagtctttagaaagatatg

SEQ ID NO: 5266 - DNA, 553 bp, Glycine max
agcttaaacgtgttataataaattgaatgattgaaggacgtggatgttaaatctgaaccaatgaaacaggaacttgacttgtatctatgttcaagagtgcccgaatgcgatcccagttgacccaattatcgttagcgtacgaggcaacaattacactaggtaagctagacaaaccaacaatagggcaaagaggggtcacactcaccccactaaagatgatgtggcacgtaattgggcaaagagagtgatgtagctccatgtggagcttgtaggccttgaatcttcttcatcaatggagtcctttacttcttgaagaagaatggcagcggaacggagaaagaagatgattggagacccacttttaggagaagatgcgttaagaagaagctcaccaccataggaaaccattgataaaagcttgaaggaagtttaacatgagtggagggagagggagagaatgaccaccaaatttagtgcctcaaatgagggctgacttttgaggataatcctcaaatgatcaaagttgaaataatcacacacatgacttttattt

SEQ ID NO: 5267 - DNA, 344 bp, Glycine max
agcttgcaatcgattacatcatttgtgtaatcgattaccaggcacaaaaaaattcaaatttcaagtctgaggagtgacaactcttcacaaactaactgtgtaagcgattactacatttatgtaatcaattaccagtaaggaattttcgaaaataactcccaagagtcacaactattcaagaagtttttgaatggccatcaaagccctataaataggtgtcttattattctcaaaatattccttggccaaaacacttgcaaattcaataaggaatcttgctcaatctttaattgtaatatccttcttttaaagagagaaaattcttcttcttcttattcaaagag

SEQ ID NO: 5268 - DNA, 275 bp, Glycine max
tgaccaggaattatttgtattggttggatgttgaattctggttgttcctggtgcggagatgatggtacagcgggtgaaccaggagcggcagtttcttttggtgaggaagccatggaaaaacagagcgtttggaatgatttcggaaatctcagaaaactattgggaaatgctggagaaaacacgaatgccaagcagatataaatttgaatgaagaatgtataggggcgtgtgaagcaacggacaaattggctttgaggggaacgtgctattaaagt

SEQ ID NO: 5269 - DNA, 507 bp, Glycine max
agcttggaagaagaatacatggagatttcatctgaatatggcgccactaatggaggaaataaagtttacatactaaagaaagccttatatggtctcaagcagtctcctcgggcttggtttattaggttcactcaagctatggtatctttggggtacaagtaaagccaaggcaatgatgagcttgaaaaatagaccctgagggagaggttagcagcccaatttgagatgaaggatcttatgaggctaaagtactttctcgggatagaggttgcttatactttacgaagggtatattcatttctcatagaaaatatatacttgatctcctcaaagaagctgacaagatgggctgtaaaaccactggagcacccatagagcaaaatcacaagattggaaatgatgaagaaagcccaaaggtatagaagacacaataccaaagactttggggaaaacttatcttttattccccaccaggcttgtatagcctatgcagatagtgtggttagt

SEQ ID NO: 5270 - DNA, 400 bp, Glycine max
agcttatgagcatttgaatttctcgtgaggttccgttgttcaatttctagcgtctcgatatctgatgtgcctgaatcggagatccgagtgaaaagttatgacaattttaatatatcgagagcttccattgctcaattttgagcgtcttgatatctgatgtgcctgaatcggacatccgagtggaaagttatgacaatttcaatttctcaagagctttcggggttcaattttgaacgtctccatatgtgatgcgcctgaatcggaccttcgtgtgaaaaggtatgaccatttgaatttctcgtcagcttgcagtgttcaattttgagagtctcgacatctgatgggcctgaatcggacatctgagtggaaaggtatgacaattttaatttcttgagagctt

SEQ ID NO: 5271 - DNA, 608 bp, Glycine max
agcttgtccttcacggcaaacatgatagcactggcatgttctgcagcattgcctacaattggaagcaagatgacagaaataaaagccactgacatattcaatgactcagatgctccctgcaagagaccagaaacacaatgtcaatgaatgaacttatgatgcacaatttatggataataggaatattgtgaatgtatgaatacagagttttgatgatgtcaaagtaaaatcaaacaaggttgtttcaacaaacattattgctttaagattaattcaaggtcaaacaaataagatcaagaaaaagataaggtctcaaataatctcactggttgattgatttttgccttaaaacaaattgtttccaagagatcaaaggctctagtattcgattactaggcaatgtaatcgattaccaggagacaagtttacaaatcaacttttataaaaagatttgaaattgaatttttgatcttgtaatcgattaccagatgtttgtaaaaagattaccagtaaccgaactcttgaaattcaaaatgaaaagtcataccctttaaaatataactgtgtaatcgattaccagtgagaatatttcagaaaagctttttgaa

SEQ ID NO: 5272 - DNA, 476 bp, Glycine max
aactaagcttataagtctcttggattgaaacagcctcccgccagtttttttaaaatttatgagtcatttcttcattcgctttgaagagaatgtcatggatcactgtatataccaaaaggttagtgggagtaagatttggttccttgtattatatgtagatgatattctgcttgcgactaatgataaatgtatgctatatgaggtgaaacaatttctctcaaagaactttgatatgaaggatatgggagaggcatcttatgtcataagcataaagatccatagagaaagatctcgaggcattttatgcttgtcttaagaaacctatattaacaaagtttttagagagatttaatatgaaagattgttcaccaagtgtagctcccttgtgaagggtgacaaacttgctttggtcaatgccccaaaaatgattttgagcgggaacacatgaaaaatattccatatgctttagcagttgg

SEQ ID NO: 5273 - DNA, 465 bp, Glycine max
atactagcttcacatcagaccacttccagggtgctggaactacttcacatggacttgatggggcctatgcaagttgaaagccttggaagaaagaggtatgcctatgttgctgtggatgatttctccagattgacctgggtcaactttatcagagaaaaatcagacacctttgaagtattcacggagttgagtctaagacttcaaagagaaaaagactgtgtcgtgaagagaatcaggagtgaccatggcagagagtttgaaaacagcaggtttactgaattctgcacatctgaaggcatcactcatgagttctctgcagccattacaccacaacaaaatggcatagggaaaaacaggactatgccagaagctgctagggtcatgcttcatgccacagaacttccctataatctctgggcatgagccatgaacacagcatgctacattcacaacagagtctcactt

SEQ ID NO: 5274 - DNA, 491 bp, Glycine max
tattgaatgttttttattttaagaaattatgattatataatttgattaatttttaattaaattatatagcatatgatcactttgttaatattttctctaatttttttagtaaatatatggaaaaaatgataaaataacaaaagattatgacttccttaattttataaaagataaatttaaattatatgaatttaaatttcaaattttacaaattaaaaaaaaaacagatgctaacttaaaggattctttttaaatgagtattaaaagaaaatatttatatttaaaataatacgtaatgtaatattggaaaattatttaatcacttatattagaaagaaaaaaaaaagtaatgcttaatgtattttgtaaacctctagtatgcttgatatttttaacacgtgtttgcttcatttggcttttagtatcagacaaacatcactatattactttctttaatctttactaaacttttattttcaatgacattggat

SEQ ID NO: 5275 - DNA, 411 bp, Glycine max
tcttcaccagagcagcatcaaggaaagtggtttgtactatcaatggggtggggaaactacttttgaacaaagcgaagtccagaatttgtagaccaggattggagctactgaagcttacaattgccagggctgaagatttgcctgcattgatttggaaatgaagcaagccttgagggaatgccataacatcccccttcttaagagttttgaggtagacaatgttggcagaagaaatgaatccagctaggatgctcccttcaattacaacaagtaattctgaagctccaggatgagtgtgaagtggtataacttcacctgctgctaagtccaaacgtgctgcggaaatgccaagaccgttgagaccagcaaactgagcatcaaatgcaggggtcactgcagctttgataatgt

SEQ ID NO: 5276 - DNA, 511 bp, Glycine max
agcttggaggagagcaaatcagctatatctttcccaaacgatatgagtctcccataatttatatttttcataaacccaagattctctttgccattttgaaatgcaccggaagaatcattgttcttgttcttctttacactgcaggtataggatacatcagctgaccaatcaaggccaccccatatagtatacccacctttgggtatcattgacatggttgaatcccacgttcgggtcatccgcattagatgctgtaaagttttaagaccaaaaacatccttattccaaaaacctggtgcgaaagtcctgtatgaggtttagagattcattagattatataaggtatcacagctaacatgattcatttttaaacaatatcatcaatggaaattacataaaaattcacccctacaaaatctggataaaattcttatatattggcaaggaaacacaattttcgaagaacttattaacagaatccacagccttataaaaatattttattggagga

SEQ ID NO: 5277 - DNA, 487 bp, Glycine max
actaagcttaagaaaaatggcctcagcaaacttcttatttccaaaaggaaattcaatcaatagaccttcaatctttaatggagagggttaccactactggaaaacccgaatgcaaatttttattgaggcaatagacttaaatatttaggaagccatagaaatagggccttatatacccaccacagtagaaagaaccacaatagatgggagcacaacaagtgaaagcataacaatagaaaaacctagaatagatggtctgaagaggatagaagacgagcacaatataatttaaaagccaaaaacataattacatttgccctgggaatggatgaatatttcagggtttcaaattgtaagagtgctaaagaaatgtggaacactctacaattaacacatgaaggtacggcagatgttaaaagatctaggataaacacattaactcatgaatatgaactatttaggatgaatgcaaatgaaagcattcaag

SEQ ID NO: 5278 - DNA, 383 bp, Glycine max
ttgtccctaggctaaacccgtatcacagaagaaaaagaagatgggagaagaaagatgcaaagctgtcagaaaaaagtagacaaactccttaatgctaaattcattagagacatcagatattctacttggctcgccatcatcgtcatggtcaaaaaggtcaaaggcaaatggcgaatatgcaccgactacactgatctaaacagggcgtgccctaaagatgattaccctctgcacaacatcgaaaaactgtggaaggaatgccttccaagattattttgatgatgccaaagaatcaagtgtaaaacaagtttcaagaatcaagatcaagattcaagattcaagtaaagtatcatgaactcagattcaagaatcaagagaagact

SEQ ID NO: 5279 - DNA, 576 bp, Glycine max
agcttataaagaaaaatgatggcatggttttaacccaatcacattatgttgataagctattgaagaagtttaattattttgatgtaaaacctatttctacttcttatgactcatccattaagttaaagaaaaaattgaataaaggaatttcttcacataaatattctcaaattattggttctttgttgcatttgacaaacttctctaggcctaacattgcatatgaaattggtagattaggaaggtatactaataatcatgatcattctcattggattgcattagaaagagtttttagatacttaaaaggaaccattaattatgacattcattatacatgttctcgtgcagtaattgaagggtttagtgatgcaaattgaatttctgattctaatgaaacaaaattgacaagtggttatgtctttactgtagctggtggggtagtatcatggaaatctgctaaacaaactattatttcatgttctaccatggaagcataaattattgctttaaatactcctactagtgaggttgagtttcttaaagaattgttattgtgatttgccattggttaat

SEQ ID NO: 5280 - DNA, 506 bp, Glycine max
  unsure at all n locations
agctntgagctaattcaaacgacaataactttttactcggatgtctgattgagtcctgtcatatatcgacacgctcgaaattgaatgttgaagctctgagccaattcaaacgacaatatctttttactcggatgtctgattgaggcccgtaatatatcgagacgctcgaaattgaatgttgaacctctgagcaaattcaaacgacaataactttgtactcggatgtctgatatagtcccgtaatatatcgagacgctccaaattgaatgttgaagctctgaggaaattcaaacgacaataactttttacttggatgtctgattgaggcccgtaatattttgagacgctctaaattgaatgttgaagatctgagccaattcaaaacgacaataactttttactcggatgtctgtatgagtcccgtaatatatcgacacgctcgaaattgaaatgttaagctctgacccaattcaaacgacaattactttttactcggatgtcagatt

SEQ ID NO: 5281 - DNA, 365 bp, Glycine max
  unsure at all n locations
gaactcctgcttccatcatctcttccaagattatgttccaatatctttttgtcatttatatttatccccacacttttctttcatttcaaaatcgaaattctataaattttttgaaatgaaagaaagagacccggtatactgaaatagaaataagtgttccaaaggaaccttctcttttaccgaagattggcctttgataaatgatcgggccattttttctatttaatatttaatatgattattctctntataatctttcttttattatacaaaataaaatgaccgaagatgaatccgctcttaagaatcattattttaggaattataaatactcagatgctgcgatgtatcgcataaattctttg

SEQ ID NO: 5282 - DNA, 480 bp, Glycine max
agcttcttacaaagcatacggctttctggatgtatatgatgatatctatacagatggatcttatatatctatatatctatagatagatatatagatgtagatatatagatatagatcatacaatgaagtaccgcacgagtgggtatataggaatccaaatctgccgaatcactcatgttatgatcttctacatcctaggtcttcccgttccttcatctggcttatgttcttcatgtagcattcagactgaatgactctatgaaattacgtcgctacttccacatggtacgggtaacgtaggagacatctctatttttcccggggggaatccttagaattaccacagcttagcttttaattcgcctctgaccatcaaatgaaatgtgaataacgccgtctccccttttttgagactttgaaacaaagggtgcttccggttctgtcggtggttgaaacaattttgtcttctccatattacta

SEQ ID NO: 5283 - DNA, 369 bp, Glycine max
tttaaatttcttttaagatctccatgctgaattaatttttgttttgaattcttaatacatccttttgttgcattggatttcttatatattaaatgtgattttgagtttttattgtataacgtgttacatctcaatggtagatatatagtaggaattgactgttgagatgatatcatattatcactcacttactcaaaataaaagttttgacatattagggatattatattataaaaaaattatttgagacccaagtaaaaattgatcatctatttattatgatatcaaagatgtttaaacatttttttggcattttagagtgaattgagatgtaaagaaagagggatatttgtgaattgctagaatcat

SEQ ID NO: 5284 - DNA, 331 bp, Glycine max
agcttgtagggttaaagtctcatgattgtcttgtcctcatgcaacaattttcaaccgtggctatacgagatatcttgccaaacaaagtccggttatcgataactcgactgtgctttttcttccatgctatggttagcaaagtcattgatccattcaagtttgatgagttggaaaatgaggccccaattatattgtgccagttggagatgtatcttccccctactttctttgacatcatgattcacttgattgtgcatctggacagagaaatcaaatgttgtggtcctgtttatctactgtgaatgtaccccgttgagcgatacataaagat

SEQ ID NO: 5285 - DNA, 440 bp, Glycine max
  unsure at all n locations
tgtaggccttggatcttcttcatcaatggagtcctttgcttcttgaattttaatggcagcaaaatggagaagaagaagagttgagcggagacgccacttcaagaagaagatgagtctagaagaagctcaccaccataggaagccacggataagagcttgaaggtaggagaagatgaatggagggagagggagagaaggagcaagaaattttgtgcctcaaaagaggtgtgaactttgaagtttaattctcaaatgataaaagttgaaaaaatgcacacacatggcctttatttatagcctaagtgtcacacaaaattggagggaaatttgaatttctattcaaattttacttgaatttgaaattgaatttgtggagcaaaaatttcactaattatgattagtgaatnttagctatggtttagccccctaatcgaagatca

SEQ ID NO: 5286 - DNA, 240 bp, Glycine max
aactccccctttgagaaaattcaaacgacaataactttttactcggatgtctgattgagtcccggaatatatctagagggtcgaaattggataccgaagctctgagcacattcaaacgacaaaaactttttactcggatgtctgattgaattccgtaatatatcgtaaagctcgaaattgaatgccgaagctctgagctaattctaacgacaaaaactttttactcggatgtctgattga

SEQ ID NO: 5287 - DNA, 488 bp, Glycine max
agcttatgctaatctaccttgcaccccaagttcaacacggtcccaaataaatcaaacactatcatatataggcataggcacatccatcattctctcatcaattcatccattattagcttttttgtttcttcaattttttcccatttctttagcccacaattccaaggaacaaaaatgatgagagagggtcaacaacatggtatggtgagatcttattggatcctactaaatccacttaatcctagacctaataccagaatcattaatcggtctaattccccttacaccactagaaatatttggtagggtttcttctaagccaactaatcactcaaagtacacaggaaagtgtggcaaaccacgttgccctgggtgccacctctactcagcttggaagtccaagggccaaacccaaggtaccaaaaagcacaaacacttagtaacacactactataaaaaataagctttaaccgatgtggattcaatga

SEQ ID NO: 5288 - DNA, 460 bp, Glycine max
  unsure at all n locations
tgtaaacttgtccaaaatcgcgaagtgaacctcggatccctgtcagatacaatactagaaggaattccatgcaaccttactactttcttgatgtacaactccactagcttctccattctatacttcatattcaccggaataaaatgagcagatttggtgagtcgatctactatgacccacacagcatcatgtccacgactagtcttangtaaactagatacaaaatccatagatatgctctcccatttccattccgggatttccaatggcttcaattctcccgatggtcgctggtgctcaaccttagccttttgacatgtcaaacatcttgctacatattcagctacatctttcttcatgccatgccaccaaaaacttctcttcaaatcttggtacatcttagtcattcctggatggaaactaagacgacctttatgcgcttcttccaagatcttaactc

SEQ ID NO: 5289 - DNA, 633 bp, Glycine max
agcttctatagaaggttcgttcctaatttctctacaattgcatcacctctcaatgagctggcgaagaagaatgtggcatttacctggggtgaaaaacaagagcaagcctttgctttgctcaaagaaaaacttactaaggcatctgttctagctcttcctgacatttctaaaacttttgagctagaatgtgatgcctctggagtgggagttggagctgtattgttacaaggtgggcaccctattgcttattttagtgaaaaacttcatagtgccaccctcaactaccccacctatgataaagagctttatgccttaataagagccctccaaacttgggaacattaccttgtttccaaggaagttgtcattcatagtgatcatcaatcacttaagtacattagaaggcaaagcaagttaaacaagaggcatgcaaaatgggtagagtacctatagcaatttccatatgttatcaaatacaaaaagggaaatacaaatgtggtagctgatgccctctcttcgagacacacattgttttgctccctaagagctcaaatttacgatttgataatatagggacttgtatgctttagatgaacatttctcttccatttatgatagttggggaaaaaaggc

SEQ ID NO: 5290 - DNA, 378 bp, Glycine max
gacactatgaaactaagcttgagcaacttcaaacgacaataaacttttacttcggatgtctgtatggagtgcccgaaatatatcgggacgccccgaaatggaatacggaagcttttagaaaattcaaacgacaaataactttttattcggatgtctgattgagtcccgtaatatatcgaaacgctcgaaattgaatgttgaagctctgagcaaattcaaacgacaataacgtcttactcggatgtctgattgagtctcgtaatatatcgagacgctcgaaatggaataccgaagctctgagcaaattcaaacgacaataactttttactccgatgtctgattgagtcccgtaatatatcgagacgctcgaaattgaat

SEQ ID NO: 5291 - DNA, 183 bp, Glycine max
gatcaaaagatttgggatggatagtgcaaaacacatgtctacaccgatgagcactaattgttacttagataaagatgaatctggtcagtctatagacataaaacaatatcgaggtgtgatcggatctcttctttatttatctgctagtacacctgatattatgtttagtgtatgcatgtgtgc

SEQ ID NO: 5292 - DNA, 486 bp, Glycine max
ccggtcatggaaagacttggcaactgccttcattatgtagtaccaatacaacatgggtatggctcctgatcggaaccaacttcagagcatgaccaagcgggaacatgagtccattaaagaatatgctcaaaggtggagagacctagcagcccaagtcgtcccacctatgactgagagggaaatgatcacgataatggtagatacgttgcctacgttctactacgagaagctgataggatatatgacgactaactttgcagacctcgtcttcaccggagaaagaatcaagtctggactgaggaaaggcaagtttgaatatgcctccaacactgtccccaacaacaatagaagagccccagtggtgggcacactgaaaaaggaaggagatacccacgcagtcaccaccgccccaacatggatgaaaacgccccagaacggccaaaactcataccagcacaaccacgcgaatcttttttatccgagccg

SEQ ID NO: 5293 - DNA, 471 bp, Glycine max
agcttggaagcattttgatagaatgcattctatgtttactctcctaggaatgtcaaattagaaaaccttactcttgttggctagttatcttaactccatataccccccccccccccccctgatttttgcaggaagagggaaattatggttttgaaattcttaattccatgtccatcaaatccaaagcacaaaattgatgtgactttgcaattgctaataaatgagttatgtaccttatggaatgatggcgtactaaatcaccatgtggctttgaggctaattcttgagataaggctgttttgatgtggactttaaatgacttctcaacttatgggattgtgtcatgttggatgacgacagggacacttggattgtctatttgaatggaaacatacaaaggcattcacaaatataaactttgtcaaagctttggatttttgattgtcatcaccaattccttgcccttgatca

SEQ ID NO: 5294 - DNA, 401 bp, Glycine max
tgctctaagctgtcaattcccttagaaaaattttgatttttatagcttcatcaaaaccatgagtgggagtttgcctaagcaaatatctaaatctttcccaagcttctctaaggaactcatcatatgtttgttggaaaatatatagcagcctttcccttgttgatctttgaccttgggaaatacttgtacggaaacttggccattacgtcatcccacctaaacaagttattcggaggaaaggatcttaaccatgagatgacatctctagctagagaaaaaaggaaacaagcacaaacttcattcgccacatgatttatcttcacggtgttgcatatgtcaatgaaggttgattgatgtgtttatggattctcatgattatgctcatggaattgattattttg

SEQ ID NO: 5295 - DNA, 383 bp, Glycine max
tattcaaatatgacttaaaacaaaaaagaatttcatatttttcagggatcaagaatacattttagtccagaattgaagataacacgttttttaaaatttggacattgctgttcctcaatggttattttggtttgtgttgtagggagtctctgctgttagggccttttatgagctacttagccagtccagcttaaatgtcctaaatcctgaagagaacaagcatgtagccccagtggagctctgtcccatcttgaagatgttatacagaatattgataataaggtaacacatttagctacctccttttttacctttgaatgatcaaaacagagaactgaattctaattgtgaaactaccattttcaatggtttttgctgatctt

SEQ ID NO: 5296 - DNA, 509 bp, Glycine max
agcttgaccaggaattacttgtatgggttggatgttgaattctggttgttcctggtgcggagatgatggtacagcgggtgaaccacaagcggaagtttcttttggtgaggtagccatggaaaaacagagcgtttggaatgatttcgaaaatctcacaaaactattgggaaatgctggtaaaaacacgaatgccaagcagatataaatttgaatgaagaatgtagaggggcgtgtgaggcaacggtcgaatttgctttgtggtgaacgtgctattaatgttaagtgattcgtttgggcacgttcagattgcagtagctgctataattcctctagcagacaaatgcccagcttgcccctcagttattcaaactgatttgcatccaaagcctttgagaaaatatctgctatttgttcctcagtgtcaacatgcttcagtgtgatcactttattatcaacaagatctctgatatagtgatgcctaatgccaatgggcttggttttgctgtgtt

SEQ ID NO: 5297 - DNA, 544 bp, Glycine max
  unsure at all n locations
agcttctcaaccaaatccaaaaccctcacttgcttcgtgaattgccagcagtaacctctcttctaaatggtgtttagatggatactccggcgagctaatagaataatctgcttgaagaaaattccgttttgattatttcaaatcacacgactataatgatccatcaaaatataaatatagcctatagcttacagataatcacactgaatggtaataggtatataggcctatagggaattttgaaaagggggaaaagacataccaagtatgagcagaaggcaagtgatcaggacttccatatgctttgtgtatctgaaacttctgggagcctgaaattccttgaagagcgctaaagccttccaaaggcacctgaaacattagtgaaaaaaatgttttaacggcttcaagtttgcaaaaataatatgccaacatcattaatatatcataacaaatcccaggacaaagagaaagctctgatccaaggtgggcaaaattgagatcttatggggagaagaatganagaactcgtgaacatgaatcataa

SEQ ID NO: 5298 - DNA, 346 bp, Glycine max
  unsure at all n locations
tgctaatagcctcatttggagattatgagataaaggagacacaataagagttgattctaanaatattatgtcctgngctatatggaatacacttcaacttcttgaagaacctttgggagattatgaacgaggatatggtgaggttcattttcgaattccatgctcatggaantctacctagaggtactaatgcttctttcataactcttgtgcccaaagtagaagacccatataactgagtgcgttatacccataccttggtgggatgtatgcacaaagttctaacanaactcttatagaatagaatgacaaacgtgatgaatggggtgaatgatcatagacaaag

SEQ ID NO: 5299 - DNA, 451 bp, Glycine max
  unsure at all n locations
ctacaagggtatgataaatntgctggaagaatcaatgaaacattggactatcgctccgcgagagatgcgcaaggacatggaacacacacagcctcaactgcagctggtaacatggtgagcaatgccagccctttcggcttggcacgcggttctgccagtggaatgaggtacacctcaagaatagctgcttataaagtatgctggcgtntaggctgtgctaactctgacatattggcagctattgatcaagctggtgctgatggtggtgatgtgtagtcactctctntaggtgggatgctaaaccttactacaatgacagcagtgccatagcctcatttggagcaacacacaaaggagttgttgtttcttggtcagcacggcaatctggtccctctagatcaactgctggatatgttgcccatggatcatgactggtgctgctagctacact

SEQ ID NO: 5300 - DNA, 281 bp, Glycine max
  unsure at all n locations
gctatgctgcanaaattacaatagacctcctcaaccctagcagcaaaatcaaccacagcagaacaattatgacctctctagtaacagatacaatcccggatggaggaatcaccctaatctcagatggtctagccctcaacaacaacaacaacaacaacctgctccttccttccaaaatgctgctggtccaaacaggtcatacgttcctcctccaatgcaacaacatcaacaacaatagcaacaatagccacagagacaacaatcaactgaggccccttctc

SEQ ID NO: 5301 - DNA, 241 bp, Glycine max
  unsure at all n locations
agtcccgtccaggtagtcccganatagactagcctcacagtgatcaganatgagaacgatgagctgattcctactcgggtgcagaacagttggagagtctgcattgactataggaggctgaaccaggttaccaaaaaggaccatnttcccctgccattcattgaccagatgctagaacgcctggcaggtaaatcccactactgtttccttgatggtttttctgggtatatgcaaattacta

SEQ ID NO: 5302 - DNA, 357 bp, Glycine max
gctatgaaatagtttattatgactccttcgataagcttatgagacaataagaagttcgcgacattaagctctctaagagcttatggaatatgggtggtgttggataaataacttaattaattacttattgaataagtgattatcatggaaaagttgtttatagaaccaaagaggaaataatgtaaggtgtaaggtgttctcataagctatcgtagagagcttattgaagtaaagctgaaaagagcttatatgcatattgtaaccgattttttataagcttttccaccagttacataaatgtttatgtcataagataagtcaaataagctgtgtaaataagctcttaaactcaaactt

SEQ ID NO: 5303 - DNA, 376 bp, Glycine max
  unsure at all n locations
atgctctngcatnctcanacactcggtctattgntgatctgcctgaaggtaagcaaccatatggttgcaaatgtgtgtacaagatcaagcatcatgctgatggatccattgaacgatacaaggcccgtttggtggcagagggatacactcaactagagggtgtggattatnttgacactntntcaccagttgctaagcttaccacaattcgcacccttctatctgtggctgctattaaggactggcacttagaacaacttgacgtcaacaatgctnttcttcatggtgatctgcatgaggaagtatatatggatctgcctcctgagtcttactgcctgttcttctttaataagtctgaaatacataagtcttatat

SEQ ID NO: 5304 - DNA, 366 bp, Glycine max
  unsure at all n locations
gcgtctcgatataatacgggactcaatcagacatccgagtaanaagttatggtcgttggaatagcctctgaggttcaacattcaatttcgagcgtctcaatatatttcgggactcaatcagacatccgagtaaaaagttattgtcgtttcaattggctcagaggttcaacattncaatttgagcgtcccgatatattacgtcactgaatcggacatccgagtaaaaagttattgtcgtttggaattgctcaaatcttaaacatttcaattcgagtgtctcgacatattacgggactcaatcaaacatacgagaaaaaagttatggtcgtntgaatttgctctcagcttcaacattcaatttcgagt

SEQ ID NO: 5305 - DNA, 359 bp, Glycine max
  unsure at all n locations
ctatgaatctccggtagtatcctgctaagcccataanactcttaatctcaaaaacaaacttagcactctcccactcaagaacagcttctatgttagatggatctacagctatacccncttgagatatcacatgtcctaggaaactaactttctctaacgaanactcacacttggacaacttagcatagaagtgtcagtccttaagagtatgcaacacaatcctcaaatggtcttcatgctcctctctagtcttagagtataccanaatatcatctatgaatactaccacanaactatcaaggtaagggtggaaaactctattcatgtagtccataaacacttctggagcattagtcaca

SEQ ID NO: 5306 - DNA, 266 bp, Glycine max
  unsure at all n locations
tggaagctgtcgagaaantcanatggtcctatcttctcanacggatgtttgtattggacacataatatatcgagacgctatgatattgaacgaattggaacctctcgagaaaaattcaattggtcataacgtttcacactttatgttcgattcgggcgcattatatatcgtgacgttcgaaattgaacaacggaacctcttgagatanttaaatggtcataactattcacacgaatgtccgattcagggacttaatatatcgagac

SEQ ID NO: 5307 - DNA, 360 bp, Glycine max
  unsure at all n locations
gccactctgattacttttcctcctctgngagcataattctaagggaagccattcttcctaaaacatctatcaactgtatgaatgtctttgccacagtaagtacatgaaaatcctgaattcgatgaggttgtgcttgctgcattgatcaagctactgtttcctatcatatcattgctattaatctatctttcttgttgaattgcataagaaaagactttagttatgccaggtaaaggatccatcatcaatacattggatctgacagtgttgtactgatcatttaatcccctaaggaattgcataactcgatcttgcttctttctttccataacactaacaagagcatcacatgtaccattt

SEQ ID NO: 5308 - DNA, 447 bp, Glycine max
  unsure at all n locations
agcttagtaaagctaagcactaacaatactcctctttggcgaattatgtctagaacatacttagacacttnctgagcaggtacgagcagatatgcaagtgggatcagcaactntcattatcagagtaatcaagcacagcggtatctgtagtggcgacagcaaaattctgcaggttgcaagtcgttgtcaggatgtcaagacatctcatgtgacatcagctntctgctccccctgtctccatgctgctactgctgtgaagcagttcactgcagcatcttctatcagctactatgcttctccaggatgcaagacatctcacgtgacatcagctnttngctaccnctggctccatgctcgtactgcatcttctatcagctactaagttcagtagcgtacatcagtcatcatcagcagcagtctccccctcacaatcatatacatacaact

SEQ ID NO: 5309 - DNA, 281 bp, Glycine max
actcggatgactggatgagtcccgtcatatatcgagacgctcgaaattgaatgttgatgctctgagcaaattcagacgacaataactttctactcggatgtctgattgagtcccgtcacatatcgagatgctcgaaactgaatgttgaagctctcggccaattcaaacgacaacaacattttactcggatgtctgcttgagtcccagaacatatcgagacgctcgaaaatgaatgtggaagctctgagcccattcaggcgacaataactttttactcggat

SEQ ID NO: 5310 - DNA, 465 bp, Glycine max
  unsure at all n locations
ctgcagctaagctgttacatttctaaaagtccctgaatttanaattataatggccccttcataatnntcaaaactttttcaataggatcactgaatccaatctgctggtaggtccctacanagatccaattgaaagaataaacaatatggggacccaattatagttnttaaactataggaacctatntaagaataccctacacataaagggggctggcaganntaattaactactaatatattcttcagctcccgcctattatgtgaacaccttgnncaacagaatattnttgttcagtttatattanaatcacatatacgtagaagtagaatcaactactaaantatttacctcaacactattcttgccaatccatgttcctataagacaatcttctttatcctctccaggatatgtatactgaaagatgaagcaatctncactattaaaatttgactgatcag

SEQ ID NO: 5311 - DNA, 256 bp, Glycine max
  unsure at all n locations
tcgctggggcagcatctagagtcctagaagcatattatatcaccctgtgcaatntatcaattntctgagcaaggacagcgcccaatgcataatttgatgcatcacacataagctcaaaaggggctgttcaatcggctgcctggatgatggaggtggtagtcagcgctctcataatgcaatcaaaagcctctttgcatctgtcattaaagtcaaactccacctcctttngcaacatgttggacagtggaatggctac

SEQ ID NO: 5312 - DNA, 385 bp, Glycine max
  unsure at all n locations
gctacatcactggggaagataacaatatcgattcatccggagacctcaaanatgaagttgtanatntaagtctcatggccaacaactatgaaagcgaagaagagaggatgctctanacacatgatgggagatgcatcaaagtttactcatatttctcccaagaatagtggacatgtgacttatggtgacaacaacaaaggtaaaattcttggagtcggaaaaataggtatgaatccatctacctccattgaaaatggtttacttggtgatgatcttaagcatagtctgctaagtgttagtcaattatgtgataaaggtntctagtggtcattggactctcataatgtgatattaaaaataaacatgatnaaaaatataaacatta

SEQ ID NO: 5313 - DNA, 419 bp, Glycine max
  unsure at all n locations
ttaaatgtttaaatattttcatatatttatatattaagtagttaagaattattaataatcagttntttcagggagacttattaattgatatgtgatcatcgattgagaaaattatatatgtgatggttgatgttagatgaattatggtactttatcagattatagcaacggtctttatgatttaataaaagagcttgtatgcaaatatatntagtaacatcctctgtgatttcctataataatgctgtgtaaattaaaagcatacactaacattgctttgaagcataccctacactcttcactntcttcaatcttatctacacttctagataagagaattatattaaaacagagatcttgataatatacaaattagaaatatatataatggtctcatttaaatcttagatgttaaaaat

SEQ ID NO: 5314 - DNA, 462 bp, Glycine max
  unsure at all n locations
tcacctgcggcatgcaagcttggtcatcttgagctagtaggtcatcatccttatttgaagttggtggngcaacatatttctttggcctaataggaactccaatatttttgcagcttctgatgttatgattggtttggccacaccttccacatgtaaagtcaggcaatttcctctttagcctatgtcctatgacattgtcttcatctacagatctcattctatttttcttaggccttcctctttggacctttttatgtggtggaacaggttgtgcatgttgtgtctgggcccaatattgtggtccttggactggttcaataaaatggtggtatgtcttgttataagcctctattgacagccactcatgacacatgtcctcaggcttgcctcctttgtgacttattgntgcaatggcatgtcgcatggcatccctacatcaaagttgtcaaatcagcacacatg

SEQ ID NO: 5315 - DNA, 449 bp, Glycine max
  unsure at all n locations
agcttaacaaaaggcatgtgaagngggtggaattcctatatcaattcccttatgttatcaaacataaaaagggaaaaggtaatattgtagccgatgctctttctcggcgtcatgcattactttctatgcttgaaacaaaattgattggtcttgaatgtttgaaaagcatgtatgaaaatgatgaaacttttggagaaatttttaaaaattgtgaaaaattttcagaaaatggtttctttagacatgaaggctttcttttcaaagaaaacaaattgtgtgtgcctaaatgttctactaaaaatttgcttgtttgtgaagcacatgaaggaggtttaatggggcattttggggtccaaaagactctagaaacattacaagaacatttttattggcctcatatgaaaaaggatgtgcagaaatattgtgaacattgcattgtatgtaaaaag

SEQ ID NO: 5316 - DNA, 446 bp, Glycine max
  unsure at all n locations
agcttatatgcccaacaattaaatcagcgtgcttatgctttatagtgtgggggaaggaattaccaggatccttgcacaagatgaaaataattttctctctttgaccgtttaaaatgataattgctcaaataatcggtttaatcagctctcaaaccgatcaattagagaattgaattgataaagaacataataaaataaaaccaaattaatggcaaaaacggatttgaactggagtatttcttatgctttttattcataaacctttgttaaataacactcgtacaagaaatgtatctgtaaaacggaattttaaataaaatactaaagataaaagtatgaagaaaaaaacttatangttntcaaagttaattcaagtaccttcttctaaaaaataaattattaaaataagtttactttataaacanatagcttataaactagtcaaa

SEQ ID NO: 5317 - DNA, 277 bp, Glycine max
  unsure at all n locations
cttaactcggaggtccgatacaagcgcataatatatcgagacgctcgaaattaaccaacggaagctctcgagaaattcaaatggtcataacttttaactcggatgtccgattcaggcgcataatatatcgagacgctcgaaatntaacaacggaagctctcgagaaattcaaatggtcataactttttactcggacgtccgattcaagcgcataatatatcgagacgctcaaaaattaacaacggaagctctcgagaaattccaatggtcataactt

SEQ ID NO: 5318 - DNA, 344 bp, Glycine max
agcttctacattcaatttcgagcttttcgatatattacttgtactcaatcggacatccgagtaaaaagttattgtagttcgaatttgctcagggcttctgtattccatttcgagcgtctcgatatattacgggactcaatcggacatcagagtataaagctattgatggttgaattttctcagagctatcgctttccatttcgagcatctcgatatattacggtactcattcagacgtcccagtgacaagttatgtgagtttaaattgcccagggcttcggtattccattgcgagcgtttcgacgtattacgggactcaatctgacatccgagtaaaaagatat

SEQ ID NO: 5319 - DNA, 409 bp, Glycine max
  unsure at all n locations
tctgttagtgttatgcctctgtctatttntaattctctatcttaggtcccttgcagtcaactgatgtggtaattcatttagctaatagaagtgttgcctaccctgttggtttcatagaagatgtcttagttagagttggtgaactgattttccctgttgatttttatattttgaatatggaggatggattttctcaaggatcagttcccatcattctaggcagaccctttatgaaaactgctagaactaagatagatgtttatgcaggcacactatccatggagtttggtgatataattgttcattttaatattctggatgctatgaaatacccatatgaagatccttctgtatttcgtgctgaaataattgaccatgtcgttgatgaatacatgactgatctttactc

SEQ ID NO: 5320 - DNA, 398 bp, Glycine max
ctcagcttgtgaagcaaaggccagctatggtcttcaaggtggattttgaaaattctctatgactcagtctcatgggcttttctggattatatgctgcaaagaatgagcttttgccccaaatggagacaatggatttctgcctgtctcaattcagcaaccatttcaattcttgtgaatggcagtcctacaaaggagattgctcctactataggcttgatgcaaggggaccctttagctcccttactcttcaatatagttggagaaggcatcacaggattgatgagggaagcagttcagaagaatgtatatagaagttacatggttggaaagaaaaaggaacccactaatattttgcagtatgcagatgacacagtatttgtgggaggctgcttgggaga

SEQ ID NO: 5321 - DNA, 306 bp, Glycine max
  unsure at all n locations
agctntgagcaaattcaaacgacaataacttttgactctgatgtccgattgtgtcccgtagtatatcgagatgctcgtaattgaaaacagaagctctaagcaaattcaaacgacaataacttttgactcgggtgtccgattgtgtccggcgtatatcgagatgctcgaaattgaaaactgaagctctgaaaaaaatcaaatgacgataactttttactcggatgtccgattgaatcccgtaatatatcgagacactcgtaattgaaaatagaagctttgagcaaattcaaacgaccataacttttg

SEQ ID NO: 5322 - DNA, 438 bp, Glycine max
  unsure at all n locations
ctcaagcttatgctgcatanattacaatagacctcctcaaccttagcttctaaatcaaccacttcagaacaattatgacctctctagtaacagatacaatcccggatggaggaatcaccctaatctcagatggtctaaccctcaacaacaacaacaacaacaacctgctccttccttccaaaatgctgctggtccaaacaggtcatacgttcctcctccaatgcaacaacatcaacaacaatagcaacaatagccacagagacaacaatcaactgaggccccttctcaaccttccttagagcagttagtgaggcaaatggcaatacaaaatatgcagtttcaacaagagacaagagccttcattcagagtttgacaaatcagatggggcagatgaccactcagttgaaccatgctcaatcccaaaactctaacaagct

SEQ ID NO: 5323 - DNA, 456 bp, Glycine max
  unsure at all n locations
cagcttgagccnaaacccaactcgcgctaaatcttgatctgttttagaatctccatcctcgccctcagaagaaaacaaaaggaaaaaagaatgttcccgaccaaagatcggaagagaactaatagaaaatatacagaaaggtcttctgaccaggcaacatctgaacagaacataactgtcaccagcaaacaagaaaagaaaggaaaccacaatttgaagtggtcctcttcctttgattaccaaccaaaatctcatgcactggcaactttctcgttccgcactaaacaaaaacagagagggaaaggccaaaacactcagagccaaattttccaccaaaaacactattcaccaaaagtcctattgatccgtgatcacatgtgtaatctttgatttgataggaaatggcttgcaattcaagtcatgacatatctatggtttggaattaagatgaaacac

SEQ ID NO: 5324 - DNA, 326 bp, Glycine max
tatcacggacctatgaaactaagcttaacattcaatttcgagcgtctcgatatattacgagtcttatatcaaacatccgagaaaaaagttattgtcgtttgaatttgctcagaggttcaacattcaatttcgagcgtctcgatatattacaggactcaatcagacatccgagtaaaaaggtattgtcgtttgaattggctcagagcttcaacattcaacttcgagcgtctcgatatattacgagactcaatcagacatccgagtaaaaagatattgtcgcttgaattggctcagagcttcaacattcaatttagagcgtcttgata

SEQ ID NO: 5325 - DNA, 386 bp, Glycine max
  unsure at all n locations
agcttagagccaattcaaacgacaataacttcttactcggatgtctgattgagtcccgtcatatatcgagacgctcgaaatttaatgctgaagctcttagccaattcaaacgacaataactttttactcgaatgtctgattgagtcctgtaatataacgagttgctcgaaattgaatgttgaagctctgagccaattcaaacgacaataactttttactcggatgtctgattgagtcccgtcatatattgagacgctcgaaattgaaagttgaatctctgagccaattcaaacgacaataactttttactcagatgtctgactgagtcccgtnatataacgagacgctcgaaattgaatgttgaagctctgagctcattcaaacga

SEQ ID NO: 5326 - DNA, 401 bp, Glycine max
  unsure at all n locations
taatacccaaaatcacatctacacgaccaaggtctttcatatcaaattttctagacaagaaagacttcacatcatttacatattactaccaaatatcaatatgtcatccagatacaaacataaaatgacacatccactatcatcaaattgtttcatatacacacattatcactatcattaatttgaaaaccatacgaaagaataactngatcaaacttttgtgtcattgctttggagcttgtttcaaaccatatagagatttaacaatttatttttcaaggaaaaacattttcaaagaaagtgacatctctagattccataatagtaccattagaaatttttgacacttctgaattaacaactaagaatctataagaagtatcatgttaagaatatccaac

SEQ ID NO: 5327 - DNA, 395 bp, Glycine max
  unsure at all n locations
cggatggagaagaagagagtgcgaggaaaatagggcttgctttctaatatttntaaatgtagcttcaacatcagttttcaatacaaaactgatgttaactatgtgatgtaaacgttaacatcggctttatgaaaaaaatcaatgttaatgaagtcatgttaacatcggtttttgaaaaaccgatgttaatgtaagttcgttaacatcggttttctgcaaaatcgatgtcaactaatgcacattatttacaattatgccaccgcatttatgttaacatcggttttaccaaaaaccgatgttaacctgatgatgttaaatctatagtctctagtagtgcctttgaagcagatgtaaaagaacgtcaacgaaagattacgatttgcccttcattgatt

SEQ ID NO: 5328 - DNA, 441 bp, Glycine max
cgcttgatgtttgtgttgaatgcattaaaggtaaatataccaatagaaagaaattgggtgcatatagagctacaaacgtcttggaattgatacatacggacatttgtgggccatttcatacaccttcatggaatggtcaacaatattttacatcactcatagacgattactccagatatgcatatatgcttcttatacatgaaaagtcacaatctctagatgtgttcaaaacatttaaagttgaagttgaaaatcaactcaataaaagaatcatgagtgtcagatctgaccatagtgatgaattatatggcagatatgacagttcaggtgaacatcgtccgaggccgtttgccagctacttagaggaatatggaatcgtcccacaatacaccatgtcggggtcacttgcatgaacagtgtgactgaaagacgaaacataac

SEQ ID NO: 5329 - DNA, 308 bp, Glycine max
tagcatcactcttaattgtatcattgtgagctttatgtgcttagggaggaaaaacagaagcaaccaaataattcacaatattggaaaactagggagtggggaaggaatcagaaatactatacagaatgtacaaatggtcatccagaaaatcatcccgaataggtgagtccttagacacacgctcaatcctactcaagtggtcaaccacaaggttctgtgcaccgctccgatcacggatctccaaatcaaactcttggagccaaagcatccacctaatcaatctaggctttgattcagccttcttcaac

SEQ ID NO: 5330 - DNA, 413 bp, Glycine max
  unsure at all n locations
agctntnntattttagcagatgaagatgaatctgtggccacctcatggactcctctaaggacaatagcataatttcttgcactgaattgttgggagttggaagccatcttctcaatcaaattcctagcctcaacaggagtcatatcaccaagggctccaccactggcagcatcaatcatactcctctccatgttgctaagtccttcatagaaatactatagaaggagttgctcagaaatctggtggtgaggatagcttgcacacaatttcttgaaactttcctagtactcatacaagctctctccactaagttacctgatgcctgaaatgtcttttctgatggcagtggtcctagatgcagggaagaatttctccaagaacactctcttaaggtcatnctagctggagatgga

SEQ ID NO: 5331 - DNA, 366 bp, Glycine max
  unsure at all n locations
tccattggtgtctngaagtctaaagccgatgaaggacatctgttaatcacataggctattgtgtttgcagcttctccccaaaaggtctttggcagtccagcacttatcggcatgcacctcactctttccaaaatggtcatattcattctttctactaatccattctgctatggagtgtaacggactattgagcgccgtttgatacctgatgctccgtcaaactaaacgaattgctctgaaacaaactccatgccatttttactccttaaaactttttgtgttgtaccaagctgatttccaataaaagtatgtcactctctgaatattttaaaagcttctaatgtgttatttaaaacatacagccat

SEQ ID NO: 5332 - DNA, 454 bp, Glycine max
  unsure at all n locations
agcttgttgtgtcttatccaatgantttctttgatagatagtaggcaaattacaatttgatttgatagctcactaagattgatcttatagagattgcctttcctcttagtagaaaagagcttagtcccatttttattttggacaatacacccttctttgttaaaggaaacatcatttccattgccacataattggcttatgctaagcaaattatgtttgagcccttcaacaacaaaaaaaaaaaaaatctataagaggatggggatgaatacttatcttatgtactcctgttatcttcactttatgattcttgtcaaaaaagactattccaccatgcataggggttaggcattggaagatacacctttctcctatcttgtgtcatgagcattcgttgtccaaataccatgaatgatgtatctttcttttggttaaagatatatgcaacaagaat

SEQ ID NO: 5333 - DNA, 270 bp, Glycine max
  unsure at all n locations
ttggagtntccaagtgccaattcgactgcttctttagtccagtcttcttctagcttcaatccatcagtgggctttccttctgtgtccagcatcttgggatgttcccagcctttgatgacagctttccaggctctgctatccagtgatttgaggaaggccaccatccttgctttccagtattcatagttggttccatccaggattggtggtctgttcactggtcctacttttttctccatgttcatcagaatttatcttcctagatctcac

SEQ ID NO: 5334 - DNA, 311 bp, Glycine max
  unsure at all n locations
tcttagatctgtcagatccaagcccagatctatgtctagatttaaaaatagtattagaggaagttgctcaacttccccaacctccaacactaagtttccttcgtcggtggagacgtcaaggagttcatgttgattcattcctctattgacaacaagattcaggccatttgcaaagggttgactgagttgtggaaacaaggaaaaatctagttacgtgcatggaaatntgaacccaaaaccaaagatttgagaataattcgtttctttgatttgattttggttgaatttctgtcatggtgtgaataatgcat

SEQ ID NO: 5335 - DNA, 382 bp, Glycine max
gtggaaaattttggcacggaatcatcagaggtggctaagtcttaagatggtcgcgttgttggagtctccaaaatgatatcctcatctttttcacggtcagctgagagagctccttcctttaacaacgagacacaaatagtgttatgccttgtggacgggtgccactctgatctcagtaactgcaaagactatcatagacgccataaggtccgtgaagtccattccaagactacacaggtcacaattggaggtcagaaacaaaggttctgccagcagtgtagcaagtacatgtttcatatgaaatttctcatcatttgctctcttaattaatgttgttactatttttttaatttggataatgtataatttgatcacccggagt

SEQ ID NO: 5336 - DNA, 409 bp, Glycine max
agcttcacaaaagtttatgtggcttgaaacaatcaccgtgtcagtggtacaagaagtttaatgagtttatgagcaactcaggattcaacagatgtgacatggaccattgctgctatgttaagaaatatactaatagttatgttatccttgtcgtgtatgttgatgacatgttgattgcaggatctagtatggcataaattaacaagttgaagcagcagttggcagaaaactttgaaatgaaggatcttggtccagctaaacaaatccttggtatgagaattcttagaaacagatcagaaggaattttgaagctgtctcaggagaaatatatacacaagttgcttgacaggttttaccttggagattctaagaccaagaatacccctttaggatctcatttgaagttttt

SEQ ID NO: 5337 - DNA, 441 bp, Glycine max
agcacatgctaacgacaataacatttcactcggaagttcgattgagtcccgtaatatatcgagacgctcgaaatttaaaaccgaagctcgtagaaaattctaacgaggataacattacactcggaattccgattgagtcccgtaatatatcgagacgctctaaatttaaaaccgaagctcgtagcaaattctgacgacaataacttttcactcggaaggccgattgagtcccgtaatatatcgcgacgctcgaaattgtaagccgaagctcgcagcaaatgctaacgacaataacatttctgtcggaagtgcgattgagtcccgtaatatatcgagacgctcgaatattaaaaccgaagctctgtgcagatgctaacgacaataacattgcactcggaagttcggttgagttccgtgatatatcgagacgctcgaaattta

SEQ ID NO: 5338 - DNA, 382 bp, Glycine max
tgacaggttcaggtgtaggtgctgctactggtggaggcacttgaatttggttgccggacctcaaggtgatggcactcatatttttcggattctgcacagtttgtgaaggcaatttgtcagaattttgggactgagcttggttcaactgagtagccatatgccccatctgatttgtcagaatctgaatagaggctcttgtctcttgctgaaattgcatattctggatggtcatttgcctcactaaatcttctaaggaaggttgaggaggggcctcaattggttgttgcctttgttgttgttgttgttgctgctgctgctgctgcattggaggaggaacatatggcttgcttggaccaacaacattctggaaaggagggacatg

SEQ ID NO: 5339 - DNA, 435 bp, Glycine max
  unsure at all n locations
agctntcactcgcatgtccgattcaggcgcatatcgtatcgagacgctagaaatctaacaaaggaagctctcgagaaattcaaatggtcataacttttcactcgcatgtccgattcaggcgcataacatatcgagacgctcgaaattgaacaacgggttttttcgagaaattcaaatggtcataacttttcactcgcatgtccaattcaggacatcgtgtatcgagacgctagaaattggacaatggaagctcttgagaaattcaaatggtcataacttttcactcggatggccgattcaagcgtatacaatattgagacgctcgaaattgaacaacgagagctctcgagaaatctaaatgggcataacttttaactcggatttccgattcaggtgcataacatatcgagacgctacaaattgaacaacggatgc

SEQ ID NO: 5340 - DNA, 294 bp, Glycine max
  unsure at all n locations
tagctccaaactctntgggtggaggatgcatgaacagcgctaggcaatgacattcatggggctccgaaaaaagtggagaatggaggattggactatagggtccacactaggcaatcatgaagcataactccaaactctttgggtggatgatgcatgaacaacgctaggcaatgacattcatggggctccgaaaaaaagtggttggcaggaccgaacggtccaccgggtttttccacctaaaaggaaaacatgctttttgcaaagaaaaataaatcattcacgagagcaccatat

SEQ ID NO: 5341 - DNA, 288 bp, Glycine max
agcttcatggatatttatgtgatgacatggttcttggaaagacacttcaagcatcagcaattgtggcctctgatatagctgagcatcgaacttcaattgggaatgaggatcttctgccatctttaattatttgcccatcaactctagttgtgcactgagcctttgagatagagaagtatattgatgtttctgttatctctagtcttcaatatgttggctctgctcaagagcgaatgcttcttcgggatcatttttgcaagcataatgtcatcataacatcatatgatg

SEQ ID NO: 5342 - DNA, 421 bp, Glycine max
agcttaataagtacatctatggattgtaacatgctttcttccaatggtatctaagatttcatgaggtcatttcttcatttagctttgaagagaatgtcatggatcactgtatataccagaaggtcagtgggagtaagatttgtttccttgtattatacgtagatgatattctgctcgcaactaatgataatggtatgctatatgaggtgaaacaatttctctcaaagaactttgatatgaaggatatgggagaggcatcttatgtcataggcataaagatccatagagaaagatctcgaggcattttaggcttgtctcaagaaacctatatcaacaaagttttagagagatctaatatgaaagaatgttcaccaagtgtagctcccattgtgaagggtgacaaacttgtcttgagtcaatg

SEQ ID NO: 5343 - DNA, 430 bp, Glycine max
  unsure at all n locations
agctnttatccatggcctcctaggtggtgagtcttttctatactcatcttctccttgaaggggcgtctcctctctctcttccttctccattctgctgccattcatcttccaagaagcaaaggattccattgatgaagaagatcctaggcctacaagctccaatggagctaacatcaaaatatatcacatcccattagctaaaaacacagtttttcttgaaaaccagcatgcacaaggatagacatacatccccataattggttcactgaccccaactatggtatcaaaagctgtaaacaaacaataaactcccctcacttatctatatctctctgttagttccatgcggtgttgttctaagatctcttangttcacgtccgttcgtccaaacgtagagctctatataccaaatcanagataattcagtat

SEQ ID NO: 5344 - DNA, 346 bp, Glycine max
cgccagcttctgttttcaatacgagcgtctccatatattactttcctcaatccgacatcggagtaaaaagttattgtcgttagaatttgctcagagcttctgttctgaattttgagagtctcgatatactacggaacacaatcggacatctcagtaaaaagttattgtcgtttgaatttgctcagagcttctgttcttaattacgagagtctcgatatattacgggattcattcggacatccaagtaaaaagttattgccgtttgaatttgctcaaagcattcgttgtcaattacgagcgtctagatatattacgggattcattcggacatccgagtaaaaagtta

SEQ ID NO: 5345 - DNA, 315 bp, Glycine max
  unsure at all n locations
tccattntcaatttcgaccatctcgatatattaccggactcatccggacatccatgtataaagttattgtcaattcaatttactcaaggcttcggatcttaattttgagcgtctcgatatattacaggactcattcagacatccgagtaaaaagttattgtcgtttgaatttgatacaagcttccgttttcaatctggagcatctatcgataaattatgacactctgtcgggcatccgaataaaaagatattgtcgcttgaattctctgagagtttccgttttcaatttggagcgtctctctatattacgggact

SEQ ID NO: 5346 - DNA, 428 bp, Glycine max
agcggatgctcaaaacatatgactggagatgtatcaaattttacacatatctctccaaagaaaagcgggcacgtaacatatggtgacaacaacaaaggtagaatccttggagttggtaaaataggtacaaattcttcaaactccattgaaaatgttctacttgttgaaggccttaagcatagcctgcttagcgttagtcaattatgcgacaaaggctatctagtatcatttgattctcaaaattgtcttatagaacataagcatgacattaatataaagcatgtaggacatagagtcaataatgtttacatgatagacttaagcataaaactagaaaacaatcattgctttcttagcaaagatgatgatccatggttatggcataaaagaattgctcacataaacatggatcacttaaataaattaat

SEQ ID NO: 5347 - DNA, 275 bp, Glycine max
agcttacaaaatttatatggcttgaaacaagcaccgaggcagttgtacaagaagtttaatgagtttatgagcaactcaggattcaacagatgtgacatgggccattgctgctatgttaagaaatatactaatagttatgttatccttgtcgtgtatgttgatgacatgttgattgcaggatctagtatggcagaaattaataggttgaagcaacagttggcagaaaactttgaaatgaaggatcttggtccaactaaacaaatccttggtatgag

SEQ ID NO: 5348 - DNA, 442 bp, Glycine max
  unsure at all n locations
agcttatcatgatcatcataattattggctatatgaaggtagacaaaagatgcaacagtggaatctgtaactgctttacttttcagcattttcccataacaatgatcagaattctgactgaaattattaaactgagcattaagaggaaagtcactaggaagaagccaggaagaatctggaaatggctcacaaaagagatcaaccatatccgctccagggtcaaccagtagaacacggttagtgaggagagcatagagaaaagcagaagctagggtcaaaatcctattccctaagccactaaacgaaatccatacaacatatttacactctgnaggactcagtaaatgaccaccagacctaagttgttcaactgttttgttataggaatcagcgtaaggtccacattgtttgtgctgagcttcatattttcttaacctagaaa

SEQ ID NO: 5349 - DNA, 448 bp, Glycine max
  unsure at all n locations
agcttcctcgtggcttctttgagaagctntctcaagaggcttctttgagaagctagatccttatctatccacacccctcttttagctgaattaacctccttaaaaataattacggatgaaaataacgcaacaaataatcaaacatcaaacataattactaataatatatagatatatatatatcagggttttacaactctcccacccttttagaaatttcgtactcaaaatttaccttactcaaacaaggatgggtgagcttctcgcatctgactttctaattcccacgtggcatcttctcctgatgcacctccccagatcaccttgaccaacgaaatctctttccctcttaagtgttttgttcgcctatccttgatcctcanaggcaatgtttcatatgtcaaattctccttcacttgtacatcatccaattcaatcacatgggatg

SEQ ID NO: 5350 - DNA, 619 bp, Glycine max
  unsure at all n locations
tctntgagaaaaagtcctatggaagcgagagcttagctacacacacccctctcataactaagctcacctccttgagaagcttgcttcggaagattcctaaagaagctagagcttaactacacacacctttctaatagctaagctcacctccttgagatgagaaactagagcttagctacacaccccctataatagctaagctcacccccatgacaaaatacatgaaaaaacaaaaaaaagtccctactacaaagactactcaaaatgcctcgaaatacaaggctaaaaccctatactactagaatggccaaaatacaaggcctaaacgaaggaaaaacctattctaatatttacaaagataagtgggctcatacttagcccctgggctcgaaatctaccctaaggctcatgagaatcctagggccttcccttggatctctagcccaatctacttggagtcttttatccaatgcccttgcggggtaggattgcatcacaaagggaaacaacatgttttaattctgttatnttctaattaaaaattgcttgctgtttaaattacaaaaacaaaccccccccccccaatttggtactattttataactatctattatgaacg

SEQ ID NO: 5351 - DNA, 482 bp, Glycine max
  unsure at all n locations
tttgtgttgatttaatctcaacagttccatttcgtgttcctgtaactttccaattaatgtagcaagagacatgttagttaaatatcgcaactcagtaatggctgttaccttaagttgtcattctctgcttaaacatctcaatactttatttatgagatcttcatttggaaaaattttccctaaagatgcaagatgatttattatatgtgtaaaccttttttgcatgtcttgtatactttcatttgaattcattctaaataattcatactcatgagttaatgtatttatcctagatcttttcacatctgttgtgccctcatgtgttacttgtagggtattccacatttcttttgcacttttancaattgataccctaaagtactcatccattcttaaggcagatgtaattatatttttggcttttaagttgtattgcactaatctcttttcttcgtcactccattcttccctangcttttcta

SEQ ID NO: 5352 - DNA, 528 bp, Glycine max
agcttcaagccttgatcaaactgaagatccttggttccttacaatattttctgggcctggaagttgcaaagtccagcaagggcattgttttgactcagagaaaatatgccctttctcttttagaggatactggttttcttggctgcaaaccatcctctcttccaatggatccaaatttaaagctcgacatgctcagtggtgatttgctgcccgatccctcaatgtacaggtgcttacttggtcgtctcatgtacctcactatttcaatgccggatattacattttctgttaacaagctaagccaatacatgcagcatccaagaatacctcatctaaatgctgtgcatcatctcctacaatatatcaagggcactccgggtcagggtcttcattttccagccagtaactccttcaacttatctgcatatgcacatgctgattgaggaggatgttttgacacacgcaggtcgacatctggttcatgtgtgtttctacgagatgctttattatcaagggacatcaaaaaag

SEQ ID NO: 5353 - DNA, 567 bp, Glycine max
cttgatctttcctcagttctttaacaagctttgtacaatatacttggccttcatttaactgtctttgggcttggcggccacgctcaacaaagtactttcgacacctactgtacgttgatttcaccaatgccgttatgggaatgttgcgacaatcctttaaaaccttattgatacattctgagaggttcgttgtcatgtggccatatcgacgtccttctctatcgtaagccatcgtccatttttcttttgagatgcgatcaatccatgttgctatggctggactcacttcacgaaatttttctaaatttttatcaaaaatgtgcttgcaaggagtataggctgcataaaattagttatgaataacaatttacagtataaatgaaagtaaaataaacgtgaccatcaaatatgaaattttacccaatttcttcaacatttctttttgtttggcattattgaattttcgattgaagttgcttgctatgtgtcgcacgcagtaaacatgataaccgtggggaggttgccagccaagtgctttgttagcgacagcggactttatactcgcgt

SEQ ID NO: 5354 - DNA, 373 bp, Glycine max
agcttgaaggtgtgtagcccaccatcttttcatagtagaaaactggtaatgtgtctactatcattgttatcatttttttctccgtcactgaggtgccacttgagctgccaggtctctccacctttgggcgcattctttgaaagatctgtgcccctttttgcacatgttctgtagttgcatcctatccggaaccatatcaaaattttactgatattgtctaacgaaggcaaccattacgtccttccaagaatggactcgggaaggttccaagttagcgtaccaggtaacagctaccccagtaagactttcttggaaggaatgtatcaccaattcctcatcgtttgcgtatgcccccatcttccaacaatacatc

SEQ ID NO: 5355 - DNA, 587 bp, Glycine max
  unsure at all n locations
tttatatatatatatatataacaatgatcttactgttagaaattattactggttgttgatgtcaataaatgatagcatcataaaatatcgtcatcaaaagtgtcatataaacaatatttgattattgtaaaattaaattttcatttttctacgtacaaaaaaaattcacttcgctttctcccattaagtttccatactttcatccattccatagaaattttctctatgttctcttaagctttcacaagtaaaattagatttcttccctctctcattcattaactctaagctctctcattctttttcttgagacatgataataattataataaattacactattttatgaaattatataaataccttttactttttttctacccctacactaacatctcttaattattgaaaaatatataccgacatgacatctttntattcattacattaactctccttaattatttgaaaaattctacaccaaactccccaaaggagaggttattataaatattaaaacaacatgaagtatttgtgtaacttcacaaaaatttatagaatattgtgttaatttactctgataatat

SEQ ID NO: 5356 - DNA, 558 bp, Glycine max
  unsure at all n locations
agcttcccaagtttttaagttcttcctcaaaactgtcctaagcaaagttcccaaagtcctattaacaacttccgtttgcccatcggtttgtgggtgacaagtggttgaaaataacaatttagtgcccaacttgctccacaaagtcctccaaaaatggcttaaaaacttagagtccctatcactaacaatgctccttggcagaccatggagtctcacaatctccttgaaaaacaaatcagccacatgggaagcatcatcaacttttttacatggaataaaatgagccattttagaaaacctattaacaaccacaaaaatggaatctctaccattgcttgtttttggcagccccaaaacaaaatccatggataaatcaatccaaggatactccggaattggcaatggagtatacaatccatgaggctttaccttagactnttgccttttacatacaatgcaatgttcacaaaatttctgcacatccttttttatatgaggcgccaataaaaatgttcttgtaatgtttctaaagtcttttggaccccaaaatgccccatt

SEQ ID NO: 5357 - DNA, 538 bp, Glycine max
agctcgtaacaaatcttctacacttggagtgatcacatgaagtcctcttgaacccttaccacccactctgtcatcatgccgagactcaggaagcccaacgggtttagccttctctaagtattctgaacaaaattcaatggcttcttctacaatgtacctctcaacaatagatgcttctggacgatatatattctctgtatacccttttaagatcttcatgtatcactcaaccgggtacatccaccatagataaacaggaccacaacatttgatttctctgaccagatgcacaatcaagtgaatcatgatgtcaaagaaagcagggggaaaatacatctccaactagcacagtataattgcggcctcattttccaactcatcagacttgactggatcaatgactttgctacatatagcatggaagaaaaagcacaggcgagttatcgctaaactgaccttgtttggcaagatgtcttgtttagccacgactaacaattattccatgagcacgtgaaaatcgtgagacctttaccctacc

SEQ ID NO: 5358 - DNA, 499 bp, Glycine max
tggtacttctactgaagctgagtttctaccctcctcctgtcctgacatagaatctctagtgcagctgaaggatgctatagggttcttgatccttcagattcagtctttgtttcttgtttgttctttttcttggatttatctctcattaaaaaaatatcaatgaaaaatatgatggattaactggttttcctttttctggtatcggagaaaagataatgattttcattggtctcattattcagtatttggatttgtacattttttattgcgtattatctattcattcattatattaggaaagtttaggtttttttaaataacaatatttgatgcaaaaataaaataaaatgattagaactaaaggtattaattaataattattatttcatttatcatttataattatttgtatgtacatgtattataatggtttaatatttattaatatgtaattttcgctaataccatatacaatacacgtcttctataataataaaaa

SEQ ID NO: 5359 - DNA, 502 bp, Glycine max
tctagatgagttatgtctgcgaatcggacatcctgtgaaaagttatgaccatttgaatttctcgagtgcttccgttgtttaatttcaagcgtctcgatattttatgtcctcaaatcagacatcggagcgaaatgttatgaccattcgaatttgtcgagagcttccgttgttcaatttcgagcgtctagatgagttatgtcaccgaatcagacatctgagtgaaatgttatgaccattcgaatttgtcgagagcttccgttgttcaatttcgagcgtctagatgagttatgtcaccgaatcggacatccgtgtaaaaagttatgaccattcggctttgtcgagagcttccgttgttcaatttcgagcgtctcgatatattatgtccccgaatcggacatccgtgtgaaaagttatgaccattggactttgtcgagagcttccggtgttcaattttgagccgtctagatgagttatgtctgcgaatcggacatcctgtgaaaag

SEQ ID NO: 5360 - DNA, 567 bp, Glycine max
tgttgacaaagctgaaaagtgtgtctttgttggtgtaagtgaaacatcaaaagcatataagttatttaatccactaacaaagaagattgtgaccagcagggatgttatttttgatgaagacaacacatgggactggaatgagcagcaacccaattcaattattgttgacaatgaagatgtaaaagaactacagctactcgtaaacattgtcttaacatctccaaatgaagctcaaatagctcctgagacagagatttcaacaccaacaaatgctggaacaacagatgcaactagacatggcaatggggcgggtcgggtacgggtattgtctccccaatcccttaccccgacgcctcgacatatccccatacccgtacccgatacccgacgggtttgagtttattgtcccatccccgtacccgtcgggtatcgggtattcccaaccccgttccacacaccatttagaaaaatattttttttttgtaaaaaatattaaaaatttgatttaaaaaaaaataaattgattgtaaacatttttttttactacttatatataataatttatta

SEQ ID NO: 5361 - DNA, 502 bp, Glycine max
  unsure at all n locations
agcttcgacctatgtgcatgaattgtgtgccatcacaactgccgttaagaagtggagacaataccttcttggccatcaattcatgatcttgactgatcacagaagtcttaaggagctcatgactcagattgttcaaactccagagcagcaaatgtattttgccaggcttatggggtatgactactccattcaatatcggtccgggagcactaatttggtagctgatgccttatcgcgcttgaaggagggatcagaaggaaccatgttattactatctgtaccttgcctgacatttttagatgaattgaagaagcaattaaaacaagaaccagcctttatcgaattcaggaagaatatattggcccaacccacagccttccctgaatattctattactcgtggattgattntgtaggggaatcgtatctggttactagaggatatccccttcattcagactctgttaatggagtatcattctactccaacagggggtcacatg

SEQ ID NO: 5362 - DNA, 592 bp, Glycine max
agcttcatggtgaatcaaaggtgattcaaaggtgttttgatgataacaaaagatgatgacaaaggtgatgacaaaaagctcaaagatcaatcaaagaacaactcatgtgatcaagttagaataaagaacaattcacgagttcaagatagaatcaagagaaggcttaatcaagctaagtatgaaaagtttttctcaaaaattgagtagcacatgatttttctcaaaacatgtttaccaaagagtttttactctctggtaatcgattaccagattgttgtaatcgattaccagaagcaaaattgttttgaaaaagttttcaaatcgaatttacaacgctccagttaatttcagaaagctgtaatcgattacaatgttttggtaatcgattaccagtgcctttgaacgttgaaattcatattcaaaagtgaagagtcacatcttttcacataaaagctttgggtaatctattacactgatttggtaatcgattaccagtgagtgtttctgaataaaatcaaaagatgtaactcttcaaatagtttttgactttttcaaattgtttttaggttttctaaatgcataactttctaat

SEQ ID NO: 5363 - DNA, 562 bp, Glycine max
agcttgtttaactgtcctgctgcaaagcaatgttatacccagctggaaagatgtatctcctccgatgaggaaacaatctatgctgcttctgcggcagacaatctccagtagtaccatcccaaaactgtaaatgtcaaggtttactgatactggtgcatccttctgccattcaggtgtcaagtacttgcttgtcccatcatcctcttttctcattcttgaatggtcagactttagcagccttgccaatccaaaatcagagatctttgcagtccacgctccatccataagtatattccgaggatttatgttgcaatggataatacggacctcacactcttcatgtagatacagcactcctctggcaatgtctaatgcaattttcagtgtgtctctccgagatatgtgtttctcatcgttgaagagaatacttgcaagagacccgttgctgatgtattcgtaaacaggaagcttcccagatccattgatgcaaaaaccaatgagcttaaccatattcctatgatgtgttcgagcaatgttagtaatatcattcaagaaaacactc

SEQ ID NO: 5364 - DNA, 661 bp, Glycine max
agcttaatagtaaaattaaaaaaacatacgaaaataaaaaatttacaaaagccaaaaacaaatattttttttctaatttttactaataaaaaaattagaaagacttgtaatcattggttgccacaccatattaatcaattatccatttaatgtatgatcaacataataaaaatagaagagttgttcaaagaatgtttgtatcagaaaatttgaatatacatccaaattaagatgttttaaatcaagatgaaattgagataaaatatatcccaaccaagtataattaaaaatgatgttataatattttttaatcatatgatatcaatataccattttaattacatatgttataacataaattggacacatgaaattatgattcatttttattttaaaagatataataataataataataataataataataataataataataataataataataataataataatataattatatgaactgaacacacatacttaacataaattgagcatataacaacgttagttattcatttgtccgatagatattcataagataaatttatgggatggttaatcattaatttttttatgtttaaagactcttaaatatttatatttaacattaatttatctaccaaattaataaatgatgttaaatgtt

SEQ ID NO: 5365 - DNA, 549 bp, Glycine max
  unsure at all n locations
tcatggtgaatcaaaggtgattcaaagatgttttgatgatttcaatgatgacaacaaaagatgatgacaaaggtgatgaacaaaaagctcaaagatcaaagaacaactcaagtgaatcaaagaacatcttaagagaatcaagaacaagtcaagagttcaagaatcaagaagaattcaagactcaagaagaaagcctagaatcaagaatcaagattcaagatctcaagaatcaagatcaagattcaagaatgaagaaaagactcaatcaagataagtattacaaagttttttcaaaactttgaatagcacatggttttttgacaaaacttttaccaaagagtttttactctcttgtaatcgattaccatattgttgtaatcgattaccagtagcaaaatgagtttgaaaaagttttcaaactgaatttacaacngtccaattattttcaaaagactataatcgattacaatgttttgtaatcgattactagtgccctcgaacgttgaaattcanatttaatgtgaagagtcacatcctttcactcaaagc

SEQ ID NO: 5366 - DNA, 552 bp, Glycine max
  unsure at all n locations
agcttgaaggcaaactggatgcattggttaacttggtaacccagctggccttgaatcagaaatctgtacctgttgcaagggtttgtggtttgtgctcctctgctgaccaccatacagacctttgcccttctatgcagcaacctggagcaatcgagcaacctgaagcttatgctgcaaatatttacaatagacctcctcaacctcagcagcaaaatcaaccacaatagaacaattatgacctctccagcaacagatacaaccctggatggaggaatcaccctaacctcagatggtccagccctcagcaacaacaacagcagcctgctccttccttccaaaatgctgcaggcccaagcagaccatacattcctccaccaatccaacaacagcaacaaccccaaaaataaccaacagttgaggcccctccacaaccttccctcgaagaacttgtgaggcaaatgactatgcagaacatgcagtttcagcaagagaccagagccttcattcagagcttaaccaatcagatgggacaattggctacnccaattgaat

SEQ ID NO: 5367 - DNA, 564 bp, Glycine max
tagccctagaggggatggaccttttcaggttttggagaggatcaataacaatgcctataggttggacctcccagaagagtatggagtcagcaccacttttaacatttttgatttaactccttttgcaagtggagctgatattgaggaggaggaactaacagatttgaggtcaaatcctcttcaaggggaaggggatgatgcaatcctccctaggaagggaccaatcactagaaccatgagcaagaggctccaagaagattgggctagagctgctgaagaaggccctagggttctcatgaaccttagggtagatttctgagcccatgggccaaggttgggtccaattatctttgtacatattagactaggatgtcattatatttggtccttgtatttagggctccatattgtaggtagggtaccctagaaatataggatttttcagcccttgtatttttgggcacctagactaatttttgtatttggggtagttctgtaatttcacatgcactaagtggatatttgatgtgtgtgggtggaaataaaattaattgaattggtaga

SEQ ID NO: 5368 - DNA, 443 bp, Glycine max
tcccttttcttgaagcaattctgggaactaactcccccttttttctgccatctctctttaattttatatacatatatattatatctttttcctacatagctaacttttccctcttacgcatacatatagatatttttatttcaattgagatgtttattgagcacacggattgttgaattttaatcaagtatgtgtgtgtgttatgagcagccttggcagctattggtgagaaggagtggtacttctatgtgcccagagataggaagtatcgcaacggtgatcgtcccaatcgtgttactacctctgggtattggaaggcaacaggaactgatatgatgatccgaaccgagaattttcgctctattggcctcaagaaaaccctaattttctattctgggaaagctcctaagagcatactaaccagttggataatgaacgagtat

SEQ ID NO: 5369 - DNA, 545 bp, Glycine max
  unsure at all n locations
agcttgatatgtggcactctatattacagaaacaagcccccacaaggaagtattttaactcccgtggctcaggttcttgtcgctgcattttccaaaagaaaccttccatcttccccatcatccatgatcagagtggaacaagttgagcaagtgaagatattgctatctgttattccgatattctcgtgcaccatcgttttcaacaccatcttagcacaacttcagacattctcagtccaacaagggagagcaatggacacccatctcaccaaatcctttaatatccctcccgcctcccttcagtccattccttacattttgctcatctttttagttcctctctatgacaccttctttgtcccatttgccagaaaattcaccggccatgagtctggaatctcacctttgcgccgaataggctttggtctttttctggctaccttttctatggttgcagctgctctgttggagaanaagagaagggacgcagctgtgaaccatcacaaaagtttgtccatcttttggataacccacaatacttgata

SEQ ID NO: 5370 - DNA, 556 bp, Glycine max
tgctaagtgtttgtgtaagtgattctagcatcttagctagcagcttgttctgtgccaatagtgcatcttgggaagaaagctctaacatgcttctttttgtggttacgtgagttttatcacgcagaatagcatgatcactagcagccatgttctctatgagttccattgcttcttcaagagtcttcaatttaatttttcctccaacagaagcatccaataactgcttgaactgcagtctcaaaccatcaatgaaaatgttcagttgaatcggctcggggaatccatgagttggtgtcttctgcagaaagctacagaatctcttaagcgcttcacttagggattcatctagaaattgatgaaatgaagaaatagttgccttgccttcagctgtctttgattctgggaagtacttcttcagaaatttctctacaacctcttcccaagtctttaagttgtttcccttgaaagaatgcagccacctcttggcttctccagccaaagaaaataagaacaagctaagccgcactacatctttcggcacccctacaattttcac

SEQ ID NO: 5371 - DNA, 533 bp, Glycine max
agctttcaattttttcaagcattgaacgattcttatgaagaattatacaataaagacaatgaagtatcttaggacaaataatgacttggaatcctgctctaatgaattcaatgaattctagagagatgaaggcatggcaagataatgtattctatgttatactccacaacataaagtagctgaaagaatgaacaaaaccttgttggaaagggccagatacatactatcgaattcaagcttgaataagagtttttgggaagaagtagtcaacaaaacatgctatattgtgtttgacatgcaatcacgtaagtgaaggtaagttagagccaaaagccaataagagattctttatgggctatgaagatggagtcaaaggattatgagtctggtctctatctaaaagaaagtcattctgagtcaagatgttgactttgatgaaccctctatgctgcattctaaatatgatgaagatttggccaaggctaaggatgtcactaagcaagttgaagttaagagctccacaatcaaaaaca

SEQ ID NO: 5372 - DNA, 275 bp, Glycine max
  unsure at all n locations
ctatttatgcaaggacgcatttgagtggtccctcgaatcacaagatgctttcgataccctcaaatccgctatgatcaacaccccagttctggcccttcccaatttccatgaaccatttgtcgtcgagacggatgcttcangcactgccatgggggctgtgctctctcagcaagggcacccattaccgttcttcagcaagaacttcacccttcgcctctttatgcgtaaacctatgtgaggaaactccatgctatcacatccgcagtgcgtaaatg

SEQ ID NO: 5373 - DNA, 595 bp, Glycine max
agcttgtttaccccatgttgaatttgcttacaatagagctggtcatagcaccactaattgttctccttttgaagttgtttatggttttaacccactaactcctcttgatcttttgcctatgcctaatgtttctgtttttaagcataaagaaggtcaagaaaaggtggactatgtgaagaagcttcatgagagagtcaaatatcaaattgagaggaaaaataaaagctatgctaaacaagccaacaaagggagaaagaaggttgtcttcgaacccacagattgggtttgggtgcacatgagaaaagaaaggtttccagaacaaaggaaatcaaagcttcaaccaaggggagatggaccatttcaagtgcttgaaagaatcaatgacaatgcttacaaagttgagctgcccggagagtataatgttagttccaccttcaatgtctttgatttatctcttttttgatgcagatggagaatccgatttgaggacaaattcttctcaagagggagagaatgatgaggacatgttctagacaagggcaaggatccacttgaagactttgaggacctttgacaaggctaaagcatggaaagc

SEQ ID NO: 5374 - DNA, 462 bp, Glycine max
  unsure at all n locations
tgagcccgcttatctttgtacatattagattaaggtttcattatttttggaccttgtatttagggctccataatataggtaaggtaccctagaaatgtaggatttttcagcccttgtattttaggacacttagactagttttttgtattaggggtagttttgtaatttcacaagcattaagtgaatatttgatgtgtgtggttggaaataaatttaattgaattggtaggagcccaatccaattaaattttagagggggaggtgagcatttgctagctacaccccattgccacatcatatagtcacactntgtgcatgtccttcatgctttacatgcctcatgacaccaaagcacacttagtggagaatcttggacttgatcttggattagtgggctgaaccataactaanattcattaatcataattagtgaaatttggctccaaaattggctcccaaaat

SEQ ID NO: 5375 - DNA, 494 bp, Glycine max
  unsure at all n locations
tactctaattttgaaaatattatacctatatatggtgacattactagagcaatcaatttatctaagaatctcatgcaacattcaaaggctaagcatattgaaataaaatatcatttcattcatgattatgtgcaaaaggcattttttatataaagtttgtaaacacaaatcatcaatggattggtatatttactaagcctttgtctgaagatcattttatctgtaaagcatttgaatatgatcgagctattagattaatgttgcattttcagaggcaatatcattttataacctctcattaatttgtttggactaatgtgtgttcaagtgtacacacggaagagaaagcctgttcacaaaaataaaaacccttcattttctcttaaaagggaaactaattaataaaaaaataaaaagatcaaaatcataaattaataattataggaagacanaatgtcaatttaatctaaaagtataatcacccaaacagaaat

SEQ ID NO: 5376 - DNA, 571 bp, Glycine max
tgcttagtgtctctgtgagggtctctagttgcttggctaggagcttgttttaggctagtaatgcgtcttgtgatgtgagctcgagaaggatggcatggtgtgtaggctcgatcacgaaggatggcatggtcactggctgtcatattttccatcaactccatagcttcatcaggtgttttcagtttgatcttcccaccagtggaggcatcatgtaactgcttcgaatggggccaaaagccatcaatgaagatattgagttgaactgactcgctgaaccagtgggtgggaatcttccagagtaaaccatggaagcgatcaagagcttcactcagtgattcatcagggaattggtggaatgaagagatctccacctttcccttagcggtcttgggctctagaaaatatttcttcaaaaatttctccaccaccttttcccatttctgcaagctatttcccttgaacaagtgcagccatctttttgcttcaccagccaaggagaaaaagaataggttgaggtggatggcatctttaggaacttcatctgttttcactatgttgccaattttctatg

SEQ ID NO: 5377 - DNA, 548 bp, Glycine max
  unsure at all n locations
agctttgtctctttactaaagcatgttcgcattgtagtgaagaaaacaccgagactattttagtctcacagttatctagaactacgtagatctgagttcctcattgaggatacgtaggagcaagagcctcgcttttgtcggccgccccacaatctctgtcatactgaccctgaggtcatgtgacatgcagagacaaattatgatcattccgcacacctttttccatccagatacgatcgtgtccgatggcacgcagagataaattatggtcattctgcgccttttgtcatccagaggcggtgagcccgatgacatgtggagacaaattatggtcattccgcaccttttgtcatccagatacgatcgtgtccgatggcacgtatagacaaattatggtcattctgcgccttttgtcatccaaaggcggcgagcctgatgacatgcanagacanattatggtcattctgcacactttttcgccatccggagacgatcatgtccgatggcacacaaagacaaaatatggtcattctgcgccttttttcatc

SEQ ID NO: 5378 - DNA, 533 bp, Glycine max
  unsure at all n locations
agcttcataaatccatcacttttaatattctctacacaaaaacttaaatgatgttaatttaacaattatttgctcaaaaaataaaaaattagaagagaaaaattacaaattcctctataatttaacccccaaaatatactcataattagtagttatcagcttccagatagtggtatcttaagtttaatgatactattacgtggtatggtttcctagagaacaccgttgatcggtgtatctacatgaaggttagtgggagcaaatttgtaattttagtcttatatattgatgatattttgcttcctgctaataatgttgctatgttacataatgtaaagaagtatctctctaataactttaaaatgaaagatatgggtgaggcattttatgtgatacgaatagaaatattctgtaatagatcacaaggattgttgtgattgtctcagaaaggatatatcaataaagttttagggagattcaaaatggaaaaatgcnttggagggattgttacaatacaaaaaggtgacaagttt

SEQ ID NO: 5379 - DNA, 560 bp, Glycine max
tactaagcctctaaaatccattattccaagaggagataatccaaattgatttattttttttgaagaaggtagctcaattagggtgcagggttactatttgttcacttgatataaatcaagaagcaaaaacaaagtgaagaaaatggaataagcaacatacatatatggtgtatccctaccaaacttcttttgattaaataatccagaaagaagcttgatgtaacctccaccacattcaatctcttgctcaaattttacagaatactgaaagaccaatattttgttcttgtttgtgaattctggtatttttgcagaaatggaaaagtgtttggcatcactcgatgtttgaatacctacaatatcctacaaaatgacaacatgttacaaaaccaaccaaattcctgtcactacccattttgacatattaagaaaggaaacaaatacaagttttatttttgttcatattaagaaaggaaacaaatactaccacttgtgtatatttcattttttcttgccttttatttttaaaattgatatacttttactaataattacaaaaa

SEQ ID NO: 5380 - DNA, 535 bp, Glycine max
agcttgaagaccagatggtttcaatgctttattcttcaagaaggcttggaatatcattggtgatgatatctttgaggcggttaatgaattctttacaactggaaaaattttaaagcagatcaaccatgctatttttgcgcttattcctaagcatgatcaggcctcccaagttaaccattttagacacatatcttgttgtaatttattatacaagattgtgtctaaaattctggccaaccgcatagccccagtgcttgagactattattggggaaactcaaactgccttcattaagaacagaaagatgatggacaacatcttcctcgttcaagagattttgcgcaaatatgcacggaaaagatcctctctgaaatgcctcctgaaaattgacttgcataaagcttatgattccatttcctaggaattcttgaattggatgcttcagtccattggcttcccaacccaattctgtactttgatcatgaaatgtgtttctttcacttcctttagtgtgacagtcaatggattcaattta

SEQ ID NO: 5381 - DNA, 592 bp, Glycine max
agcttatgctgcacacatctacaatagacctcctcaacctcagcagcaaaatcagccacaacagaataactatgacctctccagcaacagatacaatcctggatggaggaatcatcccaaccttagatggtcgaatccttcacaacaatagcagcaacaacaacagacttattttcaaaatgctactggcccaagcagaccatacgtacctccaccaatccagcatcaaaaacaacaacagccccagaaacaacaaacagttgaggctcctccgcaaccttcccttgaagaacttgtgaggtaaatgattatgcaaaacatgcagtttcagcaagaggccagagtctccattcaaagcttaactaatcagatgggacagttggctacatagttaaatcaacaacagtcccaaaattttgatagattaccttctcaatctgtccagaatcccaaaaatgtgagtgccattacattgaggtcaggaaagcagtgtcaatgacctcaaccagtagcatcttcctcatccgcaatgaacctgcccaacctcactctacttcaggaaaagatgatgacaaaaatttaaagagtagtt

SEQ ID NO: 5382 - DNA, 346 bp, Glycine max
ttaccatttgaatttcgggagagatttcgaagtttaaattcgagcggatcgatatattataagcctgaatcggacattcgtgtgaaaagatatgaccatttgaatttctcaagagcttgcgttgttcaattccaacctctcaacatattatgcgctccaaaccgaccttcccggggaaaggtattaaccatttgaattctcgagaagttgcgatggtttatttccaaccggtccatatattataagcctggaaccggccttccgggggaaaggtcttacccattggatttctaaagaaccttcggtggtcaaatttgaacctcttgacattttatgcgccccaaac

SEQ ID NO: 5383 - DNA, 536 bp, Glycine max
  unsure at all n locations
tatccttaaacaagtattagcaacatcacccaatacttgtttaatttttttctcaccatgacattggtgggagtatccaccgggtttgttgatggctaatctccaccgaaaaatttggttggtcatctatagtggaattttcccttccaaccacgtttgttccatccacaaagctaacactcaagaccttgcttactctgaccaacgacatgttagtaatacttgtttaatctagtattatgtgtacttaccaaggacgttgaaggttatccttgaaagcatgctttttgcaaacaatataattcttgagtaagagattaattctaaatttaagaattggagttaaaaattagaaccagaggatctttatcaagtagaagacacagtatatgctttgcagtttaagcaagaaacaagaggaaaatgccttggaggtaaaaattggagaagtcataccacaagtttctaagcttgactatttgattccaaaatgatgggaaaattaatgatgttacacacaaaatantaagtgggtg

SEQ ID NO: 5384 - DNA, 522 bp, Glycine max
  unsure at all n locations
agcttgcttctacaatctccccctttttgatgataacaactctaaaatcaagaaacacacacacacactttttcctagtcgatcactcgcataaatttccattctccccttttgtttttgagtttatgcttcatttgaaattaagttaattacttatgtgagttcttgatttattccctatttctctccccctttggcatcaacaaaaagccaaagtgcgtaacaaatataaaacatacataaatgactaatcatacaagagaatagaaaacaatcaaacaagataacttaaccattcatcaatcttagaaagataatacttcatagaatgtcatataatccagaaagtcattcataataaccaaataaaagtacataccactgatcatatattatcaaaataattaagtttaaaattcataaccataaacaaccaagagcaagtaaatataatcatcatgttcaggcatactanacaaatattaaaaaagaaataataagtgctcaaatgtcatanaaaca

SEQ ID NO: 5385 - DNA, 504 bp, Glycine max
tgtaggaaattcaaacgacaataactttttacttggatgtccgattgaatcgggtaatatatcgagacgctcaaaattgagactagaagctcttagcaaattgaaatgacaataactttatacacggatgtccggttgagtcccgtaatatatcgtgacgctccaaattgaaaacggaaactcttagaaaattcaaacgacaataactttttactcggatgcccgacagattgtcgtaatttatcgagagatgctccaaattgaaaatagaagctcgtatcatattgaaacgacaataactttttactcggatgtctgattgagtcccgtaatatatcgagacgctcaaaattttaatccgaagctctgagaaaattgaattgacaatgactttatacacggatgtccggttgagccctttaatatatcgagacgctgcaaattgaaaacagaagcttggaggaaattcaaacgacaataactttttactcggatgtccgattg

SEQ ID NO: 5386 - DNA, 544 bp, Glycine max
agcttgtaccaaattcaaacgacaataacttttttctcgaatgtccgattgtatcccataatatatagagacgctccaaattggaaacggatgctcgtaagaaattcaaacaacaacaacttgttactcgaatgtccgattgagtcccgtaatatatcgaggcactccaaattgaaaacgaaaactcgtagcaaattcaaatgacaataactttttactcggatgttcgattgagtgccgttatatatcgacacactcaaaattgagatcagaagccttgagcattttcatatgacaataactttatagtcgcatgtcctattgagtcccgtaatatatcgggatgcttgaaattgataatggaagctcgtagcaaattcaaacgagaataactttatacaaggatgaccgattgagtctcgtaatatatcgagacgctacaaaatgaaaacggaagctcgtagcaaattcaaacgacaataacttttttctcggattcccgattgagtcccatattatatcgagatgctccaaattgaaaacg

SEQ ID NO: 5387 - DNA, 530 bp, Glycine max
agcttgaaacataacatctattgcaggtaccaccgctttagcaactttgttttttatcgctttctccattccatcctaaaataaccaaaaagagaattcaccatgtaataagtattctgaatcggtaataaagaaaatggaaaacaaggacaattgaaataaaaaaatagtatgcaggatcaaaccatgaaagcatatgcagaaatggacccctaaatatatatttttatcaaaaaggtttttcctattaatagttgacagttcttgcatatagcaaacccttaagaaaattaaaaatatatatatataaaatcaaaacaccgtctaacactcattcttaggacatgaataactggacaagtaacccatggatgattgaaccatccctctgttgtcttcaagactaggacagcaaatatttgcctttctaggttctagggtctataaataaaagaaaaaaacccgagataaatcattcattcaatcataagtgaaagaaaacatgaagaatatatttctaaaaatactat

SEQ ID NO: 5388 - DNA, 489 bp, Glycine max
gaagcttgacaagcagttgggccaaaagatttctctcggtgtcctttctctcaaacgagtctgtgacccagagagaaaccatggaaggatgaaagcctgggtagttcagatctttgatgcatagaacaacttcattcacatctctagcactggattgaatagcaactgtcagaaaaatatgtaacaagacaaaataacttgaaaaaatatcatcatcgtagcactacaaaaattagaaatcaagtttctttgtgactacttaaaaagcatagttactcaacagggattcgaatcgtgaattgcccagctaattttttaatcatgaaacataatttgtatcgaattgtaagactcaaaacaattaaaaattacttcaaatatatcatataattgatatgtagtgctcaatgtaaaaatttaaaatagaaataaataaaataacttaaccataagttctatataaacaaattattaggtatatctaaatct

SEQ ID NO: 5389 - DNA, 564 bp, Glycine max
  unsure at all n locations
agcttcatccgtgggtcaagaatcatagcaattgaaagaatgacattatggtcactccaatacttgccaaacttttccatcatcaacactgccatattttgcaatactggatcatcacacttaagtgtttctcgcaacaaccattcaattttccatacttgcatgaagtattcattggaagttggataagatgtacctaaaaaaatttcaaataagataattaaactataaatataaatctgaaactatttattataattatgaagtttgaaaaaatataactgaaatcaaattagtcatcttataaaatggcttaaaaaattcacccactttttcagctcttttccattcctcattagatggacaacatttgtattttctatcacgaataatgaaacttgcaaaagcacaacgatacctaagagcactctcaagcatgatataagtagaattccaccgagtaggcacatccaacctcaagcccactntagtatcaatacctcttacttgagcaatacanttgataaatactatntttcttgactcagagctctcacatattta

SEQ ID NO: 5390 - DNA, 562 bp, Glycine max
tcttgttgttactatgaactttcaatatttcttccctccctctttcatctggtaatccaacagtgacctattggaacaattacaaattgtcatgtcttataattttgttgaatttttagtaactactaactagcttaaaagtcatacctaccaactgattgatcgatcgtgcaaaaagttttatactactagcatattataataaaattcattgtcttatacgttaaaatttgtttatttttatagtaattactttaaaagctatatttataataaattctgatgggttaatgatttacaatagcaatgcatggaaattaaactgataaataataattatataggcattaacaggggttaattataaaggattctaaagttgcaagtaacatacctgtctatcaaacctcccaggtctaagcaatgctgaatcaagaatttcaggtctgttggtagcagcaatgactataactccagtgttttcagtgaaaccatccatttcaatgagcaactggattagtgtttgctccctttcatcattttctccacctatacctgtacc

SEQ ID NO: 5391 - DNA, 484 bp, Glycine max
tctggaaggagatcaacttgatgttctatgcctcttgaaggtggcagtccatgaggaatctccataggaaagacatttttaaatttctgcaataagggttgaacactaggagaaatagaaatagtaaactcattagaattatcagtagaaattttactgtctttgcaatactgtagattgagtggttcatgagcaggtaacactttcctcacttcactcgcctctgcaaaataattaaattttctctcatgtgtatcactctctctcttatgtgtatcactcttttcctcgggtgtatcactcttctttttcatattcctttgtggggcctcactattttctttctcttgttctctcttttctctcattctgatttggtcatcacacacttctctaagggatagaggtttaagagtaaacgaggaagatttggctattcgtctgtaaggcttttctttgttacggttcaacaaatgttgcattt

SEQ ID NO: 5392 - DNA, 437 bp, Glycine max
agcttgaaattgatcaacagaagctctcgaggactttaaatggtcataatttgtaacacggaagtccgattcaggcgcataatatgccgagacgctcgaaattgaacaacggaatctctcgagaaactcaaatggtcataacttatcacacggaggtccgattccggcggatagtatatcgagaagctcggaattgaacaacgaaagctctcgagaaattcaaatggtcataacttttaaaacggaagtaagattcaggtgcataatatatcaagaagctcgaaattgaacaacggaagctgtcgatatattcaaatggtcataacttatcacacgaaagatcgattcatgcgcatgatatatcgagacgctcgaaattgaacaacggaagctctcgagaaattcaaatggtcataacttatcacacaagcgggctg

SEQ ID NO: 5393 - DNA, 473 bp, Glycine max
agcttcttcaaaaatattgggttatactcatgtgctccaagatcttcaagactttgaatcagttcaggaatgtcatcataaagaaaatactcatgaattatagttacagattcctttttgtacttcctcaccttctcatcttcttggatttccccatcttcagatgcaggtttggaaagtgaagcatcaagccatccttcagatattgccttggggacaaatgactgaaacaatgccttagctgatggaatatcaagagcaagatcatctagggattctgccaaacgagaaaaccctttcaccatttggctggaactaaccagtccttcttctgctgcttcttttaatagcttcaacattggaggttctgcggaacgtatctccatggcaagtatcacagccctcttaacaacctcatgatggaagaatgaaacccccaactccgtatacacctacaggctttcaatgtggca

SEQ ID NO: 5394 - DNA, 635 bp, Glycine max
  unsure at all n locations
agcttaccaggctctcaaattgctcaacttcgatgaagccgcatatggagaaaggagaaaattatagttgctggaattaaaggaaatgagactgaatgcctatgagtcctctagaatttacaagcagaaaatgaaggcgtatcatgacaagaaattgcataaacagaacttccagccaggccaacaggactctttaactctaggcttagattgttcctaggtaagttgaaatcgaagttgttaggaccgtttgtcattaaagaagtgagaccccatggagcaattgagttggaggatcctacaagaagcaatcttgaaaaaaatggatactcaatggacaacacttgaagatctacaatggcagacaattagagaggctcacaagcattgtctatttaaatgacccgtgaagaaaacacaacgtctagttaaagacgataaactaagcgctagttgggaggcaacccagcacatatgtacaaaatccatctttctggactttttcaaaaaaaaaaaagcccaacaagtgtatacagtagaaacaggggtgcaagaaagcaaaatcagatgngctcacgaagactcgtgctaagcacgctacttggcgctaagcgtgcaggatgtcacatgcgctt

SEQ ID NO: 5395 - DNA, 390 bp, Glycine max
  unsure at all n locations
tgcagttagctgtacttgtgaatttatgaagatgacctctttgttcaccttcccagagggagtctctgatgccgacttagttctcttggtgactacaagacctacaactggaaatacacttgcttgggctgtggcatgtgaacgggaccaatggggccgtgctatagctggtacattatcctataattgtgttggtttaaatggtggtctttatcttgcatttgggatgctttgtaactgaaagtgcctttttgtttgtgtgcaggacatgttaatgttgctcctcgtcatttgacagctgaggcaaagactntgctttcagcgactctgatacatgaggtttgattatttttttgtgtctagaagagattatatttgaagcatggctga

SEQ ID NO: 5396 - DNA, 478 bp, Glycine max
tctaaactttatacaagaatgaagctctgataccacttgtttataagtgacctcagtatcttaagaagagaggttgaattaagataccaaactatccccaactaaaaattatctctctctttaactaataatgaaaccctaattatgaattatttcaagaacaattcaaaataaacttctttaaagcgaaatataaactgcaataaaataaaacaagtttaagggaagagagaatgtaaactcagattttatactggttcgaccatgtcctgtgccttcgtccagtccccaagaaacctgcttgagatttccactatcttgtaaaatccttttacaaaattctgaaccacacagggacaaccattcccttgtgttcagataaccttacaacttaagagaccctcggtctcttaatcagatttctttgaataataagaagaagcattttctctgtttacacaaagatgtacaatgaaag

SEQ ID NO: 5397 - DNA, 457 bp, Glycine max
tcagagactgcagcaggatatgagaaggtttagcaaacccctgtgtaatctaaagcagaatctgatcaaagccagagaagatcttcaatttgctcacgaaaaccttagaaacaataacatgaatggagatagaattgatagagtgaggcagctgacagaagaggttattaatcttaatgaattggaggaaaagatgcttatgcagagagcaaaagtggattggataaggaaaggtgatgggaataactcctttttccatgatattataaaaagcagaaataatagaagaagtatatacatgctgtagaaaactgatggaaccttgcttgaaaaccagtctgagatagaggatgagatcatggatttctacaagaaactcatggggactgatgatagccagctgcaccatattgacatagatgctatgagaaatggcaaacaagttaatatggagcaa

SEQ ID NO: 5398 - DNA, 431 bp, Glycine max
tatatatcaaagatatgacaacttataagttgttagctacttatacttagattttgttggttgcattgactctcggaagtctcaacatctggatacatcttcatgatggctaatggagcaatatcttggacaagtgcaaaacaatcattagtttctacttctaccatgaaggttgagtttatttcataatttgaagcaacatcatagggtatttggttaaaaagtttcatggccgatctacaagtgattgattacattcctagactggtaaaggtgtattgtgataatccagctgttgtttttctggctaaaagcaataaaagagaaagtcaaacattgacattaagtgtttagccatgagggaacatgtcaaagtgaatgaaatcattatttaacacatcactattgaactaatgattgtagacccattg

SEQ ID NO: 5399 - DNA, 665 bp, Glycine max
agcttgtcaatcttttgagcaaggaccgcccccaatgcataattggatgcatcacacatcaactcaaatggggctgtccagtcagatgcctgaatgatagaggtggtagtcaatgcatgcttgtggcaatcaaaagcctctttgcactggtcatcaaaatcaaactccacctccttttgcagcagattggatagtggaagggccactttgctaaagtccttgataaagcgcctataaaaccctgcatggccgagaaaggaacgaacctctcacacacaagaggggtaaggcaattgtgaaataacagttatctttgcagggtctacctctatgcccttattggaaattatatgccctaaaactataccttgttctaccattaagtgacattttttaaaattcagcacaaggttagtttcaatgcgtctattaagaactctatccaaactatccaaacatgcatcaagagaggatccataaacagtaaaatcatccataaacacctcaatgcaactctctaaaaagtcactgaaaatgctaagcatacaccgctaaaaggtaccaggggcgttgcataagccaaagggcatctttctataagaaaaagtgcaaaggacaggtgaatggggctttttctgaccctaggagcatatgaattgtaaata

SEQ ID NO: 5400 - DNA, 552 bp, Glycine max
agcttggatcaactcatattactttttattattttactttggtcaaaaaattagacaagcgctaaatattgaaatttctgatatttatgaaccacaagcagacattgttacagcttctttgtcaacatgtaattggactttgcaactatccaatcaatcatagttataaattagtaatcatatcacaaattatagatgaaaattacttatccattcatttaaagattaaccattggttaaaagaaaaacttatacgatatcaattaattacatatataatatctatatctagaactataatgatctaattgtctaattgacaagattacaaacgtctcgtttaatatctttccgtcaagattaccttagcttagggtatatatatttcgcaacgacttcgttgacattaatggtgaagtagttggcgtgcatttgtcacgaagaagcaaagaagaacccttactcggggtcactaacaaggcgtgcgtgctcgttatgctacttgtctacacttcaaaattaaaataaaataaataccagggctttaaaaca

SEQ ID NO: 5401 - DNA, 190 bp, Glycine max
tgctacaattaacacctgaagctctcagatactaccctggatgtaggaattaccacacactcacatggtggaaccctcatctataaaaacagtagcctgctacttacttacaaaatgctgaaagcccaatcggaccatacattcctacagcggtccaacttcggcaacgaccacagaaacatgctacaga

SEQ ID NO: 5402 - DNA, 579 bp, Glycine max
agcttgaatcggacctcagtgtgaaaagttatgaccatttgaatttctcgagagctttcgttgttcaatgtcgagcatctcgacatattatgcgctcgaatcgaacatccgtgtgaaaagttatgaccatttgagtttctcgagagcttccgtggttcaattccgagtatctagacctattatgtgcccgaatctgaccttcgtgtgaaaagttatgaccatttgaatttctcgagagcttccgatgtttaatttcgagcgtctcaatatattgtgagcctgaatcggagctcagtgtgaaaagttatgaccatttgtatttctcgaaagcttccttggttcaattccgagcgtctcgacatattatgtgcccgaatctgaccttcgtgtgaaaagttatgaccatttgaatttctcgagagcttccgatgttcaatttcgagcgtctcaatatattgtgcccctgaatcggacctcactgtgaaaagtatgaccattggaatttctcgagagctttcttggttaaattcgagcgtctcgattattatgggcctgatcggaccttcggggaaaagttat

SEQ ID NO: 5403 - DNA, 520 bp, Glycine max
tatgctgcaaatatttacaatagacctgctcaacctcagcatttaaatcaaccacagcagagcaattatgacctttccagcaacagatacaaccctggatggaggaatcaccctaccctcagatggtccagccctcagcaacaacaacagcagcctgctccttccttccaaaatgctgctggcccaagcagaccatacattcctccaccaatccaacaacagcaacaaccccagaaacagccaacagttgaggcccctccacaaccttccctcgaagaacttgtgaggcaaatgactatgcagaacatgcagtttcagcaagagactagagcctccattcagagcttaaccaatcagatgggacaattagctactcaattgaatcaacaacaggcccagaattctgacaagctgccctctcaagctgtccaaaaccccaaaaatgccagtgccatttcattgaggtcgggatagcagtgtcaaggacctcaacccgtagcacctttcttatctgcaaatg

SEQ ID NO: 5404 - DNA, 625 bp, Glycine max
agcttttgagtgaaaccatgtgactcttcacttttaaatttgaatttcaacattcaaggacactggtaatcgattaccaaaacattgtaatcgattacagccttttgaaaatatttggaacgttgtaaattcagtttgaaaactttttcaaactcattttactactggtaatcgattacaacaatatgataatcgattaccagagagtaaaaactctttggtaaaggttttgtcaaaaactcatgtgctattcaaatttttgaaaaactttttaatacttatcttgattgagtcctttctttattcttgaatcttgagtcttgaatcttgatcttgattattgagatctttaatcttgaatcttgattcttgattgtaggctttcttcttgagtcttgaattcttcttgattcttgaactcttgacttgttcttgattcacttgagttgttctttgatcttttgagctttttggtcatcacctttgtcatcatcttttgtgtcatcattgttatcatcaaaacacctttgaatcattggtgattcatcatgaatctttgctttcacaatattgcctaccctgaataccctaacctaacctgtaccctgtatgcatgtgacctact

SEQ ID NO: 5405 - DNA, 353 bp, Glycine max
tagaacaaatattttgaattctaggtccccttagagattttgttaagatgtctgctagttgatcattagaactaacaaatttagtaataactttgttggatcaagtggcctatgaataattaagaaggggggttgaattaattattgctaaacctttactaattaaaaatttctcttctgagacttttactaaattgttaagagaatgaggagtgaaagataaacttaacagatagtcaaagcgaaaattaaatgcacagcggaaagttaaagagtatggaagaaggagacaaacacacaagagtttttatactggttcgacaacaacccgtgcctacatgcagtccccaagc

SEQ ID NO: 5406 - DNA, 509 bp, Glycine max
tctaaactttatacaagaatgaagctctgataccacttgttttaaagtggcctcaaatgtcttaagaagggggggttgaattaagatattataaactatttccccaattaaaattttatttcactttctattcaagttacaaattcccttaacaatgaacttcttaaatattgattcaaatagaacaatctgaatatgaatataaaacaataataaataaatgagtttaagggaagagaaagtacaaacttggatttatactggttcggccacacccttgtgcctacgtccagctcccaagcaacccgcttgagagttccactatcttgtaaaatccttttacaagttctgaacacacaaggacaatccttcctttgtgttcagaattcttttacaacaagagaccgtcggtctcttaatcccttagagaatttgaaagaagagaagaatgaatctctcttgaaagagatagattttacaatctgagcactctaatgattccttaatga

SEQ ID NO: 5407 - DNA, 553 bp, Glycine max
agcttgacaagtttataaggtcttcctcatagctgttctaagcaaaggtcccaaactgcctatctgcgacattacgttagcccattcacaatgtgcggacacaagtacgatgaaaataacattttattgcccacactgtggtccactaaggagctacctaatggataataaacttatagcgcttactgctaactatgctccttggaaaaccgtggagcctcacgctttacttgaaaaacaaatgcgacccctgtgaagcatcatcaacttttttacatggaataaaatgagccattttataaaacctatctgcaaccacaaaagtggaatctctaccattgcttgtttttggcagccccaaaacaaaatccatggattaatcaatgcaaggatactccggaattggcaatggagtatacaatgcatgaggctttaccttatactttgtctttttacatacaatgcaatgttcacaaaatttctgcgcatcctttttcatatgaagccaataaaaatgctcttgtaatgtttctagagtcttttggaccccaaa

SEQ ID NO: 5408 - DNA, 593 bp, Glycine max
agcttcttatccaaggctcatcttggtggtgaagctcctccttccatggcttattccttactacaaagactactcagaatgccccgaaatacaaggctaaaaccctatactactggaatgaccaaaatacaaggcccagacgaaggaaatacctattctaatatttacaaagataagcgggctcatacttagcccatgggctcgaaatctaccctaaggctcatgagaaccctagggccttcccttggatctctagcccaatctacttggtgtcttctacccaatgcccttgcggggtaggattgcatcacttcatattattctccatgtatatcctccattttcttgtggtttggtgctgtttagagtagattcaaaaaaataaaccgattaaatcttagatctacacttgttcttgcatttctatggttcaaattttgtagatctactcttgaatcatgtttttgtgttgagtttacgttctatcatttttcattcataatattcttgtgctgaaccttagatctaatttttctttcaaatattgattagaaaaaaaaacacaaaatctaagtgtaatcacttaatccatg

SEQ ID NO: 5409 - DNA, 580 bp, Glycine max
agcttgatgaaaaacagtgcttttctctttgtcttgtcatgtgttaacatttttgtgatctaattgaaaagcctgttattattattattattattaccacttgtttgtcttttcacaggtctgtgattttggtctgtcacgaatgaagcaccatacatatttgtcatccaaatcctgtgctggaacggtaacttttcagaacttggatataagcttttggaaattctgtttttactccttattcaccattgatataaattatcaccatagttggtttcattgtaggatctacaatttttacaataaaaaaaactaaatatatcttttgcctgcagccggagtggatggcgccagaagtcttgagaaatgaaccagccaatgagaaagaagttaattctgcgtctgtgtcagcttcatggaaatatgattttgaagttcgcaatgtgatagttaaagtttgcatgcacgtgtgatgtgtattagtttggtgtgatcttgtgggagttaactaccacaagaattccctggcaagggtttgaacccatgcaggttgttggagctgttggatttaaaataaacg

SEQ ID NO: 5410 - DNA, 485 bp, Glycine max
ttgagtgaaacttggtggtttgtcaagaacaggacgtattctctgtgagacaaaccaatataaatttcttgtgtctcattcttattattttctcttctactatttaaactaacccatggtttgaatttgatcttttgtgtttgaaaaattccgtttgttttacaaagatttgaaactatcgtctgatttgctttgcaaaagtctgatatttgttttcttaaggcttgctcatctgatgataactttgttatttacgaaaagaatttaaattttctcaaaatcccaacctttttatgatatttgtctctacacatgtttaactctattttgacctgtcatgggcctaacatgtttctacctccctaaatgcgtatttcataataaaaaaattatatagggctatttccatatttaaacctttgagttatatttatatttaaataagaatccatactttttgtccttttaaatatacctttttttgt

SEQ ID NO: 5411 - DNA, 548 bp, Glycine max
agctttgcataccccaaggatccattattattttacttgtgaaagagagccatgagggtgggctcatgggccactttgggatagaccagacccttgtcttactcaaagaaaagttttattggccccatatgaagaaagatgtccataagcattgcactaggtgtgtggcttgtttacaagccaagtctagggtgatgcctcatgggctatacacacccttacctatcccatctgcaccttgggtagacattagtatggactttgtccttgggcttcctagaacccaaagaggtgtagactctatctttgtggtggtggataggtttagcaagatggcacactttataccatgccacaaggtggatgatgcttaccacatctcaaaactctttttcagggaagttgtgagactccatggtttgcctaggaccattgtgtcagatagagatgctaagttccttaaccacttctggaaaaccttatgggctaagttaggaactaaacttttttctctaccacttgtcatccacaaactgatgggcaaacag

SEQ ID NO: 5412 - DNA, 565 bp, Glycine max
tgcactgcccaaagtggacaaccttccagaaaacgttgaagccaccattgatgtcccttatgatgtcgttcagtatctcaaaaaagcctacgatgatttggaagaacccttgacctgttttctcaaatcttccaaagttgattggcatttctatgacccatatatgttacagttaccaaaaaggttcaaagagaaaaccaaatggtgtggaatagtaagccccggttgggcaccatagttgaaggtattgagccacaaggcagttggtggggttttgactcactctggttggacctctgtggtggaggttgtttagaatgaaaaacctctagttttgttaatgtttcttgcagaccacggattgaactcgagggtgttggaagtgaagaatatggggtattcaattcctaaggatgaacaagatggatcattcacgagtgatgcggtcgctaacttaataaggttggttatggttgtggaaaaaggaaggatttacagagaaaaggtttaaaaggtgaaggatttatgtctgaatattgttagacaagaaaaatatattaacaaa

SEQ ID NO: 5413 - DNA, 691 bp, Glycine max
  unsure at all n locations
agctttaaaagttagggtcacttataatttaactcattgatttgccgagaaaactaatgaaaaaacgagagtgtgtaatgatttttttttttgtcttgtatgaacatcctttagtaaaatgaacatttctctctatatgattaactttggattttgagtcataccttatccaaaactagacatacatgactttttatacaggtaaagtttataaaattttgttatctaataagtataagttatgcaatagttttataaatactctataaaaggaaaaaaaatgaaaacttgagtattaatataaatttataatccgataaatatatttatgtataaatttggtttgggttggattagattgaattttaaaatcaaatccaaaatctgattttatccaaaacaaatgggtttattaaattttaatttgttcgactattggtttatttgattttcagttntttgcttgatttattcataaagttatttgataaaattagtttatgaacattcctaagaaaaccgataaagtaaagacatcanatgtacaattaagtctattaactagtaaagtacgcctttgttgacanatctacagtgttaaacattcgtagattaatatgtatagnacattctttgcctattgattcttaatggacatctctcgtactaattttttcagtttaaggaaaag

SEQ ID NO: 5414 - DNA, 562 bp, Glycine max
agcttcattggaaagaaactaactttttggttttatttaaaaaatttgataattatatcaattataattatatttctgtcattaattgtatttattaatggataatattgtttattaaacttgttatattacaacatatttaatttggttttatttttaacattgattattgtatgttatgagtattgagtaatgagtaatggcatttataagtgaaatttaaattttaatattatcagatcatgaatattaagagggcgtgccctggtgcaacagtaaagttgccctttgtgaccagttgatttcaggttctggaaatagccataaatactatgttttgttttgcttaatatcgcttgacatattatattaaaaattaaaataaaatgtgttaactattacaggttccttggttatatcattaaaccttaaagttgccttcaccagtttaataaccagtcctattttaaaaccttgcacttgcttataatataagggactgaagtaagatgctgcttgccatttagtagataatatttatgactgaaaaccctaacacgtt

SEQ ID NO: 5415 - DNA, 602 bp, Glycine max
  unsure at all n locations
agcttgcttctacaatctccccctttttgatgatgacttctttcgaaatcaagaaacacacacacacattttttcctagtcgatcactcacataaatttccattctccccctttgtttttgaatttatgcttcacttaaaattaagtttattactcatctgagttcttgatttaatccctatttctctccccctttggcatcaacaaaaagccaaagtgcataacaagtatgaaacatacaaatacaactaatcattcacacatcaatcatggaaaaatataaactaatcatgaagcaagaaacatgactagatcaaatatatagaaaaatcacatagtcatataacataattcataattgttcaaacaaaccatgcaaataaagaaatactaaattgttcaaatgtcataataatatagccaaatacacggctggaaatcaaagtactagtaatattaaaataagagaaaaactaaaataatggtggcgacggtggtggtagatcaaagcttgaacgaatataagagacatcttcttcgactntggtgattcttgactccatctcattgaagcgcatgtccacttgtaactccaaagtatg

SEQ ID NO: 5416 - DNA, 540 bp, Glycine max
agcttgtagggttaaagtctcacgattgtctcgtgctcatgcaacaattgttagacgtggctatacgagacatcttgccaaacaaagtcaggttcacgataactcgcctgtgctttttcttccatgctatatgtagcaaagtgatttatccagtaatgtttgatgagttggaaaatgaggccgcaattatactgtgccagttggagatgtattttccccctgctttctttgacatcatgattcacttgattgtgcatctggtcagagaaatcaaatgttgtggtcctgtttatctacggtggatgtgcccggttgagcgatacatgaagatcttaaaagggtatacaaaaaatctatatcgtccggaagcatctattgttgagaggtacattgcagaagaagccattgaattttgtttagaatacttagaaaaggctaaagctgttgggcttcctgagtgtcagcatgatgacaaagtgggggtaaggggtcaagaggactgcacgtgatcacttcaagtgtagaagatttgttacaagc

SEQ ID NO: 5417 - DNA, 524 bp, Glycine max
aactctgctttccaccaatcttcgatctctttcaggatcagaatagggttgtttatgaccgggaatcgattggtgatttggatccctacgagtatcaactggtgctacaatgtgacataccagactctttaaatatgtctaagcgcatacttccttagtctaaaactgactaaagaaatgtacttttagttgagcaatgtatccttggtcatttcttatgaagactatatcatctatatagaccaccgagtaagaacatctactctatgacgtatgacaataaaaaactgaatggactgcttcacttcggtatatcccaaaagcctgaacagctgagctgaattttccacaccaagcacgtggggattgtttgagtccataaagagacctccaaaatctgcaaaccaagctatactccccctgagcaacaaatcccggggttgctacatataaatcggctattctaaattcacatgtagaaatgcatttttaatatccaactgatacagcggctaaagacagat

SEQ ID NO: 5418 - DNA, 521 bp, Glycine max
agcttttatttaaaataattccatacctctttatctttatcaaaaataaaaactatctcatatctgttattttaagaagcattctaatataggacaaagataattcataattagccgcatgatcacatgatctgatcctattatgtaacaatagaatattattgttattttatggacaactttgacatttataaaataatactcccttggcagtattaattatattcttggtgctagcgaaaaatataataatattccactagaatatttatgtggttagatgaaattctgtaatttaattatcaaataaattattttgttttgcaaagattataacactcatttgtatgtgacctcatatgttcaatactacacggataatagtacattaatcatcattaatttactagtcaaggtgagcatctaacaacactccttaacgtccggatggtatgaagtaacatcttgtacttttcaagaaccaatgaaagaataatataacgttttcttccatcatttat

SEQ ID NO: 5419 - DNA, 570 bp, Glycine max
gacacttgaaactcagcttccaaccaatcttcgatatctttcaggatcagaataaggctccccatgattgggtagcaatttttgatttggatccataggagtatcaattggtctacaatctgacataccagtttctttaagtatgtctaacgcatacttccttagtctaaaaatgactaaataaatgttcttatagttgagcaatttttccttggtcatttcttatgatgactatatcatctatatagaccaccaagtaaaaacatctactcgatgaggtatgacaataaaaaactgaatggtctgcttcacttcgttttatcccaaaagcctgaacaactgagctgaattttccaaaccaagcacgtggggattgtttgagtccataaagagacctccaaaatttgcaaaccaagctagactccccctgagcaacaaatcccggtggttgctccatataaatctcctattctaattccccatgtacagatgcatttttaatatccaactgatacagtggctaatgacagatggcagctatggcaagaaagagtcaaacaaaagtaattt

SEQ ID NO: 5420 - DNA, 548 bp, Glycine max
  unsure at all n locations
agcttgtcacttgatgtcaaccagtctgctacttgttctcttgtcatcttccattatatttagcaatttggaaatttattgcttttacaccaagtgatgtttcatagtttagttattaacatctacgatcaaactttatggttagcataaactggaacgctgaacaacagtaggtgttggctttgggttcatgctttctgatagaacaagtactttgaagacatgttttaataatatttttcataattttgaaactgttttatttaagcttcagcagttgttgcttgctagtactcatgctatgttggttactctctagtctacttactactaatgttggagctttttcccatctatgctctctatatccagtatttgaagntaagagctctttaaaggcaatcctatacacattacttctatgaagcaactgtcggagctggtctttcaattggtagcactctacgtggcctccttgaaactggagacaaaatattacaaatcgaaggcatctttagggttgctttgatggggtatatctctttttt

SEQ ID NO: 5421 - DNA, 619 bp, Glycine max
agcttgcggtaaagtaataacaaaactagacattttcaataactcacaatacaaagctttgtttgattctaccaagagaaataatcaaggatgtgcttaaaagacccacgtcaggaatgctggacctctttctacacaccaatctccctgtggcctcactgtaatgggttagcacagaaaatatactgtccatggcagtaacagcacttcgcttctcatcatcactcgcctcacacggctcttctctctccacttctgcatcccacaaagctaaaaaatcagtagaacccaaacactaggacaattactgggagaccaaaaggaactattacaattctgcatcaaatatcaagtttaaaatacattttaactttttttctttatttagcataacctaacatgatcaaaaagcacatgtatctacgttttgtcctaaaattatttttaattatgcgactaatttaattattatggttggtgaagcaacgcttgagtacgaagcactcacttgacatgcatgaataaggaaagaaaaggaagaaaaaaaaaactaaaccaagaaataaacctctgacatcaggttcgagcacttgctccaatgaacaaacgcgatcaatct

SEQ ID NO: 5422 - DNA, 598 bp, Glycine max
agcttgcttctacacttaagtgtttggggtgattatagagaaaatgttggggggagttaaaacaaaatgggcttttcaaataaaaatccgacccactttaagtgactcagtacaaaaacattgcatttcattaagcttgcgtttagtgatcacaatccatatgttggatgcatgtgtatagtgcacaagacttactaagctcattggacgatagggcctttggatgcatatcaatgtgttgagaccttccacataaatttgaaacttcattccacaagaagcatgccaagcaaactcttagcgagattaacctatcctcagtaaagggttttgtaaataaataaacaagttgatctcctgtagatacaaaatgtaattccatagtacccttctaagtgtgatcccttatgaaatggtgttttatttctatatgtttggctcatgaatgcatgataggatttttagaaagatcaatagcaacaatattatcacaaaggatagtaatgttactctcaaataggttatagtcggcaagctgatgttaatccacaggagttgaaaacaaagacatgcaggtgatatatactctatttatgct

SEQ ID NO: 5423 - DNA, 514 bp, Glycine max
tgcatgatttacattctctccctttctcaagaaaattcttatttcttcttgacatcatcaaaatcttcatgatatacattttctgtatacacacgcattaaaaactctttctctttgtatcaacacggtttatataaaaactctattcctgttcaaagatttcttttccgtttttcaacaaacactcgtggtttatacaaaaatttatttatatacactcattactcacacacaagaatttctttttacacattattttcacacacaaaatgtctccatacactttttacatataaaaactcttttcttttctttatatatagacatgacatttgttcacaacgcctctttcttttttctattcttagcgttatcatgattattttgttgggtttatttttacgacgacgttcctaaaggagaactctacaaggtttcggaattctcacaaacattatctacgataactaacacaacagtccacacaaaatgtatgctcaaaacaaaatatgat

SEQ ID NO: 5424 - DNA, 609 bp, Glycine max
gcatgcaagcttcgaacgatcatcgcttcattcttgtttcgatagattatttcaccaaatgggtagaagcggcttcttataccaatgtcatgaagagtgtggtggtcagattcataaagaaggaacttatttgttgatacggactccctaggaagatcattactgacaatggcaccaatcttaataacaaaatgatgcaagaaatgtgcggggatttcaagatccagcatcataactccaccccctatcggccaaagatgaatggggttgtggaggctgcaaataaaaatatttagaagattattcagaagatgacagtgtcatacaaagattggcatgagatgttcccttttgccctgcatggatatcaaacctcggtacgaacttctactggggcaacgccgtattccttggtttatgggatggaagcggcgctcccatttgaggtagaggtcccttcccagaagatactagcggaattgggcctaaaagaatcagagtgggctcaaacatgctacgaccaactcaaccttattgaaaggaagcgtttgacagccgtgagccatgggcgccagtattaacaaaggataaagaacgcgttcgacaaga

SEQ ID NO: 5425 - DNA, 508 bp, Glycine max
  unsure at all n locations
agctttgagcaaattcaaacgacaataactctttactcggatgtctgattgagtcctgtaatatatcgagacgctcgaaatggaataccgaagctcagagcaaatttaaacgacaataacctttttactcggatgtctgattgagtcccgtaatatatcgagatgctcgaaattgaatgttgaagctctgatcaaattgaaacgacaataaatttttactcggatgactgattgagtcccgtaatatatcgaaacgctcgaaattgaatgccgaagctctgagcaaattcaaacgacaataactttttactcggatgtctgattgagtcccgtaatatatcgagacgctcgaaatggaataccgaagcgctgagcaaattcanacgacaataacttattactcggatgtctgattgagtccccgaatatatcgaaaagctcgaaattgaatgttgaagctctgagcaaattcaaacgacaaaaactctttacttggatgtctgattga

SEQ ID NO: 5426 - DNA, 510 bp, Glycine max
agctttcagctgtctacttggatgattctgatccatctagcatgtttgatgatgtgctgctgtgtaaggatggtaagagtccatctattttttatgctggccgtgaaccgtcaccatcgcagattgctgactcaggaggatctaatgggaagaaaacacgatcgaagaaaggttccaacaagaggacaagtgcaagcgcaacggtggatttatggactttgctaactcaatgtgcacaggctgtggctagctttgaccaaaggactgcaaatgaaacactcaagcagattaggcagcactcttcaccttatggcgatggacttcagcgtttggctcattactttgccgatggccttgagaaacggttagctgctgggacaccaaagttcatttcctttcaatcagcatctgccgcagatatgttgaaagcctacagagtgtatatctcagcatcaccatttctcaagatgtcaaatttcttggctaacagcactattctgaagctagcac

SEQ ID NO: 5427 - DNA, 376 bp, Glycine max
ttatatatcgagccgatgtataataattacttatcaacttatttctctcattagtgacgagcacagagtatattaaaaagaatgtgttaaacatggtattttcaggtgactattaagtatatggatttgacttgggatgcgtgaacaagctctcattcaatggcgaaaaagctcgtgaacgagtcaccttcccctgtccacctctggcactccaaccactgagtgctgtattggacctgtaaaatgcccactcactcatgctggccttgcctaaaatgatagccccagcttctcttaatctggaaactacacctgcatctctaggcaccacagagcccagaagagcaaaagagcctgcagtggtgttcatcttatc

SEQ ID NO: 5428 - DNA, 561 bp, Glycine max
  unsure at all n locations
agcttttaactgaatttgcagcgttccaattgatttttaaatggtgtaatcgattacaacatattggtaatcggttaccagtgtatctaaacgttgaaattcaaattcaattgtgaagagtcatatcttttcagaaatgttttgtgtaatcgattacatggttatggtaatcgattaccagtgacaagttttgaatgaaaagtcaagagatgtaactcttccaatggttttcaggtttttctcaacgttataactcttccaatggttttcttgactggacatgaagagtctataaaagcaagaccttgacttgcatttcaataactttttataacaactttttagaatttcttgaacaacttttgagaaatcttgaaacccttactacttatncttcttcttcttcctttgccaaaagctttctaagttttctggtttccaaaccttgttctttcacagaaaacaaaagngngctatatctttttattctctcctcccttgccaaaagagttcaacaaggactaatcacctgaatctttttttggctctcttctctttttc

SEQ ID NO: 5429 - DNA, 440 bp, Glycine max
tgaaattgaacaacggaagctctcgagaaattcaaatgctcatttcatttcacacggatgtccgattcagatgcataacgtatctagatgctcaaaattgaaaaacagaagctctcgagaaattcaaatggtcataacttttaacatggatgtctgattccgaagcataacatatcgtgacgctcaaaattgaataagagaagctctcgagaaattcaaattgtcataaattttcacacggatgttcgattcggggataaaatatgttgagatgcttgaaattgagagataaaagctcttgtgaaattccaatggtcataacttttcactcggatttccgattcaagacatttgaaattgaccaacctgagctctttaaaaattccaactggtcgtaacttttcacacggatgtccgaatccgggaaatattatatcgag

SEQ ID NO: 5430 - DNA, 487 bp, Glycine max
tcttagtctcacctgatgaagatgaattcgtggctacttcattctctcctctaatgacaatagcatcatttctggcattgaattgctgggagttggaagccatcttctcaattaaatttctggcttcagcaggggtcatgtctccaagggctccaccactggcagcatctatcatacttctctccatgttactaagtccttcataaaaatattgggggagaagctgctcataaatctggtggtgagagcaactggcacatagtttcttgaatctctcccagtattcatataattaagctctctccactgagttgcctaattcctgaaatatcttttctgatggtcgtggtcctggaagcagggaaatttttttctaagaatactctcttgaggtcatcccaactcgtgatggaccgtggagcaaggtaatatagccagtcctttgccactccctctaaagaatgatgaaaggcgttcagaaatatgt

SEQ ID NO: 5431 - DNA, 598 bp, Glycine max
agctttgagcaaattcaaacgacaataaatttttactcggatgtccgattgagtctcgtaatatatcgagaagctcgaaatggaataccaaagctctgagcaaattcaaacgacaataactttttactcggatgtcttattgagtcccataatttatcggaacgctcgaaatagaataccgaagctttgagcaaattcaaacgacaataacctttttactcggaagtcggattgagtcccgttatatatccagacgctcgaaattgaatgttgaagctctgagcaaattcaaacgacaataacctttttactcagatgtcggatagagtcccgtaatatattgagacgctcgaaatggaataccgaagctctgagcaaattcaaacgacaataactttttactcggatgtgcgattgagtcccgtaatatatcgaaacgctcgaaattgaatgttgaagctctgagcaaattcaaacgacaataaatttttactcggatgtccgattgagtcccgtaatatatcgagacgctcgaaatggataaccaaagctctgagcaaatacaaacgacaataactttttacttggatgtcttatt

SEQ ID NO: 5432 - DNA, 625 bp, Glycine max
ttgagccaactcaaacgataataactttttactcggatgtttgattgagtcccgtaacatatcgagacgctcgaaattgaatgttgaacctctgagccaattcaaacgacaataacttttttcacggatgtctgattgagtcccgtaacatattgagacgctcgaaattgaatgttgaacctctgagcaaattcaaatgacaataactttttactcggatgtctgattgagtcccgtaacatatcgagacgctcgaaattgaatgttgaagctctgagccaatacaaacgaccataactttttactcggatgtctgattgagtcccgtaacatatcgagacgctcgaaattgaatgttgaagctctgagccaatacaaacgaccataactttttactcggatgtctgattgagtcccgtaacatatcgagacgctcgaaattgaatgttgaagctctgagccaatacaaacgaccataacttttttctcggatgtctgattgagtcccggaacatatcgagacgctcgaaattgaatgttgagctctgagccaactcaaacgacaaataacttttactcggatgtctgattgagtcccgtaacatatcgagacgctcgaaattga

SEQ ID NO: 5433 - DNA, 557 bp, Glycine max
agcttcaacattcaatttcgaccgtcttgatatgttaagggactcaatcagacatccgagaaaaaagttattgtcgtttgagttggctcagagcttcaacattcaatttcgaccgtctcgatatgttaagggactcaatcagacatccgagtaaaaagttatggtcctttgtattggctcagagcttcaacattcaatttcgagcgtctcgatatgttacgggactcaatcagatatccgagaaaaaagttatcgtcgtttgagttggctcagagcttcaacattcaatttcgagcgtctcgatatgttacgggactcaatcagacatccgagtaaaaagttatggtcctttgtattggctcagagcttcaacattcaatttcgagcgtctcgatatgttacgggactcaatcagatatccgagaaaaaagttatcgtcgtttgagttggctcagagattcaacattcaatttcgagcgtctcgatatattacgggactcaatcagacatccgagtaaaaagttattgtcgtttgatttgctcagagctcaacattc

SEQ ID NO: 5434 - DNA, 645 bp, Glycine max
ttggctgcgcagcagctctgatttcgcgagtatttatagtttatgacgcattgtaatcgattacaggtatgggtaatcgattacatgcccaataagccttctggtaatcgattacaggatgttgtaatcgattacaggctgcctgttcatgtgtaatcgattacactggatggtaatcgattaccagagcctatcctaggctagtttctaagagaatatctatatttatgctcaaatacatcctatatgactaattttcactactaatacactaaattcaatcattcaattactatgtacacaagaaattataaattctatcataaaaacaagaattcaaacaagatcaaacaaaacaatctacaatcaaaagataaaaagttaatcaacctatcaatcaaccaatcaatcaaccaatcaattcctatttgtctaaatctcttacatctaaaagacctaattctcttctaatagagaaaaacactttcttggggagaggtttagtgaaaatatcagcaagttgattcttagtatcaacaaattctaatacacaatctccctttaagacatgatctctaaaaaagggtgtctaatctctaatatgttagttcttgaatggtgaactgggtgtttggatagaattat

SEQ ID NO: 5435 - DNA, 561 bp, Glycine max
agcttgtagcaaattcgaacggcaataacattttactcggaagtccgattgagtcccgtaatatatcgaaacgctcaaaatttaaaatcgaaggtcgcagcaaattttaacgacaataacatttcactcggaactccgattgagtcccgtaatatatcgagacgctcgaaatttaaaaccgaagctcgcagcaaatgctaacgacaataacatttcactcggaagtccgattgagtcccgtaatatatcgagacgctcaaaatttaaaaccgaagctcgcagcaaatgctaacgacaataacatttcactcggaagttcgattgagtcccgtaatatatcgagacgctcgaaatttaaaaccgaagctcgcagcaaatgctaacgacaataacatttcactcggaagtccgattgagtcccgtaatatatcgagacgctcaaaatttaaaaccgaagctcgcagcaaattctaacgacaataacatttcactcggaagtccgattgagtcccgtaatatattcgagacgctcgaaatttaaaaccaaagctcgtagcaaat

SEQ ID NO: 5436 - DNA, 598 bp, Glycine max
tttgctcatttgatgttgtgaagttgttgataatttgcatttctagatgaaataagccatgttctcttgtgtcaggatgaggtctgttaggagaacacaaacctttaacatcaatcggactatacctttctcttcaaatccagcgatcaactgtgtaggcagaaatttggagaagtatcaacttggtggggtcatatttggttgcaagaatagtactttaaaagaatgtcaatcaaaacaactctttggttagtatttctttcttttgctttcttttattgtaacatttgtaatagattaacagtaattagtatgagtttaaaggattaatgaatcaatgatttgtgttttaacaggcttaccaacaaaccacttttcctatgtgaagaatattgatcctggtctgcctatattcttattcaactatagtgacaggaagctccatggaatatttgaggcatctagcaaggggaaaatgtacatagacccttatgcatggattgatgataattcagatttggatagaacacagtatcctgcacaggtatcacttgttatatcttcttatcaactctatctcacaagggtcataatgata

SEQ ID NO: 5437 - DNA, 514 bp, Glycine max
  unsure at all n locations
agcttagagaaatatgtcaaatatcgatcttaaagaaaactaacaagaaagaaaaaaagttaaaagcattgagcaaaaaaacaaacaataaatttaaacaaaatgccagaaatgtgattgaaaactgagagaaaagatataacgtggattgataagaagaatagcaacaaagtaagacatttagaaaatagggaaataaaaataaaggaaacaataaaggcaaggaattaaataaataattaccattactgggaatgtaaagcttatgacatgtaagaaagaactgtatatcggcaagtaaataaatggatagaaaataacttanggtgtgtttggtagagaggaatgaaaagggatgaaagtgtgaggaatgaaaagagatgaaagagagtgtaaagtgaagttgtttgattgagatgaaagagagtgtaaaagagatgaaagatttaaattaaagttgtaggcaaataataaaagtaactaaactagagatggagcacttattaaaaaatag

SEQ ID NO: 5438 - DNA, 496 bp, Glycine max
agctttatagtgatccttttcaaaagctttgtcttgaaattgatcactcacactaatcaagtcattctcaagaaattttgtatttcttgattccacaatcctagtgctatgtgatggacaataaaatctataccctttggacttttcagcatatccaatgaaatactcactaatagtcctagggtctagtttcttctcttgtgggttataaacactcacttcagatgggcatccccaaacacgtatatgtcacaaactcagtttctaaccttttaacttgaaaggtgtctttaagacaaccttgattggaactcgatttaatgtatacatagtcatctttaatgcttcaatccacaagaattaaggaggttttctattacttctcatacttcttaccatgtccattaaagttcggtttcttctttttgccacaccattctgatccggagaaccaggcatagtgtactgggcaaaaatctcatgtttttgaagaaac

SEQ ID NO: 5439 - DNA, 574 bp, Glycine max
  unsure at all n locations
ttctaagcatttttttgggccattccagatcctcgagcgaatctgacccgtagcctatcggctcctccttgcaccggagtcactgatacaccccgtgtttcactgctttctcctccgccctcatcacggttccccacccgccaccacgtacacatggcccttacaggttcgagatgaccagcccctcaggcgtccgctgtgtttccttgactataaagacgacaccgcgaccaccccaccaacacgaatggtccttacccaatgggaaggcgagccaccggaggacacctcgtgggaaaaatggtctgacctatgccaggcctaccaccttgaggacaaggtggttttcggggaggacggtagtgttagcaatgccggcaactacaactccgatagcgagcatctccgtcacgacaccaacccaagaccagtacgtatcaggggagcgccagcacgtctgcgagattatcacgtgcaatacctaccaggaacaaaaggataggctcgtacatacgataatagcaggtgcatgtacagaatcanggaaatgcacacgtgatctaatacacacgtg

SEQ ID NO: 5440 - DNA, 441 bp, Glycine max
tcaagatgtagttaagacccctgacaacttctgttcgtgttttaggcttgatagaaacacagatgttagatataataatatgaggaaggttgcttctcgtgcagattccagggacaactatttatactgtcctagggctgtcgatctacaggatgaggatttaaggcattttcagcggcattgggaaaagggggagcctgtcattgtcagcaacgtgcttgcaaaaacatctggtttaagctgggaaccacttgtcatgtggccgtgcattccgtcagatgactaagaccaagcatgaacaacatttggatgtgaaagcaatcgattgcttacattggtgcgaggtttgcgtaacatctcaatcttgaactgtgagggatatttgcacaaattccattgctcacatacatatatgtgaagcttatgttgataatgtttaat

SEQ ID NO: 5441 - DNA, 655 bp, Glycine max
agctttacattcttccaagttctaccttctttacaagatccttcaattgctttcttccttgaagcatgcgcaaaccaggggtattgggtgatgaaacattaatcacctagaaaaggatattaaaaacattaaacagaatagattaccaaacatttgtcttacaaatttgtagtaagctgcacagatgcttgattaaaaaaaattggaatccctatgtcagttgttttttgccatccatttctcacttttctaaaccagggaattggcaatggaggtgacaacacccttgaaagaaacacatttgttgaacatcaaggacaacctaaaaacataatccttcaaattggatgatcaatcatactactcacatcatgttctggtgaaaggtttgggtgggaaatttggaggatgtaaaaccgttcccattgctgagtttccatcctttcatttctccataatgaacttaaaaaaaatgaccggtgattttaagctggcagtaaaggcaatgatcctgggtataaatcttagatctctttagtcattatacaccacaacacttctgttccttagtaaaccaacattttatatagaagatgtatctttcaatatgttaacttttgtatgcaattacacataataccgataatgaatgatg

SEQ ID NO: 5442 - DNA, 616 bp, Glycine max
tgtattcaagttcaaaagacggaaagcatagtgcattgttctgtttgaataattttaaatagtactacttgctttaccactagtttataataatggttttgtatgttggatatcttttgttgtttttcacttttgattggtaagtaatgtttttcctcctcttggttttgacaaaaagctacactgttcgttcctttgggattagaagaaatgagaagattgcatgctatgtcactatcagaggtaacaaggcgatgcaacttttggagagtggtttgcaagtgaaggaatatgaacttctcaaaaggaactttagtgatactggttgctttggctttggtgttcatgagcatattgatttgggaatcaagtaagttgaagaaatctttgattttttctattttttttactttttcctgaggtaaacattttacgacagacgtgaagttgaagatttgatatatgttgtggtgtgcacaatgcatattcactttatactgcattccacttttgacttaaaccaaatgctaactggtgtattaatataggagtttcaaaattttctttcgttgttttggactttggtgcttatataaatttttttttttttgatatt

SEQ ID NO: 5443 - DNA, 454 bp, Glycine max
agctttaaggactgaaaacagagaattttttgttaaaaaattcattattctttctgcaaaaattcttttataaatccttgtaaagttaaaaaaaatctcaaaataccttgaacatattgagagaaaaggactaagcacttatttgtatattcgtctataagacatttctacactactacaatttatagatttaacatcgcaaggttaacatcggttattcacaaaaccgatgttaacaaaagcacggtgacatttttgtaaataagtagacttagttaacatcggttttggaaaaaccgatgttagtatctcgttaacatcagtttgggaaaaaccgatgttatcgagttgatgttaacattcgattttttacctagttgatggtaacatcggttattttaaaaaaaatgaatgttctatcattatatattaaaaatctggaattgcacaaccc

SEQ ID NO: 5444 - DNA, 439 bp, Glycine max
ttgaataccccaaggatcaattaggaaattacttgtgaaagtattattctcatgaggatgggctcatgggccactttgggatagacaagatgtccataagcattgcactaggtgtgtggcttgtttacaagccaagtctagggtgattccttatgggctatacacacccttacccatcccctctgcaccttgggtagacattagtatggactttgtccttgggcttcctagaacccaaagaggtgtagactctatctttgtggtggtggataggtttagcaagatggcacactttataccatgccacaaggtatatgatgcttcccacatctcaaaaatcttttttagggaaagtgtgagactccatggtttgtctaggaccattgtgtcagatagagatgctaagttccttagccatttttggaaaaccttatgggct

SEQ ID NO: 5445 - DNA, 622 bp, Glycine max
  unsure at all n locations
agctttgttactgttgcatcaaacttgttatttgatcttgaaataactatgtttcctagacatttaattaccttttgttgattcctgtgcaaacatgtttacttgtgttgttatcctttccatttacttggataagactttgatatttaattgttaattttactaaggatgtcctcctctacaagtgcttatattttgaaactatttctatgtgatggttgtgctggaaatggttttggtaatttatgcttaattattatttagaaggagtaagtttgtaaattataactataaatttttataaaatacatttgtttgtaacttactaaatttttccttttaaagagtaagtgtatgctagtaagtgtgtataatacttgttaacttacactcaatttttcaaagaagtaagttaacaagttattattattaaattttcttaaagtacggtcaggtacaacttattaaattacaccttcaaaataatgattactaatgtagatggtgttattcgttcgtattttttaactagataatttcattntcagcaatattttattttacaaatatttaaattcattatttaggtaaaataaaaaaatttacataaatatcatgaact

SEQ ID NO: 5446 - DNA, 586 bp, Glycine max
  unsure at all n locations
agcttgcccagagaatgagtccacggaggatatgcttaccacctcaaaagactggaaagcagtttctaatgactcctctgctgcctccacataaggcatagaggatgggcaactcaccaagatatcttccttgcctgatacgatgaccaaatgtccttgcactacgaatttcaacttttggtggagtgtagagggaacaactcccactgagtggatccacgggcgccccaacagacagctttagggggggttaatgtccattatttggaaggtgacttgacaggtgtgagggcctatctgtactgggagatcgatctctcccctaacctctcggcgggtgccgtcgaaagcacgaactaccattgaacttggctttaagtgggaggctttgaatggtaatttgtccaaagtgctcttaggcatcacgtttaaactggaaccattatcgatgagcactttggctacgatatggtccatacacttgactgatacgtgcaaagccttattatgccctctcccctcggcggngatttcttctttggcgaaagcgagatagtntgtgggcatgatattgttgatcaaccct

SEQ ID NO: 5447 - DNA, 533 bp, Glycine max
  unsure at all n locations
tcttagtctcagatgatgcaactgagtttgtagctacctcatgaactcctctaataactatggcatcatttctggcgctaaactgctgaaagttggaagccatcttctcaattaaatttctagcttcagcaggagtcatgtctccaagggctccaccactggcagcatctatcatacttctctccatattactgagtccttcataaaaatattggagaagaagctgctctgaaatctgatggtgagggcaactggcgcatagttatttaaattgctcccagtactcatacaggctctctccactgagttgtctaatacctgagatatccttcctgatggctgtggtcctggaagcagggaaatttttttctaagaatactctcttaaggtcgtcccagctcgtgatggaccttggagcaaggtaatacagccagtcctttgccactccctctaatgaatgaggaaaagccttcagaaatatgtgatcctcttggacatctggnggtttcatggtggagcagacaatatgaaat

SEQ ID NO: 5448 - DNA, 581 bp, Glycine max
  unsure at all n locations
agctttcataaaaaatgagtgatattttattatttattttcacaataaatcaaggttataaaaagaacttagcaattgatacatttaaaaaggttgtatgtttcttataattaaaagaataaaatatcatcattggttcttatacaaaggacatttataatgttttaattattttttctctcctttggttgtatatttcatacactatttctctaaccagccaaaagaaattctctctcaatcatttcaaattgtcttaattaatttcttttatcatttaaaaatggtaggactagtatgagaaataaagttatttttttagtatttaacgtaactacgtatttaaaagttgagactattggttaagctgaaatgatatcatgtcagttgatttatgcacccgatgatataatttattctttttaatctaccatattttatctttatctttaaattgaaattaaataatnttttaaaagaatatgtcaacagttaaaaataaattcatattacaatttaaattattcattgagtacaaaataatttatatattgaaatatatttattattaaaaaatttaa

SEQ ID NO: 5449 - DNA, 609 bp, Glycine max
  unsure at all n locations
agcttgatgattcgactttccttttatggctttaacacattgagtcagtcatcaaatcacatcaccttcaacgtttcattgtcaatcctcaaattcctctctgttttctttctgcagaagaatgtgaagctggactggttgccaaaggttttaatcaagttaaaggctttgatttttcagaaactttttctccagttgtgaagcctattactattaggcttattttaactctagcaatcacaaatcaatgggtgcttgctcagctagatgcaaataatgcctttcttaatggcttgcttaaatgagactgtctacatgtctcaactccctggtttccaacaatcaaatccttctctggtctgtaaactaaataaagccttgtatgggttcaaacaagccccaagacaatggttngagaggctgcaatctgctctaacttagtttggttttgtggctagtaagtgtgatccctctctctttgttttcaagacttcatctcactgtgtatcttttagtttatgtggatgatatcatccttactagcaagtccactcaatttgatcagcacctgacatctaacctaattcaaagtttttcttaaacaactcg

SEQ ID NO: 5450 - DNA, 450 bp, Glycine max
tcccttgttcaattttgagcgtctcaatatattatgcgcttgtttcagacatctgagttgaatgttatgtccatttgaatttctcgagagcttccgttgttcaatgtggagcgtctcgagttattatgcgcctgagtcggaccttcgagtgaaaagttatgaccatttgaattgctcaagagctgccattgaccaatttctgagcgtctctatatattatgcgcctgacccggacctgcgtgtgaaaagttatgaccatttgaattgctcaagagctgacattgttctatttacagcgtctcgatgtataatgcgcctgaatcggacctccgagtgtaaagttgtgaccatttgaatttctcgataggtttcattgctcagtttcgagcgtctagatatattatgcgcctgaatctgacctccgtgtgaaaagttatgaccatttgaatt

SEQ ID NO: 5451 - DNA, 509 bp, Glycine max
agctttcattgttcaatttcgagcatcttgttatattatgcgcctgaatcggaccttcgagttgaaagttatgaccatttgaatttcacgagagcttccgtggttcaatttcaagcgtatcgatatattatgcgcctgaatcggacctccgagtgaaaagttatgaccatttgaatttctcgagagctttcgttgttcaatatcgagcgtctcgatatagtatgcgcctgaatcggacctctgagtgaaaagtaatgaccatttgaattgctcaagagctttcattgttcaatttcgagcgtcttgatatattacgcgcctgaatcggacctcctagttgaaagatatgaccatttcaatttctcgagagctttcgttgttcaatatcgagcgtctcgatatattatgcgcctgaatcggacctctgagtgaaaagtaatgaccatttgaatttctcgagagcttccgatggtcaatttcgagcgtctcgatatattatgcgcctgaat

SEQ ID NO: 5452 - DNA, 589 bp, Glycine max
  unsure at all n locations
ttaacagcatagccttgtaataggacttccaaagctgtcatatcaagatgattctctctgtgaagcttgctagaaagggaaacaagtaaaaagttctttcaaagtcaaaaatgttgtttccacttattggccgttagagctcctccaccttgacctatttggaccaaccaatactacatccctcactggacatagacatggtctagtcataatgaatgattacaccagatggacatgggtcatgttcctaacccacaaggatgaatcttttgatgccttctataaattttataaaagaattcaaaattaaaaagtttttttatatttgtatctcttcaatcagaaacgaccataggggagagtttgaaaataatctttattgaaaacttttatgaagagaatgatattcaccataactattccactccaagaacaccacaacaaaatggagttattgagaaaaaaaatagacctcttcaataaatggctagaaccatgcttaacgactactctacccctaaacgcttctaggctgaagcaatanacattacctattacatatagaaaaaatttatatatgtcaatctta

SEQ ID NO: 5453 - DNA, 463 bp, Glycine max
agcttgcattgttaattgtagtatttgtgtttcttgcttttctcattgaaattcatgtgtttcatcatattgggtgctaagatattgtttactttaggggtaggccttggccagattagtagaagaaatagctcaatgtggtattccagaaggttcaaggaagatcaatggaaagtacattcattctcaccttgttgctagattagaaggtatattggtatttgctctaactattactcacgattagagcctaccctatatgattaacaagagtacttcctagttctggataactatgtgttaatgtttgtgtggaatatgctaataaagcttctcaacaatgtcttttttttccaactttgccctatttgtgcccttatcagtgcaaatgcattgttttttcctacatagttgtaaatgaacaactgaaggaaaaaatataggatgtcggtacgacataatc

SEQ ID NO: 5454 - DNA, 562 bp, Glycine max
taagctccttcaactgcacaaggctcttaatatttgaagagtatccttgtggaaccttcacccgacgaaaacttatcttctccttcttggacaaagtatggcaggctgggggcaagtaaattttcttcccatcagaccttggatgcaactgtgatcttatacccatattagctagatcttgacgggtattcaagccatccttcgtcttgccttgaatgttaaggagcgccccaatcacactatcacaaacatttttctccacatgcataacatcaatacaatgtctaacgtcaagatcacaccagtacggaagatcaaagaaaatggacctcttcttccatatgcaactttgacttttatccttcttttgggtcttcccaaatacagtattcaggtgttcaacccgctgatatacctgctcaccagtcaacggtatcggtgcaatatcatgctcttgacttccattaaaaagcttttctcagtcgtctataaggatgattgggtgttagaaagcggtgatgcctactgtagaactatttttctccatgtttaagttgtatgt

SEQ ID NO: 5455 - DNA, 487 bp, Glycine max
  unsure at all n locations
agcttcatatttgaatacaagaatgtgctttcttgctcttctcacatcctttgtgcctttatgagtgacttcaagcatttttcatatttcctttacacttttccaccttgtagtatgaaagaattcatcagaagataaaccagaagttaaaatgtttttagcttttttatcatcttgcccttttcttttctcatcatctttcatctcttcccattttttaggtaccaattcaccatttacttctttagttggtgtaaaagtacctttaacaatagcattccatgcatcggggtcaattgactgaataaagatttccattctcttttgccaaaaagaaaaatgttccgcctcaaacaaaggatgtcgatttaaagatgcaccctctttgaaaatgatttgttttgagcccactnttagaaaanttgtgatcttgagtaacttacaatatgtagctctgataccaattgaaaaagatgatggaactcac

SEQ ID NO: 5456 - DNA, 261 bp, Glycine max
  unsure at all n locations
ctcggatgtctgatcgagccctgttatatatcaagacgctcgatatngagaatggaagcactaagaatagtcaaacgacaataacctttgactcggatgtccgattgagtcccgtaggatatcgagacgctcgtaattganaacggaagctctgagaanaatcaaacgacaataactnttaactcggatgtccgatcgagccctgtaatatatcgagacgctcgaaagtgaaaacggaagctctaagaatagtcaaacgac

SEQ ID NO: 5457 - DNA, 334 bp, Glycine max
ctcgtcttcttctatagtccagtcttcttctggcttcaattcttcagtgggctatccttctgtgtccagcatcttgtgatgttcccagactttgatgacagctctacaggttctgatatccaaagatttgaggaaggccaccattcttgctgtacaatatatatagttgcttccatcgagaattggtggactgatcactggaccgccttctttcttcatgttcatcagaatttatctgcctagatctcactctgtgatttcgagtgttggctctgataccaattgaaattctgataccagcggacagatgtcgtaccggatgtcacgacatcac

SEQ ID NO: 5458 - DNA, 212 bp, Glycine max
  unsure at all n locations
acatgcacagtggccaaagatgcatgggagatcctgaaaaccactcatgaaggaacctccaaagtgaagatgtccacatggcaactatnggctaccaaattccaaaatctgaagatgaatgaggaagagtgtattcatgacttccacatgaacattcttgaaattgccaatgctagcactggcttgggagaaagaatgatagatgaaaagct

SEQ ID NO: 5459 - DNA, 350 bp, Glycine max
cgcatagtatatcaagatgcgtcgaaataaacatcaaagtgcaaggcaaattcaaacggtcataactttcgactcggaagttcgattcaggtaaataatatatcgagtcgctcgataattaaacaacggaaagtcacaagacatttaaatgggtgtaacttttcacctggatgcccgattcaggcgcatagtatatcgagatgctagaaattaaacatcagagtgcaaggcagaatcaaacggcccataactttgagtcggatgtccgattcaggccaataatatatcgagtcgctcgaaaatgaacaacggaagctctcagctatctcatatggcataacttttcactc

SEQ ID NO: 5460 - DNA, 295 bp, Glycine max
  unsure at all n locations
gtgtctcgatatattatgctcttgaatcggacctccgagtgaaaagttatgaccatatgaatgtctcgagagctagctctgttcactttcgagcgtctcgatatattatgcgcatgagtctcgaccccgagtganaagatatgtccatttgaatntctcgagagcttccgttgttcaatgtttagagtctcgatatattatgcgcatgaatctgacatntgagttaatagttatgaccaggtgaattgtttgagagctatcgatgtcaattttgagcgttcgattattatgcgcg

SEQ ID NO: 5461 - DNA, 298 bp, Glycine max
  unsure at all n locations
ctgcagctcttctgttctccccattgaaacaatnntttttaatatacctcattcaaaggtgcttccaatgtactaaaatccttcacaaatcgcctataaaaacttgctaggccatgaaaacttctcacctcggtcacacttttaggtgaggccactcttggatagccttaaccttttcttcatncaactngtaccccttggaagtcactacaaaaccaagaaacacaacatggtctttcaaaaataatgcatntttcaaggttagcatacaatngttcccttctaagcacacacaaca

SEQ ID NO: 5462 - DNA, 154 bp, Glycine max
  unsure at all n locations
cagtttcgagcctctcgaaatattatgcgcctgaatcggacatccgtgtganaagttatgaccatntgaatntctcgagagcttccgatgtttaatttcgagcgactcgatatattatgagcctgaatcggagcctcgtgtggaaagttatgac

SEQ ID NO: 5463 - DNA, 327 bp, Glycine max
  unsure at all n locations
tttggacccatgagctaagtatgagcccacttatctttgtacatattagattanggtttcattatttctgggccttgtatttagggcttcataatgtatggagggtaccctagtaatgtangatgtttcagcccttgtatttagggcacctagaactagttttgtattaaggatagttttgtaatttcacatgcattaagtgtgaatatatgatgtccttcatgctttacatgtctcatgacacctaagcacacttagtggagaatcttggactcgatcttggattagtgggctgaaccatagctganattcactaatcgtaattag

SEQ ID NO: 5464 - DNA, 365 bp, Glycine max
  unsure at all n locations
acaagttgtcccacagagaatgcaaaatatgcggcattgaagtacgtngagagcttctttaactgctttgggtcgttttgctcgaactggtctgctncataagcaagcatgtttggcttcacacacccactccctaatgccaccaagtagagtgctacatagaatatcatggccttcatgctcttggcttctacgcactgttctccatcagtcacattgcatggangtggcttcaattgaggaacatgagcttggactgatagcagtatgaaaccgtggaatcgtattatatatacatgactaanggctctcgatcaatggcaataatatattntgttagagagagagagagagagagaagagat

SEQ ID NO: 5465 - DNA, 483 bp, Glycine max
  unsure at all n locations
ttgaattctagtcccccttatagactctgtgaagatgttngctagttggtcattagaacctatcaaatttgtaatgagttctcttggaaaaaccttttcctgaatgaaatgacnaataaatttaatatgcatagttcatccatgaaacatcatattggtggctatatgaagagctntgcttgattgtcacaacataatttcacctattggatgtctctaaacttcaattcttgaaggagatatttaatccaaacgtgtgcacaagtagctgtacacatatncttatactctacttctgcacggtgcagtaacattgtgcttttactcttcaagagacatattcctccataggtcacaatccccaaaacacattgtcatggcgactgcccactatatacaaatcttgcttgaggaatcctgcctgtgctntatttatatacttaaggcgtgttaagatctatgatccaaaatcatctatatata

SEQ ID NO: 5466 - DNA, 251 bp, Glycine max
  unsure at all n locations
tctctctaaccttactctngaatntacatctcatagtggtgattacttcagagactaagagaacgttgtcaagaatagaacgatcttcaacataagtttattggtattgggaaatgcatttggtaaggatgtgtttaagcccattggctaggaccttgaaaatgaatttatagataacattgcaaaggaataagagcccaaagtttttcatagtagtgggactacattttttggggataaggacaatggat

SEQ ID NO: 5467 - DNA, 266 bp, Glycine max
  unsure at all n locations
atatctcaccatgaccaggcgtgaaatatctntctgacagttagtttcttaattctccttgtgtgagtcattggcttgtagtntgtagaatccttagatacatcanagggtcacctagaaagggacgttgttacactgacaggggacatagtaacattattggatactcacatgaagactcggctggagatgcangagatagacaatccacttcaagcaattgtatttttgtgggttgaaatcttatctcatggaagtgtaaaaag

SEQ ID NO: 5468 - DNA, 310 bp, Glycine max
  unsure at all n locations
ccttcacccgacgaagacactgacaaagacttatctcttccttcttggacanagtatggcaggctgggggcaagtaaattatcttcccatcagaccttggatgcaactgagatcgtatacccatatcagctagatcttgacaggtattcaagccatccttcgtcttgccttgaatgttaaggagcgtcccaatcacactgtcacaaacattnttctccacatgcataacatcaatacaatgtctaacgtcaagaacacaccagtacggaagatcagagagnatggacctcttcttacatatgcaactctg

SEQ ID NO: 5469 - DNA, 523 bp, Glycine max
agcttaacaacacttaaggttcaatgccccttctaaactatgtgttcaactaagcaatgcattaaagacatgttaatttaattgaataataaatgcgagtctttattaggaggtgtgattaattcatttaatataataaatgggcggattattcagggagtagttgaagatttgatttattctagactattactttttgttgaacaactgacctcaataacttaagagggggtgaattaattaaattttaaaattttcccgctaacaaattttaacccccttttaaatgatacatgatagactcagaatgcagaagaagaagaagaaacaatcaatttaataatgttcttttaaatgcgcaagacaaagtaaactgcaataaaataactgagataagggaagagagaattgcaaaatcattttatactggtttggccactccccgtgcctacgtccagtccttaaacaacccacttgagattttcactatctttgtaaactctgtacaacttctgaacacatc

SEQ ID NO: 5470 - DNA, 510 bp, Glycine max
agcttgaaattcagaaccgaagctctgagcaaaatcaaatgacaataactttttactcggatggccgattgtgtcgcgtagtgtatcgagacgcttgaaattcagaacaaaagctctgagcaaaatcaaacaacaataactttttacacggatgtccgaatgaatgccgtaatatatcgagacgctcgatcttgaaaacggaagctctgagcaaattcaaaagacaataactttttactaggatgtctgattgagtcccgtagtatatcgagatgctcgacattcataacagaagctctgagcaaaatgaaacgacaacaactttttactcggatgtctgattgtgtcccgtagtatatcgagactctcgaaattcagaacagacgctctgagcaaaatcaaacgacaataacgttgtactcggatggtccgatggatcccgtagtgtatcgagacgcttgaaattcagaacagaagctctgagcagaatcaaacgacaataacttttta

SEQ ID NO: 5471 - DNA, 638 bp, Glycine max
  unsure at all n locations
taagggacgtgaggtcttgaaggaactacctctttaggttgtaaaactctatgaggagatagaaaccttgagagataaactaggaaaatttattggtggtcatgaagcccttaacaaaattattaaggtgcaaagaaaccctaaagacaaatttagccatgctttcaaaggcaaaaagattgtacatggtgaagaagttattgtttgctatttttgtggaaaaatgggtcacaaaactcataagtgcaaggatctccctacaaagggaaacccatcaaagggtttgtccagtgcttaccaacatccacaagcaaacaaggaaaaaggacccaaaaagatttgggtagctaagaataaaataattcctattacagacctncttgatagtaggaaagaaacaccattgatggtacctggacagtggctgctcgcaacacatgatagtcaaaaagtctatgttctgatccctaagccctatgtctagtggggttgccacttttggagggaataaaaaaggtccgataactggtgtaggtaaaagttgcattcctccctatccttctatagataantgtttactttgttaaagggtgaagcataatttgctaagcataaatcaattatgtgacagtggatat

SEQ ID NO: 5472 - DNA, 634 bp, Glycine max
agcttcctgtcgccagtgatccacacattataccaatgatctcttaagttgataccattaggatattcaaacaataccctctcataagttgataccacatcaccatcatattacataatagcaacgactccctccatcttcaacccaatatggtgaaatatcaaaacaatgcaatgaatcagaccacttgtatttattagcatcttatattgtgagtcaattatcaacaacaaccaagattgcacgacaaaatataagattcaaattacattgagctctacaaggacattgttggcttgtcagactgtcataaatatgattgctaaatcacaatataaaacattaagttttactttttaaaaattaaaacacttaaaaaaacacaatgaaatcataattcctttgtattaatcaatacaacggaatcatgatttcattccctagtcagggtaaaaataaaataaccaaacaaaatcatactcttgttacaaatttgtgaatgttatcaataatacaacaaaatcatgattccattatgttatttaacaatataaaaaaataacaataaaaatatgattatggtgtacaagcatttaacaaaaacatattttcattattaatttttttcacccca

SEQ ID NO: 5473 - DNA, 559 bp, Glycine max
tttggcacaaagaagaagaagttcatagagattgccggctcgtaaaggattgtattggattgattggatttgagaaagattgattagaaaagtgtatattgaaaagcaaatcaaagccttgctgttatagactcttcatgtatggccaaaaggaccatttacagaaggtatcacttttagaaaaacttaaaacaaatttgaaaaagtcacaaaccttttgaagagttacatcttttgatttattcagaaacaatcactggtaatcgattaccaaattagtgtaatcgattacacaaggcttttatgcgaaaggatgtgactcttcacatttgaatttgaatttcaacgttcaagggcactagtaatcgattacgaaaacattgtaatcgattacaactttttgaaattaattggaatgttgtaaattcagtttgaaaactttttgaaatccattttgctactggtaatcaattacaataatctggtaatcgattaccaaagagtaaaaactatttggtaaacatgttttgagaaaaatccatgtgctactcagtttttt

SEQ ID NO: 5474 - DNA, 507 bp, Glycine max
ttaacatttattttacaggtattcataatgttgatatttttattcaagaatttgatctacttttaaccccagttgatgagatataagatgaatctaactgtagttcttttatcactgtttttcaataaactttgcctcaaaaaataaaatacaaggatcacctaattacaagctttctaaattctaattactgatttttaggtttatttacctttttttaatctaaattaaaaatgttaatctctattttttataattaaaaaaactttgagatccctttcactgatgttatctatgactctatgtgttgatgctatcacttggcaaaggaagaaattaagagtaatcgaatacacagaagagtttatgaggtgctatctaaggctgctagctcaaatccaaaacacgctggcttgaatgaacgcgagctctattttgtcttcttttgtaagccaaatagttttcaagagatgaaaagagcttggcatgtgtctgatgtgcactttg

SEQ ID NO: 5475 - DNA, 489 bp, Glycine max
agctttaacaacaattcccttctttttcttatcattttcttcgtgttgatttaatctcaacagttccatttcgtgttcctgtaactttccaaatagtgtagcaagagacatgttagttaaatctcgtgactcagtaatggctgttaccttaggtgtccattctctgcttaaacatctcaatactttatttatgagatcttcatttggaaaatttttccctaaagatgcaagatgatttattatatgtgtaaacctttttttgcatgtcttgtatactttcatttgaattcattctaaataattcatactcatgagttaatgtatttattctagatcttttcacatctgttgcgccctcatgtgttacttgtagggtatcccacattttttttgcacttttacaatttgataccctaaagtactcatccattcctaaggcagatgtaattatatttttgacttttaagtttgattgcactaatctctttt

SEQ ID NO: 5476 - DNA, 588 bp, Glycine max
agcttatgctgcaaatatttacaatagacctcctcaacctcagcagcaaaatcaaccacagcagaacaattatgacctctccagcaacagatacaaccctggatggaggaatcaccctaatctcagatggtctagccctcagcaacaacaatagcagcctgctcctttcttccaaaatgttgttggcccaagcagaccgtacattcctccaccaatccaacaacagcaacagccccagaaacagccaacagttgaggcccctccacaaccttccctcgaagaacttgtgaggcaaatgactatgcagaacatgcagtttcaacaagagaccagagcttccatttagagcttgactaatcagataggacaattagctacacaattgaatcaacaaaagtcccagaattctgacaagctaccttctcaagctgtccaaaatcccaaaaatgtcagtgccatttcattgacgtcgggaaagcagtgtcaaggacctcaacccgtagcaccttcctcatctgcaaatgaacctgccaaacttcactctacttcaaaaaaggtgaagacaaaatttacctacaatttctgaca

SEQ ID NO: 5477 - DNA, 520 bp, Glycine max
agcttgacaagctagcttgtttaactaatattaataataatgatgataataataactttattttatcaaatcttatcttatccagattttattctatctagattttatttcatctcatctcatcttatcttatctaaattttattttatttcatttatgggttgggacttaaaatagatttgtaagctttggggctgaggacttatatatcaacacaaaggttttagtttagggagcttttttcagagaggagaataattctaggatgttagaatttcagtttttattactgttcatgcacattgttcacgtagaataaaattcattttttgcaaatcatctttgatccatacatttgttcatattatgctgtttttattttctttggatatactttgcgctttaacgacttggaatcaatatgattttggttatcaattatttttggatttgtcattacttatacgaaattttataagtttcttttttaggtaggatttcactaggtgttaaaataatg

SEQ ID NO: 5478 - DNA, 508 bp, Glycine max
tatagaatatataataaaagaacaatgacaattgaagagtctatacatgtttcctttgatgagtctaatgccattcttccaaggaaggattttttagatgatatttcagattccttagaagatacacatattcatggaaataactctaaagaaaaagatgaaggaagcaatgaagattctcaagataatggggctagaggaaataatgaacttccaagagaatggaaagcctcaagagatcatcccctcgacaacattattggtgatatatcaaaaggggtaacaactagacattctcttaaagatttatgcaataatatggcttttgtatctatgattgaacctaaaaatataaaagaagccatattagatgataactggataattaccatgcaagaagaactgaatcaatttgaaagacataatgtgtgaaaactagtacaaaaacctgaaaattatcctgtcataggaacaaaaagggtttttagaaataaattagatgaacatg

SEQ ID NO: 5479 - DNA, 433 bp, Glycine max
ttagactagccttgataggaatttggtgactcactcttgttgtcattgctcagggcttgttgtcatcatctttgaatgtatcaaaactgcttgaatcaaccttgattcatcatcatgaagcttgcttctacaatagatagcatggctcattggtgtagccatgtgcttagcattttccatgccgaatctatgaataaactgtttgcggtacttatattgattgacaaaaattctagtcttggtatgtttaatttgtctatcaagacaaaaattatatactcgcataatggacatatcaaactgactttgcatgtcatgagagaagtccttgcacaataattcatgagtaaatctacaaataatatcatcacacatatatatgaaccaagaaaacatcatgtaatgttctctttatgaaaagagtaatatctac

SEQ ID NO: 5480 - DNA, 544 bp, Glycine max
tattaccttataaatgtttgatggatatttcagatatccactttggtaatgatactcattgccgacattggaggttttggcttaaccatgttaatcaccacctttgctgtgaagggcattaaccgtgtccatgctgtgggatggatttgtgccatttttaacattgcagtgtttgctgctcccttaagcataatggtacattctatattcaattattcacataatatagatcttgcatagtttgatatgcaatctgaaatatgtaaaatctgtacattaattgcagaggagggtcataaaaaccaaaagtgtagagttcatgccattttcattgtccttatttcttacgctctgcgccaccatgtggtttttctatggtttcttcgacaaggatgacttcattatggtgaggaataacacttctatatctattactcattctactcattttctcttgaaagcaaactgattagtgttttgttttgtggattatcagtttcccatgtgttaagatttatttttggcatctctcaaatgattttat

SEQ ID NO: 5481 - DNA, 639 bp, Glycine max
tagaagaaatctcaaacgatagatttcacaaaatcttttctaaatcttttaaaatattattctactttttcacgtgagataaggttttttataacatcagtttgataatttttaatgattttaaaaaattgatctgtatttttatagtttgaaaattatttttaatcctgtattttgtaattaaaataattttaaaaaatcaaaatcaaaattcatacaaaatatgaaataagcaatgatttacgaaatatctaacgtatgctggaaaacatcggcgacagaaaaaatctgaaaaataaataacaaggataacattttttccccgcaaaaaagcactttatagtcagatgtagtttcaatattttaaataataacattctcacatttaaaaataaaataaaaattagagaatctcgtatcttttcgtagttatttatccaaatagttttactttagaatatataaaataatcttatagctatttttatactaccctcctatcatatatacatgcatatctaagtatatttattaattttaataataatcttaaaaatcacttatcaataattttataaattaattagtacagggatgtttacattagtaatttttaatattagattaaaattttaaaaa

SEQ ID NO: 5482 - DNA, 477 bp, Glycine max
agctttacagcagatgcccctttactccatgttcttgaaggatatgttaacaaggaaacataagtatattcaccaggaaaaaattgtagtggaaggaaattgtaatgttgtgattcaaaagatccttccacccaagcataaagaccttgggagtgtaactattccttgttcaattagagaagtcactgtgggaaaagctctgattgacttgggagccagcattaatttaatgtcattctccatgtgcagaaggttgggagagttggagaccatgcccactaagatgactttacaactgggtgaccgctccattaccagaccatatggagtaattaaagatgtgctggtcagagtgaaacattttatcttcccgacagactgtgtggcaatggatatctgtgaagatactgacattcctgtcatattgggaaggccattcatgttaactgcaaactgcatatttgatatgggtagaaa

SEQ ID NO: 5483 - DNA, 434 bp, Glycine max
tatcaacatcaaacttggagaaagagttcttggggtcaagacatgagaagcaatcaagtataatgttacttccttcactaaagcggcgatccatctccacacatattttatcaatagcaacataaaaaatctctgcacggtaatgatgaagattagtgatagtcctcccttctgctcttgaacgaccccgaactggtatttcgtcatccatatttggtactagaatacttttagcaacacaaaatccttggacatcggcaaaaaaattattccagccactctctctcattgtgcccaaccgagctttgacaacatcaactaattccatggcattcacaatattaagatcttttctttgcaatatatttgaaagctcgtttgtgataccaaacaactttaacattaacctcaaaataaaagcaaatttaaagctc

SEQ ID NO: 5484 - DNA, 489 bp, Glycine max
  unsure at all n locations
cagcttgtatagaaggtgcgttcctaatttctctacaattgcatcacctctcaatgagctggtgaaaaataatgtggcatttacctagggtgaaaaacaagagcaagcctttgctttgctcaaagaaaagcttactaaggcacctgttctaactcttcctgacttttctaaaacttttgagctagaatgtgatgcctctggagtgggagttggagctgtattgttacaaggtgggcaccctattgcttattttagtgaaaaacttcatagtgccaccctcaactaccccacctatgataaagagctctatgccttaataagagccctccaaacttgggaacattaccttgtttccaaggaatttgtcattcatagtgatcatcaatcacttaagtacattagagggcaaagcaagttaaacaaaaggcatgcaacatgggtagagtacctanagcaatttccctatgttattaaatacaaaaagggaaa

SEQ ID NO: 5485 - DNA, 546 bp, Glycine max
caggaccttaaaactcagcttcctgggaatatgtctaagaagttgagcttagctctcacacctctctaatagctaagctcacctccttgagataagaagctagagcttagctacacaccccctataatagttaagctcactcttatgcccaaaaacatgaaaatacaaaaaagtccctactacaaagactactaaaaatgccccgaaatacaagactaaaaccctatactactagaatggccaaaatacaaggcccaaacaaaggaaaaaactattctaatatttacaaagataagcgagctcatacttagcccatgagcttgaaatctaccctaaggctcatgagaaccctaagaccttcccttggatctctggcccaatctacttggagtcttctatccaatgcccttgcggtgtaagattgcatcatgataaaccaacttcttaaagcatttatgtgagtcaagtggagttttaaaatgtttcacaaagaaatgcccaagttatattggacaaagaatatatagagtatctctcaacagaaca

SEQ ID NO: 5486 - DNA, 532 bp, Glycine max
  unsure at all n locations
agcttgtagcctttatatccttgagagtagccaaggaacacaatagccctaggtgagaatttgtgtttgctggatatcanagtggaggcataacataatgttccaaaagtcctgaaatcagcatagttaggaagtttagcatgtaaaatcacaaatggtgacttggctttcagaatggggctatgggtcctgttcatcaagaaaactgcagttttgacacattcaccccaaaattttaatggtaaataagattgaaacagcaaggcacgaacaacatttaaaatatgaagtgtttcctttctacaacattgnttttctgtgggcgctccacacaggaaaattggtgtaggacacatttcttcaaaaagaaatctgaaaaggcaagctcttttgcattgtcagatctgaatcttttgatggtggttttaaattgagtttccacatatgaaaaaatttgtggtacaataaggagacaatcagattatttataaaaaagtatatccaatgaacctacttttatcatctactaaag

SEQ ID NO: 5487 - DNA, 469 bp, Glycine max
ttgagaaatatactaccccatgaagttcatcaattagttcatcaacagtgggaataggaaagttatctttgattgtgatggcattcaaggccctgtaatctgtgcaaaatctccaagtgccatccttcttcttgacaagaatgattggaggtgaaaaatggcttctgctaggggcaataatcccttccttgagcatgtcagctatcattaattacttcaatctgatccttccggctgtgaggatacctatatggcttgacttttactggtccagcaccttcaaccaatgggattgaatgattgtgagttcttctagggggtaatcctgatggcacatcaaagactgttctataagtgtaaagtaaacagttccgcaatggcatgcgtatgctgcattcttctcaggtgattaaattgagcctgttgtcatagagagggtatctcaccatgcaaggtgataaattgatta

SEQ ID NO: 5488 - DNA, 503 bp, Glycine max
  unsure at all n locations
agcttgtaattttcagaaaaacaaatacctattcaaccatatcaacatactaagacaattcaaggtgaaatcaagagacatagagagcaatttaaaataggttacgtgcactacacaacatcattcaatgctagatccatctaagatgcctagatcattccttataaagaagaacctatctctagcaagtggtttagtgaatatatttgctagttgatgctcactatcaatgaaatcaatgcaacaatcaccttttgaaacatgatctctaagaaaatgatgtcttatctcaatatgtttggttttagaatgcatgacaagatttttggttaaattgatcgcacttgtgttgtcacattgtaagggaatgtgatcaaggattacattcccttagaatgcatgacaagaggcctttatgagttctccattctctagggacatccataggaggtatggttgagatctttntggttagttcatgttctttcactttggtttttatc

SEQ ID NO: 5489 - DNA, 438 bp, Glycine max
tccatttgtatactgcaaccataataagaaaaaagctttttgtttcccctcctgtggatgtagccttgatcaaggtgaaccacgtaattctgtgtgtgttctttctctattttcttctctttcaccttgctgcaaaactctgtgtgtatgacatagctttctgctgtttttgttgttgttgttcttgcttgttcttcatcacttccataatagataactttctacctgtttcatttgtcgatgaggagttggataaactgttttcaactgatttatcatcacgtgcacaaaacaagaaaactgagatatacaccagaattctttccatccttaataatggtgtagttattggtgataagaagtttgaatttctagcattctcatcaagtcagttgcgggaaaactctctctgaattgttgctcctacaacaactggat

SEQ ID NO: 5490 - DNA, 630 bp, Glycine max
agcttaacaaaaggcatgcgaagtggttggaattcctagagcaatttccttatgttatcaaacataaaaagggaaaaggtaatattgtagccgatgctctttctcggcgtcatgcattactttctatgcttgaaacaaaattgattggtcttgaatgtttgaaaagcatgtatgaaaatgatgaaacttttggagaaatttttaaaaattgtgaaaaattttcagaaaatggtttctttagacatgaaggctttcttttcaaagaaaacaaattgtgtgtgcctaaatgttctactagaaatttgcttgtttgtgaagcacatgaaggaggtttaatggggcattttggggtccaaaagactctagaaacattacaagaacatttttattggcctcatatgaaaaaggatgtgcagaaattttgtgaacattgcattgtatgtaaaaaggcaaagtctaaggtaaaacctcatggattgtatactccattgccaattccggagtattcttggatgaattattcaatgaattttgtttggggctgccaaaaacaaccaagggtaaaaattccatttttgtggtgctgaaaaggttttctaaaaagcttaatttatttcatgtaaaaaaaat

SEQ ID NO: 5491 - DNA, 440 bp, Glycine max
  unsure at all n locations
tatcatttttttccttaaattttctttctcattttttctgtcaaatttgttaatttaatcaagttctccaattatttaaaaacattacaattaaactaacggaaataatggaaaatgataccatcgtaatagttttaaataattgacgattcaattaaatatttttaaacaaactttttaattgaatttttaattataattaaaaaatcaattgtatagttaaacttttttctatcaccttagatatcatatttgtcactcttataatatttataatatttatgcagatgcttgagtaattatgatgttggttttcaattaaaattaaaatttgactaanatatgtttgtgataactgatgaaatctaaatttgtgggtattccttaatattttttctttgttttgctctatgaggatatcactaataatttttatttta

SEQ ID NO: 5492 - DNA, 563 bp, Glycine max
agcttgcttgaatcaacatttttcaattgatccaaattaacttcaggtagtcttttgtcaactatgcacatgataatatctttctcaaactcttcttaagccaaaactgagaactctttgttattggtctcttctgagatttcaaagttcctccttgcacacactatctctagcaaaacaaccataactgtaaacatcagattttgaagttactgaaagatttgggagccattctggagctacataccctttggttcctctcatatttaacacggtttggtacctgtcatccttgggagttatgagctttacaaggttgaaatacgagagtttggcctcgaaatcctagtccaagagaacattttcaggttttatgttgacatatgcagttatgacactcttcatgaatatacatgatagttgacacccccttgcgacgtggtgagggggcgtggtcgagtcccacatcgaataaaaatagtgccgagatacactatattagtggggagtaattctcaccttacaagttgggtttgtaggattaagctaaactcatgaaaaat

SEQ ID NO: 5493 - DNA, 515 bp, Glycine max
agcttcaattggagtcttgtctcttacagacttagttggacatatgttgagtatgtaaacagcagtgtacactgcttcagtccagaatgtgttaggtagtcccttctccttgagcatcgatctagctatttccataactgtgcgattctttctctcggacactccattttgttgaggagaatatgcgactataagttgtcgctctatgccttcatcctcacaaaatatttcaaactcgcgagaggtgtactctttgccgcgatcacttcttagtacttttatctattttccactttgattttcagcaacggccttcaactttttgaatactccaaagacttctgatttttcttttagaaaatatacccatgttattctaaagaagtcattattgaagagtatgaagtaccagttgttctcatgtgatggcagccttattggtccacagacgttcgtatgtatcagctgccatagatctttcgctctccatgctccgcttgttgaaaaaggaaatc

SEQ ID NO: 5494 - DNA, 485 bp, Glycine max
cagctttgacatgttggatattggcaacaatttctatatgggcaagctcgacattgaagcagataggacaaaggtaatggaggaaggcccctagatgatctttgatcactacctaacaattcatacttgggcccaggattttatctccgcggcgacaaagattgatgaaaccctagtgtgggttcgatttcctggccttgaccttttactatgatgaaagcattctcttggctctggcaacgaccattggcaatccaattagtgttaattcaaataccctacacataagacatggaagggttgcgagagtttgtgtgcaaattgatttggacaaacctgttgtggggaaaaattggctaaagggtcactggcatagagtagaatatgaaagtttataccacagctgtgcctcatgtggtcggaatggtcatttggctcgaaactgccctacttcattacatgtagacacccatcattcttcttcg

SEQ ID NO: 5495 - DNA, 527 bp, Glycine max
agctttttggtggggagcaataaggtgcctgttgatgttctccaatatgctgatgatacgatatttttcggagaagcatctatggcaaatgtcaaaactgtgaaggttattctcaggagttttgagctggtttctggattgagaattaattttgctaaaagcaaatttggagttgttggtcaatctgaggagtggtgtcttcatgctgcaaactatcttaactgtgctttggttcaatttcctttatgttatttaggaattctgattgttgtcaatcccaaaagaagggtggtgtgggatcctgtaattaggaaatttgaagataggctgaataggtggaataagagaaacatatccatggctggcagactcactcttattaaggctgtcttaacagcactacctttgttttacttaacttttttcagggcccctaaaacagtcattaataaggttatcttccattcaaagacaatttttgtggggaggttaaccagaagagaagaagattgcctgggtatcttgga

SEQ ID NO: 5496 - DNA, 345 bp, Glycine max
gctgcatgctgccatcttatgctgcgaacatgtacaatttactttctcaacctctgcagcataatctacctcagtgcaactattatgactctctccagcaacagatactgccctggatggaggaatcatcctaccctgcgagggaccctctatccactgcatcaacgggtgtctgttacttacatacaaaatgctggaggcccaagcttaccatacattccttcaccgaaacagcgctacaacaaccccataaacaaccaacagttgaagcctctccacacccttctatggaataacttgcgaggccaatgactatgcacaacatgtaattttagcacagagacc

SEQ ID NO: 5497 - DNA, 487 bp, Glycine max
tgaagtagaggagaccttcaatcctagaacgtaacgtggcatacaaaagtgggcagttaacttgaatgaccattattttcaatgcggaaagtattatgttcttcactatccatgttcacacattattgctgcttgtggttacgtgaacatgaattacttccaatatgtagatgttgtttacacaaatgagcacatcctaaaagcttattccgcgcaatggtggcctcttgggaatgaagcggttattcctccttctgatgagcaatggacacttatccctgatccaagtacaattcgtgcgaaaggtcggccaaaatcaacaaggataaggaatgagatggattggctggaaccatctgagcaccgacaaaaatgtagtagatgtggaagagaaggacacaacagacgtcgatgtccaatgcaatctgaatgtggaagttgtaaaataattgaattatgtattttggttgcctacttgaatgaaatg

SEQ ID NO: 5498 - DNA, 535 bp, Glycine max
agcttttggtaaaagaagaagaaaaagttcatagagattcaaggcttgtaaaggattgattggaaaagtaaaagtgtgaaagaattaattgattgaaaatgcaaaacaaagccttgcttttatagactcttcatgtctggtcaagaagaccatttagaagaggtataacttttagaaaaactttaaaaccaatttgaaaaagtcaaaaaccttttgaagagttacatcttttgatttattcagaaacagtcgctggtaatcaattaccaaataagtgtaatcgattacacaaagcttttatgtgataagatgtgactcttcacatttgaatttgaatttcaacgttcaaaggtactggtaatcgattaccaaaacattgtaatcgattacaactttttgaaaataattggaacgttgtaaattcaatttgaaaactttttcaaaacaattttgctactggtaatcgattacaacaatctggtaatcgattactagagagtaaaaactctttggtaaaggtttttgttagacaagt

SEQ ID NO: 5499 - DNA, 313 bp, Glycine max
gccttgtttgaaagaggtatgcctatgttgctgcggaagattttattatatttacctgggtcaactttatcagagagaaatcagacacctttgaagtattcaaagagttgagtctaagacttcaaagagaaaaagactgtcgtcccaagagaaccacgagtgaccatggcagatagttcgaaaaccgcaagtttactgaactctgcacatctgaaggcatcactcatgagttctttgcagccattacaccacaacaaaatggcataggtgaaaggaaaaacaggactttgcaggaagctgctagggtcatgct

SEQ ID NO: 5500 - DNA, 545 bp, Glycine max
  unsure at all n locations
agcttcaagaataatggcctcagcaaacttcttattcccagaaggaaactctataaataggcctcctatttttaatggggagggttaccactactggaaaactcgaatgcaaattttcattgaggcaatagacttaaacatttgagaagccatagaagttggaccttatgtacccaccatggtggctggtaatacaacaatagagaaacatagagaagagtggtctgaagaagaaagaagattagtacaatacaatttaaaggctaaaaacatcattacttctgccttaggaatggatgaatattttagggtgtcaaattgtaagagtgctaaggatatgtgggacactctacaagttacacatgagggaacaactgatgtcaaaagatctaggataaatactctaactcatgagtatgaattatttaggatgaagacaaatganagtttacaagatatacaaaaaagattcacacatatagttaaccatcttgattcattangaagaacttttcaaaatgaagatcttataaataaagtatttt

SEQ ID NO: 5501 - DNA, 559 bp, Glycine max
  unsure at all n locations
tcaacatcagaccacttccagggtgctggaactacttcacatggacttgatggggcccatgcaagttgaaagccttggaggaaagaggtatgcctatgttgctgtggatgatttctccagatttacctgngtcaactttatcagagagaaatcagacacctttgaagtattcaaagagttgagtctaagacttcaaagagaaaaagactgtgtcatcaagagaattaggagtgaccatggcagagagtttgaaaacagcaagtttactgaattctgcacatctgaaggcatcactcatgagttctttgcagccattacaccacaacaaaatggcatagttgaaaggaaaaacaggactttgcaggaagctgctatggtcatgcttcatgccaaagaacttccctataatctctgggctgaagccatgaacacaacatgctatatccacaacagagtcacacttataagagggactccgaccacactgtatgaaatctggaaagggaggaagccaactgtcaagcacttccacatcttttgaagtccatgttacattttg

SEQ ID NO: 5502 - DNA, 385 bp, Glycine max
tgagcgttataccagctgcggtgggctgcagctacgtcacatggacgtggcggagcccgcgcatgtgctcatccttggaggagagatgtctgcctatgttgctctggatgatttctgattagtgacctgactcgactatctcttagataagctttacgcctttgtcatatgcttcgagttgcatatctaactcaaattagaaatatactgtgtcatcgctagaattacagagtgaccatggcagacagctcgaacacacttaggacactgaatcctgcacatgtagtgcatcactcatgagctcgctgcctccttggcagatcaagagcctgtttttggctatctgcataacactactgtgccagactgtgcttcggtggtacgg

SEQ ID NO: 5503 - DNA, 568 bp, Glycine max
tgaccgaggataggaattcctacccttaccctaggaagaaagatcagaagaatctccacagaagaaaaggaaagaaaagagaaagagagaatcacacaatctaagattggaggaaagcatacgaaaaatagaaaaagaaataacgaacaatatgaaaagattctttggatcagacactgtctgaacaatgtgcagaattgtcaaaatgaataagaaaagcggggcttacaaaaatttgtttgaaacctgagggatgcctgaagtattcacctccatgcttgttccatgctgaaccaaagagaaaagagagatagaccgacaagggaaaggccagaacacccaaaagcccaaatttcccaccaaagttcaacttgctaaaaagtcccattgatccatgttttcacatgttatctttgatttgataggaaatgatttgcaaagtcaagtcatgacatatttgtggttcggaattatgatgaaacactttcttgtgtgagatttatacactctgagtggttctcctctatttcagttggacccagagtttcttctaaatgctcattttgaa

SEQ ID NO: 5504 - DNA, 507 bp, Glycine max
agcttcaagatgctcaattgctccaggttgctgcatggaagggcaaaggtctgtatggtggtcagcagaggagcacaaaccacaaacccttgctacaagtacaaatttctgattcaaggccagctgggttaccaagttaaccaatgcatccagtttgccttcaagcttcttagtttcatatgatgcagatgggtttgtagctacctcatgcactcctctaatgactatggcatcatttctggcgctaaactgctgggagttggaagccatcttctcaattaaatttctggctttagcaggagtcatgtctccaagggctccaccactggcagcatctatcatacttctctccatattactgagtccttcataaaaatattggagaagaagctgttctgaaatctgatggtgggggcaactggcacatagtttcttaaatctctcccaatactcatacaggctctctccactgagttgtctaatacctgagatatccttcctgatggc

SEQ ID NO: 5505 - DNA, 475 bp, Glycine max
agcttctggtaggacatcttgacttgctttccaatctgacattcaccacagattctgccttcttctattttcagattgggaatgcctctaacagcacctttgtcaatgattttcttcatgcctcttaagtgcagatgtccaaatctttgatgccatatttcgacttcatcttctttggaggatagacatgtggaggagtaactggtttcttgaggtgtccataggtaacagttgtcctttgatctgctgcccttcattagaacttcactcttctcatttgtcaccaagcattctgactttgtgaagcttacattgaatccttcatcacacaactgactgatgctgatcaagtttgcagtccgtcccttcaccagcagtactttgttcagactaagaagtccatcatggactagctttcccattccagagatcttttctttagagccatctccaaatgtcacataactagtggagc

SEQ ID NO: 5506 - DNA, 498 bp, Glycine max
agcttgaatcggacatccgtgtgaaaagttatgatcatttgaatttctcaagagcttccattgttcaatttcgagcatctcgatatattataagcctaaatcggacattcgtgtgaaaagttatgaccatttgaatttctcaagagcttccgttgttcaatttcgagcctctcgacatcttatatgcccgaatcgaacatccgtgtgaaaagttatgaccatttgaatttctcgagagcttccgatgtttaatttcgagcgtatcgatatattataagccttaatcgaacctcaatgtaaaaagttatgaccattttaatttcccgggagcctccgttgttcattttcgagcgtctgtatatatgatgcgccttaatctaacatccgtgtgaaaagttatgaccatttgaatattctcaagagcttccattgttcaattgcaagcctctttacatattatgcgccggaatcgggacctccgagtgaaaaattatgacc

SEQ ID NO: 5507 - DNA, 565 bp, Glycine max
tgtaatatttataaatcactttttttataaaccttgattaattcaagttaaatcaattaggtagaaccaattaacttgggttatgggtgtaattttgattgcattgaccgtatgttttagtgtaacaatttattccataccatgggacttaatattatgtattgggtacgtagtaaaaattatatatatatgcaaattgttgtattacatcttattaatagttactatgttagtgataattaacactaacaagtatttatctttaaaaaaaaagtctaattaaatcacgcacagacagtacatgtacagtcaagtcaaggtgcttttcaaattaacctgccaacttgaattatttatttatgatctagttaaaagtaatatatttatttatgctgagaataaaagattatttaaaaaatgagtagccgctactagtctagtcaaaattttcaagttattgccacctgaatgcagtcaaacatcatgatgttacactcgactaattaataagaaagagagtgataatgtcaattagtaaaacaattaacaaggttgttttaaattc

SEQ ID NO: 5508 - DNA, 480 bp, Glycine max
agcttcgtgccataggaatggcttagtttccggagtagctggtagaatggctttgccttctctgcgagccttaaaaagaacctagacagaggcattagtctaccattcaacttctgaacttctctgacgttagtaagactatgcatttctagtatcgttgcgcacttggcagggttagcttctatttcgcgatgggtaatgatgaagcccaaaaaattttcgtggccaaccctaaaggtgcattttttgaggttaagggtcttgacatacttgttaatctctatgaacacctcttccaagtctgccacatgttgtgctacactgtgagacttaacgaccatgtcatccacatatacctcgacattttgtcctaagggcatgaccctataacagacgtgagtgagttgagaatgaatacttaccgagatttggagtacactgatgtagtgaagatggactccacaatcttcccccttggat

SEQ ID NO: 5509 - DNA, 525 bp, Glycine max
tcgccggcccgggacatcctccaggggaaagttacactggggtcaccacctcgagctgtgctctctctcttctgtcaaatcaaacatggggttctagaaacccagcaccaagtcttgggttgaataacatggtaaatttccacgggacgcccatgacacagcctgctgcatcatctcatggtgcatcaatccatcaacttccaaataccccgtggtgtttcaagggcattgattctggtaactgttcgcccgagggggtccctgatctaggtctcggtcagatttcgcagcctctcagtagccaacttcacggtgagctggacctgtcccaacaaggcaggagacattatatggatctagaacagtccagggcatatgaatctgctcattggtcactttaatgcacttgtttttgtttttgtttttttgtcaggtttgtaataaaatgtagcacaaacctgtgcctacttggttactgaccagattgatgataactatttcttgttttggtttgttcaaactgat

SEQ ID NO: 5510 - DNA, 539 bp, Glycine max
agctttagcataggatccaatggagtaagagctagcttaaagtgtgtcatctcaacattttcaagtaagtcaagaatctaatttcgtctattaagaaagagacctttattagaaactgccatttcaattcccataaagtagtttaagcggccaaggtccttgataggaaaacagatagcaaagcgtgtttgagttgagaaataacatgattactatttccaacaataataaggtcatcatcgtaaacgagaactaccacttgtttcatttaagacatcacaaacaaataaagaagaatctgcattacttcttaagaaatcacctcttgaagaataatacttaatttcacatgccaagcacattaagattgtttcaaaccataaattgatttgtatagttggcaaacgcaggaagaatttgaactttttggatgtcctgggggtcattccatatagacttcttcttcaagatccccgtgtaagaaagcatttttacatccatttggctcattgaccatccataattaacaacaatatatg

SEQ ID NO: 5511 - DNA, 495 bp, Glycine max
tccattttcaattacaagtgtctagatatattacgggacacaatcggacatccgagaaaatagatattgtcgcttgaatttactacgagcatactgttgtcaataacgagcgtctcgatatactacgagacacaatcggacattcaagtaaaaagttattcctgtgtgaatttgctacaagcttccattttcaatttcaagcgtctagttatattacgggacacaatcggacatccgagtagaaagttattgacgattgagtttgcttatagcatgtgttgtcaattctgagcgtctctatatatgacgggactcgatccgacgtccgagataaaagttattgtcgctagaatttgctccagagcttctattttcaatttctagcgtctcgaaatattagagcactcaatcggacatcttagttaaaagatattgacggtttaatttgctacgagctactattttccagtatgagcgatttgatatattacggga

SEQ ID NO: 5512 - DNA, 502 bp, Glycine max
agcttgtagcaaattcaaaccgcaataactttttactcggatgtctgattgtgtcccgtagtatatagagacgctcgtatttgaaaacagaaactcgtagcaaatacaaacgacaataactttttactcggatgtccgattgtgtcttgtagtatatcgagacgctcgtaattgaaaacagatgctcgtagcaaattcaaatgacaataactatttactcggatgtctgattgtgtcccgtattatatcgagacgctcgtaattgaaaacagaaggttgttgcaaattcaagcgacaataactttttactccaatgttcgattgtgtcccgtagtgtatcgggacgctcgtacttgaaaacagaggctcgtagcaaatctctacgacaataactttttactcagatgtccgattgagtgctctaatatatcgagacactcgaaattgaaaacagaagctctgagcaaaatccaacggacattacttttatctctgatggccg

SEQ ID NO: 5513 - DNA, 396 bp, Glycine max
aatatgtacaaattctaaggcagagagcacttacatccaagtccaacaaattttatgtaagctacagttcactataattgcgccatactgcacgaaattcttcacggaatgtgtttagacgagctttcaagttaggtgttctaaagcttgcatgcaggatggtagctgaaaatagcaagaaaaattaactcaaaagcaaattcatagttgctaaaaatatttaaaagattaaaatttctcagtatgcaacgtaccaagaagaccaatagcaagagcccataaaactgtcaggagaccagcagaaacaaaccaaagaaagaaacttgctgcagaaaaatggggaaagaatcactggaatcaaaaaatattggactgggtagcagggatgacagaaca

SEQ ID NO: 5514 - DNA, 407 bp, Glycine max
  unsure at all n locations
agctngtaggccacctcttcgacttatgatttatattgaaacggcccaaaatagcgggatgagagtttgggattaatacgtcgggccaccgtgagctgtctatgagggtgcaacttaatgaacacccaatccccctccgcaaaagacacagcacgacgatgtttgtctactgccttcttcatggattgttgggcacggtgcagatgagctttcaattggcgaatagcctcgtctctatcgaacaataccaaggctactaaatccacggatgtctcacctgtcaaaaaacgacgcacagatggaggagctcgtccataaacgaccttgaagggagtcttttcagtagccaaatagaaagacgtattgtaccattattcaacccatgaaagccaaagatgccatttatt

SEQ ID NO: 5515 - DNA, 351 bp, Glycine max
agctctgcgtctacaaacggcatgtcctccttttggcctttcaccatgtgggggatagatgtcataagtgccatcgaacccaaggctttgaacgatcatcgcttcattctcgtggcaatagattatttcaccaaatgggttgaagcggcttcctacaccaatgtcatgaggagtgtagtggtcagattcataaagagggagctgatttgtcggtatggactccctatgaagatcattactaacaatggcaccaatctgaataacaagatgacgtaggaaatgtgtgcggatttcaaaatccaacatcacaattccacgccctaccgaccaaagatgaacggagccatggag

SEQ ID NO: 5516 - DNA, 436 bp, Glycine max
agcttcatgacatgcctaagttgattgtcaatgattgttatcgtgtatttaacaaccgcttttggtgagatctctttcatttacaaggcataacactcgcttttagtagcacctatcatccttattccaatggagagactggggtgaccaatcatatcctacaaagttaaaagctttctacgaaactccttcaactactccaccttcattaacgacccacgtcactgaaactattatgcctttggtgccttctgccatcctagagagccacatgcttcgtcttggccgtggctacattgatcaagtgttgattcaatgggaagggctttcacctacgacagctacttgagaggacaagaaggctttttgcgacaactatccttactttaaccttgaggacaaggttgttgaaaaaggagggggtattgatatgggt

SEQ ID NO: 5517 - DNA, 404 bp, Glycine max
agcttataatatattattacactcgaaattttcatcatattctctcgagaaattcaaatggtcataacttttcacccggatgtccgattatggcgaatcacatatcgagacgctcaaaattgaacaacggaagctcttgagaaattctaatggtcataactttcaactcggatgtccgattcaagcgcatcacatatagaggcgctcgaaaagtgacaacggaagctcttgagaaattcaaatggtcataactttccacactgatgtccgattaaggattataatatatcaagacgctcgacattaaacatcgtaagctctcgagaaattcaattggacattacttttcacacggatgtccgattcgggcgcttaatttgacgacacgctcgatattgaacaac

SEQ ID NO: 5518 - DNA, 452 bp, Glycine max
  unsure at all n locations
gacactatgaatctcagcttggaaaccagccatcanatgctatacgaaattagattggaatagagtacaatggcngcatgacggaccgtgcagaaccgggttgtggagtaaactcaatgtcctcccttcaaggtagaagtgatccagatgcctacctggactgggaaatgaagactgagcacgtatttgcctgcaatgactacactgatgcgcagaaagtcaagctagcagcagctgaattctccgactatgcccttgtttggtggcataaataccaaagagaaatgttgagagaggaacggcgagaggtagatacatggactgagatgaaaagggtgatgagaaacaagtatgtgcccactagctataacagaaccatgcgacagaaactcctatggctgtcccaagggaatttaaccgtggaagaatattataaagagatggaaatggcg

SEQ ID NO: 5519 - DNA, 208 bp, Glycine max
agcttgtaggccttggatcttcttcatcaatggagtcatttgattcttgaagatcaatggcaacagaatggagaaggaggaaaggtgattggaaacgccacttcaaggagaagatgagtcaagaacaagctcaccatcataggaagtcatggataagagtttgaaggtaggagaaaatgagtggatggaaagagagaggcggggggtt

SEQ ID NO: 5520 - DNA, 428 bp, Glycine max
agctaaatgttgacatcctgcccctcattatttgtaacatatgaaaatgacttttggcatgagtatattgtttctctaaaatatggtgctctcgtgaatgatttatttttccttgctaaagcatgttcgcctttttaggtgaaaaaaccaggtggaccattcggtcctgccaacaaatcttatccggagtcccatgaattgattgtcattcatgcgacctccaccatcaagtctggagccccacgaattgattgcctagcgctgttcgtctatcctccaccctcaaatcttattcggagacccatgaattgattgtcattcatgcaccctccaccatcgagtctggagccccatgaattgattgcctagcgatgttcgtctatcctccaccctcaaatcttattcggagccccatgacatgattgtca

SEQ ID NO: 5521 - DNA, 428 bp, Glycine max
agcttgtagggttaaagtctcattattgttatgtgctcatgcaacaattgttagccgtggctatacgagacatcttgccaaacaaagtcaggttaacgataactcacctatgctttttcttccattctatatgtagcaaagtcattgatccagtcatatttgatgagttggaaaatgaggccgcaattatactgtgccagttggagatgtatttcccccttgctttctttgacatcatgattcacttgattgttcatctggtcagagaagcagaagaagccattgaattttgttcagaatacttagagaaggctaaacctgttgggcttcctgagtctcggcatgatgacagagtgggtggtaagggttcaagaggactgcaggtgatcactccaagtgtagaagaattgtacaagctcacttgtatg

SEQ ID NO: 5522 - DNA, 402 bp, Glycine max
  unsure at all n locations
aagtctcacgattgtcacgtgttgatgcaacatattgttagccatgtgttttgcgagacatcttgccaaacaaagtcaggttagccataactcacctgtgctttntcttccatgccatatgtagcaaagtcgttgatcctgtcaagtttgatgagctggaaaataaggccacaattatactgtgccagttggagatatatattccccctgctttctttgacatcatgactcacttgattgtgcatctggtcaaagaaatcgaatgttgtggtcttgtttatctgcggtggatgtacccggttgagtgatacatgaagatcttaaaagggtatacaaagaatctatatcgtctagaagcatctattgttgagaggtacattgcagaaaagccattgaattttg

SEQ ID NO: 5523 - DNA, 397 bp, Glycine max
agcttgaatatcttcatttgagtattgcaattctatccaaagcatttcattggctacacactctccaatctcttccttctttgacccgcctatatttgtcaaactgcacactccctcactataatgaaccatccttgctcaacttctcatctctgcaaactctccatctttccgttactagttattcccctgccatttcttttgtccccaagtggatattcaaattgaagaaacttgtttctcttcaattaccgggtaatgaaatccaaggtccgattcctggtggtattcgaaacctcacacttcttcaaaatcttgacttgtctgaaaattcattctcatcttctatacctgattgcttatacggtcttcatcgtctcaagtctttggacctaag

SEQ ID NO: 5524 - DNA, 332 bp, Glycine max
ggacctatagaatctaagcttcgttttaattacgagcatttatatataggggggttattgacatccgagtaaaaagttattgtcgttagaatttgctcagaccttccgctttcaatttcaagcgtctcgatactttacggaattcattcggacatccgagttaaaagatattgtggtttgcatttgctttgagcttccattttcaatttcaagtgtctcgatttattacaggactcaatcagacatttgagtttaaagttaatgtcgctgaattttttacgagttttccgtttaattacatgcattctgatatataactggactcattggga

SEQ ID NO: 5525 - DNA, 426 bp, Glycine max
agcttgtagcaaattcaaatattaataactttttactcggatgtccgattgtgtctcgtagtatatcgagacgctcgttattgaaaacagatgctcttagacaattcatacgacaataaatttttactcaaatgttcgattgtgtcttgtaatatatcgagacgctcaaaattgaaaacgaaagctcgtagcaaaatgcaaccacattaacttttaactcggatttccgattaagtcccgtaatatatcgtgacgctcgaaattgaaaacataagctcttagaaaattttaacgacgataactttttactcggatgtccgattggaacccgtaatatatcgagactcttcaaattgaaaacagaagctcctatcaaattcaaactacaataactttttactccgatgtccgattgtgttccgaagt

SEQ ID NO: 5526 - DNA, 419 bp, Glycine max
  unsure at all n locations
agctaccattgatcaatttcgagcgtcttgttatgttatgcgcctgaatcagaactccgagtgaaaagttatgaccatttgaattgctcaagagcttacagtggtcaattactagcgagtagatatattatgcgccagaatcggacctcctagtgaaaagttatgaccatttgaatttcttgagagctttcgttgttcaatttcgagcgtttcgatatattatgcgcctgaatcggatctccgagtgaaaagctatgaccatttgaatttctcgagagcttctgttgttcaatttcgagcgtctggatataatatgcgaatgaatcggatctctgagtgaaaagatatgaccatntgaatttctcgagaagcttcgttgctgaattttaagcgtcttgatataatatgcgcctgaatca

SEQ ID NO: 5527 - DNA, 461 bp, Glycine max
tctgagtcacctgcggcatgcaagcttcaagaaaaagatggcctcagcaaatttcttatttccagaagggaattctatcaatagacctccaatctttaatggagagggttaccactactggaaaacccaaatgtaaatttttattgaggcaatagatctaaatatctgggaagccatagaaatagggccttatatacccaccacagtaaaaagagttacaatagatggtagatcatcaagtgaaagcataactatagaaaaacctagagacagatggtctgaagaggatagaaaacgagtacaatacaacttaaaagccaaaaacataataacatctgccctgtgaatggatgaatatttcagggtttcaaattgtaagagtgctaaggaaatgtgggacactcttcgattaacacatgaaggaactacagatgttaaaagatctaggataaatgcactaa

SEQ ID NO: 5528 - DNA, 373 bp, Glycine max
agcttgccttgccccttgatatacttgtggttacttatggccactatgaatgacaaaatccttgggataaaggtagtgttgtcatgttttcaaagaccgtactaaggcatacaaatccttatcataagatgaatagataaaggcaggaccacttaacttttcactaatataaccaaattggatggccgttttgcaacaacacaaccctcatcccaacattggaagcatcacactcatatttcaaagatttgggaaagtttggcaacgcaacgtatgggggcattagttagcatttgcttaagaacattgaaagctccttcttggatctcttcccatgtgaaaccaacatttttcttgagcacttcattgagag

SEQ ID NO: 5529 - DNA, 429 bp, Glycine max
agcttctcacgcccttgacattcatgggatgtatgaagtttctcaatcacatcaatctttgccttgtccacctctatttcccttattgaaatcttatgccccaacactattccttcttgaaccatgaaatggcatttcacccaattgagaactagattggactcttcacatcactgtaatactctttcaagattggataagcacccttcaaaagatggcccaaaaatagggaaatcgtccatgaaaacttcaatgcatttttccaccatataaaaaaaaatagccatcatacatctctgaaatgtagctagggcattgcacagaccaaaaggcatgcgccgatatgcaaatacaccaaaaaggcaggtgaaagcagtcttctcttgatctttgggatctacaacaatctaattatagccagaatatcca

SEQ ID NO: 5530 - DNA, 422 bp, Glycine max
  unsure at all n locations
ggttctatatccatagaagttgggcgcaatagcttgctgctaacatgtatnttgcttcagtagtggataatacagttgatccctgcttcttgcatatccatgtgactaagtttccttctatcaaaaggcaacttccacttgtactttttctttctactttatcactaacatagtccgcatcacaatagcttatgagcctgaaactttcccttcttttgaacaaatgaccaagggtaggagttccaattaaatatctaaatatacatgtaactgcaattaaatgaacttcccttggttcctcttagaatatagcacataagcaaactntgaacgttatatcatgcctaaacgtagtaagatactgtagtgagccgatcattgctctgtactgggtcccgtccaccttcgttgattcctcgttc

SEQ ID NO: 5531 - DNA, 441 bp, Glycine max
gcgctcgagaaacattaatagaattatatttgtctatatttcaagtacacatttaacatttttttctctaaaattaaacttaatgggcttctagagcaaaagagagtttttcaacttcaaccaaataaagaaacttcaaagcattgttctttgtttgtggtaactttaattacaaagcatacacatatataattaattttcaattaagaaaaatcaaattacctcttcaaacaatgtaacataaaagataaaacaaaccacaaaaaataatcatgaaaggaagagataaatttatttccaaccacacatatcaaatattcatttaatgaatgtgaaattacaaaactacccctaatacaaaaactagtctaggtgccctaaaatacaagggctgaaaaatcctacatttctagggtaccttacctatattatggatcccta

SEQ ID NO: 5532 - DNA, 428 bp, Glycine max
  unsure at all n locations
agctngaaggtaaactagatgtcttggttaacttggcttattaactggccatgaatcaaaaatctgcacctgtcaccagactctgtggtttatgctcctctgccgaccaccacacagacctttgcccttctgtgcaacaatctgaagcaattgaacaacctgaagcttatgttgcaaacatctacaatagacctcttcaacctcagcagcagaatcaaccacaacagaacaattatgacctctccagcaacaggtacaatcccgggtggaggaatcatcccaaccttagatggtcgaatccttcacaacagcagcaacaacaaaaacagccttattttcagaatgctgctggcccaagcaaaccatacgttcctccaccaatccagcagcaacaacaacaacaacaatagccccggaaacatcaaaca

SEQ ID NO: 5533 - DNA, 434 bp, Glycine max
agcttgagctcggctggagttgaatacgtttagcttgagttgacatagggcttttttaaggctctgctcgacttacataaaagtctgacttacgagcctatttaaaagcttgcttaaagacgtcttttattaattaattattttaaaacctagtgaaatactaactaaaaaaagaaacttataaaatttcgtataaataatgtacaaatctaaaaataattgataaacaaaattatattgaattcaagtcgttaaagcacaaagtatataaaaaaaataaaaatagcataatattaaaaaatgtatggattagagatgatttacactaatatagccaaacaaaaattattattagttaaattaacaatttttaatccaatttttttaatatataactatattatatagttttaaaaaaaatatatccacaataa

SEQ ID NO: 5534 - DNA, 451 bp, Glycine max
  unsure at all n locations
ctagcttcttaaggaagttttctcaaagtaagcttctcaaggtagttttcttaagaaagcttctcaaggaagttacctagtctataaataaaagcatgtgtaacacttgttataactttgatgaatgagagtcttgtaagacacaactcacagttcaacttctctccctttgtcttccttcaatttcgtgctccctcctctctttcttttagcaaatgctcacccccccctctaaaatttaattggattgggcttctcccaattcaattaaatttattttcaaccacacacatcaaatattcacttaatgcatgccaaattagaaaactacccctaatacaaaagactagtctatgtgccctaaaatacaagagatganaaatcttacatctctagggtaccttaactatattgtggagcccaaatacaatgcccaaaataatgaaacctt

SEQ ID NO: 5535 - DNA, 257 bp, Glycine max
  unsure at all n locations
agcttctgttatcaattgtgagcgtctntnatattattggactaaatcggacatccgagtaaaaagttattgccgttcgaatttgcaacgagtttgttttttcaatttggagcatctttttatattacgggactcaataggacatccgagtataaagttattgttgtttgaatttgctcagagctatggaacttactttccagtgtctccatatattaccgaatttaatcaaacattcnactataaaaccattgccc

SEQ ID NO: 5536 - DNA, 436 bp, Glycine max
agcttgaaggcatgtaacccaccatcttctcttagtatatcataggtaacgtgcccattatcattgttatcatttccctttccatcattgtgggtgctacttgagctgccagatccctctacctttgggcgtattctttgaaagattcatgtgccctcttacacatggtctgaaactgcattcttttcggagccatatctgaatagtgctgatattgcctaacaaaggcagccattaggtccttccacgaatggactcgggaaggttccagattactatactaggtgatggctgccccagctagactatcctggaagaaatgcatagaaaagtgttgatctttttcgtatgccttcattttcctgtagtacatcttcaagtgattcttggcgcaagtagtccctttgtacttattgaaatctggcaccttgaactt

SEQ ID NO: 5537 - DNA, 398 bp, Glycine max
tatcggatttgtaatctccatctgattcaacctatccatgttaggaaagcaggggtggaacttgattaataacccacatactacaatgtataaaattctcaaaaataaatattatccagatgtcggattctatgatgcaaaactagggcatgaaccaagctatacgtcgtatagcatttttgcttcacatatattggtcgaggaaagcatatagtgcaaaaaaagtgatggtagctctataaacgtttggactcaaccttgggttcgagcatcaacaagcccatatatcacgtgatcaaccctgctcgatcttgatgatctcatagtcagttcactcatcgacaaccaacaacgatgttggcgtcaagatgtgctacaacaatatttcaatgacaacg

SEQ ID NO: 5538 - DNA, 411 bp, Glycine max
agcttatcacccttaccggcgattgttataatcttttaatggaagtcaagggcatgatagtgcaccgatatcgttaactggtcaacaggttcttgagcgagttgagggcatcaatgttgtatttggaaagacccaaaaaggaaaaaagtaaaacttctatatagaagaaaaggtcgatattgtttgatcttccatattggtccgatctagatgtcagacattgtatttatgttatgcatgtcgagaaaaatgtttgtgatagtgtcatcgacacacttgttaacattcaaggaaagacaaaggatggtttgaatactcaccaagatctagttgagataggtatatgagaccaattacattcaaggtatgatggtaacaaaatatacttgcctccaacttgtcatactttgt

SEQ ID NO: 5539 - DNA, 440 bp, Glycine max
  unsure at all n locations
ctagctactntctctgtntgttggatgaaaggcactgctacttctaaactctggttaatctataatatttacatgtcttatgttaatattggataaccatgggttgttagaattgtgaactgactaatacgtggcatattatctgactttgggcatccatatctgtacttatataatacagatctctttgctcattaaaaaacaaaatactaatctattaaatttttctgcatattcgaataataaattcaattttttcatttttcacaaactaatttattagtgtctcatatttccaggaagtaaaataaagatttatcttatgagcaaatatttgattttagtaaaattagtaagatttaaattttaattctattgcatctgcacgttataattattactactcttctactaattttaccaccataagtttttgttta

SEQ ID NO: 5540 - DNA, 410 bp, Glycine max
  unsure at all n locations
cttgcaagctggaatcatttatcctatcttcacagccaattgtgagtcccatccaggtagtttcaaagaaaaccggcctcaccgtgataaaaatatgagaaggaggagctaattcctactcgagtgcagaacagttggagagtatgcatcgactataggaggctgaaccaggttaccaaaaatgaccattgtgcactgtcattcattgaccaaatgcttgaacacctggcagataaatctcactattgcntccatgatgggttttctggttatatgcaaatcactattgcttctgaggatcaggaaaagaccacattcaccggccccttcggcgctattgcctataagatgatgcctttcggcctgtgtaatgtccctggttccttccagcgatgcatgatgagtatttt

SEQ ID NO: 5541 - DNA, 415 bp, Glycine max
  unsure at all n locations
ntgatatatacaattgcactattcataaaatatgagccatgttcagcaatctcaaccttggtgaatatttagcctcgtggaagataaataacaaatccacctcagtctcctgtgttaagggtcctgtcacatctatcatgagcaacattcaacaagtccaagcaaagtttgcacttgttagtttcgactatcatagtcaagatattaactgcatcttctgtagtgtgaaccttccatagcaaaacctggctagatgtgagtaactccctgatcttgtgaaacatcacatcaatatgattggttctcgaatgatacaactgagtctttgtagatcaatagtattctatctattgcaatgcaactgaacaacaactggctcaatgcccaactcattcactaaccctttctaaccaca

SEQ ID NO: 5542 - DNA, 248 bp, Glycine max
tctggcttcaattattcagtgggctctccttccgtgtccaccatgttgcgatgtacccagcctgtgaggaccgctttacaggttctgctatccagggattcgaggaatgccaccatactcgctttccaatattcacagatgcttccatcgagaagagcgggtctgctcactggaccgacttctatctccaggctcagcagagattgactccctatatatcactctgggaatccgagtggtggctctga

SEQ ID NO: 5543 - DNA, 299 bp, Glycine max
tccgttgttcaatttcgagcgtctcgatatatgatatcccttaatctgtcttctgtgtgaaaagtttgaaccattcgaatttctggacagcttccgttgttcaatttcgagcgtctcgatgtattatgtaccaaaatcggacatttgtgtgaaaagttatgaccattcaaatatgttgagagcttccattgttcaatttcgagcgtctagatgagttatgtccgcgaatcggacatcctatgaaaaggtatgaccattccaatttctcgagaaccttctttggtcaatttcgaacctct

SEQ ID NO: 5544 - DNA, 460 bp, Glycine max
gagcttggagtttccaagtgccaattcgtcttcttctttagtccagtcttcttctggcttcaattcttcagtgggctttccttctgtgtccagcatcttgggatgttcccagcctttgatgacagctttccaggttctgctatccagtgatttgaggaaggccaccattcttgctttccaatattcatagttgcttccatcgagaattggtggtctgttcactggtccgccttctttctccatgttcatcagaatttatctccctagatctcactctgtgatttcgagtgttggctctgataccaattgaaattctgataccaggggacagatgtcgtacaggatgtcacgacatcacgcttcagaacatgcagattatatgtgtccgtatgaacagattaaacaagtaaataacacaagagaattgtttacccagttcggtgctacctcacctacatct

SEQ ID NO: 5545 - DNA, 446 bp, Glycine max
  unsure at all n locations
tctatggaaaatgtgaaagttctcaaagctatccttagaacttttgaagtggtttctggtttaaaaataaattttgccaaaagctcttttggtggctttggtagggatgaccagtggaggcaaatggcagctacctatcttaattgcagtcagttagctctccctttttttttatcttggtatacccattggggccaacccgaggcaagctcatgtgtgggaacctattatccaaaaatatgagaggagataagctaggtggaagaagagatatatctcttttggggggagtgtggttcctatccaatcagtccttacttctcttcctatntattatttntctttnttcagggttccccgtatggtggctaacaaattaatcagaattcagagaagctntctttggggaggaggtcatgacaacaacaagaatgcttggatatcat

SEQ ID NO: 5546 - DNA, 453 bp, Glycine max
  unsure at all n locations
agcttgtaagaccacagtaagagtagtgttgtatcagtggagaacatccaaccccttattgtagccccactgtatgaattattgcatgaataagaacgaaacttatagtgagatttaaggctttcaaaatatgaattactatatatgaaaagaagttaaaatatctttgtattcaataacaatttgattgtttgaaaattgatgactgcaataccatgcatgactacggaataatttctccaaaataagaaataaaataactaaaaaaaaggctgaaaaggtcttcattaaaggctntgcacaatgcacattaattaatgaaataataatagaatacggtaagagtgaggactctacctggaggattgttaaggtatttagagtaccacttgatacaggacttctactttggcacanatactttatcccgctcaagagaaaccagtgtggagt

SEQ ID NO: 5547 - DNA, 463 bp, Glycine max
  unsure at all n locations
agcttgagcttagctacacatacctctctaatagctaagctcacctccttgagatgagaagctagagcttagctacacaccccctataatagctaagctcacccccatgacaaaaaacatgaaaatacaaaaaaaagtccttactacaaagactactcaaaatgccccgaaatacaaggctaaaaccctatactactagaatggccaaaatacaaggcccagacgaaggaaatacctattctaatatttacaaagataagtgggctcatacttagcccatgggcttgaaatctaccctaaggctcatgagaaccctagggtcttcccttggatctctagccaatctacttggagtcttctacccaatgcccttgcggggtaggatngcatcaganagggcacccttcaaagacggtcctccaaccgatgtcggtattcaacgacactggtgtaccaccacacg

SEQ ID NO: 5548 - DNA, 465 bp, Glycine max
  unsure at all n locations
agcttgtacccactacagggcagtagattatgtttgcttcacttgatttgtaatgctgttgtacggccagtttatgttttaactattaacagcattaacagcttcacttgatatttaacagtttcacttgataaaatttaaatatttaatttttaactaatgttttgctactcgtgtaaaccttgcagtgatcctaacttgcactttgtggagtctcctgcatcggctccaccagaagtttaaattgattttgctgcacaacaacagtaagctatcttccttgacctaaattaattctttctatagtaggataaaaacatagattgtagaaattcatagttgcatttgaagataaaaagtaaacataaatccttcttcacaaacataaacccttctttagtatattcataaatcatnatataacaaatttgatttctcattttttaaaaagaaattatttctaca

SEQ ID NO: 5549 - DNA, 463 bp, Glycine max
  unsure at all n locations
agcttctggtgggacatcttgacttgctttccaatctgacattcaccacaaattctgccttcttctattttcagattgggaatgcctctaacagcacctttgtcaatgattttcttcatgcctcttaagtgcagatgtccaaatctttgatgccatattctgacttcatcttctttggaggatagacatgtggaggagtaactggtttcttgaggtgtccataggtaacagttgtcctttgatctgctgcccttcattagaacttcactcttctcatttgtcaccaagcattctgactttgtgaagtttacattgaatccttcatcacacagctgactgatgctgatcaagtttgcagtcagtcccttcaccagcagtactttgtccagtctaggaagtccatcatgaactagctttcccattccagtgatctttcctttagaaccatctncanatgtcacat

SEQ ID NO: 5550 - DNA, 436 bp, Glycine max
  unsure at all n locations
ggatattaatgatataaggggacaattgtttgatattggatctaacaagaagggtaaaattaagaagtgcaaaaaagattattagttataaattctacaaaattttatacgtcatttggatgttattatttagatttagtcttatatgcctaatttatctcctggagctatttcttttttttttttagagttctacaacacatttattctctatttacttcatacactaaacaatggaaatttttgcaagataatgtatgaaaattttctattaaatcattatctcanacttgatgggagagtagaattgaaagtgtcaaaccaatataactttaagcaccatagataagagatgtttgcttcattatcaaatatagtgaagatcctaatanaaagtgaagcctatgttaacaactatagaataaaatttgaattt

SEQ ID NO: 5551 - DNA, 413 bp, Glycine max
tcctacaattggacaatagtggtgagcctttcaacatcacttcccaagtagtgtttgattctgctgccattcacagtctctgtcctctttgtggctggatccttcaataccacaactccatgtggaatgacttcatttaagatgaatgatctggaccacttagattttagcttccctggaaacaatctcaatctagaattaaataacaaaacctgttgtccaagcagaaattttttatcaaaagctttttatcatgacaaactttaactctttgcatataaagcttggaattctcataatcttgaaaccttaattcctccaattcatgaagttggagcttcctatgttcaccagctctgtttagataaaaattcaaaaacttcgatgccgagtaggttgtgtgctccaacaca

SEQ ID NO: 5552 - DNA, 465 bp, Glycine max
  unsure at all n locations
agcttagaccgctgaaggaactttcttatttattgggaaaacagtaaacttaatcaactccgtatacgaatagaaacaaaagagagacaaaacagtcaatgttgagttgagccatcgacaactctcgtgcaagcacaaggaggagtagcccgatgcttgtgagtgacacggataagtgcacttattatttataaaataatagagaaaaataaaaagttcggcgaatagaccgatttgaatcgaacactcaacaccggcgtggcgtttccgtatgtttttgatcaatagaacaggaagaggaggaaaaaaaagcttatgatgagcatctatttgagtcgatcatttccaagatctaattccagtttattcttatgtagtggaaaggccttacaatctgaagttntacgcttaggggaagaaatgttcttggtggatgcaggacctgngacccccagaatttgtatg

SEQ ID NO: 5553 - DNA, 432 bp, Glycine max
ctttcttagacatatttagatggctgcaaacaatttattatgtctcaacatatgctaaattcatgaaggatttgcttacaaacaatagaataattatggatgatgaaacattggagctagaggcaggttgtagtgcaattattcataaatccattctatagaaatctcgagatcctagtagtttcacaattcctgtgactattagaagattattaataggaaaggcagttctttatttaggtgcaagtatcaacctaatgcccttgtccatgatcaagcggataggagaagtagacattataccaacaaggatgactctgcagtttgctaacagaactatcaagcattcttatggcattattgaagatgtattggtaaaagttgaccaaattctctttctagtcaactctatggtgatggatatgaagacaa

SEQ ID NO: 5554 - DNA, 447 bp, Glycine max
  unsure at all n locations
agcttgttactaaggaagaagtttatatgttgtttcctctatgaaatcgtataaggcacctgaacctgatgggtattagaaaatattttttaagatattttgggaaaaggttggagatgatgtttggagatttgttagagaagcgattcagaaggtatgtttgatgtgtaggctgctaagactattattgtcctaattcctaaaggtgattctcaaaaaacatttagagtgtgtttggatagagaattttaacaaaggaaagtaatttatcagagaatctaaatttttctaatctagaattcattgtttggatgttttttttatgaagaatttaaattnttggaattttaaaacggaatttcaaacaactaanaatgtgaaatttcaattctcttctaaaaagtgagaaattaagattatcttcttatagaagaatcttctaaaatg

SEQ ID NO: 5555 - DNA, 465 bp, Glycine max
  unsure at all n locations
agcttaccacccagcttttgaggttatgctttgtctcatgctgcatatctgatcaactgcatacccactccctttttgcataacatatcgccttatgagaaacttcatggacacccacgtgacatatctaatcttcgcgtgtttggctgcttgtgttatatcaacactcttaaagcacattgtcaaaagctcgatcccagagcgcatccatgcatcttcattggttttaaaacgcatactaagggatatttagtctacgattttcattcgcatagcatcaattgttcacgaaacgtcgtattttatgagaatcatttcccacatttccctgaaacatcatctttgaaatccacttttactattccaactccggagtcattctccagcgaccaatatgaaccaccagttgatattatcattactatacgcagaacccanaacggtcctactcaagatgagccttct

SEQ ID NO: 5556 - DNA, 466 bp, Glycine max
  unsure at all n locations
agcttaagggaagagaggaatgcattcttgatttatactatttcggtcacttcctgtgcctacgtccagtccttaagcaacccacttgagattttccactctctttgtaaaactccttttacaaagtctgaaccacacagggacaacccttcccttgtgttcaggaatcctctacaacaagagacccatggtctcttaatcccttttcagaaataagaagaagagaagaagaaatctctcttaaaagagatagattgtacaatgaagatcaatcaaaaattccttattgaatatgcaagtggttgaccaaggaatctttttgagaggataagacattttagttcagaanaactcttaatctttggagaggataaaactttttgggcaataaaaactctctttaaattcgagtttccgagtcacatataaatagacccttgatggccattcataaaccatttgaata

SEQ ID NO: 5557 - DNA, 484 bp, Glycine max
  unsure at all n locations
gacactataaatctaagcttaacaagttagtaagttttctacttataattctagatatattatgtttatatatatgatgttataattgtgcatgatctgtcaaagaaaatatgatgtttctacttgcatgatgtgttataatatatgatgtttatatatatttcgaattttgttgttaataaaactgtttaattagaaactgtataatttttttgtttaataaaactgtttaattttgcatgatctgtttaataaaactgtttataaaactgtttatatataatatatgatgttaacattnttaaaactgtttataaaacagtttagttagaaaaaatgttaaaactagagaaaaaaaatgtataataaaactgttatatttaaaactgtttcattagagtaaaacattttttctttgtttttatttcgaaatttaatacatatgttatatagaatgatatatgttgatgatgatgttggatgt

SEQ ID NO: 5558 - DNA, 470 bp, Glycine max
  unsure at all n locations
agcttataacatatttaagacacactaagatgaatgttaagaatatatttgaggtcaaattagtcaattgcttaggcatgagtattttattgcccagaaaatttagagaagattaattagtaatatatagtcaggaatataaattaaaatgttacaactatcttcactaccttaacttcaagagcaccagctaggccttactatattcaaaagaaaaggttaaaactgtgaaaggcaatctaatcacaaactaacctgtctgatgacatcattaagaccagggcagagccctccacaagtaacaattgctgcctttacttcttctggcttaaagtatatcttttcacgaggcccagctcgatgaaccctaaaaggatttcagaactacttagcatatatgttaatattaggaaacagcattctatacaacacaaagatgtactanaaatattgaaaccataaactagaag

SEQ ID NO: 5559 - DNA, 383 bp, Glycine max
  unsure at all n locations
agcttctaaactntatacaagaatgaagctctgataccacttgttggacaagtggcctcagatatcttaagaagggggagggggggttgaattaaaatattacaaattatttccccaattaaaaattctatttaactttctattcaagttacaaattcccttaataatgaatttcttaaataatgattcaaatagaacaatttgaatatgaatataaaacaataataaataaatgagtttaagggaagagaaaatgcaaactcatatttatactggttcggccacacccttgagcctacgtccagtccacaagcaacccgcttgtgagtgccactatctagtaaatntcctttacaagttctaaacacacaaggacaatcctt

SEQ ID NO: 5560 - DNA, 441 bp, Glycine max
  unsure at all n locations
agctttggcaaattcaaacgaccattacttttgactcgaatgtatgatcgatgccgattatatatcgagacactcaaaattgaaaaacagaagctcacgagaaattcaaatgggtataacttttcactcggatgtctgattcacgcgcataatatatcgagaccctcgaaattgaacagggaagctctcggcaaatccaaacgaccataacatttgactcgaatgtatcatcgacgcccacgatatttcgagacgctcaaaattgaaaaacggaagctcttgagaaattcaaatggctataacttttcactcgaatgtccgattcacacgcataagatatcgagacccttgaaattgagcatggaagctcttggcaaattcaaacgaatataacttntgactcgaatgtatgatcgatgccgattatatatcgngacgctc

SEQ ID NO: 5561 - DNA, 429 bp, Glycine max
  unsure at all n locations
cttcaacattcaatttgagcgtctcgtaatattactggactctttcagacatccgagtaaaaatttattgtcgtttggattggctcaaagattcaacattcaatttcgagcgtctcaatatattacgggactcattcagacatccgagtaaaaagttattgtcgtgtgaattagcttagagcttcaacaatcaatttcgagcgtctcgttatatcacgggactcaatcagacatccgagtaaaaagttattgtcgtttgaattggctcagagcttccacattcaatttcgagcgtctcaatatattacgggcctcaatcagacatccgagtaaaaagatattgtcgtttgaattggcttagagcttcaacattcaatttcgagcgtctcgatttgtgacnagagtcaatcagacatccgagtaaaaagt

SEQ ID NO: 5562 - DNA, 440 bp, Glycine max
  unsure at all n locations
agctntgagccaattcaaacaacaataactttttactctgatgtctgattgagtcccgtcatatatcgagacgctcgaaattgaatgttgaagatctgagccaattcaggcgacaatatctttttactcggatgtctgattgagtcctttaatataacgagacgctcgaaattgaatgttgaacctctgagcaaattcaaacgacaataactttttactcggatgtctgattgagtcccgtaatatatcgagacgctcgaaattgaatgttgaatctctgagccaatccaaacgacaataaatttttactcggatgtctgattgagtcccgcaatattacgagacgctcaaaattgaatgttgaagctctgagccaattcatacgacaatatacttttactcggatgtctgattgagtcccgtcatatatcgagacgctc

SEQ ID NO: 5563 - DNA, 331 bp, Glycine max
ggtgatcgattacacagtaagggaattttcaaaataactcttatgagttacaactgttcaggaagtttttgaatggccatcataggcctttaaagactttggatacgaaattccttagaggttttctgaataacattttcttatcctctcaaaaccaaattgtcttatcattctcaaaatattccttggtcaaaacacttgcaaattcaataaggaatcttgatcgatcttcaattgcaatatccttctcttaaagagagaaaattcttcttcttcttattcaaacagatctgtttaagagaccgagagtctcctcatatgtaacgatatt

SEQ ID NO: 5564 - DNA, 463 bp, Glycine max
  unsure at all n locations
agcttttcaatttctatccaaacaataccatattgtaattaaaaaaaaacataagaaattagttacatgatattctcaattcccaactacttccgttgatatgatttttttttttaatatgatatatctaattgaagcctaacatttcaaaattaaaatatatcaccacagttaacaaatttgttattaattntaatttcatgtcattaaattaagatatgatctcatattngatcataaacccagttagattgatatttttttccagtatgatgtaccggattgcaagttataaaattaaagtaacattccgttaaatatattgattttatatgtattattatttggagggatttcatatttatntaataattcaaggttataacaataataaattttatccancatcattcaactgattgaggtaactcttgttaaaaaattgatttatatatttattatt

SEQ ID NO: 5565 - DNA, 466 bp, Glycine max
agcttcctcaatttttatggattgatgctcttaagactgctgcgtatatattaaatcaagttccaaccaagactgtctcaaagacaccttttgagttattcaagggttggaaaccaagtttgcaacatatacgcgtttggggatgcccgtctgaagtaagaatttataatccacaagagaagaaactagaccctaagactattactgggtatttcattggatatgctaaaaggtctaaagggtataggttctattgtccatcccacaacactaggattgtggaatcaaggaatgcaaagtttcttgaaaatgacttgatcagtgggagtgatcaatttcagaacatttcttctgaaagggatcactatgaagctgaaccttctgggacaagtaataggttggtagtcattcccacccctcaagttaaaatgggtggtagacaaccagtgattgaagttcacaagct

SEQ ID NO: 5566 - DNA, 421 bp, Glycine max
taagtgtttaggcttattccatcataaacaactaacacattgttggaccttgtggcctcaataacttacgaaggggtgaattaattttccactaacaaaattttaacacccttttaaaagagataggctcaaaatgtagaagaagcaacaatgaatttaataatgttctttaaacatgaaagacacaattgattgcaacaaaataaataagataagggaagagagaatgcaaacacagttttatactggtttggcaaaatctgtgcctacgtctagtactcaagcaactcacttgagattttcctttctctttgtaaattcctttacaactgttgaaccacacacgaacaacccatcccttgtgttcaggaatgcttacaacttaagagaccctctgtcccttaatgaatctctttgtata

SEQ ID NO: 5567 - DNA, 434 bp, Glycine max
  unsure at all n locations
agctttacccacaacatctctcgccaatggaacactgtatagtgacacttccaggatctttgtgctttgggggaaggattcattgaatgactgcactacaatttccttccacaactatcgtatcattgtggatataccggttcttctttgtcagcatgtcttttaaaaatttggcatagagtggcatctgttgaagagcttctccaaaaggcaaagtgatctctagcttcttgaagatgtcaagaaatctggctaagtgtcgctctttatccttcttggaagttaccattggatatggtacttcctttctttcagctaaattaatctctctctntgtgtctctcgaaacctcactctggctcttctttttctgctcatcaaccttctctntntcttntcaattttctgaattttttctttttctacttcttctt

SEQ ID NO: 5568 - DNA, 356 bp, Glycine max
tccattgttcaatttcgagcgtctcgatatcttatgcgcctgaatctgacctccgtgtgaaaagttatgaccatctgaatttctcgagagcttccgttgttcaattttgagcgtcttgatatattatacgcctgaatcggacctccgagtgaaacattatgaccatttgaattgctcaagagcttccattgttcaatatcgagcgactcgatttattatgcgccggaatcggaccttctagtgaaaagttatgaccatgtgaatttctcgagagcttccgttgttcaatttcgagtgtctcgatatattatgcgcctgaatctgacttccgcgtgaaaacgtttgaccatatgaat

SEQ ID NO: 5569 - DNA, 409 bp, Glycine max
agctttgagcaattcaaatggtcattgcttttcactcggatgtccgattcaggcgcataatatatcgagacgttcgaaattgaacaatggaagctcttgagcaattcaaatgatcataacttttcactaggatgttcgattcaggcacataatatatcgagacgctcgaaattgaacaacggaagctctcgagaaattcaaatggtcataacttttcacacggaggtcagattcaggcgcacaatatatcgagacgttcgaaattgaacaatggaagctcttcagcaatttaaatggtcataacttttcactcggatgtccgattcaggcgcataatatatcgagacgctcgaaattgaacaacggaagctctcgagaaattcaaatggtcataacttttcactcggat

SEQ ID NO: 5570 - DNA, 433 bp, Glycine max
  unsure at all n locations
tctatagatggttcgttcctaatttctctactattgcattttctctcaatgagctagtgaagaagaatgttgcatttacctgnggtgaaaaacaatagcaagcctttgctttgctcaaagaaaagcttactaaggcacatgttctagctcttcctgacttttctaaaacttttgagctagaatgtgatgcctctggagtgggagttggagctatattgttaaaaggtgggcaccctattgcttattttagtgaaaaacttcatagtgccaccctcaactaccccacctatgataaagagctttatgccttaataagagccctccaaacttgggaacattaccttgnttccaaggaatttgtcatttatagtgatcatcaatcacttaagtacattaggtggaaaaacaagttaaacaagtggcatgcaaaatg

SEQ ID NO: 5571 - DNA, 437 bp, Glycine max
  unsure at all n locations
agcttcaatacagtgacaccagtgtttcattttangagctgacaaagtcttttggatgggatacatatgattctttcatgcagcatgatgttcaagaactaaatcgggttctttgtgaaaaacttgaagacaaaatgaaggtatggcaagagttttggaatatttgttcatgattattcttgatgggtgaccatatcaaatggttgttttgtgttatttgtcttcagggaactgttgttgagggaaccatacaaaaattatttgaagggcaccatatgaattacatagaatgcatcaatgtagactacaaatcaactagaaaggagtcattttatggtacttccttatgcattttgaattcaattatatgttttgttcttccttgttatgtatttctaatttagttttgcatatgcatgttagaccttcagcttgat

SEQ ID NO: 5572 - DNA, 459 bp, Glycine max
agcttatcaccacactccttcaaaccactggccacaccaccaacaacttcagcttcgtgaatctcacttgcgactcccaatttggcgtcatctcgatcctcttccccgcaccgtactctccctctaatgccaccatcctcttcttcataaagaagcgtgatggcactagaaaaccactgagcgccactacgctgaactttctcctcatcggtagggacacatcgttggtggcgctaagctggttcttctgactcttcatgaaccaccccatcgtggaagaaaagatcctcgcagagctaacgttggtgcttacttccactcatggcggcgaccgacgacactggatggaggaggcaatggacttcgaagaagcagagaaacttgtttagttaaaagcagtgttagccgaaacgctacgtgataataagttttatgttaaataataaaataattttaaaa

SEQ ID NO: 5573 - DNA, 422 bp, Glycine max
  unsure at all n locations
tcaacattcaatntcgagcgtctcgatatattacgagactctatcagacatcagagaaaaacgttattgtcgtctgaatttgctcagagcttcaacattcaatttcgagcatctcgatatgttacgggactcaatcagacatccgagaaaaaagttattgtcgattgaattagctcagaagttcaacattcaatttcgagcgtctcgatatgttacgggactcaatcatacattcgagaaaaaattattgccgttgaatttgacacaggttaacattcaatttccagcgctcgatatgtacggggctcaatagacatccgagtaaaagtattgtcgttgattgctcaagattcacattaatacgagcgttcgatatgtacggactcatcgacatcgagaaaaagtatgcgttgaatggctca

SEQ ID NO: 5574 - DNA, 434 bp, Glycine max
  unsure at all n locations
agcttccattntcaattacaagcgtttcgatatattactggactcaatcggacattcgagtaaaaagttattgttatttgaatttgttcacagcttctgtattcaattttgagcgtcttgatatattttgggactcaatcggacatccgtgttaaaagttattgtcgtttgcatttgctacgagcttccgttttcaattacgagcgtctcgatatattacgaaactcaatccaacctccgagttaaaagttattgtcgttagcatttgctacgagcttccgttttcaattacgagcgtctctatatattacgggacttaatccaacctccgagataaaagttattgtcattagaatttgctacgagctttcgttttcaggttctagtgtcttgatatattacgggacttaatcgaacattcgagttaaaagata

SEQ ID NO: 5575 - DNA, 403 bp, Glycine max
  unsure at all n locations
nganacagggcttgataaagagctattggtattccaatatgataagccagatatgcaaggcaatctctttaactccacaaagctatntctgaaatatgctgaagatgaaattgtacggatgaaagcagatgagagataagccttgtaccttcgaaaagaagttactgaatactttcatgggaatgccacaaaggaagaagcccaccctctcataattttcatgattagaacagactttttgaatatctcggatctagtgtgcaaagaagtggaaaagatgcatgatagaattgttggtggttctggcagatccttccaaatacctcctaatgcatcattacctgttgctaacatgtacaatcatcgacagcaagatagaagctcatatgacgaaagctcatct

SEQ ID NO: 5576 - DNA, 305 bp, Glycine max
  unsure at all n locations
tactcgaatgtctgattgagtccccgaacatatcgagacgctcgaaattgaatgttgaacttttgagctaattcaatcgacaataaaatttttctcggatgtctggttgagtcccgtagcatatctagacgctcgaaattgaatgttgaacctcttagctaattcaaacgacaataactcttttcacggatgtctgattgagtcccgtaacatatcgagacgctcgaaattgaatgtngaagctctgagccaattcaaacaaccataacttttntctcggatgtctgattgagttccgtaatata

SEQ ID NO: 5577 - DNA, 434 bp, Glycine max
agcttaaacattcaatttcgagcgtctcgattatttttggactcaatcaaacatccgagaaaaaagttattgtcgtttgaatttgcacagaggttaaacattcaatttcgagcgtctcgttatataacgggaatcaatcagatatccgagtaaaaagttattgtcgtttgaattggctgagagcttcaacattcactttcgagcgtctcgatatgttacgggactcaatcagacatccgagtaaaaacttattgtcgtttgaattggctcagagattccacattcaatttcgagcgtctcgatatgttacgggactcaattagacatccgagtaaaaagttattgtcgtttgaattggctcaaagcttctacattcaatttcgagcgtctcgatatgttacgggactcaatgagacatcccagtaaaaagttat

SEQ ID NO: 5578 - DNA, 431 bp, Glycine max
ctggccaccacggagtttccgactatggtcttgtgtggtggaacaagctacaaaaggagagagcaagaaatgaagagccaatggttgatacatggacggagatgaataagatcatgaggaagcggtatgtgccggctagttactcaattgacttgaaattcaagctccaaaaactaacccaaggcaacaagggggttgaggagtatttcaaggaaatggatgtgctcatgattcaagcaaatattgaagaagatgaggaggtaactatggctcgatttcttaatggtttgactaatgatatccgtgatattgttgagctgcaggagtttgttgaaatggatgatttgcttcacaaagcaatccaagtggagcaacaattaaaaaggaagggagtggtaaaaggagtttaccaactttggtcttctagtgga

SEQ ID NO: 5579 - DNA, 420 bp, Glycine max
agcttctatggataatgttagtgttatcattgctattcttagaagctttgaaatagcttctggcctgagaatcaattctgccaagagccaactgggagcaattggtcaatctgatcagtggatcagatgtgctgctgatctcttgaattgtggtccactgcagcttcctttctgctacctagggctgcctataggtgtcaatccgagaaggaaggtggtgtgggaacctattatcaacaaatttgaggctaaactgaacaaatggaggcagagaagtatatccatggctggtagaatcaccctaactaatgctgtcttaacagctctgccattgttttacatgtcttttttcagggctccttcagcagtgattaacaagctcatttccatccaaagaaagtttctttggggtggtaacca

SEQ ID NO: 5580 - DNA, 395 bp, Glycine max
agcttgaaattgaacaacggaagctctcgatatattcaaatggtcttaacttttcactcggatgtccgattcaggctatatcgagacgctcgaaattcaacaatggaagctctcgagaaattcaaatggtcttaacttatcactcggatgtccgattcaggtgcataatatatcgagacgctcgaaattgagcaacggaagctcttgagtaattcaaatggtcataacttttaacccggatgaccgatttaggacatcacatatagagaatctcgaaattgaacaacggaagctctcgagagtttcaaatggtcataacttttcactcggaggtcagattcaggcgcattatatatctagacgctcgaaattgaacaacggaagctctcgtgaaa

SEQ ID NO: 5581 - DNA, 438 bp, Glycine max
  unsure at all n locations
cttaagcaccgcagctgcagctctataaaccacacttttttatatggcttgancagngcgaacttacgtttgaatactctatacatgcagacacatgcaacacattatgttttcactgataataaaaagagaaatgtttagaaacacggtgactcgctctatcgaatatatcccctttcatttggtcgaaaatttttaaaatgaaaaaagtttgcgaatcctactcaataattaacgacgttttccttctaactttatgcacaaaaaacttgtttaatagagcgtgttcttatggcttatcaaataaaaaaataaaacatacatgcacgtcaataagtcactactcggtctatgctgacaggttagaaagtaatctacattgggaagtgtgatgctaacattctattttgttcgattgaaaaaactgcgtactttctt

SEQ ID NO: 5582 - DNA, 397 bp, Glycine max
  unsure at all n locations
ggccgccacggagttntccgactatgctcttgtgtggtggtacaagctacaaaaggagagagcaagaaatgaagagccaatggttgatacatggacggagatgaaaaagatcatgaggaagcggtatgtgccggctagttactcaagggactngaaattcaagctccaaaaactaacccaaggcaacaagggggttgaggagtatttcaaggaaatggatgtgctcatgattcaagcaaagattgaagaagatgaggaggtgactatggctcgatttcttaatggtttggctaatgatatccgtgatattgttgagctgcacgagtttgttgaaatggatgatttgcttcacaaagcaatccaagtagagcaacaattataaaggaagggagtgact

SEQ ID NO: 5583 - DNA, 387 bp, Glycine max
  unsure at all n locations
agcttaaataggtgggtttgtccgttctcgctagcttagngcaaatttgaatcgcttagcacacataagtggattttggtttagcgtgcttctctcgcttagtggatgagctgaagcggttcgcttgatgacctggagcagtgcgctcagtgaacctgacaactcatcttcttctagattcttcctcacgcttaaatagcaagttctcatctacctccatggcttcctatggtggtgagcttgttcttgactcatcttctccttgaagtggcatctacaatcagctttcttccttctccattcaactaccattgatcttcaagaagcaaaagactccattgatgaagaagattcaaggcccacgagctctacatggagcttcattag

SEQ ID NO: 5584 - DNA, 271 bp, Glycine max
  unsure at all n locations
agcttacaccagtatcggatgtatattacttttggagacatattggtacaacttctaactggaagaccccttttggggctagttagagatatgaaatgtgcattggaaaaggaaaaccttaaagcagtcttggactcttcagctggtgaatggccgttttttcaaactgaacagctggcatatttagcattgaggtgttgtgaaaagacttggttgaaccggccagaccttgtgtctgaaatctggagtgttcttgaaccattcanagcaa

SEQ ID NO: 5585 - DNA, 370 bp, Glycine max
  unsure at all n locations
agcttcggaaaggtctggagggagttatagatgtatgattcttagacngcacgggacaaggcgatgatgctattccggtacttgcgagaaaaagacatgtttgagaagtattacaatctgcatatggcaaagcggcttttgtcgggaaaaacagtttctgatgatgcagaaagaagtctcatagtcaggctcaagaccgaatgcggttatcaattcacctctaaattagagggcatgcttaccgacatgaaaacctctctagaaacaatgcagggcttttatgccagccaccctgagttaagtgacagtcctacacttaccgtgcaggatttgacctcagggttttggcctactcaatctactgctatat

SEQ ID NO: 5586 - DNA, 384 bp, Glycine max
agcttgtgaaggaataccttgaagattattccttaccagtagtaattgaccgtaactttgtgattgatgcgctaccttcgggaaaaatcaatgaccttcgcaaaaatataaagctggtaatgggcgttgggtttgcaaaggagtgctacgaggtgtactgtaactggaggagggaaagcttaaaggagtgcttaataaatttattaggcttgccagagattaatgtggaggagaaaagtagattgttggaatttgaaaattacattcttagaagacgtattgaggctatccaggtcgctcttggaacactaattcccagtgagcgacgactctgtgatagcgtcttccaggggttctcttatgtggctgatctttgtttcactg

SEQ ID NO: 5587 - DNA, 410 bp, Glycine max
tgaggcatgcaagcttgtgcatccaataccctgatgtggatgttttatattttcttaaaactggactgatgcatttgcttccaaagtttcatggccttgcacgtgaagacccgcacaaacatctgaaagaattccatattgtctgctccaccatgaaacccccagatgtccagaaggatcacatatttctgaaggcctttcctcattctttagagggagtgacaaaggactggctttattaccttgctccacagtccatcacgagttgggatgacgtcaaaagagtattcttagaaaaaattttccctgcttcgagaaccacgaccatcaaaaaggatatttcaggcattagacaactcagtggagagagcttatatgaatattgggagagatttaagaaactatgtgcc

SEQ ID NO: 5588 - DNA, 387 bp, Glycine max
  unsure at all n locations
agctttgaaaaaggaaggtggtgtatantctttataacaagctcgggaatattttgagagcgtgtgcgcaaaatattaattaataccatgtgtcagaatggtatattttgttttaccgcatgttaaagtgacatatttaatcatttttcatatattttactaagttttatcaacctaacaattgaataatgttatttaaacttgttattcagaagaaaaaaacatgttatttaaatttgatgattatgcatattaaattntaaataacccagggattcataaatcataaatatgtaatttaatagtattgcttattggaaatagcatattatacattaaaataaaacaatttatttagaattaaatagatctttaattaagactatg

SEQ ID NO: 5589 - DNA, 377 bp, Glycine max
  unsure at all n locations
agcttcaagaataanggttctagcttatttcttattcccagaaggaaattcaataaataggcctcctatttttaatggagagggttaccactactggaaaacccgaatgcaaattttcattgaggcaatagacttaaacatttgggatgccatataagttggaccttatgtacccaccatggtggctggaaatacaatagagaaacctagagaagagtggtctgaagatgaaagaagattagtgcagtataatttaaaggctaaaaatattattacttctgccctaggaatggatgaatattctatggtttcaaattgtaagagtgctaacgatatgtgggacactctacaagttacacatgagggaacaactgatg

SEQ ID NO: 5590 - DNA, 388 bp, Glycine max
  unsure at all n locations
agcttttcaagcccnatttacngcgtttactaccttngccggcnggggaattgcgaactttgatcaaacatttgaggttactaccgacgcgtcaaattctgttgttggagcagttttatctcagcaatcccatcccattgcttttttcagtcgcaagatatgtcccaaaatgcgggctgcatctgcttatgagagggaaatgtttgctgttacggctgcagtcaaaaagtggcgacattatctcttgggaaggcattttttcatttatacggatcatcgcagtttaaaggaattgataacgcagacgattcagacgccgacacaacatatgtggttaactaagctattgggtttaactatgagattgatacaccccggaaagaccaac

SEQ ID NO: 5591 - DNA, 395 bp, Glycine max
  unsure at all n locations
agcttgccaccacgaagttttccgattatgcttttgtgtggnggaacaagctacaaaaagagagagcaagaaatgaagagccaattgttgatacatgggcggagatgaaaaggatcatgaggaagcggtatgtgccggctagttactcaagggatttgaaattcaagctccaaaaactaacccaaggcaacaagggggttgaggagtatttcaaggaaatggatgtgctcatgattcaagcaaagattgaaaaagatgaggaggtaactatggctcaatttcttaatgttttgactaatgatattcgtgatattgttgagctgcacgagtttgttgaaatggatgatttgcttcacaaagcaatccaagtagagcaacaattaaaaaggaaagga

SEQ ID NO: 5592 - DNA, 332 bp, Glycine max
  unsure at all n locations
agcttcttagttgcagattattctttttattttgnggctacctcatgcactgctctaatgactatagcatcatttctggcgctaaactgcttgggccaacaacattttgaaaataatgctgttgatgttgccgctgttgtggaggactccatcatctaaggttgggatgattcctccacccgagatggttcctgttgctggagaggtcataattgctctgccgtggctgattttgctgttgaggttgaggaagtctattgtatatgacggcagcatatgcttcaagctgtccaattgctgcacagaaaggcgaaggtctgtatggtggtcaa

SEQ ID NO: 5593 - DNA, 365 bp, Glycine max
agcttcttggtttctccgttgaatgtgaagaaaaaatgtggatttatgagggcatgcccaaccaaagcttgaactactgtgtttttggttggaccccttacaatttattctaaacatcagctgaaatcttctttaaagaattgtggagacagaaactgctattcctaatatgtgtgtatttgactagctgaaaccaaaaggaagttgcattgcgaggggacttctttatcttcaccaagacttcaggctgaggattattcacagggatctaaaaactagccatattttgctggatgcaaatttggatccaaaaatatcagactttcgcttggctcgatcattttgggagaccaagtgagggaaac

SEQ ID NO: 5594 - DNA, 397 bp, Glycine max
agctttgaaccatacaaggacaacctttttctttgtgttcagattgctttacaacaagagacccttggtctcttaatcccttttcagaaataagatgaagagaagaagaaatctctcttgaaagagatagattgaacaatggagcactcaaataattccttattgaattgcaagtgtattggccaaggaatttttaagaggataagacaattttggttttgagaggataagacctttttgttctaaaaaactctaagcaaatttgtgttccaagtcacatataaatagacccttgatggccattcaaaaaccatttgaacagatgtgactcttggaaattattttttgaaaatctcctctggtaatcgattacaagatttgggtaatcgactatagg

SEQ ID NO: 5595 - DNA, 391 bp, Glycine max
agcttcaacattcaattttgagcggttcgtattattacgggactcaatcagacatccgagtaaaaatttattgtcgtttggattggctcagagattcaacattcaatttcgagcgtctccatatattacgggactcattcagacatccgagtaaaaagttattgtagtttgaattagcttagagcttcaacaatcaatttcgagtgtctcgttatatcacgagactcaatcagacatccgagtaaaaagttattgtcgtttgaattggctcagagcttccacattcaatttcgagcgtctcaatatattacgggcctcaatcagacatccgagtaaaaagttattgtcgtttgaattggctcagagcttcaacattcaatttcgagcgtct

SEQ ID NO: 5596 - DNA, 355 bp, Glycine max
agcttatccgtagaggtgttggactttttcaggtcttggagaggagcaataacaatgtctataggttggacctcccataagagtatgcagttagaactttataggtggagctaatactgaggagcatgaaccaacagatttgaggtcaaatcctcttcaaaggggagtgggtgatgcaatcctccctaggaagggactagtcaccaaagccatgaacaagaggctccaagaggattgggctagagctgttgtagaaggccctaggattctcatgaaccttacggtagatttctgagcccatgggccatgttgtgtccacttatctgtgtacatattagattaggatttcattatt

SEQ ID NO: 5597 - DNA, 390 bp, Glycine max
agcttgaactctaaaggtatacttttataaactaagagttttcatttaagtaagagtaagacagaataaaagttaaattgggagaagatgtcatatcacaggttttctaagtttggatatctaggattcatcatataaaaggatggagaaattaatgaggatgtataggatacatgtgggatggcttaaatggtgaaaagcatcgagggttatttgtgattgccaagtgtctaccaagctcaaaggcaaattttattggacaactatacgtccaactatactatatgatagtgaatgttgggttttaaagggacaacatgagagaaaagtgagatttgcagaaatgacgatgttaagatggatgtgtggtgatataagacaagataaaaa

SEQ ID NO: 5598 - DNA, 392 bp, Glycine max
agctttgctaatgtcgattttcaaattctttttattgtctttcctttttgtgggcatcccatatggtgaatatatttagtggcacacattctctctgctctccctaaatatttttttaaaaaaatttaagaatgagtgggagagagaaataaatgagttttaaaatataaacattaaattaccttattatccgtaaataaatttattatcataaaataagtagttaagttttttgtccaaataatttggtatgttaacatacccctttatatttatatcttttttatttcttaaaacataattttgaactatactttctaaaacaacatatatcaattccataaagtaatttttaggactatgttttaataaaatacacataattatggaat

SEQ ID NO: 5599 - DNA, 398 bp, Glycine max
  unsure at all n locations
agcttggatttcctttntggagggattctatctttcctaagatggagccaaacccagtcaccctcattaagaactagctcttttcttcctctattgcctatagttgaatacacctttgtttggttctctatttggttcttaaccctctcatgcaacttctttacaaattctgacctagattccccttctttatgtataaaagaagtgtctagtgggatgggaatgaggtctaacggtgttaggggattgaacccatagacaacctcaaaaggggactgcttggtggttctatgaacccccctgttgtaggcaaattctacatgaggaagatactcatcccaagtcttatggttgcctttcagaagagcccttaaaagggtggataaagacctattcac

SEQ ID NO: 5600 - DNA, 405 bp, Glycine max
gacctgcagcatgcaagctggattgaagaaatggaagtactatataattcgaaataggatcaatgaagatcaacaaagtatggactttagttgaagtttcaaaggatataaaaccaattggttggaaatgagtttacaagaaaaggattggagcagattggaagattgaaacctacaaaacgcatcttgttgccaagggatattgtcaaaaggaaggtatagattatgatgaaacttctctcgtggaaatgctcaaattaattcggattatttttgctatagtagcatactatgatcatgaaatatgaaatggatgtgggaaatgtctttccttaacggtgagctaaaaaaaggtgtgtatatgacacaactcaagggattcacatccttgtttgatcataataa

SEQ ID NO: 5601 - DNA, 388 bp, Glycine max
agctttgcttctacacactcattctatgaaatatcttgcggacatgggaagaggtggtgtagaagttcttgaataaatattttccagtgtccaagaccactgaggggaaggtggaaatctcatcattccatcaattccctaatgaatcaatgagtaaagctcttgaccacttccatggtttactctagaagacctctactcatggatttagtgagcctattcaactaaatatattcattgatggcctgtgaccccatttgaagcagcttcttgatgcatctgctagtggaaagatcaaattgaaaacacatgatgaaactatggagttgattgaaaacatggcagacagtgaccatgccatcctttgtgaccgagcttacacatcgac

SEQ ID NO: 5602 - DNA, 382 bp, Glycine max
  unsure at all n locations
gcagcttagcttctgtgcccngacttttggttattatctataacggacagagaaggatacttctttctggctccattcactaccccagaagcacccctgaggtattacactcaaatgtatttcaggtttctttccattttggcctttttttttttttatcaaatgggcaccttaaagtatcttccttttttcagatgaggccagatcttattcaaaaggcaaacgaaggaggtttggatgtcattcaaacttatgttttctggaatggacatgaaccttcacctggcaaagtaatgaataatgtttgcttgcagtgnttgaaaaaaatgcatttttttgtcgctattatctattntaacaagtttagctgtttttgttggta

SEQ ID NO: 5603 - DNA, 354 bp, Glycine max
agctttgagcaaaatcattcgatattttctttttactcggatctctgaatgagtcgcgtaatatatcgagatcctcgtaattgctaacggaggctctgagaaatttctaacgacattaactttgtactcggatgttcgattgtgtcccgtaatatatcgagacgctcgaaattcaaaatagaagctttgagcaaaatcgaacgacaattacttttgactcggatgtccgatggagtcctgtaatatatcgagacactaaaaattgaaaaccgaggcgctgagaaaattcaaacgacaataactttttacacaatcatgatgcttaaaattcacaacagaagctctgacataaat

SEQ ID NO: 5604 - DNA, 335 bp, Glycine max
  unsure at all n locations
agctngtacactttattttattncataattnnganngcagaactcgagcacagtttatctggtccaaataccgctaaggaacagngggagcaggaacaatttgcaattttctgcgaacatcttccaagtcttcatgaaaatgttgctcataatatacacacataagatcagtcgattgcatgccagcacgaatggcccaagggaagtagtgctgataaaacaattttctctgcttttcattgaatctagccgtgccccctataacggacagcagacacataggaaggcccatctgctcaaattcaatgagcttcagtgcttgctccccaatcaag

SEQ ID NO: 5605 - DNA, 395 bp, Glycine max
agcttcaagtagagggaatatgatgtataagattaatatgactatggctatgatcactacaaacaatacccaagtttcaggagaatcctgcagtccatatgccctattgagggaagggacaataaatttgcacccttggattttcaaaccccaaaaagatttgacaatcactacttcataaacattcttgaagggaaaggcttgttagattctaacaatgttcttatcaaccatgacttagatggaaagattacagagcagatgtgggcttatgcctctaatgaaaaacttttgtttgcttcatttgctaaatctatgattaagatgggaaacatcaatgttcttacaggaaatgagggggaaattaggaggaattataggtttgtcaatgctta

SEQ ID NO: 5606 - DNA, 343 bp, Glycine max
  unsure at all n locations
agctagattggctgattttatattttattgcaaccagacctgacattgngtttgtagtaagtatactttcaaggttcatgtattgtgctagtgaagttcatcttcaagctgccaaacgagttattagatatgttaaaggcactttagactatggtataatgtactctcattctcataattttaagctccatgaatattctgatagtgactgggcatgttgtattgatgacatgagaagcacctctggatattgattttcctttgggtctggagtcttttcttggtgttctaaaaagcaagaaagtgtatctcaatcaactgcaaaagcaaagtatgtaactgc

SEQ ID NO: 5607 - DNA, 315 bp, Glycine max
tgtcctcggtgacgaagacaattgaattagccccttctagctttgcacaggcgtcaacgattctcaaaatgaagggtctgtgtttggaagtggcgatgaggtggagaacaacctctgtgtatgaggtggtgttgaagatggacccgctgtactcaatgtttgttcacagggtacagtaaattataaagttgccgttgtgggccacgccgacggagccgaagctgtatccggcgactaaaggtagcacgtttattagcatggattggccggcggtggagtatctgtcttggccgatggcgaggctgcctgggagct

SEQ ID NO: 5608 - DNA, 361 bp, Glycine max
agctttgatctaacaccgccacttctaccatcatcttagatttctattatgttaatattattagtactttaatctccagccgtgtatttggctatattatgatgatatttgaacaatttaatatttctttatttgcatggtatgtttgaacaaatattaattacgttatttgactatgtggattttatatttgatctattcatggttcttgcttcatggttcttgctttatgatttggtttatatttttcatgaatgttgtgtgaatgcttagttgatatttgtatgttacgcactttggctttttgttgatgccaaagggggagagaaatagggatgaaatcaacaagaaataaggatta

SEQ ID NO: 5609 - DNA, 316 bp, Glycine max
ttttattgttgtttagatggatattttggctatttgcaaattccaattgctaggagggaccaagaaaaaactacttttacatgtccctatggaacttttgcatatagacggatgtcatttgaactttgtaatactcctgctacttttcaaagatgcatgatgtctattttatttatttatttaattgagtcttgcattgaaatactcatggatgatgtttctatttttggaacttgttttgacacatggttgcataacttgaatgtggtcttgaaaaggtgtagggatacaaggttagtcttgaacttggaaaact

SEQ ID NO: 5610 - DNA, 357 bp, Glycine max
agcttactcctcattttatcagttcttaccaaatcgtaaaaagagtcaacggagttgcctattaaattgccttgtcaccatccctctcaaatctcaatagtgtcttccatgtctcccaactcagaaaatatatctatgatccattaccaatgaggattgaggaaaaaatggtgaaacaactaagagagaaggatattcctttgatcaagtttgtgagcggaggagctactaaagatagtgctacatgggagttggaaagccacatgggagaatcatatcttggtttgttcttttcagctaaatttcaaggacaaaatttcttttaaggaggggggaattgtaacatccttctatttt

SEQ ID NO: 5611 - DNA, 317 bp, Glycine max
agctttactatgcagagaatattcaaggaaaataccttcatctgacttagcatcaaattttcctaagttatcttttccattattcaatacaaaacatttacaaccaaagatatgaagatgagagatgtttggttttctgccattgaccaattcatatggagttttctttaaaatgggtcttattaaagccctatttaaactgtagcatgcagtgttaacggcttcagcccaaaagtattttggaagaggagtatcatttaataaagttctagcaatctcttccaaagatctatttttcctttcaacaacaccatttt

SEQ ID NO: 5612 - DNA, 305 bp, Glycine max
tttacctttcattttaacccttaaaacttccctgccaaaattgtcatagataaagcaatgttgatgttcaaaggacactttaaatccctttttaatcaactgacctacacttagcaagttttggtcaatgttaggtacataaagaacatctgatattaatttggtacctgaacacgttgaaattgcaacagttccttttccttttactggaatatagccaccattcccaattctgacctttgagacattagttggcttcaaatccttgaatagagtcttatcatttgtcatgtggttcgtacaac

SEQ ID NO: 5613 - DNA, 325 bp, Glycine max
  unsure at all n locations
agctttagtgngtagtgtcaagttttagggtttactgtgtagggtctaatccttatggtttaggatttagggtgtaggggttatggtttaaaatttaaaggtaatggtttagggtcaagtcttagcgtttagggtttaggttttacggtttagggttgaaataaaattactccaaactcatatgcatctaatgaaataaaattacatttagaagttgaaataaatggagtggatcaagccaggttgagtgactttagttatccataagtaaaccttaataaactgaataccatacattacgtgtgaaattcaaatgagaaattta

SEQ ID NO: 5614 - DNA, 360 bp, Glycine max
agcttcaaagactaattcaaggatataagagtgtggacgagtattacaaagggattgagatttccttgattagggctcaaattgaagagtatcaagaggctaccatggcaaggtttttgcatggtctcaataaggtaatccaagacattatagagttacgccactatgcctctttttggaggatctcattcatgaaactatcaaggtggagcaacaattaaaagggaaacaaatatacaagaagtccccctatgtgtcttcaacataggaggataaggagacattcaagaagaagggaggatcttcattcaaatctcatgagaaagatgctgcacttagtaaaaataatttaaaccctac

SEQ ID NO: 5615 - DNA, 313 bp, Glycine max
tttatataacaaagtgaagatattaaaatcacacagaagtaggcttgaaaaaatgacataaagttttttattatgaaaaacaattgattaaatatttgttgtatataaaatattatcaaatcaatcataagagttgatattatcaaaaccaataacttaaaacataatattaacattaattttcaattacttcaaattatcaataattaaaaacaaataatttaaaacaatatttcaaaatgcatggtataagagacatatctagtggaggactgtttctatatgagaatgggaggtgaaatattgtgaactt

SEQ ID NO: 5616 - DNA, 283 bp, Glycine max
tctggtcggtgctgattcttggtataccccttttacaccttcatgtacctttcaattggatacgtccagcgtaaaaatataggaccacacaactggatctccctgactagatgaacaattatgtgaaccattatgtcgaaaaatgatggaggaaagtacatctccatttgacaaaggaaaatggcgacctcgttctccaattcatccaatcttgcagggtcaataactttgctacatatagcattaaaaacaaagccttgaccagttatggcttccccaaaat

SEQ ID NO: 5617 - DNA, 351 bp, Glycine max
  unsure at all n locations
ggagaggggatgaaatttttccaactctcctaatgtctatcgaggagtccgaggtttcggtgatcttcttgtccataaactacatatgccacttctaagtggtgcttggaagagctcgtgaaaattatggaatgcaaaaaaacaaagggtcaaatcgtgatacccattttttatcatgtagatccggcagatgtgcggaaccagaccggaagttatgcagatgcttttgtgaaacatgaacaacnnctnanaaacaacnnncaaaangnnnaaccccngaaagacacnncgagagaagcagccaacctctctggattggattgcttggtcaacangtttttttccaattaa

SEQ ID NO: 5618 - DNA, 325 bp, Glycine max
tcttcttgactcatctactccttgaagtggtgtctccaatcatctttcttctccattccgctaccatgatcttcaagaagcaaaggactccattgatgaagaagatccaaggactacaagctccacatggaagctcgacaatggacacaaaagccataacatttgactcaaatgtttgatttacgaaagctcagagaaaattcagactgtcataacttttgacttgaatgtctgattgcgtactataatatatcgagatagtcgaagttgaacacggaagctcctagcaaactcaaactaccataactttttattcaaatgtctg

SEQ ID NO: 5619 - DNA, 318 bp, Glycine max
tgacaattattatttattacatttaactttctctcccaaaaatgctgtgtttagggaacattaccaaatggacaagaggtcgctgttaagaggctttcacaaacatctagacaaggattaaaagaatttaagaatgaggttatgttatgtgccgaactccaacatcgaaatcttgttaaagttcttggatgttgcatacaagatgatgagaaattgctcatatacgaatatatggctaacaaaagcttagacgtctttctttttggttagtgtctctaaatttaattgttaattgaatgttggatctattatttcctt

SEQ ID NO: 5620 - DNA, 320 bp, Glycine max
tcaacatcagaccacttccagggtgctggaactacttcacatggacttgatggggcctatgcaagttgaaagccttggaggaaagaggtatgcctatgttgttgtggatgatttctccagatttacctgggtcaactttatcagagagaaatcagaaacctttgaagtattcaaagagttgagtctaagacttcaaagagaaaaagactgtgtcatcaagagaatcaggagtgaccatggcagagaatttgaaaacagcaggttcactgaattctgcacatctgaaggcatcactcatgagttctctgcagccattacac

SEQ ID NO: 5621 - DNA, 378 bp, Glycine max
atccctaagcgaccgcagctgcagcttgcataccctttgatcttttatgaaattacttgtgaaagatagccatgagggtgggctcatgggccactttgggatagacaaaacccttgtcttactcaaagaaaagttttattggccccatatgaagaaagatgtccataagcattgcactaggtgtgtggcttgtttacaagccaagtctagggtgatgcctcatgggctatacacacccttacccatcccatctgcaccttgggtagacattagtatggactttgtccttgggcttcctagaacccaaagaggtgtagactctatctttgtggtggtggataggtttagcaagatggcacactttataccattccacaa

SEQ ID NO: 5622 - DNA, 313 bp, Glycine max
ttgatgcaacatttggagaggttaatgaaactacgagatgatgcactccatgagaggttggatcaaatggagaatagagatcataatgaagaagaaaggaggagaagagggaatgatggtgttcctagacaaaaccgaattgatggtattaaactcaacattcctccatttaaaggaaagaatgatccggaggcctacttggagtgggagacgaaaatagagcatgttttctcatgcaacaactatgaggaggaccagaaggtgaagcttgccgccacggagttttccgactatgctcttgtgtggtggaaca

SEQ ID NO: 5623 - DNA, 356 bp, Glycine max
agcttgaaattgaacttcggatgttcttcagattctcaaaaggacatagctgatcacacggaggtccaattgaggcgcataatatatcgagacgctcgaaattaaacaacgaatactctcgagaaattcaaatggtcgtaacttatcacacggaagtccgattcaggtgcataatacatggagacgctcaaaattgaaccacgaatgctctcgagaaattccaatggtcataacttttcaaacggaagtccgatttaggcgcataatacatcgagaatcttgaaattgaacaacggaagctatccagaaattcaaatgggcgttacttgtcacacggaagtccgattcaagcgcat

SEQ ID NO: 5624 - DNA, 309 bp, Glycine max
tgaaggcaaactggatgcgttggtcaacttggtaacccagttggccttgaatcagaaatttttacctgtcgcaagggtttgtggtttgtgctcctctgctgaccaccatacagacctttgcccttccatgcagcaacctggagcaattgagcagcctgaagcttatgctgcaaatatttacaatagacctcctcaacctcagcagcaaaatcaaccacaaaagagcaattatgacctttccagcaacagatacaaccctggatggaggaatcaccctaacctcagatggtccagccctcagcaacaaca

SEQ ID NO: 5625 - DNA, 341 bp, Glycine max
agcttaccattaattgtacatcttttgtggagaatattttccctttgggtgtcattcagtggctgcatttgactttccaagagccttctcaccattagtatatcaccctgcatagcttcctcttcaagctcatcctttgcttcttcttcttcactaatttcagattcactagtgatttctccatctgccttcatgatcatggttttcttggttggacagtcagaagcaatatgtcctctgcctaagcatttgaagcattttatgtttctggtactggtgttggatgatgaagcaaaattatgcttggttttagcactgaaaactgttgactttccatgggg

SEQ ID NO: 5626 - DNA, 357 bp, Glycine max
  unsure at all n locations
agcttatggagactttctcntntttacaacaaggcctgcttgaccttctgactgctgagagctagagacttttctttcttaggtgcttcgtcttgttaaagttcatgttcatgaacttaagagtaccaattaattctttaaaggaaattgagtcaagattctttaaaacccttagtgttgttacttgttaatgtggctccttgtagagcttgtaggccttggatcttcttcatcaatgaagtccttcgcttcttgaagatcaatggcagcggaatggagaaaaaggaaaggttattggagatgccactttaaggagaagatgagtcaagaacaagctcaccaccataggaagccatg

SEQ ID NO: 5627 - DNA, 354 bp, Glycine max
  unsure at all n locations
agcttgcccaaggtcttctaacttttcatcaatggtaggcatgggaaatgtgtccttcatcgtgatggagttcaaagccctataatccatgcaacaacgccatgaaccatttttttttcttaacgaggaggatgggtgaagaaaatgggctatggctgggttggatcaggccggccgcaagcatggaggagatttgggattcaatctcggctttttggaagtggggataatggtagggtcggacattcacaggantgaaattgggaaaaaggggaatatggggctgaatattgcggggcggaggtagggtggttgggtcaaggaagatggcggagtaacggtcaaggagggtgg

SEQ ID NO: 5628 - DNA, 316 bp, Glycine max
ttgcaaagaaaaatgcagaaaccaaaaaatacccctggttttcatacagccgttgtccatcgaggtactgaacaaaaccatcaatgagatatggaccaacataagaagccaaagtgtttaacaatacaagaaaagctgtgataagaatctccttccatgctgaaattattaacgacttcaccaacttcagtgtggtgacactattaattccaccacaatcagcctcaactttctctctgaaagttggaaaagtaccaattacactatctctgctgtctagttgaggaacatcctcaaggtccagggtcttctgatt

SEQ ID NO: 5629 - DNA, 347 bp, Glycine max
agcttatcaacatcaaacttggttaaagagggcttggggtcaagacatgagaagcaatcaagtataatgttacttccttcactaaagcggtgatctatctccacacatattttatcaatagcaacataaaaaatctttgcacggtaatgatgaagattagtgatagtcatcccttctgctcttgaacgaccccgaaccggtatttcgtcatccatatttggtaccggaatacttttagctacacaaaatccttggacatcggcaaaaaaattattccagccactctctctcattgtgcccaaccgagctttgacaacatcaactaattccatggcaatcacaatatt

SEQ ID NO: 5630 - DNA, 321 bp, Glycine max
ttggagtttccaagtgccaattcgtcttctttttttgtccagtcttcttctggcttcaattcatcagtgggctttccttctgtgtcccgcatcttgggatgttcccagcctttgatgacagctttccaggttctgctatccagcgatttgaggaaggccaccatccttgctttccagtattcatagttggttccatccagaattggtggtctgttcactggtcctccttctttctccatgttcatcagaatttatctccctagatctcactcagtgatttcgagtgcctgctctgataccaattgaaattctgatatcaat

SEQ ID NO: 5631 - DNA, 311 bp, Glycine max
tataatatatcgatacgctcgaaattaaacatcgggaactctcgagaaattcaatttgtcatcatttttcacacggatgtccgattcgggcgcataatatgtcgagaggctcgaaattgaacaacggaagctcttgagaaattcaactggtataacttttcacacggatgttcgatttaggcaaatcacatatcgagacgctcaaaattgaacaacggaagctcctaagaaattcaaatggtcataacttttcactcgaatgtccaatacaggcgtatcacctatagtgacactcgaaattgaacaacgga

SEQ ID NO: 5632 - DNA, 354 bp, Glycine max
agcttcaatcggacattcgtgtgtttaagttatgaccatttgaatttctgaagagcttccgttgttcaattttgagcctctcgacatattatgcgcccgaatcggacatccgtgtgaaaagttatgaccatttgaatttctcaagagttttcgatgtttaatttcgagcgtatcgatatattataagcccggatcggaactcagtgtgaaaagttatgaccatttgaatttcacgagagcttccgttgtgcatttacgagcgtctctatatgtgatacgcctgaatcggacatccgagtgaaaagttatgaccatttgaatgtctcgagagctttcgttgtcaattttgagcgt

SEQ ID NO: 5633 - DNA, 281 bp, Glycine max
tggcttagaactttctgcttttattaggaggtttttttgcatttgtattttggggtaatgcagacatggagtaacttctaaaatggctgccaaaggaaaataattgagagccaagtgatgctgaataattggacctctgagaagtgttaccgatacctgaattcaaagaaaattgaggaggagataaccggcgggttacatgggggagagcgttatctaatggaagtatccatttaataatgctccacatggatcctgatttgtgtgaaactgaatgttct

SEQ ID NO: 5634 - DNA, 363 bp, Glycine max
agcttctaaactttgtacaagaattaagctctgataccacttgttagacaagtggcctcagatatcttaagaaggggggggttgaattaagatattcgaaactttttcccctaattaaaaatctatcttactttttacttaagttatgaattcccttaatgacaatcttcttaaatattaattcaaatgaagcaacttgaatataaatataaagcaataataaataaaggagattaagggaagagaaaatgcaaactcagttttatactggttcggccacatccttgtgcctacgtccagtccccaagcaacccgcttgagagttccactaacttgtaaattccttttacaagttctaaacac

SEQ ID NO: 5635 - DNA, 316 bp, Glycine max
ttggaaaatgatttctatacaaaagttagtcgtataaagtgactaacacttatctatgaaagttttttagagagttttttagaatcttattgtcttattctctcaaaagcaaatcattggccaaacacttgcaagtcaattaacgattcttctaagaacttcaacttgtatcattcttctctaaaagagagaaaaacttttgtacttctaaaacaaaattgttgtgatcaagaggctgtgtgtctcttgaattgtgagtttcctgaacacaagggaatggatccctcagttgttcaaaagtttgaaatggatttta

SEQ ID NO: 5636 - DNA, 324 bp, Glycine max
tgtagggttaaagtctcacgattgtcacgtgctcatgcaacaattgttagccgtggctatacgagacatcttgccaaacaaagtcaggttaacgataactcgtctatgctttttcttccattctatatgtagcaaagtcattgatccagtcatgtttgatgagttggaaaatgaggccgcaattatactgggccagttggagatggattttccccctggcttcgttgacctcatgaatcacttgaatgggcctctggtccgagaaaataaatgatggggtcctgtttattaacggtggatgtacccagttgagcgatacatgaa

SEQ ID NO: 5637 - DNA, 369 bp, Glycine max
  unsure at all n locations
cttgaagccaaaaggaaaaattatcttgtttttgttcaatgtactctgcataatagagtgtgttcaatgcaaagttaccactccattccatcgaaccttgaggattgataaagccatcaagataagtcttcattaaaattgatcttgaatattgcttccatggtcttcgaagataaatcctaaccgggttttgaaacaacaatattccaaaaagttcctcgcatatcgcgatggatgcttcatagaatcaaaanccnctnnannnaanctcnccggaaaatcacttgaagagggcctaangacncngcatccatcgctttatattacagttgaatttccaatcaaaagtatgacccattgtgtcaaaca

SEQ ID NO: 5638 - DNA, 316 bp, Glycine max
tgtaatcgattacacacatactgtaatcgattaccataggagattttcagaaaatattctcaacagtcacatctttttgtgtggttcttgaatggctatcaaaggcctatatatatgtgacttgagacacgaatttgacaagagtttttcagaacaaaaaggtcttatgctcttagaaagaaaaataattttatcctcttacaaattccttggccaaaactcttgtgattcaataaggaattatttgagtgctcaaattgttcaatctatctttttatagagagatttcttcttctcttcttcttcattctgaaaa

SEQ ID NO: 5639 - DNA, 314 bp, Glycine max
tatagttattggagggagaataaaacaattcaaaatcaattgtacctttcaagtaacgaagaattctttttgcggcttttagatgaggagaggtaggagcctccgtaaagcgacacacaactcccaccgaatatagaatattgggccttgtattggttagataccttaaactccccacaagactcttgaagaccgtggagtctaccttctctccttcatcaaactttgataacttcaagccaccttccataggtgtgttcacgggattgcaatcaagcatattaaatttcttcaacacttcttttgtgtagctt

SEQ ID NO: 5640 - DNA, 305 bp, Glycine max
tggacaatggcagtgcaatcttactaaaatcctggatgaatctcctataaaaacctacatgtccaagaaaagaacgcatttcctgcatagaagcgaggtaaggtagagaagtaataacatcaatcttggccttatcgacctcaatacctctaatagataccaaatgccctaagattatatgtaaccacatggtacaaaaactattgttaagagtaaagacccttcccgtggcctttggacgtctagtttggtcattcagacccccaccattctgcttcttcttgggatataggcaatctctttga

SEQ ID NO: 5641 - DNA, 312 bp, Glycine max
tcaacattcaatttcgagcgtctcgatatattatcaggactcaatcagacatccgagtaaaaagttattgccgtttgaattggctcagagcttcaacattcaatttcgagcgtctcgatatatgacaggactcaatcagacatccgagtaaaaagttattgtcgtttgaatttgctcagagcttcaacattcaatttcgagcgtgtcgatatattacgggcctcaatcagacatccgagtaaaaagatattgtcgtttgaattggctcagagcttccacattcaatttcgagcgtctcgatatattacgggc

SEQ ID NO: 5642 - DNA, 363 bp, Glycine max
  unsure at all n locations
agctntaaggaaattcaaacgactataactttttactcggatgtctgatggagtctcgtaatatatcgagacgctcgaaattgaatgttgaagctctgagccaattcaaacgacaataactttttactcggatgtctgattgactctcgtcacacatcgagacgctcgaaattgaatgttgaagctctgagccaattcaaacgacaataactttttactcggacgtctgattgagtcctgtcatatatcgagacactcgaaattgaatgttgatgctgtgagcaaattcaaacgacaataactttttactcggatgtctgattgagtcctgtcatatatcgagacgctcgaaattgaatgttg

SEQ ID NO: 5643 - DNA, 324 bp, Glycine max
tctctgcatgatgaattgccaaaatggatggatccatgcttattgatttcttttctgtgtatgtgacagggggggaaaaggagtgatgggcgaacacctgacggaatacgtccaattaactcgagatgtggcctattacctagagcacatggaagtactctttttacaagaggcgagacacaggtctgagccaactttatttgttttccagtttatgcttttgatgatatctgttggtgtctatatatgcttatgcaagtcacattatctcttttctgtgtttgttagttttattagaagggagatagaatgatcaaacacaaa

SEQ ID NO: 5644 - DNA, 314 bp, Glycine max
tagcacctggaattcggatgctccatcaacctacctatcgatgatgggtagagggtatgtgtctttggggcacgccctgtttagatcagtgtagttggtgcacattcgccatttttcgttggctagctaggtggaaaacctgacctctcttatgaaatttgcatggaggagcttgtcgacttcttctttgatgactttatgccgctcttcacccatcttcattttcttttgtgatataggtttgtctttagaaggttttcctatacaagatgtaaacaaaactgccttggttgatgaggaccctagacaccatg

SEQ ID NO: 5645 - DNA, 314 bp, Glycine max
tagcacctggaattcggatgcttcatcaaccttcctatcgatgatgggtagagggtatgtgtctttggggcacgccctgtttagatcagtgtagttggtgcacattcgccatttttcgttggctagctaggtggaaaacctgacctctcttatgaaatttgcatggaggagcttgtcgacttcttctttgatgactttatgccgctcttcacccatcttcattttcttttgtgatataggtttgtctttagaaggttttcctatacaagatgtaaacaaaactgccttggttgatgaggaccctagacaccatg

SEQ ID NO: 5646 - DNA, 311 bp, Glycine max
tgtcagccgcgattgacgaaggatgcagaagacgacgttagtctctgcgtgctatcaggcttttcatcttacagacagcaaaagaaagtttatacggataaccactcgggtatttccacccgtcaacgtgactcaaatgtcagtatgacagatcttgtgaaggtggccgacaaaagcgaggctcttgctcctacgtatcctccaatgaggaactcagacctacgtagttcttgataacttgtgagacttgaaaaagtctccaccggaagatgctgacatctccggaaagggcgcagatgaccacattggcc

SEQ ID NO: 5647 - DNA, 352 bp, Glycine max
  unsure at all n locations
agcttgtaagagtgcatttgttttttcttgcaggccattgataggattgggtggttgctttctaaaaggagaatttggtgggcaattgttgactgctgtaggtaaagatggaaacaatcaaatgtttcctattgcctatggtatagtggaatctgaaaattattcatcttggaagtggtttattgatctattgatagctgacctagatggtattcaggagggatcttaggctttcatttctaaccancanaagggaaanacttattggaactaacatgaactatggctttcattcaattggtccactattttttgcagggtttggttgaagtaatcaaagagcatggtgaaa

SEQ ID NO: 5648 - DNA, 347 bp, Glycine max
  unsure at all n locations
catatgaataatactccaatggttgggtttagcaaaaatgattaatttttcatagataaaataaggtttgaatatttgtttcgaaagatgttaatattaatttagtgtgagaataagattatgtttgataaaactagttaaaaagataattagaaatagtaaaaactaattgatagttgaaaaatgaatntttttttattcgtgaaaagttatcttattgaatcatatacaaatgtttggtaaaattatatgttgaaatagctaacaaatataaaaatatataaatgaacatgtttatataatgtttttatacatatttntaattcgatttgttgataaaaaaatat

SEQ ID NO: 5649 - DNA, 368 bp, Glycine max
acatagacacctagttagacttttgggttactgtgtggttttagacgaaatgatgctaccatatgaatatatgcctaatagaagcttggatgctttcatatttggtaagactatttcttgcatttgaaatattctgttggctaagcacttttttgtacactcaaaatcctattttgaagtagactaatgtaatgtgtcatgcccctaatgaactacaagaccggaagctgtgtgttctattagactgcgatgtgcgcttcaagaatattatggggattgctcgatggcttctttatctacatgaagaatctacgttgaggattattcattgggacttgaatacaagcaacattctaccttatgtatag

SEQ ID NO: 5650 - DNA, 358 bp, Glycine max
  unsure at all n locations
ctaagctgaatcgacctcagtgtgnaagnatgacttctgatattcgttagctcncgngatcaatntctagcgtctgtatatgtgatacgcctgaatcgaacatccgtgggaaaagttatgaccatttgaatntctcgaaagctttcttggtacaatttcgagcatctcgacatattgtgtgcccgaatctgaccatcggtgaaaagttatgaccatttgaatatctccagagcattcattgtgaagtttcgagcgactcgatatattataagcatgaatcggaccttagctgaaaacgttctgaccattagaatttctcagagctctcgttgtaaaatttgagcgcctctatatatta

SEQ ID NO: 5651 - DNA, 437 bp, Glycine max
aatcctgactcaccataaacgttgacccaaggttttattgcctattcttatcctcggaagcaagaaaagatgtgaagaaaattttcaatcaaaggaaaaaggagaagaaaatttccaatcaaagaacaagagaatgataattctcaatcaaaggaaaaaaaggaagcaaagaaattcccaatcaaagagtgggagaaagaataaatgaaaagaaaggaaattcccaaccaaataatgggagaaatgtaaaaagaagaatgctcctgatcgaaagataacagaagacatgtgcagagaggtctttggaccggacaatatctgaacaatacagaattgtcaccaaatgaacgaaaaatgaaggaaatgaaaccactacctaatatggtcttctccacttaattaccaaccaaaatcccgtgcgctagctaccctttttt

SEQ ID NO: 5652 - DNA, 401 bp, Glycine max
  unsure at all n locations
tcgcacttgataacggagaacacatgaacatgttgctggcattttcattcatggcgctccggacaaacgtggagtatggatgattgcctagagggaccgcacttatgctatcatgaagctcatctccaaacttgaaagtggacgacacatgaacaaccctaagcaataaactttcatgtggctccgaaagaagatgagaatggacgatngccttgagggtccactcttaggcaatcatgaaactcatctccaaactcgaaagtggaggacacatgaacagtcctaagcatatacattcatgttgctcctgaaaaggataaaatggacgattgtcttgagggtcctcttataggcaatcatgaaactcatctcccaacttcaaagtggaggacacatgaaca

SEQ ID NO: 5653 - DNA, 446 bp, Glycine max
  unsure at all n locations
tcaagctggtatctccttcttcactacatctagtaataccgggttgtgtcttctctgtggctgtcttactggtttagctctgttagtgcttagctntactgagttttaaaagattggctaaaattttgttaaaacataagcacttagacaatgaaggaaagctggagttgctgcacatgatgtctaacattatgtcaaggaatcagatcgggctgcacaatgcacaaggcaagataaaatgtcaaatgaagaattgaagctgcaggatccacgatgtcggatacaatgtccaggacattctgcccgaaaatactggacacataaatctgttatacctttaacagcttaatgtgcagtcagcaacagattatgcgatctatctntaggaacgaattaaaagataattaaagttcgaattacaaacttgaatagttcgttcacggatt

SEQ ID NO: 5654 - DNA, 476 bp, Glycine max
tgcagtagatgccactctactctaaattcttgaaagatatgttaacaaggaagcataaatatattcatcaggaaaacatcatagtggaaggaaactacagtgctatgatccaaaagatccttccacccaagcataaagatcctgggagtgtaactattccttattcaattggagaagtcaatgtgggaaaagctcttattgacctgtgagccagtgtcaatttgatgccactctccatgtgcagaagattgtgggagttggaaataatgcccactcgaatgactttacaattagctgactgttccattaccaggccatatggagtaattgaagatgtgttggtcatagaaaaacattttatcttcctgacagactttgtggtaatggatatctttgaagatactgacatccctgtaatattgtgaaggccattcatgttgactgcaagctgcatagatgatatggggaagaggaag

SEQ ID NO: 5655 - DNA, 417 bp, Glycine max
  unsure at all n locations
atcggacatccgtgtgaaaagttatggccatttgaatnttacgatagttattgatgtataatttcgagcgtatcgatatattataagcctgaatcggacatccgtgtgaaaagttatgaccatttaaatttcacgagagcttccgttgttcaatttcgagcgtcactatatgtgatgcgcctaaattggacattcgagttaaatgttatgaccatatgaatttctcaagagctttcgttgttcaattctgagcgtctagatatgtgatgtgctcgaattggacactcgtgtgaaaagctatgaccattataatctctcaagagctttccgtgttcaatttcgagcctctcgacatattatgcgcccgaatctgacatacgtgttgaaagtttgaccatttgaatttcatgagagctt

SEQ ID NO: 5656 - DNA, 458 bp, Glycine max
cacgtttcaaactcaaagtatattacatttacaaacttaaataagaaagatcttcacatctataaaaagacttaatgaacattaacagaaataaaacctaccagaacctgtaagtgaaagaaaatatacagacccatgtaaactatagaacatagatctaaccttttaagtggaaaataacataaacgtagaagtatgcaaatgaagatttaccaaatgaattcagtaatagcaactttacctgaaagtgtaaactgttaatgcagcacccaatccgccaaaacaatgggaccatgatcctctggaactctaccatgttaataacttccaaaatatcttccagttcacccagaaacatcacctctttctgactatttgttgctggccaatatttcaacaagccgcttatcacaatgctcgctaactttggctccttctctataaactgcataacacag

SEQ ID NO: 5657 - DNA, 468 bp, Glycine max
  unsure at all n locations
tactcaagctcgagcacctncttccttacctcttncttcattgttgggtnctttcttctctggggttgtcggactggtctgtagtcttcttccatcattatcttgtgcatgcagtaggcagggctaatacctttaagatccgatatatgccacccaattgcttccttgtgtttcttcaaaatttctactacactcgtttcttcatcggatgtgagtgtattgctgatcaccatatgcttactctcattcttctttaagaacacatgcttcagatggttgggacatatcttcaattctaccttcttcttcttagatggagtcttgctctttagtttctcaaaactggccttctcctcatggatgttatcttgtcgatccaagtcttctaagcaagccttgagatcttcttctttctcattgggtaggcaatctatccgatcaccatggctctttcagctaagtctgtgc

SEQ ID NO: 5658 - DNA, 256 bp, Glycine max
tgaacaacgataactctcgagagattaaatggtcatcataactagtcacactgaagtacgattcacgcgcatactatatcgagacgctcgaaatctaaccacggacgctctcgagaaatccaatggtcataacttttagcacgaaagtccgactcagttgcatgttatatcgagacactctaaatcaaacaccgagagctctcgagaaattcaaatgatcataacctataacacgtaggtcatattccgacctata

SEQ ID NO: 5659 - DNA, 464 bp, Glycine max
acttcctgtgtttgggaacctctcctgcctcaggtgtttctaaacccaatcacctggttcaagcacgactttctttctgcttttgttggcttgccgtgcatagctcgcatttttcttttcaatttgaaccttcacttgctcatgcaacttcttcacatattcagctttagcctgtgcatccttatgcttaaacatagcaatgttaggcataggcaacaaatcaagaggagtcaaaggattaaatccatacactatctcaaatggtgaacaattagttgtgctatggacagcccgattataagcaaactcaacatgaggcaaacaggcttcccaagatttaagatttttctttaaaacagtcctaagcagtgtgcctaaagtcctattgactacctcagtttgaccatcagtttgtgggtgacaagtagtagataacatacaattagtaccaatcttaccccaca

SEQ ID NO: 5660 - DNA, 462 bp, Glycine max
  unsure at all n locations
gaatgaagctctgataccacttgttagacaagtggcctcagatatcttaagaaggggggttgaaaaatgcaagttacaagttcccttaaaaaatgaattcttaaataatgattcaaataaaacaatctgaatataaatccaaagcaataataaataaaagagtttaagggaagagaaagtgcaaactcaaatttatactggttcagccacacccttgtgcctacgtccagtccccaagcaacccgcttgagagtttcactatcttgtaaaatccctttacaagttctgaacacacaaggacaatccttcctttgtgttcagatatctttacaacaagagactctcggtctctcaatcccttttgagaatttagaaagaagagaagaataaatctttcttgaaatagatagattgtacaatctgagcactcacataatnccttattgaattgcaagtgtattg

SEQ ID NO: 5661 - DNA, 388 bp, Glycine max
  unsure at all n locations
acatgcctcatgacacctaagtatacttagtggagaatcttggacatgatattggattagtgggttgaaccatagctaaaattcactaatcataattagtgaaaatttggctccacaaattcaatttcaaattcaagtgaaatttggataaaaattcaaatttccctctaattatgtgtgacacttataaatagaggtcatgcgtgttgtatttttcaactctgatcatttgagaattacgctncaaagtttagacctcatttgaggcataaaattatgtgctccttctccctccactcatcttctcctaccttcaaactcttatccatggcttcctatggaggtgagattgttcttgactcatcttctccttgaagtgacgtctcca

SEQ ID NO: 5662 - DNA, 429 bp, Glycine max
tggcctcagcaaatacctgatttccagaatgtaattctatctatatacctccaatcttgaatggagagggttaccactactggaaaacccgaatgcatattttcatcgaggcaatagatctaaatatctgggaagccatagaaatagggccttatatacccaccacagtagaaagagtatcaatagatggtagttcatcgagtgaaagcataaccatagaaaaacctacagatagatggtctgtagaggatagaaaacgagtacaatacaacctattagccaaaaacataataacatctgtcctatgaatggatgaatatttcagagtttcaaattgttagagtgctaaagaaatgtgggacactcttcgattaacacatgaaggaactacagatgtctaaatatcttcgataaatgcacttactcatg

SEQ ID NO: 5663 - DNA, 468 bp, Glycine max
taagctccttcaactgcacaaggctcttatatattgatgagtatccttgtagaaccttcacccgacgaagacactgacaaaaacttatcttctccttcttggacaaagtatggcaggctgggggcaagtaaattatcttcccatcagaccttggatgcaactatgatctgatacccatatcagttagatcttgacgggtattcaagccatccttcgtcttgccttgaatgttaaggagcgtcccaatcacactgtcacaaacatttttctccacatgcataacatcaatacaatgtctaacgtcaagatcacaccagtacgaaagatcaaagaatatggacctcttcttccatatgcaactctgacttttatccttcttttgggtcttcccaaatacagtgttcatgtgttgaacccgctgatataccagctcaccagtcaacggtatcggcgcaatatcatgctctt

SEQ ID NO: 5664 - DNA, 465 bp, Glycine max
gctatccctattgaactgccatcatcaagcatgcttttattcgagtttcttcatcactcacagtataaaacacctccaacagtgaagggagtttttccttattcaatatttgaacccgaacccgaatatgatcgtactcatgattcaagcccgagagaaacttaaagattctctcttgctcaataaactgagccaatgcaacggagtcagcattgcatttgcatgtcatcttcaaattctgatattggtcgaactccatccacaagccactcaaggtttcataatattctgtcaccgagaggcttccttgcttagtcataaagatctggctttggatctcatgacagacaatgatatcattctttacatagtatatgctggcaaggttgtcacaaatttctcgagcaccggataaatattgaatgacaatataccatgtatatagtaaatacttcaaaaatgatg

SEQ ID NO: 5665 - DNA, 479 bp, Glycine max
  unsure at all n locations
tcaatctaagcttatcccttttcactcatgtgtccaagtctttgatgccacatggttgacttattgacaacctcagtaactgctaccatatcctcatctgcaatcatgtaaagagatcctcgcttctttccacgagccacaatgagattggcctttgttaccttccaagcttcatctccaaaagtggtgtgatgtccctcatcatccaactgccctttagatattaaatatctctttaaggcatgaatatgtctgacattgcgcaatgtccatagggatccactggaggtcttgatgttgatatcacctcttccgacaatgtcaagagaatttccatctgcaaggtaaactntcccaaaccttccagaaatatagttagacaataaatctttagagggagtagtgtggaacgacacacctgagtccatgatccatgaatcaacaggactatccannactgcaaataatgcatcatcaag

SEQ ID NO: 5666 - DNA, 463 bp, Glycine max
  unsure at all n locations
cataagtaagaagaaatattactaccaattaatagggttctattaacctccaaaaggtgtctattgtttctctcggctactccattttgctaaaggaaattaggacatgatgtttgatgaagaataccaacaaatttcataaanaatttcaactcatttttgtattatccccttcattattagacctgactatctttattggagtattaaattgtgtggttatcattttgtgaaaaacttgaaaaacattacacacatcatttttgcgtttaagaaggtataaccaagtcattcttgtacaatcacccacaaatgtcacaaatcatcgcatttcattatgtgtggaaagagggacaagtcctcanacatcatagtgaataatatagaagggagcataaactttattgttatttatagaaaaagtaacgcgatgacgttttgtcattacacaagantcacattt

SEQ ID NO: 5667 - DNA, 392 bp, Glycine max
  unsure at all n locations
agcttagactgagttcagcctaccatcctcttactgatgaccaaactgaacggaccattcagtcattgggggaccttttaagagcatgtgtcttagaacaaaaaggaagctgggagagttntcttcaattgatagagttcacttataacaatagttttcattctaccattggtatggctccctatgaagctttgtgtggttgaaggtatagaacacccctatgttggttagatctcggagaaggcctcacctcaggaccagaagtggtacaacaaaccactgagaaagttaagttaattcaggaaaggatgagaactgctcagagtaggcaaaaatgttatcatgataagaggaggaaagatctggaattcgaagttggtgatcatgtattc

SEQ ID NO: 5668 - DNA, 384 bp, Glycine max
  unsure at all n locations
ntgatgcaacagttggagaggttaatggaagaaggagatgatgcgctccatgagaggttggatcaaatggagaatagagatcataatgaagaagaaaggaggagaagagggaatgatgatgttcctagacaaaaccgaattgatggtattaaactcaacattcctctctttaaaggaaagaatgatccagaggcctacttggaatgggagatgaaaatagagcatgttttctcatgcaaaaactatgaggaggaccaaaaggtcacgcttgccgccacggagttttccgactatgctcttgtgtggtggaacaagctacaaaaggagagaacaagaaatgaagagtcaatggttgatacatgggcggagatgaaaaggatcatg

SEQ ID NO: 5669 - DNA, 395 bp, Glycine max
  unsure at all n locations
agctatgaccaggaattattggatgggttggtatgtgaattcaagttgttcctggtgcggagatgatggtacagcgggtgaaccagaagctgcagtttcttttggtgaggtagccatggaaaagcagagcgtttggaatgatttcgtaaatctcagaaaactattgngaaatgctggagataacacgaatgccaagcagatattaaattgaatgaagaatgtagaggggtgtgtgaagcaacggtcgaatttgctttgtagtgaacgtgctattaatgttaagtgattcgtttgggcacgttcagatagcagtagctgctataattcctctagcagacaaatgcccagcttgccctcagttttcaactgatttgcatcaagcctttggaaatatc

SEQ ID NO: 5670 - DNA, 326 bp, Glycine max
  unsure at all n locations
tgtcaaaaagggaagcaagttaaaaactcttttgaaagtaaattaaatgtttctacttcaaaaccccttgaactacttcacattgatctatttggtccctctagaacaatgagtttgggtggtaattactatggcttagttatagtagatgattactcaaggctcatatggactttgttttaaccaaaaatgaagcttttggtgctttttaaaaacttgccaaggtgattcaaaatgaaaaaggtctcaacattgtttcacttaaaagtgatcatagaggtgaatttcanaatgagtctttttgaaacttttgtggagaaaatgga

SEQ ID NO: 5671 - DNA, 387 bp, Glycine max
agcttatgttgcaaacattttacaatatatccctctcaacctcagtagcaaaatcagccacaacatagtaattatgacctttccagcatcaggtacaatcccgagtggaggaatcatcccaaccttaaataggtgaatccttaacaacagcaacaacaacaaccttattgtaaaaatgttgttggcctaagcagaccatacgtgcctccaccaatctatcagcaacaacaacaacagccccagaaacaacaaacagttgaggcttcttcgcaaccttcccttgaagaacttgtgaggcaaatgactatgcaaaacatgcagtttcaacaagagaccaaagcctacattcagagcttaactaatcagatgggacaattggctacacag

SEQ ID NO: 5672 - DNA, 454 bp, Glycine max
  unsure at all n locations
ctaagctngaaaggattatgnacttgaccttgagtccaagacatttactaaaatttagctataaatcaactaatgaaagtgctcaaaagggtatatacaaccctccaaacttgagcctaaggataaatgaagtttaaagctaaataactcagaaagatatacatgtctccaaccttgagacttaaagtaaataaagcttaaaattgagctacaagtaagctaaagtacttaaaaagatatatagtaaaaaaaaatgtaagaaaattaaatgagctataatacaattaaaatgaataatcaaaccataatttaagtctagttatgcttttgttattaaaaagtantaattntagcanttttatatttattaaataaattatacgagtctcattaaaataattaaagcatatttcctagtctctattaacaagatcaaataaacttttacaatatt

SEQ ID NO: 5673 - DNA, 395 bp, Glycine max
  unsure at all n locations
agcttggagacaaaatcatgaaatttgggtgtcgccaattcnttggtgagaaaatctgccacttgatcacttgttgaaactggtagtagctttagagtgcccttcaaaagcttctctcgcacaagatggcaatcaatttccaagtgttttgtgcgttcgtgaaaaaccggatttgaggcaatgtggactgcgctttggttgtcacagtaaagagttggagttctggtaagctgaactctcaaatctgcaaaaagatacaacagccattgcaactcacaagcagctgaagacagagccctgtactctgcttctgaagatgatctggacacagttgcttgctttttagcacgccatgacactaaagatttgcctatgaagaaacaatatccagatat

SEQ ID NO: 5674 - DNA, 373 bp, Glycine max
  unsure at all n locations
agcttccatcaagtgcggaccctcaaggatatccaccattctccccatttttcggagccccataaatgttattgcctagcgctattcatgtgtcctccaccttcgagtttggagctatgtntcatgattgcctaagtgcggaccctcaaggaaatcctccattctccccctttttcggagccccatgaatgttattgcctaacgctgttcatgtgtcctccaccttcgagtttggagctatgtttcatgattgcctaagtgcggaccctcaaggcaatcctccatcctccccctttttcggagccccatgaatgttattgcctagcgctgttcatgtgtcctccaccttcgagtttggagctatgtttcatga

SEQ ID NO: 5675 - DNA, 329 bp, Glycine max
  unsure at all n locations
ttgaataggagtggtgcgcggngtatatgttccatatacacatctttattgagatttccatgaaggaatacattataaatgtcaagttgttgcaaggaccattgatttgctgcagcaatggtcaaaagtaacttaattgtgtttacctttccaattggtgaaatagtggcaaaagtagttgataccttgggtttgagtgaatccacgaagcatagctttgagccaatacctttattntatgttagactatttattttaactattatgataattaacataataaaattataatgtctacttaaatatatgtttcttactttattttaaac

SEQ ID NO: 5676 - DNA, 267 bp, Glycine max
  unsure at all n locations
agcttgaaattgaacaacttatgctctctactatntcgaaagggcatagctttttactctgatgtcctattcggagacatgactcatttatacacttgaaattgacaacggaaactctctgaaaattctgatgtgcataacactttcctctcatgttctgatcgaggacataactttattaaacgctcgaatttgaacaactgaatctctcgagacatctgaatggcataacatttcactcagatgttcgattcggggatattattt

SEQ ID NO: 5677 - DNA, 379 bp, Glycine max
  unsure at all n locations
gcttgttagcatactctntaattgtttcgaactccttcattttctgcatctcaaattctctaactaaattcagggcttgcattcccttaatcctttcatctccttcgtattcattcttaaggaaactccagatttcatatgcctgattgatggtcattattctagtgaaaatttcttttgagatagcagcaaataaagaagctcttgcctttgactntcttgttttcctctccttttaattntttatctgagtcattgttggattggttggtaaaggaagaacttcgtagtcttcctcaaccgcttcccagagatcatttgcctccaaatgtgcctccatttttgctgcccagatttcatgattatcaccatcaaacat

SEQ ID NO: 5678 - DNA, 372 bp, Glycine max
tactcaagcttctggtgggacatcttgacttgctttttatctgacattctttatagattctgccctcttctattttcagattgggaatgcctctaacagcacctttgtcaatgattatcttcatgcctcttaagtgcagatgtccaaatctttgatgccatattttgacttcatcttctttggagaatagacatgtggaggagtaactggtttcttgaggtgtccataggtaacagttgtcctttgatctgctgcccttcattaagacttcactcttctcatttgtcaccaagcattctgactttgtgaagtttacattgaatccttcatcacacaactgactgatgctgatcaagttcgcagtcagtccct

SEQ ID NO: 5679 - DNA, 400 bp, Glycine max
  unsure at all n locations
agcttcttccccctttccctaatgtctaattttttcacatagnttatgagcttatgcaaatataataattgcatcctttaactataaacaggacaaaagtatccttttacatttgacaaggtattaaatcatgaggcatctcagcaagatgtttcactgagatatcacaattggtacaaagtgcgcttgatgggtacaaggcgattattaatttgtgtcttctttgttcaagttaccttttgcaggtcaaaaatctcttacattggatacaactattggtatgtgacaattattattttctgagaagcagtggctactggttgatcattggcgccaattcttgtatgtaatatactagagtattaatattaatatacacatctttaactttctcgattat

SEQ ID NO: 5680 - DNA, 399 bp, Glycine max
  unsure at all n locations
tcgaaagagacattccaagtggttggaattcatttagatgttttcttatatgatcaagtacaagaatggtaaggaaaacatagtggttgatgctttatctagaaggtatgtttttcttacttctttgcaaactaaattgcttggttttgagtttatgaaggacttgtatgctaatgattctgaatttggcaaagtatgggattcttgctctaaacatgtttttaggaactattatagatgttcatgtttcaaaaaaaaaagttgtgtgtgtctgtgttccttgcatgaaatgttagtttgagaaatcatggtggtggaatgatgggacattntggtgtgaaaaagactttataaattctggataagccattttattagcctagcatgaagcatgatgtg

SEQ ID NO: 5681 - DNA, 412 bp, Glycine max
  unsure at all n locations
agcttagactgagttcagcctactatcctctaactgatggccaaactgaacggaccattcagtcgttggaggaccttttaagagcatgtgtcttagagcagaagggaagttgggagagttctcttccattgatagagttcacttataacaacaattttcattccaccattggcatggctccctatgaagctttgtatggtagaagatgtanaacacccctatgttggttagagctcggagaaggcctcaccttatgaccagaagtggtacaacaaaccactgagaaagttaagttaattcaggaaaggatgagaactgcttaaagttggcaggaaagttatcatgataagaggaggaaagatctggaattcgaagttggtgatcatgtattcttgagagtcacttcatggac

SEQ ID NO: 5682 - DNA, 385 bp, Glycine max
  unsure at all n locations
cactctgaaactcagctattcagatgctactgacaaaggcagtggttttggttttttcagcggnccattctgctgccccaggataacaagggctaatagctacaacagtaggactaacatgcttaacagtaaacagaacacagccaggtgatgttggagcacaagagaaggccacaatctggtatgtcatctcacatcttggcagtttgatcagctcccgagtaaagggataaagaagaatactcggtgagttctgggccggtatagcaataaccaaccatcttttgtataacaaactctagatccattcaactctggcgactcgaaggtgagtgtcttatgctgcacagggtcatagaattcataacaggcaccgaattttgga

SEQ ID NO: 5683 - DNA, 375 bp, Glycine max
  unsure at all n locations
agcttaagctccttcaactgtacaaggctcttattatttgaagagtatccttgnggaaccttcacccgacaaagacactgacaaaaacttatcttctcctttttggacaaagtatgacaagctgggggcgaataaattttcttcccatctgaccttggatgcaactgtgatcatatgcccatctcagctagatcatgacgggtattcgagccatccttcgtcttgccttgaatgttaacgagcgtaccaatgacactgtcacatacatttttctccacatgcataacatcaatacaatgtctaacgtctagatgataccagtgcggaagatcaaagacaatggacttcttcttccatatgcaagtcgtactttta

SEQ ID NO: 5684 - DNA, 285 bp, Glycine max
  unsure at all n locations
attgttcaatttcgagcgtctcttatatnacgcgcctgaatcggacgtccgagngaaaagttatgaccatttgaattcctcaagagcttccattgttcaatttcgcgcgtctcgatatattatgcgcctgaatcggacctccgagtgaaaagttatgaccatttaaattgctcaagaggttccattgttcaatttcgagcgtctcgatatattatgcacctgaatcggacctccgagtggaaggttatgaccatttgaattgcttaagagcttacattgttcaat

SEQ ID NO: 5685 - DNA, 387 bp, Glycine max
tctcctcattgtagcattatttactttcggctctttagcattctcaataaattggctccgatagcccatagaaactatacaacccaatgcaattgctctggcctctagcaattcgctatttgcactcctcctaattatatatatcccgtaatttctatcactattcattattttattttatatttaattacatgttttaatatatcaagagagagaatgataatttattaaattaaaaatatttttagtgatgttatgttaaatagactacataatattacattttttcatcataagagatgaaggataatataatatttgtatctttcacagataaaacaagtgtaatttattttgtttactataaaagaatatagtatgactact

SEQ ID NO: 5686 - DNA, 381 bp, Glycine max
  unsure at all n locations
agcttatcattgataaaagtttatgatttactatttgatactattagggggttgntcgaagaacctgcccataatntaagattccagcagaagggttaatctctaagtttccatagggaaagatggatccttgtgaaaacttatctccctctgcacatttcatgacatacatgtaatctgttggaactagactaaatccaagctcatcccaattaatgtcagcatagntttccccagcagtactgattttcagacaaaagagggtaatcaaagttcagattcanaatcaccaataaaaccaagttcatacattattatctactagtacaataacattgtcgtactcatcaaaaattaaataccataacattttcgtattca

SEQ ID NO: 5687 - DNA, 437 bp, Glycine max
agcttgctgatacaattattaggggattgtttaagtactggcttataacaaatagtccaaaggaggttatgttcctgggtgagttggaagaagtcttggaagcaactcaacccccagaatttcagcgttgtatggagccattgtttcgtcgcattgcacgttgtttgaatagccctcattttcaggtttgaatttttcaatactttcctctggctccttttctgtttctcctcttatttcatgatgaaaatacacctgaatttcaaattaattctctctggcaacttccttcatactgattacctgaatcctatatctcaattcacttcctctagttgataagttggtttaattagcaagaaaaggactaacctttttgcatcatcctatagctaaatgcatattggcttatggctttgaagtgacataatatcaat

SEQ ID NO: 5688 - DNA, 411 bp, Glycine max
agcttgaaggtaaactagatgccttggttattctggttatcccaactggccatgaatcaaaaatctgcacctatcaccagactctgaggtttatgctcctttgccgaccaccacacagacctttgcccttttgggcaacaatctgaagcaattgaacagcctgaagcttatgttgcaaacatctacaacagacctcctcaacctcaacagcaaaatcagccacaacagaataactatgacctttccagcaacaggtacaatcccggatggaggaatcatcccaaccttatatggtcgaatccttcacaacagcagcagcaacaacaatagacttattctcaaaatgctgctggcccaagcagaccatacattccttcaccaatccagcatcaacaacaacaacaacaaccc

SEQ ID NO: 5689 - DNA, 447 bp, Glycine max
agcttccatcaactgcagctgcccaaacttttctagtattcaattacaacatattataatcgattacagaggcttgttctatggtaatcgattacagggagtagtaatcgattaccagaccctaaaacatggatttttcattaaaactaactatttttcacccacaaaaacatacacatttagtataaataatgaaaatatacaataataaaaaaacaagtatcaaaagcaatcaataatcatcataactctcaaacacattcatcaaagacaatccaaatttcaagatcaaacaacaattaacaatcatcataactctcaaacacattcatcaaagcaatcaaaatttcaagaacaaacaacaatcaacaatcatcataactatcaaacataattatcaaagacaatcgaaactcaagcgaaaacaatcattaaacctcaatcaac

SEQ ID NO: 5690 - DNA, 399 bp, Glycine max
agcttggttatctccttcttcactacatcattattcaccgggttgagtcttctttgtggctgtcttactggtttagctccatcctctaaatttattcgatgcatacatgtggatgggctaataccaggaatgtccgccagggtccagcctatagccttcttatgcttcttgagaactgacaacaacttctcctcttgctcatcagcaagggaggcagatataatcactggaaaactcttgctatcatccaagtaagcatattttaaatttgatggcagaggcttcaattctggtgtggtcggctggacagtggttgaaggagatggtttctcagcctttacctcataaagaaagtcagaggtatgtgtacttcctgaaacattggtagtcctatctgac

SEQ ID NO: 5691 - DNA, 393 bp, Glycine max
  unsure at all n locations
ngccgccacggagttttcctactatgctcttgtgtggtggttcaagctacaatttgagagagcaagaaatgaagagccaatggttgatacatggacggagatgaaaaagatcatgaggaagcggtatgtgccggctagttactcaagggacttgaaattcaagctccaaaaactaacccaaggcaacaagggggttgaggagtatttcaaggaaatggatgtgctcatgattcaagcaaatattgaagaagatgaggaggtaactatggctcgatttcttaatggtttgactaatgatatccgtgatattgttgagctgcaggagtttgttgaaatggatgaattgcttcacaaagcaatccaagtggagcaacaattaaaaaggaagggagt

SEQ ID NO: 5692 - DNA, 345 bp, Glycine max
  unsure at all n locations
atagaagactccaagaagaatgggtcagagatgcaagagaaggccctatggttctcatgagccttagggtagatttcgggcccatgggctaagtatgagcctgcttatctttgtacatattatattaaggtttcattattttttggccatgtatttagggctccataatatagataagataccctagaaatgtaggatttttcagcccttgtattntanggcacctcaactagattttgtattaagggtagttntttaatttcacatgcattaagtgattatttgatgtgntgtggtggaaaataaattaaatgaattgggagaagtccaatccaattaaatttt

SEQ ID NO: 5693 - DNA, 391 bp, Glycine max
agcttgaaggtaaactagatgccttggttattctggtaacccagctggccttgaatcagaaatttgtacctgtcgcaagagtctgtggtttatgctcccctaccgaccaccatacagacctttgcccttctatgtagcaacctggagcaattgagcagcctgaagcttatgctgcaaacatttacaatagacctcctcaacctcagcagcagaatcaggcacaacacaacaattatgacaactccagcaacaggtacaatcccaggtggaggaatcatcccaaccttatgtggtcgagtccttcacaacagcagcagtagcaacaacgacaaccttatgttcagagatgtgctggcccaagcagaccatgcgttcctccaccaatccagca

SEQ ID NO: 5694 - DNA, 384 bp, Glycine max
  unsure at all n locations
ntgatgcaacattnggagaggttaatgtttcaacaagatgttgcgctccatgagaggttggatcaaatggagaatagagatcataatgaagaagaaaggaggagaagagggaatgatggtgttcctagacaaaaccgaattgatggtattaaactcaacattcctccatttaaaggaaagaatgatccggaggcctacttggagtgggagatganaatagagcatgttntctcatgcaacaactatgaggaggaccagaaggtgaagcttgccgccacggagttttccgactatgctcttgtgtggtggaacaagctacaaaaggagagagcaagaaatgaagagccaatggttgatacatggacagagatgaaaaagatcatg

SEQ ID NO: 5695 - DNA, 343 bp, Glycine max
agcttgacaaggagccataccaatacaggcctggtagcttttgtccgaagcaaactcaagcaatggcgaacaatccatccagctaccttgttgctctataatacacgcccgaagtagatcctctagagtctgaatagttcgctcagtctgaccatctgtttgaggatgataagctgaactaagcttcagctttgtccccaaggcttcatgtagacttgtccaaaatcgcgaagtgaaccttggatccctgtcagatacaatactagaaggaattccatgcaaccttactacttccttgatatacaactccactaactgttccattctatacctcatattcact

SEQ ID NO: 5696 - DNA, 341 bp, Glycine max
  unsure at all n locations
tctacattcaatttcgagcttttcgattattacgggacttaatcggacatccgagtaaaaagttattgtagtttgaatttgctcanggcttcggtattccatttcgagcgtctcgatatattacgggactcaatcggacatccgagtaaaaagctattgtcgtgtgaatattctcagagcttctgaattccatttcgagcatctcgatatattacgggactcaatcagacatccgagtagaaagttattgtcgtttgaatttgctcacagcttcagtattccatttcgagcgtctcgatgtattacgggactcaatcagacatccgagtaaaaagttattg

SEQ ID NO: 5697 - DNA, 350 bp, Glycine max
  unsure at all n locations
tagctatatgcaagtcaatttcatgatgcttctcggagaggatcttcttcggacatatttgcgcaaaatctctagaactacgaagaagttgtccatcatctttttgctcttaatgaaagcagcttgactgtccctaattatcgtctcaagcactgtggctatgtggttagccagaatnttaaatacaatcctgtataacaaattaccgcctgatattggtctaaaatggttaacctgtgaggcctgatcatgcttaagaataagcccactaatagcatggttgaactgctttataatttatccagttgtaaacatttcattaaccgctgcatagatattaccaccaatga

SEQ ID NO: 5698 - DNA, 380 bp, Glycine max
  unsure at all n locations
tgttgctcgatatctntagctctttgagtccnctngagaattgngttnctcttcttcttcttcttcttatatgggatccctctagccttttgctgacacttcttgacctcacgcaggtacacccgaatggctcctcctccaaagggattagtctctggcgatccgccatgctcctcatangcagcgcgaaaccggcctatgagggcatcgaggctaccccatgcttgcctgagagggcangcacanggtgcangaggggtgggctggccaaagaagatgcaaccgtgcaagtggaccttggttttccaaattgatcgaggtaccgaaggaaatccaacacatggttgaagttgcactgagagagtggaactgggggactc

SEQ ID NO: 5699 - DNA, 429 bp, Glycine max
  unsure at all n locations
ntaagcaaattcaaatgacaataactnttgactcggatgttctattgagtcatttaataattcttgacgctaganattgaatacagaagctctcaccaaatttaaatgacaataactttttactcagaagtctgattgtgtcccgtaatatatctagatgctcaaaattgaaaacagaagctctgagcaaattcaaacgacaatagctnttgactcggatatccgattgagtcatttaataattcgagacgctcaaaattgaatacagaagctctaagcaaattcaaatgacaataacttttgactcgaatgtccgattgagtcantttataanttgagacgctcanaattgaatgcaggagctctcaccaaatttaaatgacaataaacttttactcagaagtctaattgtgtcctgtaatttatcta

SEQ ID NO: 5700 - DNA, 318 bp, Glycine max
  unsure at all n locations
tacaatcaagtggacataaagtcgattcctcctgaggaggtttggtattgtctcaacacggatggagctttcaaagggcaaggaggtattactggttgtggtgggctttttaggaatataaatgggaagtggatttggggtttttccagaaacttanggaaagaaagtgtctttgttgcgagctgtggggttntttttttcaaaggcctcaagttgttcttcataaagggattgataaggttactattcaagtagattctaaagttgttgttaaagctataaatggcgacaaagtggggaattttngttggtggatat

SEQ ID NO: 5701 - DNA, 444 bp, Glycine max
  unsure at all n locations
tgannatgaacaacggattctctcgaganaatctagtggttataaattntcacacagatgtccgattcggggaaataatatatcgagacgcacgaaattgaacaacggaagctctcgagaaatttgaatggtcataacatttcactcggatgttcgatccggggacataatttatcgagacgctcgaaattgaacaaccgaagctctcgacaaattagaatggtcgtaacttttcacgcgaatgttcgattcggggacataactcatctagacgctcgaaattgaacaacggaagctctcgagaaatttgaatggtcataagttttcacacggatgtccgattcgggaacataatatatcaagacgatcganatngaacaacggaagctctcgagaaaatcgaatggtcataacgtttcacacagatgntccgatcggggacat

SEQ ID NO: 5702 - DNA, 455 bp, Glycine max
  unsure at all n locations
ttccttttcaggtccattgactaataaaccagtattagtaaacttgtttctggagggtttccacgtttaccagtggcccacacttcatctccaatagcatctactaatgcttcacctcccctggttgcttcacccaggataagtgagcttcatgaacttcctagacctcctggtaatcaatctagcaagccacgagcgggtcactctgctccattagtattaaaaaatccaaaagctgccatgactaataaatttccttcagttgtatttagtgcagcatctccactctcaactccacctgtctctcggagtttctctataccttctagtggtcagagagttgtggcattaaatgtctcttatactaacgtattggatactcnccaagattcaaaggttgaataagacgtgtcaacctcactaacacccatgtcgcagagagcatctaatatatc

SEQ ID NO: 5703 - DNA, 449 bp, Glycine max
  unsure at all n locations
gttcttcctcaaaactgtcctaagcaaagttcccaaagtcctattaacaacttccgtttgcccatcggtttgtgggtgacaagtggttgaaaataacaatttattgcccaacttgctccacaaagtcctccaaaaatggcttaggaacttagagtccctatcactaacaatgctccttggcaaaccatggagtctcacaatctccttgaaaaacaaatcaaccacatgggaagcatcatcaactntcttacatggaataaaatgagccattttagaaaacctatcaacaaccacaaaaatggaatctctaccattgcttgtttttggcagccncacaacaaaatccatggataaatcaatccaaggatactccggaattggcaatggagtatacaatccatgaggctctaccttagacttttgccttttacatacaatgcaatgttcac

SEQ ID NO: 5704 - DNA, 435 bp, Glycine max
  unsure at all n locations
agcttcacaaagagaatcatctagatataacatacttggaagatctcttacgaggctatgcttttcaagctttaagattaacctcaagctagcatgaccaagcttctcatgccatgcccaatgatgctctntgactgagagtaagcatgacacttttttactggatagatcaccaagtttaatcttatagagatttccttgtctcttagcagagaagagtgaagacctatccttgtgttggactatacacatatccttaataaaggtgacattatatccactatcacataattaacttatgcttagtagattatgcttcaatcctttaacaagcaacacattttcaatatgaggatagagagggatacaaatcttactgacactagttattcaaatcttttgattccctccaaaagtgatcgccccatcagacat

SEQ ID NO: 5705 - DNA, 445 bp, Glycine max
agcttcctatgctcattggagagtctgagattcttggaccttatctcaagtgggttcatgggattaattcctcatcaactaggaaacctctcagacctgcagcaccttagtgctggatacaattatgctcttcagatagacaaccttaattggatgtcaaggctatcttccttagagtaccttgatttgagtggttcagaccttcataaacaatggaactggcttcaagtacagagtgcacttccatctctttcataactacacttggagagctgtctaatcgataacttaggaccaccaaaatgaaaagccaactctacacatctccaagtgcttgatctttcaattaacagtctcaatcaccaaaaccattcatggctatttaatctcagcacaactctctgtcaacttgatttacacagtatcctttctcagggacagtgat

SEQ ID NO: 5706 - DNA, 488 bp, Glycine max
  unsure at all n locations
agcttgtgcatncaataccctgatgaggatgttccatatgctcttaaaactggactgatctcattgctttcaaagtttcatggccttgcaggtgaagacccacacaagcatctgaaagaattccatattgtctgctccaccatgaaaccaccacatgtccaggaggatcacatatttctgaaggtctttcctcattctttagagggagtggcaaatgactggctatattaccttgctccaaggtccatcacgagctgngatgacctcaagagagtattcttagaaaaacaatctccctgcttccaagaccacagccatcagaanagatatttcaggcattagacaactcatgtgagagagcctatatgaatactgtgagagatataaaaaattatgtgttagttgccctcaccaccagatttcatagcaacttctcctccaatatttgtatgaatgactcaccaacatggagagaagtatgatagatg

SEQ ID NO: 5707 - DNA, 442 bp, Glycine max
  unsure at all n locations
taaaggaagtggaagaattagtatgggcagaaatgtctcttcactgattggtaaatctgttccccaaatccctgaaaaatgtaaagatctaggtacattcagcataccttgtattatagggaacaataagtttgacaatgccatgctagatttaggagcttctgttagtgttatgcctctgtctatttttaattctctatctcttggtcccttgcagtcaactgatgtggtaattcatttagctaatagaagtgttgtatatcctgctggtttcatagaggatgtcttagttagagttcgtgaactgattttccctgttgatttttatattttgaatatggaggagggattctctaaaggctcagttcccatcattctatgcagaccttttatgaaaatngctagaactaagatagatgtatatgcacgcacactatctatg

SEQ ID NO: 5708 - DNA, 485 bp, Glycine max
  unsure at all n locations
agcttattgcatgagctatatcaggttgagtacatgccatagcatacattattgaacctataatgttagcatatgtgatactctccatataagtatactcttcagctctctttggggattgacttacacttagtttgaattgatcatatataggtgtcacaataggccaacttcgaatttgacattccaaacctttcaataaatttattgaggtatgtctcttgagatagatacaaaatcttcttctttctatcccttttgatttccattcccaatattctccttgttgtcccaagtccttcatttcaaattccctttntaactcanctttgaccttggtaatttcggccttaccgntacttggtattaacatgtcatcaacatatagcagtaggattacaaaggtacctttattccttttgaatagccattttcaattgactacccttgaaccaatgggctttttgataaactcccatgtattt

SEQ ID NO: 5709 - DNA, 444 bp, Glycine max
taatgtgagttgagagatcaacacggcgtgttctacaccttacaaacgtgattcaacaatcccattgtatgagagtctttctcgatctttctatagctaactgggtgtaggtaggattatattattaaaatataattctatttttgtattatgtatagaaacttacactttaaaaacaagaacgagaatatcatatttatttgaccaatgattaaatattcattcaacttatttattatttttaaattaagtatacgattgcattaaataattagttagtttgttacttcgcgaaaataaaatacaaaaattcacaattaactataagtttcccctactatgtatcattgacacaatttcaaagttccaatttcaaatggatgaatcattaatcattatcaatgatgtattatatgggaagtagactacttcaagtcgttttaa

SEQ ID NO: 5710 - DNA, 424 bp, Glycine max
  unsure at all n locations
agcttctgtnttcaattatgagcgtctagatatattacgggtatcaatcggacatccgagcaaaaagttattgtcatttgaattctgtgtattcattttttagcatcaagaattattaaatgactcaatcggacatccgagtaaaaagttattgtcgtttgaatttgctgacagcttttgtattcaatttcgagagtctcgaattattaaatgactcaatcggacatccgagtaaaaagttattgtcatttgaattttcttagagcttttgatttcaatttcgagcatctagaattattaaaggactcaatcggacatccgagtaaatagttatggtcattttgaattgcttagagttactgttctcaatttcgtgcgtctcgatatactataggactcaatcggactttacagtaaaaagtta

SEQ ID NO: 5711 - DNA, 488 bp, Glycine max
  unsure at all n locations
catgcaagctngaaggcatgtaacccaccatcttgtcatagtagaacactagtaatgtgtccactatcattgttatcatttccctctccatcngtgggggtgctacttaagctgccagatccctccacctttggacgtattctttgaaagattcatgctcccttttgcacatgttctactactccattctatccggagccatatcagaattgtactaatactgcctaatgaaggcaaccattaggtctttccaagaacggacctgagaaggttccatattattataccaggggatggctaccccagtaagactttcctggaagaaatgcatcaacaatttttcgtctttcgcgtatgcccccattttcctacagtacatgttcaggtgattcttgnggtaagtagttcccttgtacttatcgaaatccagcaccttaaactntggagaaatgaccacgtcaggcactatgcacaactctgccatgtca

SEQ ID NO: 5712 - DNA, 443 bp, Glycine max
  unsure at all n locations
cttctcatttatgcataacatacaagttcgtattttaattntatgtttagtaacaagactaaacttcataataatatgaaagataaattttttatttaatacttgttagtatatattgaaaagaaaactgttgaaattagtaatttttgattatttttgcaacatataagaaaggtgttatgtgtgctttctttagtgatacgatgttacgtgttttaatagactaataatgtaatgtaacattgaaacatcaaattataaatattttgtataaaaattaatggtatatttttgttggatgtatttattcagcacaaaaatttattggatgtgttttaatttttgtgaatggccctccctgtcttctcagtctagggtgcccttgcaagacatcattatccaatggccgttttaacatgtcttaatttaattatttcttataa

SEQ ID NO: 5713 - DNA, 374 bp, Glycine max
  unsure at all n locations
agcttgtgcattcaatatcctgttgagggtgttccatatgttcttaagactggactaatacatttgctgcccaagtttcatggtcttgcaggtgaagatcctcttaagcatcttaaggatttccatattgtttgttccaccatgaagcccccagatgtccaggaagatcatatctttctaaaggcttttcctcattctctggagggagtgtcaaaagattggctatactaccttgctcccaggtccatttttagctgggataaccttaagagggtgttcttggagaaattcttccctacatctaagaccactgccatcagaaaagacatttcaggcatctggcaacttantggagaaagcttgtatgagtaatg

SEQ ID NO: 5714 - DNA, 456 bp, Glycine max
  unsure at all n locations
agcttatggtgtgttgatggtgcaatattattgtgttcaacgaatcttagcttcatttaatataattagacaatgtttcatttaaataaaattttatttttattctattctactattgtgaatttatttttcattaatgttctcactcacggaaaatatattatgacaatttgatgtgaaagtgaaactagtttgtcaagtttagtcacagttaatattgtggagctttgtagaattatattaggtaaaccactagcatatatgatacatgatattgtggcatgtatattttatatattntgacaagtaaaaagtacacaattgcttcccctaatttctattcctcanattataccctccattttcatgaaattcaaacaaggtgtattatagtatagttntaccgtactatcttctgttattnttatactntgtacaacaatagttagtacgtta

SEQ ID NO: 5715 - DNA, 469 bp, Glycine max
  unsure at all n locations
tatctcttcccattagtaataagattatttcttttcctttttctcttgttcatactgatgtatggcgtcctgctaatgtccttaatatctcatgtgctaaatggtttttaaccttcatagatgattgtactcgagcaacttatgttttcttattaaaataaaaatctgaagtcagctttgtttttattcagtttgtgtcaatgattanaaaccaatttggagtcaatattaaaagaattangtctgacaatgccagggactactttaatcttgtgctaaaatcttnttgtcaaaaggaaggaataatccatgagtctttaagtgttaacacaccccaacaaaatgggattgcagcaaggaaaaatgggcacttattaaaccaaactagagccttgctttctaaaantatatccctaanaaantatggngggaagccctcctttactgcacctacctaatcaatatatta

SEQ ID NO: 5716 - DNA, 484 bp, Glycine max
  unsure at all n locations
aagccttattcgttccctcatgaatatccatcactactaaaataaaaaagaattttttaaaatggtccaaaacaatatttaacgacggttgttgaccgtcgtagtacatatattgtaaaaagtgttaattttcaacgacggataagaaaataccctcttaaaaaattgacaactttcaacgacggataagaagatattgacttagaaaactgacaactttctaagacgatgtttacttagaaagacaacttatttttaattattgatattttttttaacaatatcccatcataaaaaatatgaataattaaaaataatctttattaccataactttaattaatattatcataatattaattaaaatcatgacaataaattaattaataattaaaaatgtatgatcataagtcttttggaaggtagtcaagagtaatatgtatccaacatacattaattaaaanatgaacctccatctaatacag

SEQ ID NO: 5717 - DNA, 428 bp, Glycine max
  unsure at all n locations
agaatcaattcatgtttcctttgatgagtctaatgttatttatccaagataggatattttagatgatattatagaatctttagaacaaatgcacattcatggacaagattctaaaggaaaagaagaaggaagcaataaagatcctccagtagaagtcaaagcaaataatgatcttccaagagagtggaaagcttaagagatcatccccttgacaacatntttggtgacatctcaaaaggggtaacaactagacattctcttaaagatttatgcaataatatggcttttgtgtctatgggtgaacctaaaagtataaataaagccataatatattatcattggatagttgctatgcaagaaaaactaaatcagtttgagagaaacaatgtgtgggaactattataacaacctgaatactaccccatcat

SEQ ID NO: 5718 - DNA, 439 bp, Glycine max
  unsure at all n locations
catgcaagcttgacatgctattgaacaagcagntatatactctgcttcacaagtagagagtgcaacaacatcctgtttcttagagcaccaggagatgggagcacctccaaacaataaaacatgccccattatgctttttctgtcaagaacatctccaccacagtctgagtctgaataagccacaagttgtggctcaaccttctctttctaatgtggaaatagaacaccaaagtctagtgtgctctcaagtatctcagtatccttttagctaccatcatatgtgaatgtcttggatcactcataaacctactgataactcccacattgaaagtgatttctggtctggaatgacaaatgaatctgagactcccaacaatttgcctatacaaggtacaatccactacagggtcagcttcacatttacccaattngcaactca

SEQ ID NO: 5719 - DNA, 466 bp, Glycine max
  unsure at all n locations
agcttctggttagtattgattctcggcgtattcctttaacaccttcaagtaccgcttaactggatacatccaccgtaaaaagaagaacaggaccacatatccggatctccctgactagatgaacaattaagtgatccattatgtcccacaatgatggtggacaatacatctccaattgacaaaggacagtgacaacctcattctccaaatcatctaatagtcaaggggcaatgactgtgntacagatagcattaaaaagaaagcacataccagttatggcaagcctaactttgtcaggcaggataccccgcatcgctaccactcaatattattgcattaacacgtggctatcatgatatttcaagccaaccaacttcatatcattgagggctacaacgatcttgatattagaatagtatccttgtgggactctacactccatagacattgacaaaaactcatcttc

SEQ ID NO: 5720 - DNA, 353 bp, Glycine max
  unsure at all n locations
tgcacacaagatactccttacctaaatgcagttttaacatctaactgccccaagtgaagattctctgcagctaccatactcagaataactctgatggtagtaatctttaccactggagagaagatctctgtgaaatcaattccttgattctgttgaaaccctttcactacaagtctcaccttgtatgactttctacgcgtcagatgcttactttagcctatagacaccccctattttgtatcgctatcttttcttataccaatataattaaacaccacgtcttattcttcgtaagggatgtcatcacatctatcattgcttgctcccactcaatatacangttcccctgcatc

SEQ ID NO: 5721 - DNA, 469 bp, Glycine max
  unsure at all n locations
gtcacctgcggcatgcaagcttcatgatgatgaatcaagatggattcatgttgttttgatgggttcaaagatgatgacaaanatcccaagagaatgatttcaagattgagtcaagaataattcccaagagaatgatttcaagattgagtcaagaacaattcaagaatcaagagaaatttgatttcaataatcaagaatcaaggataatcaagatcaagattcaagaatcaagagaagactcaatcaatataagtactaaaaagtttttcaaaacattgagtagcacatgaagttttcacaaaatcttttaccaaagagtttttactctctggtaatcgattacagtaaactggtaatcgattaccaatggcaaagtttgttttcaaaagctntcaactgaatttacaatgttccaattaatttcaaaatggtgtaataaattacaagatattggtaatcgattaccagt

SEQ ID NO: 5722 - DNA, 484 bp, Glycine max
  unsure at all n locations
agctngctaacccatggaagctcctaatatctcccacactntntggggtgggccattcttggatggccttgattttctcagggtccacttggaccccatttctaccaactacaaaacctaagaaaactatattatctacacaaaaggtacacttctctatttttgcatagagggtgtttttcctaaggactgaaagaacttgtctgagatgtcctaagtgatcatctaggctcctactatacactaaaatatcatcaaaataaacaactacaaatctacctatgaaatcccttaagacatgatgcataagcctcataaaggtgcttggtgcattaatgagcccaaaaggcatcactagccattcatacaaaccaaacttggtcttgaaagcagtattccactcatcaccctttttcatcctgatttggtgataaccacttctaagatcatattttgaaaagatattggcaccatgcaactcatc

SEQ ID NO: 5723 - DNA, 487 bp, Glycine max
  unsure at all n locations
tgcaagctgtttggaactttggctcagaacttagctatgcaacaaattcggttcttccacagttgaaaaaatttacccgagatatagtatctagtgaaggagttccaagcagatctgtcatcagatccaattgatgaactacatttttcccaggaaaaagtggctttcctgttagtacttcagcaaagatgcaacctatactccatatatcaattgctggtgtatactgcatcaagatttaaaaaaagttagacctacagaaagtgaatatgaaaactggaaccattttaaagtgtcactttacaaccaaataaaattaaaaagttcagtatgaaactatgaactaattttagcagaagccaatacacacgcatgaatcgacatttatcacaacactacaacattntcccttgatgctccacaagaaatacagccccacatttacaacacttaatgagtgaattcaatcttaactaccctatagact

SEQ ID NO: 5724 - DNA, 431 bp, Glycine max
  unsure at all n locations
agcttcaagattctttgaccctaccagtcatcttttatattaataaaattatttgctaatagttatatatttatctaacactatacaatattgattatatcattgaaataccatacgtaaaatcataatatctatgttaatggatcaatttttattgcatagaaattatattaatgaaacacgtttaactatcaatagttttttaacatgtgactgttaagttnaaatagatanaattctatngcaagggtgtccatgttgaaagaaggtctcatcatataaggtaaactaggtttaaaaattatattagatactaatacacgatgatatatatatatataatagaattatggcngatgacttacttatatttttcnntgattacccaatacaccaataaacactaattaataaacaatatgaaatatata

SEQ ID NO: 5725 - DNA, 446 bp, Glycine max
  unsure at all n locations
agcttgagcttagctacacatacctctctaatagctaagctcacctccttgagatgagaagctagagcttagctacacaccccctataatagctaagctcacccncatgacaaanaaacatgaaaatacaaaaaaaaagtccttactacaaagactactcaaaatgccctgaaatacaaggctaaaaccctatactactagaatggccaaaatacaaggcccggatgaaggaaatacttattctaatatttacaaagataagcgggctcatacttagcccatgggctcgaaatctaccctaaggctcatgagaaccctagggccttcccttggatctctagccctagcgctgttcgcctatcctccaccctcaactcttattcagagacccatgaatngattgcctagcgctgtttatgtgtcctccaccatcgagtctggaaccc

SEQ ID NO: 5726 - DNA, 431 bp, Glycine max
  unsure at all n locations
agcttgttcagaatggttnggaagtgtccaaacatggttnggatatcttctccctctttcatactaaagagttcatactaacttgttagaaggctcaacttgttacattttacctaagaggacccttcataggtaatggctaaggtgtaccacatctgtttagcacttttgaagttgtgaactttggaatattcttcttgagatagagcacacaacagagcatttcttgcacgagagttgaaaagaaatatggacatatgttgattcgtccactgtccctaggtatctcgntcttatgagcgtctaaaggaatttgattacctttctctacaacgtcccacatattgatgtgagtggattcaaagaaggcaatcattctttccttccagttgtcgtagttggctcccttgaacataagagacttgttcaca

SEQ ID NO: 5727 - DNA, 443 bp, Glycine max
  unsure at all n locations
ggcttctacataaagagctttgaaatctgaagtttagttttcaaatgatcaaagttgaaaaaaatgcacacacatgacctctatttatagcctaagtgtcacacaaaattggagggaaacttgaatttctattcaaatttcacttgaatttgaaattgaatttgtggagccagccaaaattcactaattatgattagtgaattttagctatggttcagcccactaatccaagatcaagtccaagattctccactaagtgtgcttaggtatcatgaagcatgcaaagcatgaaggacatgcacaaagtgcgactatatgatgtggcatggaggtgtagcaagtaaatgttcacctccctctctaaaatttaantggattgggcttctcaattcaaattaaattatttctcaacacacacatcaaatatttcacttatacatgtg

SEQ ID NO: 5728 - DNA, 430 bp, Glycine max
  unsure at all n locations
tcgagaagaatggcctcagcaaattccttatttccagaaggaaattctatcaatagaccaccaatctctaatggagagggttaccactactggaaaacccgaatgcaaatctttattgaggcaatagacttaagtatttgggaagccatagaaatagggccatatatacccaccacagtagaaagaattacaaaagatggtagcacatcaagtgaaagcataacaatagaaaaacctagagatagatggtctgaagaggatagaaaacgagttcaatacaatctaaaagccaataacataataacatctgccctgggaatggatgaatatatcanggtttcaaattgtaagagtgctaaagaaatgtgggacactctacagtttacacatgaaggaactacagatgttcatagatctaggataaacacac

SEQ ID NO: 5729 - DNA, 442 bp, Glycine max
  unsure at all n locations
catgcaagcttccatcaataatgtttcactcagaagtccgattcagtcgcataatatatcgagacgctcaaaattcaacaacggaagctctcgagaattcaagtggtcataacttttcacatagatgtccgattcaaggacataatatatcaatacactcgaaattgaataatggaagctctcgagaattcaagtggtcatcactnttatctcagaagtccgattaaggcgcataacatatcgagattctcgaaattgaacaatggaagttctcaagatattcaaatggtcataacttttcagttcgatgtccgattaaggcgcataatatatctagacgctctatattgaacaacggaagctctctagatattcaaatggtcataacttttcactcagaagttcgattaaggcgcataatatatcgagacactaaaaattg

SEQ ID NO: 5730 - DNA, 464 bp, Glycine max
  unsure at all n locations
agcttcttggatgtttaatggatcctcctctattgtataggccatataatcgggcccataatctgtagcaattcttgctctcttacctcttcgaggctctatatctgattctggttgtgcaagattttcattactaatagcaggaagatgactagatgaagtacccgcactattccttaatttaaaagataatcagaaaccagattctttctcatctctggagtatgcatcacatctttgagaatcaaagtctttccagaggtaaacttcagttcaacatctccagttccancacccgtnntggtgtgagaatctccaagcaacactttcttattttcaacatttgtgtatgttgtaatcatagcacgatcatagtagacatggcgagaggcgccagtgtctacccaccatacatctgatcctgcaatgatattaatcttagttatcacaacaatgggtgactc

SEQ ID NO: 5731 - DNA, 365 bp, Glycine max
  unsure at all n locations
atactaggctngagctcggcttgagttgaatacgtaaggcttaagcttgactcattacctgtcataagctttttttataggcttggctcgacttacataaaagtctgatttggcccatgagcttatttaaaagcttgcttaaagacgtccttgattaattaatcattttaaaatctagtgaaatactaactaaaaaaaacttataaaatttcgtataagtaatgtacaaatccaataataattgataaacaaaatcatattgaattcaagtctgtcaagcacacagtctatcaaaagacaatttaaagagcatgatcttaaaaaatgtatggattatgtgctcagccccaaagcttacaaatcta

SEQ ID NO: 5732 - DNA, 429 bp, Glycine max
  unsure at all n locations
agcttcaagaatcaagatcaagattcaagaatcaagacaagacttaatcaagatgagtatgaaaaggttntttcaaaaattgagtagcacatggatttttctcanaatatgtttaccaaagagtttttactctctggtaatcgattaccagattgttgtaatcgattaccagtagcaaaatgaatttgaaaaagttttcaaatgaatttacaacgttccaattgatttcaaaaaatatgtaatcgattacaatgttttggtaatcgattaccagtgcctttgaacgttgaaattcaaattcaaatgtgaagagtcacatcctttcacataaaagctttgtgtaatcgattacacntgattggtaatcgattaccagtgattggttatgaataaaccanaatatgtaactcttcaaatnggttttgactt

SEQ ID NO: 5733 - DNA, 463 bp, Glycine max
  unsure at all n locations
agcttctggtgggacatcttgactngctntccaatctgacattcaccacagattctgccttcttctattntcagattgnggatgcctctaacagcacctttgtcaatgattntcttcatgcctctcaagtgcagatgtccaaatctttgatgccatattctgacttcatcttctttggaggatagacatgtggaggagtagctggtttcttgaggtgtccataggtaacaattggcctttgatctgctgcccttcattagaacttcactcttctcatttgtcaccaagcattctgactntgtgaagtttacattgaatccttcatcacacaactgactgatgctgatcaagtntgcagtcagtcccttcactatcagaactttgtccagactatgaagtccatcatggactagctttcctattccaatganttttcctttagagccatctccaaatgtcacat

SEQ ID NO: 5734 - DNA, 281 bp, Glycine max
  unsure at all n locations
tatgggttatgcaacagaactnagcttattgttacaagacttggttcatgtgtcgttgaagcagagattattactgggcccaacataggtcatagaacatacataccaagaatgaatctttctccttctgattcaccatggccattcaagcttattagaagacaatttccattcatggtcttatttgccatgacaattaacaaatctcaaggacagtcgatggcacaagttggattgttttgcccaccccagtattgtactactgcgagtatatgttgcgc

SEQ ID NO: 5735 - DNA, 468 bp, Glycine max
agcttaccattataggaagccatggataagatcttgaaggtaggagaagatgagtggagggagaatgagcacaaaattttgtgtctcatatgaagtctgaactttgaagtgtaattctcaaatgatcaaagttgaaaaaatgcacacacaaggtttctatttatagcctaagtgtcacacaaaattggaggaaaatttgaatttctattcaaatttcactttgaattgaatttgaattggtggagcagaatttggagccaaaatttcactaattataattagtaaattttagctatggttcagcccactaatccaagatcaagtccatctccactaagtgtccttaggtgtcatgagacacgtaaaacatgaaggacatacaagtgtgactatatgaagtgacaatatggtgtagcaagcaaatgctcacctcccccttaggatgatccaaaatttaattggattggg

SEQ ID NO: 5736 - DNA, 459 bp, Glycine max
  unsure at all n locations
agctngatgaatcatgtatcgtagttaggaacaaggctagattgattgctaaaggatacaaccaagaggaaggcattgactatgatgagacctatgcctttggtgcaaggttggaagctattangctattgcttgcttttggttgtattatgaatttcaggttatatcaaatggatgtgaaaagtgcttttctcaatggatacattgaagaagagatatatatagaccagcctccaagttttgtagactttgaacatcctaatcatgtttacaagttgaaaaagacactgtgtggtttaaaagaagcacctaaattttggtatgaaagataaagcaatttcttaattggacagtcttttgtaagaggtcaagttgacaaaacattgtttatcaagagatcatacaacgagttcttgctttgtgcaaattatgttaatgacaattnttggtgtctctgat

SEQ ID NO: 5737 - DNA, 457 bp, Glycine max
  unsure at all n locations
agctngaaggtttgtacatgaccaaatctttatttattcgtctgtacctaaagcagtctttgtattcgtttaaaatgcatgaagatagatcagtaggagaacaattggatttgtttaataaaatgattctagatcttgaaaatattgatgtcactattgatgatgaggatcaagctctgttattgttgtgctctttgcctaagagttactctcatttcaaagagactttattgtttggaagagatactgtttctcttgatgaagtgtaggctgctctgaattcaaaggaattgaatgaaagaaaggaaaagaagtcctctgcaagtggtgaagggctgacagccagaggcaagaccttcaagaaagatagtaaatttgataagaagaagcaaaagccagagcatcagaagaatggtgaaggaaacatcttcaaaatcagatgttatcactataaaaa

SEQ ID NO: 5738 - DNA, 373 bp, Glycine max
  unsure at all n locations
gcttgagccaattcaaacgacaataactttttactcggatgtctgattgagtcccgtcatatatcgagacgctcgaaattgaatgttgaagctctgagccaattcaggcgacaatatctttttactcggatgtctgattgagtcctgtaatatatcgagacgctcgaaattgaatgttgaacctctgagcaaattcaaacgacaataacttttttctcggatgtctgattgagtcctgtcatatatcgagacgctcgaaattgaatgttgaagctctgagccaattcaaacgacaataactttctactcggatgtctgattgagtcctgtcatatatcgagacgctcnaaattgaatggtgaagctctgagcc

SEQ ID NO: 5739 - DNA, 316 bp, Glycine max
cgaaggcaaactggatgcattggttaacttggtaacccaactggccttgaacaagacatctgtacctgttgcaagggtctgtggtttgtgctcctctgctgaccaccatacagacctttgcccttccatgcagcaacctggagcaattgagcagcccaaagcttatgctgctaatatttacaatagacctcctcaacctcagcagcaaaatcaaccacagccaaacaattatgacctctccagcaacatatacaaccctggatggaggaatcaccctaatctcagatggtctagccctcagcaaacacaacagcag

SEQ ID NO: 5740 - DNA, 341 bp, Glycine max
  unsure at all n locations
nttgcaagagttatgactactataggaggcatgtttttctcttttcattnctttcattaggttgtcttctttcgtcctctcttattttctttctttcatcttgacttatttcttccactcttttttttcccttttcttttctttcttgtttttctttccataacttgagggaactcaactcatctaagattctagataaagggtctttatgactagtacccttgccattaacactagatgaatgatgactcgtgttggttcctaagttgtggttctttcttgttggaggtttgaaaacaaaaggtaaaagaaactatggttgaaactagccaaataaacac

SEQ ID NO: 5741 - DNA, 322 bp, Glycine max
agcttccatcagctgtcttacttgtttagcctcaccctctaaatttatccgatgcatacatgtggatgggctaataccaccaatgtccaccagggtccaacctatagccttcttatgcttcttgagaactgataacaacttctcctcttgctcatcaacaagggaggcagatataattactggaaaacttttgttatcatccaagtaagcatattttaaatttgatggcaaaggcttcaattctggtgtgagcggttggatagtggtagaaagagatggtttctcagcctgtacctcataaagaaagtaagaggtatgtgta

SEQ ID NO: 5742 - DNA, 320 bp, Glycine max
agctttaaggtcaagagggctgtatgatgatacaacttgcctcgttgtagatattattccttcagatcatcccgtgttgccaacaattccaagaaagaaacgtaacgtgctaacttcccttctctttggaaagaaatctcaaaactctacaaacaaaggcaccaataagctttcttctgttggtgttgtggaggaattatttgaagagggttctgcaatgcttacagagaggtaactgggaccataactgctaaatttatatttgcatgatgtcatttgaagtttaatttgtcaccatcatggtggaaagagagaaaaaa

SEQ ID NO: 5743 - DNA, 328 bp, Glycine max
  unsure at all n locations
agcttcgaagtttaaatggggctattaggtcctaataatcngngacgggtagctgttcataagagttaggggtgatgaagaaagtctcgtacacaacagcagcaatagccgagccaattaatgggccggcccagtagacccagtggttagcccatgtcccgctaacaacagcaggtccaaaagaaactgctgggttcatggatgcaccactaaaggtaccacctgccaagatgttagcacccacaatgaaaccaattgcaattggagcaattatcccaagtttacccttctttgggtccactgcagtggcatacactgtgtaaaccaa

SEQ ID NO: 5744 - DNA, 325 bp, Glycine max
agcttgcccgatggattcctattcattacccattagaaatagactagtagatagggcagcaagaccctgcctacttagcttcttagatgcatactcagggtacaaccaaatacggatgcatccacaagatgaggagaaaacaaacttcataacctagtcgtctaactattgctatcagattatgccattcggcctaaaaaaggctagctccacttaccagcacctaatggacatgatattcaaagaacaaattggaaagaaaatggaggtatatgttgacaacatggtggtaaagtctaatgatgcagaatcacacacctatgat

SEQ ID NO: 5745 - DNA, 325 bp, Glycine max
agcttgaaaggatgcttcaatgttggaatataaagagggagagaaagagagaggggggagcacgaaattgaaggaataaaagagggagagaagtggaactttgatgaatgagagtgatgcaagctccattggagcttgtaggcctaggatcttcttcatcaatggattcctttgcttcttggaagataaatggcagcggaatggagaaggaagagagagaggagacgccacttcaaggagaagataagtctagaagaagctcaccaccataggaggccatggataaaaacttggaggaagaaggagatgaatgaagggaggggga

SEQ ID NO: 5746 - DNA, 329 bp, Glycine max
  unsure at all n locations
tgcttaacgtttatcctttcatagtagncattttttgcattccaatttatgatgagggaatcacgaacactctctgccgttgcaaagaaagccttattgagctcaaacttctctggagaaaaagggctggtgaactcggcatggaatttgatgcttgaagcaatagatgcagaatctggtacaaattcattgaaagtgtctgcaagtgttattaaagaaagaattattaattaggtccttatttactggaaaaataaaaacaatgttgagactgtatggctaataaatctcatattattagttcaataaaaacataaagatgggacaaa

SEQ ID NO: 5747 - DNA, 318 bp, Glycine max
agctttagatacatattaatattatagactactatttgtaatcaacagaaaagatcatttgtaaaacgcttttagttaattgcatttctcctaaagttttctaattgagccattttattcttttagatttcagttatattaattgggttcttcaaaaaaaaaaaagtctagatcatcatattctatatttttcttaaatgagataatttatggtgtccacttgaggagtgtcctctatccatctaatttgatactttcttccgcttatcgcttactcttaactgtgcatttaatttatctgctaaatataatataaat

SEQ ID NO: 5748 - DNA, 304 bp, Glycine max
ttcagcaaattttaacgacaataaatttttactttgatgtctgattaaggcccgtaatacatcgagacgctcgaaattgaatgttgaagctctcagcaaattcaaacgacaataactttttactctgatgtctgattgggtcccgtaatatatcgagacgctcgaaattgaatgttgaagctctcagtaaattcaaacgacaataactttttactcggatgtctgattaagtcccgtaatacatcgagacgctcgaaattgaatgttgaagctctcagcatattcaaacgacaataacttttta

SEQ ID NO: 5749 - DNA, 316 bp, Glycine max
agcttcagaattcaatttctagtgtctcaatagattacgggactcaatcagacatccgagcaaaacgttattgtcgtttggattagttcagagcttcagaattcaatttcgatcgtctcgatatattacgggtctcaatcagacatctgaggaaaaaagttattgtcgtttgaatttgctgagaccttcaacattcaattttgagcgtctcgatgtattacgggactttatcagacatccgagttaaaagttattgttatttgaatttactgagagcttcaacattcaatttcgagcgtctcgatattttacggga

SEQ ID NO: 5750 - DNA, 324 bp, Glycine max
tatgaaatccttaattgttctccatcttagcaacttttatctttctggaaccattccaaagaaaattggatcactgcaaaagcttgaagatttggatcttggagataaccagttgagtggaacaattccaatagaagtcgtggaattacccaagttacggaatttgaatttgagcaataataaaataaatggaagtgttccctttgagtttcgccaacctcttgaatctcttgatctaagtgggaatttgttgagtggaacaataccaacacagcttggagaggtgatgggactgaaattgttgaatctgtctcgcaataatct

SEQ ID NO: 5751 - DNA, 292 bp, Glycine max
tgagccactgcttcacattattgaagctctcttcatctgtcacatcataaacaatctgccagaggaaccagttagtaaagcatgcaaggatccatctacacgggaaatcaatatccaaaagcccatgccaagaaaatcatcacccacaatgatcccatgggccccacgatagtagctactggtgattgtcctaaatcgttcttgcccggctgtgtcccactacatataaaaacagatcacaaatcaaggtaagaaaactatatgtcaacacaatcatgacctttggtgatcc

SEQ ID NO: 5752 - DNA, 334 bp, Glycine max
gcatgcaagcttggaaagcatggaaaatgtctctggtattgagccatgcaaattgttcccctcgagagtgatgctgtgaaggcgtctgaggttggaaaattcaggtggaataatgccaaataagtgactgcgaacaatctcaaggtagtgcagtccagtgagattggaaagaacgggtgaaagcagccccactagacctttatcgtacaggattagtcgtgtgacacggttatggaatttgtcacatacaacacccgtgaagttgcacacatgaacagcttcatcccagttagcaagtgaggaatgcgggtctgatatgattgtttttctgaat

SEQ ID NO: 5753 - DNA, 343 bp, Glycine max
aatacttaagcttttgcaactagccttgccttgtatctttcaatttctcccttggttttcttctttgttttgtacacccacttaacaccaatagccttgtgcccttttggaagggagacgaattcccttgtgtcattcttctcgatggatctaatttcttcatgcatcgcatctcatcatttttatcttgcatagcttcttcaaagttcactggttcataatctgcaaagagacaaaatagtattatattatccaatctctcatttcaatcacaaagatcttggagggttcttgtgcgtgacacaaccctttcactctcaatagatggcaaagtgtcttcatg

SEQ ID NO: 5754 - DNA, 319 bp, Glycine max
ttgaagaaattcaaatggtcataacttttcactttgatctccaattcagacgcatcacatattgagacgcttgaaattgaacagcggaagctcttgagaaatgtaaatggtcataacttttaactcggatgtccgattcaggcgactcacatatagagacgcacgaaatttcaatggtcataacttttcacactaaggtccgattcaagcttataatatatcgagatactcgaaattaaacatcggaagctctcaagaaattcaattggtcataatttttcaaacggatgtccgattcgagcgcataatatgtcgagac

SEQ ID NO: 5755 - DNA, 322 bp, Glycine max
  unsure at all n locations
agcttgtagggttaaagncccactattattacgtgttcatgcaacaattgtcagccatggctatacgagacatcttgctaaacaaagtcaggttagccataactcgcctgtgctttttcttccatgctatattgtgccatttggagatgtattttccccctgctttctttgacatcatgattcacttgatcgtgcatctagtcagagaaatcaaatgttgtggtcctgtttatctacggtggatgtacccggttgagcaagacatgaagatcttaatagggtatacaaagaatatttatcgtccagaagcatctattgttga

SEQ ID NO: 5756 - DNA, 329 bp, Glycine max
  unsure at all n locations
agcttgagacatcatggntaatttgtcttctcctatgtngcacaccaagaagcgacagaagtaactatgtgtctctgcacttcctttccaccactccattctgatgatgggtatgtggacagatcaacctatgttgcacaccaagttctgcaagataattggtaaatggcctatactctcccccagtcagattgtacagctttaacaggtaaattgaattgagttttaactagagtatgaaactgtttaaacagatcaagagtttcagatttacttttcaacaaataaagccaagtaaatcgagtgtgagcatcaacagaggttacata

SEQ ID NO: 5757 - DNA, 327 bp, Glycine max
  unsure at all n locations
agcttgtcgcatctttaactaatgcggttttataaaatcgnccttgtggtagtgtcataaaatctcacttttgcagtagttccaattgcaatctatgtttcaattgaagatccttggcccttcgaaatattttcttagcttagaaatagctaaatccagcaaaggtatctcactctcctagagaaaatacactctatctcttttagaagatacaagtttcttggcatgcaaaccttccaatcttccaatggatcccaacttgaagctcaatcttcatgatggagacatactccttgatccctcagtgtataaaaggttaattggtaa

SEQ ID NO: 5758 - DNA, 263 bp, Glycine max
taacaccttcccccgcccaacagattgtgggtgacaagtggttaaaaataacaatttattgcccaacttgctccaaaaagtcctccaaaaatggcttaggaacttttagtccctatcactaacaaagctccttggcgtaccatggaatctcacaatctccttgaaaaacaaaccagccacatgggaaacatcatcaatttttttacatggaataaaatgagccattttagaaaacctttcaacaaccacaaaattggaaactc

SEQ ID NO: 5759 - DNA, 345 bp, Glycine max
ctttggctttgaggacttgctccaatggctcatcttttcttctattgaacctttcttcataggcttgaagagaacccatcaattggtctacggtcattgagtctaaatccttagactcttcaatagcacaaaccacataatcaaatttatcgattaaggagcgaaagatcttttccaccacacgaacatcttccatattttctccataacgcttcatttggttcacaatagccaacaccttgttgccaaaatctgagatagattcagattccttcatatgcaatgattcaaactctctacgtatagtttgtaggcgcaccttttttaccttatcaacaccttcaa

SEQ ID NO: 5760 - DNA, 315 bp, Glycine max
agcttgagacatcatggttaattcttctgctcctatgttgcacaccgggaagcaacagaagtaactatgtgtctctgcacttcctttccaccactccattctgatgatgggtatgtggacagatcaacctatgttgcacaccaagttctgcaagataattggtaaatggcctatactctcccccagtcagattgtacagctttaacaggtaaattgaattgagttttaactagagtatgaaactgtttaaacagatcaagagtttcagatttacttttcaacaaataaagccaagtaaatcgagtgtgagcatca

SEQ ID NO: 5761 - DNA, 314 bp, Glycine max
  unsure at all n locations
agcttgngcctctcttgtnttttattgaangnagcatatagatccgaagacccttaggtgctttgctgatggcttcttcccgttccaagcttcaattggagtcttgtcttttacagacttagttggacatctgttgagtatgtaaacagcagtgtagactgcttcagcccagaatgtgttaggtaatcccttctccttgagcattgatctagccatttccataactgtgcgattctttctctcgaacactccattttgttgaggagaatatgcgactgtaagttgtcgctcaatgccttcatcctcacaaaatt

SEQ ID NO: 5762 - DNA, 325 bp, Glycine max
  unsure at all n locations
agcttgtgcatccaataccctgttgaggtttgtcttatgtnccnaaaactggattgatgcatttgcttccaaagtttcatggccttgcaggtgaagacccgcacaaacatttgaaagaatttcacattgtctgctccaccatgaaacccccagatgtccaagaggatcacatatttctgaaggcttttcctcattcattagagggagtggcaaaggactggttgtattaccttgctccaaggtccatcacgagctgggatgaccttaagagagtattcttagaaaaaattttccctgcttccaggaccccagccatcaggaagga

SEQ ID NO: 5763 - DNA, 336 bp, Glycine max
  unsure at all n locations
agccgacctgcagcatgcaagcttggttctaatttgattttcattatatgacggnacccaaggggacgtgcgagtaacaattattgccatttgaatttgttacgaaattccgttttcaacttggagcaatttaatatattaggggactcaattggacatccgagtaaaaagttattgtcgtttgaatttggtacgagcttctattttcaatttggaatgtatcgatatattacgggactcaatcggacatccgtgtataaagttattgtcatttgaaaatgctcagagcttctgatctcaattttgagcgtgtcgatatattatgggactcaatcg

SEQ ID NO: 5764 - DNA, 331 bp, Glycine max
cccagcacgggttctatgcccgattctgctgttatctgagtccgaagcaagaagccgatgcaactgcatgatggagttaaccgccacggcttcgttcggattcacctgcagcatccacggcttcacgtcttcaaggcgccacgccgccacgccacgaaatgcaaacctaacattcacggaccgcgccagctcagcgagcctgagcccaatttcgcggagcgtgtcgcggttgtcggacgagggaagcccaattcccgtgagcctcaacagcggaggcccaccgggccgaagcgccagggcctgaatcagcgcgggccactggagcccctgc

SEQ ID NO: 5765 - DNA, 318 bp, Glycine max
acctcagtgtgaaaagttatgactatttgtatttttcgggagcgtccgatgtgcattttggagcgtctgtatatgtgatgcgcctgaataggacatccgagtgaaaagttatgaccattggaatttctcaagagctggcgatgttaaatttagagcgtctcgatataatataagcctgaatcggacatcagtgtgaaaacttatgaccattttaacttctggagagcttccggagagcattttgtagcgtctatatatgtgatgcgcatgaattggacatccgagttaagagttatgaccattggaatttatcaagag

SEQ ID NO: 5766 - DNA, 317 bp, Glycine max
agcttggtttcctccttcttcactacatcaagaatcactgggttgagtcttctttgtggctgtcttactggtttagccccatcctctaaatttatttgatgcatacatgtggatgggctaataccatgaatgtccgccagggtccagcctatagccttcttatgcttcttgagaactgataacagcctctcctcttgctcatcagcaagggaggcagatataattactggaaaactttttctatcatccaagtaagcatattttaaaattgatggtagaggcatcaattctggtgtggccggctggatagtggtaaa

SEQ ID NO: 5767 - DNA, 282 bp, Glycine max
gaaatcaatcttttcacatatctgcaaactcatcaagctccaaaggattggacatctcgtgcatttacctccttgtctttgctttgaccttctatgcaaactttccggccttcttctttttctccaaagctcgaatctataagaaccagctacctatgatgatacatagttagaaagtggaaagcttgggaaattataaatatatatcgaaaatatattggtaagtacctgattcggtgacacatagagtggattctcatataaagttgggcctccaaaact

SEQ ID NO: 5768 - DNA, 320 bp, Glycine max
agcttgcatttcctccatgaatttcttggtctcgaaacgtgcgatggtaccctagttgttcaccaaatttgctttggtcattccaatgtcacggtcaataatggaaagagtcttgttggttttgtcgggcacaacacagatgaagaactatggttaagcatcaagcttgctcttgtcagaatgatcctccataatttttactgcaacaacggtataatctccctgtggcggtggcttcggaggtggtggttgatatggcggcgggcgtctacgccggtgaggaacagaacaaagctaagtcgtattagtggagagaatcc

SEQ ID NO: 5769 - DNA, 324 bp, Glycine max
gcttggagaaagaaatatggcttttttatagccgatgtctatttaagatatacataggtgtgcctccttgcatataaacatgaatttttcaagggctttgaaatattctgtaaaagggttcaaaaggaaaagggttttgcatttcttccatcaaaagtgatcatggaattgagtttgagaatgctgagttcaaatcattttgtgaaaggaatggtattttttgcaacttctcttcatcaagaacacctcaactgaatggagtaattgaaagggaaaataaaactctacaacaaatgggtaggaccatgctttgggaaaacttac

SEQ ID NO: 5770 - DNA, 304 bp, Glycine max
agctttctactgcattttagaattatggatttcggcaatcttgctctgactattccctcttcactttacggactacaactgtccatcttgtggtgctagtttacatggatgatcttattgtttcaggtaatgattctgaagctattcttcggtttaagctttatcttcatatatgctttcatatgaaggatttgggaagattgaaatattttcttggagtggaagttgctcgctcacccaaaggaatttacttgtgtcaaagaaaatacgccacggatattattcttgaaactgggttacttgg

SEQ ID NO: 5771 - DNA, 377 bp, Glycine max
  unsure at all n locations
tagggcctccaaaatcatctaaatattattagatgatgagagatcaactcatatcaagagtatgttatcatcaatcattttcttaaaatctaataattataataagtcaataattatatccgcttaattccaagaaaataaattgtgaggatgaatgatagctcttggttggtgtgtaagttgatccattctcttattagatattatatcttctaattaatcaacgatataattatgaagatcataaattaatgaagttaagtaaagctatattagacntttaaaaaataaacatttttttatccggaggatccagctatattataaatntaattagaatattctggccatattattcaatcaatcttgaatatata

SEQ ID NO: 5772 - DNA, 269 bp, Glycine max
cgttcctaatatctctactattgcaacacctctcaatgagctggcgaacaagattgtggcgtttacctgtggtgataaacaagagcatacctctgctttgctcatagatgaggttactaaggcacctgctctagctctctctgactttactaacacttgcgagctaaaatgtgatgcctatggagtgggagcatgagcagtgttgttacaacgtgggcaccctattgcttagtttaatgagaaactatgtagtgccttccttagctacc

SEQ ID NO: 5773 - DNA, 413 bp, Glycine max
  unsure at all n locations
gcttacctagaagtatggcatggattacttcagcgctgtagcgcttggtactcgaactttggctcaacgcattntatctacccttattactctgaaaaagcaggggcaccttgcgtccttgaaccgataaccatattttggctaacctagcctcctccatccctcgagtccaataaagggtagtacaagaatattcaccttttgtccatcgactacgcccttcggccggatcttatgccttgactcaccctccgtggatgaaccttacgaaggaacccttgggttttcgaggcattggattcttaccaacgttagcgttagtcaagccaacattcccgcttctgcttcgaccagcactactcgcatgggtccctccctgtaagatggtacactcccctaccgattcattttac

SEQ ID NO: 5774 - DNA, 390 bp, Glycine max
  unsure at all n locations
taattggaaactgaattcattttttactattgtaattgaaggtgaatatatcttaactcaaaaactcttttctacaattgaaaattttaaatctttaggatttctcaattagggcaatcattaagttcaagaatatctaaattatcataattgttgatatttattcctatagaatttccaactttgttacattatatcttaaattcaatccttatttcaatttcacagttgtcgataggaatatacgatcaacgcactataagtgaccaaatgccaatttacaaaggcactaaattaaaaaaagacaaacattcaatttaaaagacatgaatttgaattacagataagaattcaaattacatcaagttaacagnaaattgagtacacatt

SEQ ID NO: 5775 - DNA, 413 bp, Glycine max
ctgtattttcatatccaggagggtgatcaacacacactacttcttgaataaaaccattcaaaaatgcacttttaacatccatttgattttgaaatcaattatggatgcaaatgctaataagattctaatggctagtaatccaaccactggagcataagtttcttcataatctattccttcttcttggttatatcctttagctactaatatacttttatttctaataactattaactactccatgttcatccaatttgtctctaaatacccatttagttccaataattggatgatcattaagtctatcaactaattcccaaacttgatttctctcacattgatttaaatgcctcttgcatagcaactaatcaaatggtcatcaattatggtttcatttatgttatttgggtcaa

SEQ ID NO: 5776 - DNA, 458 bp, Glycine max
  unsure at all n locations
ggtaaactgtttcatctgtttgataatgatggttataaagggcatctactataagaaaacataaagattatactagttcagtagtataaagggtgatccttacctttatttaatgcatagtttctatggtcatgctagttcaatagaattagtgacttttgactctgttgaagtgttggttctttctggagcatcgtcagggataataaagctttgggatttggaagaagcaaagagtaagttaattagtatattttgaagtcatggactgtataatgtataatgatgttattcatanttgagaaagactgcaggtgaggaagtttgatgtctaatgtttttgggaatgatgattgatgtaggtggtcattgagttctttattggattgttgctntatttttggaccatgctgcttatcatcacaggtacaagtggttctttgtaaacttttgatgtt

SEQ ID NO: 5777 - DNA, 435 bp, Glycine max
  unsure at all n locations
aagctggcgatgtcgaaaatctcagctgttagctgtctagagaagaaattgtggctcacgttgagactagtgaggtttgtgaagatgatgaattgcttccctgaaaccacacctcccaatttcttcatggaaaggtctatggaagttacaattgttgagtcattgttacacttgatgccggaccaagaacatgcataggatttcccagttaattgtcctccagagggcaccacccaattgtgcaagctgttgtcatcatctacaagctccgattntatgctgagaagtgcctctgagtaagggtcaattgctagaactgctgatgataccatgaagaaggtaacaagaataagatctttgatgtagaagcatttgaaaatctccattggaacttggagagcatcacaaggtagagagggacaattgtaagtaccc

SEQ ID NO: 5778 - DNA, 453 bp, Glycine max
cttagtaaagctaaacacgtacaatctccacctctggtgaaatttgtctaaaacatacttagacactttctgagcaggtacgagcagttatgcaagtgggatcagcaactttcattatcagagtaatcaagcacagcggaaattctgcatgttgcaagtcgtttccaggatgtcaagacatctcacatgacatcagctttctgcttctgctgcccctgtctacatgcttactgcagcatcttctaacagctactagtcttttccaggatgtcaagacatctcatgtgacatcaactgctccccctgtctacatgctcttactgttgcatcttttatcagctactagtagcttacaccagtcatcatcagcagcagcagtctgcccctcaaaatcatatacatacaactccccctcaaaatcatgaagcatgcatacatcgtatcctactaatc

SEQ ID NO: 5779 - DNA, 345 bp, Glycine max
aacacacactactgtttgaataaaaccatctataaatgcacttttaacatccatttgattttgaaagcaattatggatgcaaaggctagtaagattctaatggctagtaatccaaccactggagcataagtttcttcataatctattccttcttcttggttatatcctttagctactaatatacttttatttctaataactattaactactccatgttcatccaatttgtgtctaaataacccatttagttccaataattggatgatcattacgtctatcaactaattcccaaactggagtttcttcaaattgaattaatccctcttgcatagcaataatcaaat

SEQ ID NO: 5780 - DNA, 387 bp, Glycine max
  unsure at all n locations
agcttgtcttgtgcagaattagggtacacattctttttttgagatntttacacataattccagagcacaccacagtgcctattttgggaaaagagctctggaggcaacaagatgagcaacttttgcagagatacctaggtcttgtaattagagagagattagaagtttatgtagacgacatgatcgtaaagagtaagcaagtggatgaacacctagccaacttgttggagttgttaatgcaactaaggaaatacaatatgagactcaaccctagaaagtgtactttcggggtacaagtaggaaagtttttgggatacatgttaaccgaaagaggaattaaggtaaatcccgacaagtgtaaagccacattggagatgaggagtccta

SEQ ID NO: 5781 - DNA, 457 bp, Glycine max
  unsure at all n locations
ggttcatcttgagataataggtggtcatcctcatttgaagttgatggttcatcatatttctttggcctaacagaaactccaatatttttacagcttctaatgttatgattggtttggccacaccttccacatgtaaactcagccaatttcctctttagcttatgtcctgtgacattgtcctcatctacagatctctttctattattctttggccttcctctttggacccttntatgtggtggaacaaggtgtgtatattgtgtctgggcccaatattgtggtccttggactggttaataaaatgctggtatgtcttattataaacttctattgacagccactcatgacacatgtccttaggcttccctcctttgtgagttatngttgcaatggcatgtcggcatggcatccctacatcaaagttgttaaatcagcacacatgtacgttaggaatgaa

SEQ ID NO: 5782 - DNA, 440 bp, Glycine max
  unsure at all n locations
tatcatccaatatagggataggatatctatactttatagttaatttattnatggctgggcagtctgtacacatgtaccatgtcccatctttctttggaaccaagatcacagggacaaaacacgggctaagactttcccttacaaatcccttntgcaagaactcatcaacttggctttgaatctcctttgcttcttctggactttacctataggctggcctatttagaaatgaagcaccaagaatgaagttaatttgatgcaatacctcttaaaagaggtaatccatatggaatttcttctaaaaaaacatcaacaaattcctgtaacaaggaaacaatctcacaaggcaaagaagagttaaaatcgttagtaaaataaacatcattgtacattagtacaagtagctgctctctggccatcaaagtactctcaacctctct

SEQ ID NO: 5783 - DNA, 374 bp, Glycine max
  unsure at all n locations
agcttaattnttcttttagaatgttagttgtccttccttcaacctcacttcctcccatactttntccattatttttagaagcttttctctttgaaccacccatttataactctaaacagtttagtgccttagtcaatgatgctattctttagaacaatagggcaatgatctgatacactcctattcaagacatgatgagagctcccttgccaagtgagtaacccattctttagatacaaatactctgcccaacttactctttacatggctatttggcttaaaccatgtatacatcctttgaacaataaggatgtcctctagctccatgtaaaanatgaaaccattaaactccctaatggtcccttcaccaccat

SEQ ID NO: 5784 - DNA, 262 bp, Glycine max
  unsure at all n locations
cattcactctgcaaatgttntgcaccgagatcttaaaccaagcaatttacttttgaacgcaaactgtgatcctaagatatgtgactttgggcatgctataacaacctctaagaccgactttatgacagaatatggtgtcactacgtggtacagagcccccgaattgctactgaattgtcagaatatactcaactattgatatttgggcggttggttgcaatttgatggagataaatagaagggagcctttaattcctggtaa

SEQ ID NO: 5785 - DNA, 446 bp, Glycine max
  unsure at all n locations
agctntactatgcagagaatatccaaggaaattaccttcatctgacttagcatcaaattttcctaagttatcttttccattattcaatacaaaacatttacaaccaaagatatgaagatgagagatgtttggttttctgccattgaccaattcatatggagttttctttaaaatgggtcttattaaagccctatntaaactgtagcatgcagtgttaacggcttcagcccaaaagtattttggaagaggagtatcatttaataaagttctagcaatctcttccaaagatctatttttcctttcaacaacaccattttgttgaggggctcttggtgcagaaaagttatgcttaatcccatgcttatcacaaaataattcaaattcttattttcaaactcacccncatgatcanctctaatagatataatctttagatttttctattt

SEQ ID NO: 5786 - DNA, 216 bp, Glycine max
gcttactatgcaaggaataaccaaagaatttttcttcatctgacttagcatcaaattttcccaagttatcctttccattggttaatacaaagcatttgccaccaaaaacatgtagatgtgagaaatttgggttcctacccttaaacaatattgatggagttttctttaaaataagtcctattaaagccctattcatgatataacatgcagtattaa

SEQ ID NO: 5787 - DNA, 458 bp, Glycine max
  unsure at all n locations
cttgtgtaatcgattacacttatttggtaatggattaccagtgactatttctgtaaaaatcaaaaggtgtaactcttcaaaaaggttctgactttttcaaatgagttttaagtttttctaaaagttataactcttcaaaaaggatttgactttttcaaatgggttttaagtttttctaaaagttataactcttctaaatgatcttcttgaccaaacatggagagtctataaaagcaagggtttgttttgcatttcaacaatcttgaatacttttacacttattcaacaatcctttacaagccttgactctctttgaatttcttcttcttctttgtaccaaaaagctttctgaagttttctggttttccaaaccttgaaaacttgtgctattcatcttttcattctcttctccatttgccaaanagaattcaccaaggactaaccgcctgaattctttt

SEQ ID NO: 5788 - DNA, 243 bp, Glycine max
aatagtagctcctagcaaattcaaaccataataactctttactcggatgtccgattgtgttccgtagtatatcgtgacgctccaaattgaaaacataaggtctgagcaaattcaaacgtcaataagcttttactcagatgtcccattgagtcccgtaatatatcgagaatgctccaaattgataatagtaggtccttccaaatttaaccataataacgttttactcggatgttcgattgagtc

SEQ ID NO: 5789 - DNA, 405 bp, Glycine max
  unsure at all n locations
ntcgagaatntaaaattgtcataactnttcactcggatgtccgattcaagcacatcacatatggagacgcccgaaattgaacaacggaagctctcgagaaattgaaatggtcataacttttcactcggatgtccgattcaggcacatcacatatcgagacgctcaaaattgaacaacggaagctctcgagaaattcaaatggtcataacttatcactcggatgtccgattcaggcgcatcatatatcgagacgctcgaaattgaacaacggaagctcttgagaaattcaaatgatcataacttttcactcggatgtccgattcaggcgcatcatatatcgagacgctcaaaattgaacaacggaagctctcgagagatcaaatggtcataacttttcactcggat

SEQ ID NO: 5790 - DNA, 263 bp, Glycine max
  unsure at all n locations
agcttccattgttcaattntgagcttctcgatatatgatgcgcctgaatcggacatcctgagtgaaaagttatgaccatttcaatttctcgagagcttccgttgctcaatttcgagcgtctcgatatgtgatgctcctgaatcggacctccgagtgataacttatgaccatttgaatttctcgagagcttccgttgttcaatttctaacgtctcaatatttgatgtgcctgaatcagacatctgagggaaaagctatgacaat

SEQ ID NO: 5791 - DNA, 447 bp, Glycine max
tcgcacttgataatggaggcacatgaacagcgctaggcaatgacattcatggtgctccaaacaaaggtggagtatggaggattgccttgagggtccgcaattaggcaatcatgaaactcatctccaaactcgaaagtggagaacacatgaacagccctaagcaataacattcacgtggctacgaaataggatgagaatggaggatcgccttgagggtcctctcttattcaatcatggaacacagctccaaactcaaaagtggagaacacatgaacagccctaagcaataacattcatgtggctccggaaaaggacgagaatggaggattgccttgagggtcctctcttaggcaatcatggaatacagctccaaactcgaaaatggagaacatgtgaatgacaacgcaattcactcacgtggctccagaaaaggatgagaatggagga

SEQ ID NO: 5792 - DNA, 323 bp, Glycine max
agctagtccaatcgatttagagaaatgccttcataagcatatctgcatattgatcaattgcacggatcatgaatgacacgattatgagcaagagaaatattgctcaaattatcaccaaaaattctaggaatagtgtgagaaactttcagcttaaacaacaaggtctgaatttgttggacctctaatgtatctggagcaaggttccagttcttatgcttcagtgctagaacgagcaacaacagattgctttttggaccaccaagagaccatgctgggtcctatatagaaaaaagcattgaatgtagaccccctgttctttggat

SEQ ID NO: 5793 - DNA, 390 bp, Glycine max
  unsure at all n locations
tcaatctttaatggagaaggttaccactactggaaaacccgaatgccaatttttatcgaggcaatatatctaaatatctgggaagccattgaaatagggccttatatacccaccacagtagaaagagtttcaatagatggtagttcatcaagtgaaagcataaccatagaaaaacctaaagatagatggtctgaagaggatagaaaacgagtaccatacaacctaaaagccaaaaacataataacatctgccctaggaatggatgaatatntcagagtttcaaattgcaagagtgctaaagaaatgtgggacactcttcgataacacatgaaggaactacagatgttaaaagatctangatgaatgcactaactcatgagtatgaattat

SEQ ID NO: 5794 - DNA, 309 bp, Glycine max
  unsure at all n locations
tcgagcgtntgacatattacgggacttattcatacattngagtaaaaagttattgttgtttgaatttgctcagagcttnggtgttnaatttcgagcatctcgacatattacgggactcaatcatacatccgagtaacaagatattgtcgtttgaatttggtcagagtttcgataatcaatttcgagcgtctcgatatattacgggactcaatcagacatccgagtaaaacgttattgtccgttgaatatgctcatagcttcngtcttcaatttcgagcgtctctacatattacgggactcaatcagaca

SEQ ID NO: 5795 - DNA, 389 bp, Glycine max
  unsure at all n locations
agctntgagcaacttcaaacgacaataactttttactctgatgtctgattgagtggccgaatatatcgagacgctcgaaattgaataccgaagctctgagcaaattcaaacgacaataactttttattctgatgtctgattgagtcccgtaatatatcgaaacgctcgaaattgaatgttgaagctctgagcatattcaaacgacaataacgttttactcggatgtctgattgagtcccgtaatatatcgagacgctcgaaatggaataccgatgctctgagcatatacaaacgacaataactntttactcggatgtctgattgagtcccggattatatcgagacgctcgaaattgaatgttgaagctctgagcacattcaaacgacaa

SEQ ID NO: 5796 - DNA, 430 bp, Glycine max
agtctcacgattgtcatgtgctcatgcatcaattgttagccgtggctatacgagacatcttgccaaaacaaagtcagattaacgataactcgcctgtgctttttcttccatgctatatgtagcaaagtcattgatccagtaatgtttgatgagttggaaaatgaggccgcaattatactgtgccagttggagatgtattttccccctgctttctttgacatcatgattcacttgattgtgcatctggtcagagaaatcaaatgttgtggtcctgtttatctacggtggatgtacccggttgagcaatacatgaagatcttaaaagggtatacaaagaatctatatcgtccagaagcatctattgttgagaggtacattgcagaagaagccattgaattttgtttagaatacttagagaaggctaaaccta

SEQ ID NO: 5797 - DNA, 392 bp, Glycine max
  unsure at all n locations
agcttaanaaggcactctatgggtttaagcttgcccctagagctaggaataaaaggatngatgcctttttggttcagcaatactntagcaagtgctatattgngcatggagtatatgtaagattgcaaaatggaggattggatcaagtaataatatgcctctatgttgatgatctattggttattgggaacaatcttaaggagattgatgatttcaaatctgacatgatgtttgaatntgaaatgatagacttgggaagactcagttatttcttaggtatagagtttacaaatgcttcaaccagaactatcttgcaccaaaagaagtatgcattagaaatattgaaaagattcaatatgactaattgcaacttagttgtgacaccaatggat

SEQ ID NO: 5798 - DNA, 413 bp, Glycine max
  unsure at all n locations
agctnntaattgactgagaacaagaaagatttaactgtaggtcattttatcaatcagattaactaaaagcataagttaataagtatgggccaatgaatggttattataaatatataaccttaatacccataaaccaaagctacaataaaaactgataatgtacttacacagttacacttccctagcatgaataatatcctaagttttttagaatttatttaagttgctccagtgccatgagaccatgccaaaagaaatccaattaatataacaatgttagaaactaaatactcatgacaggaatgcttacatgtgactaaaataaaattaaacaaaatacaaatatatatctttttaattaatggagatcaatatagaacaaacatatagtagtgatgatcatagcaatcaaa

SEQ ID NO: 5799 - DNA, 457 bp, Glycine max
cttgcattgcttggcagaattgcgaacaaggagctaagagattctagcccactggttcttaccatatttcataacaatcgcttttaggatttcatcttcggtgtttttccaaacattgccctttatcataatcctcatcttcacttcaactacagtcaacaaccaaacaattcaaacaaagattattagatgtgaaaaataagggaaaagaaaaataatgagacatcaggccttatgttagggagaataaaaaaccacactcttgcaattaggttttgaagtaacgtattatgcgataaggaagaagaatgatccattcaagtgagcgagagtccaaagcgagcttcatcgtgtgaggcatgaaccagagtccatagcactgttgactttgtcggagccatggcagatccacaccgaaccaccatgagtggtatgtgtccaacacttcagaatccat

SEQ ID NO: 5800 - DNA, 220 bp, Glycine max
gcgtctcaatatattattggcctgaatcaaacatccgaatcaaaggttatggctgcttaaatatgccatgtgcttcaatgatcaattgtgagcatctcgatatattatgcaactgaattgggcatctgagtgaaaagttatgccctatgagttagccgagagctctcgttgttaatttcaagcgtctcgcatattattggccagaatacgacatctgagc

SEQ ID NO: 5801 - DNA, 384 bp, Glycine max
gatccttaatcacctgcggctgcagctggagaaaataaaaataaatccgattaagcagaatgctagaaataccttggcagctctggttgtagctctagaccaacgggaaatggcagtttcatgtttctcaatgttgaagaaagatatagagctgtgcttgagttcagcaaaatctaagagcttccacctatgtattaaaacaaaaagataaaattaaaactcatggagagtctagtaaagaaggacagaggttctcattgcagtaaataaagtaccagctttgttcaataagaattgcacaatctgctagctttcttcttgtacgaaagactttgtatactttctgcagtttaagtgcagccctatatttggggttatctggat

SEQ ID NO: 5802 - DNA, 396 bp, Glycine max
actagatgccttgggtattctggtatcccaactggccatgaatcaaaaatatgcacctgtcgccagactctgtggtttatgctcctctgccgaccaccacatagacctttgcccttttgtgcaacaatctgaagcaattgaacagcctgaagcttatgttgcaaacaactacaatagacctcctcaacctcagcaacaaaatcagccacaacaaaacaattatgacctttccagcaataggtacaatcccgggtggaggaatcatcccaaccttagatggtcaaatccttcacaacagcaacaacaacaacaacaaccttattttcagaatgctgctggcccaagcagaccatacgttcctccaccaatccagcagtaacaataacaacaacaata

SEQ ID NO: 5803 - DNA, 480 bp, Glycine max
acactactagcacactcaagcttcttagtttcagatgatgcagatgggtttgtagctacctcatgcactcctctaatgactatggcatcatttctggcgctaaactgctgggagttggaggccatcttctcaattaaatttctggcttcagcaggagtcatgtctccaagggctccaccactggcagcatctatcatacttctctccatattactgagtccttcataaaaatgttggagaagaagctgttctgaaatctgatggtgagggcaactggcacatagtttcttaaatcgctcccagtactcatacaggctctctccactgagttgtctaatacctgagatatctttcctgatggctgtggtcctggaagcatggaaaaaattttctaagaatactctcttaaggtcatcccagctcgtgatggaccttggagcacggtaatacaaccagtcctttgccactccctctaatgaa

SEQ ID NO: 5804 - DNA, 403 bp, Glycine max
  unsure at all n locations
agcttcttcacatagtccgccttttcttgatcttctntatgcttaanaacagaaacattatgcataggcaaaaaatcaagaggagttagtgggttaaaaccataaacaacttcataaggagaacaattagtggtgctatgaacaactctattgtaagcaaattcaacacggngtaaacaagcttcccaagtttttaagatcttgctcaaaactgtcctaaccaaagttcccaaagtcctattaacaacttccatttgcccatcggtttgtgggtgacaagtggttgaaaataacaatttagtgcccaacttgctccacaaagtcctccaaaattgacttaggaacgtagagtccctatcactaacaatgctccttggcagaccatggagtctcacaatctcct

SEQ ID NO: 5805 - DNA, 269 bp, Glycine max
ctgagtcggacatccgtgtgaaaagttatgaccctttgaatttctcaagagcttctgttgtcatttccagcctctcaacatagtatgcgctcgaaactgacattcgtgtggaaaggtctgaacatttgaatttctcgagaggttccgatgttctaattcgagcggatcggtatattataagcccggatccgacattcgtgtggaaaggtatgaccatttgaatttctaaagagccttcgcgggttaattttgatcctcttacaatatat

SEQ ID NO: 5806 - DNA, 396 bp, Glycine max
  unsure at all n locations
tatatcgatggctcaaattatcatcggaaactctcgcgaaattcaaatgggcatagaatttcacacggatgtccgattcgggcgcataatatgtcaagagtctcgaaattgaacaacggaagctcttgagaaattcaaatgggtataaaatttcacacggatgtccgattcaggcaaatcacatatcgagacgatcagaattgaacaacggaagctcttgagatattcaaatggtcataacatttatctcgaatgtccaatttaggcgcatcacatatagtgatattcgaaattgaacaacagaagctctcgtgaaattcaaatggtcataactnttcacactgaggtncgattcacggctataatatatcgatacgctcgaaattaacatcggaa

SEQ ID NO: 5807 - DNA, 428 bp, Glycine max
tttgagcaatgcaaatggtcatagctatttactccgatgttcgaatcaggcgcataatatatcgagacgttcgaaattgaacaatggaagctcttgagcaattcaaatgatcataacttttcactaggatgttcgattcatgcacataatatatcgagacgctcgaaattgaacaacggaagctctcgagaaattcaaatggtcataactttttcacacggagggcagattcatgcgcacaatatatcgagacgctcgaaattgaacaatggaagctcttcagcaattcaaacggtcataacttttcactcggatgttcgattcatgcgcataatatatagagaccctcgatattgaacaactgaagcttttgagaaattcaaatggtcataacttttcattcggatgtccgattcaagcgcataata

SEQ ID NO: 5808 - DNA, 323 bp, Glycine max
  unsure at all n locations
gcttnattgttaatttaagcgatatgatattatgcgcctgaatatgacctccggtgaaaagcatgaccgtttgaatctctcgagagcttgcgttgttcaattatgagcgtcttgatatattatacgcctgaatcggagcttcgagtgaaacattatgaccatttaaatgtctcgagagcttccgttgttcaatttgaagcgtctctatatgtgatgcgcctaaatctgacgcccgagagataagatatgaccatttgaatgtctcgagagcttacgttgttcaatgtggagcgtatcagattcttatgcgcacgaatcagacc

SEQ ID NO: 5809 - DNA, 324 bp, Glycine max
agcttctcaggtccggtcatggaaagacttggcaactgccttcattaggcagtaccaatacaacacggatatggctcccgatcggaaccagctttagagcatgaccaagcgagaacatgagtccattaaagaatatgcccaaaggtggagagacctcgcagcccaagtcgttccgcccatgactgagagtgagatgatcacaattatggtagatacgttgcctacgttctactatgaaaagctgatagggtacatcccagctaactttgcggacctcgtcttcgcccgagaaaggatcgagtccggactaagaaaaggcaagtt

SEQ ID NO: 5810 - DNA, 314 bp, Glycine max
agcttgtcagatggagatgatcttgccatgactttgattctatcaatcttatccattctttcctcatgtgagaaatttctgaattgaaagccttcaaccactgctgcttgatcatcatccaattcatcatcaagaatcccacattcagaggctatggcccttgctgtgtgcgcattatctcctgtaatcatcttaatcttcactccagcattcttgcacgattcaactgctgctccaactcctggcctacaagggtctttcaacccaagtattcccaacagtgtgagttctgtctcttcaagttcaagtttttc

SEQ ID NO: 5811 - DNA, 317 bp, Glycine max
agctgtactatgcatataatattttatgaaaataccttcggctgactgagcatcaaattttcctaaactatcttttccattattcaatacaaaacatttacaaccaaagatatgaagatgtgagacgtttggttttctgccattgaacaattcatatggagttttctttaaaatgggtcttattaaagccctatttgaaatgtagcatgcagtgttaacggcttcaacccaaaagtattttggaagaggagtatcatttaataaagttctagcaatctcttccaaagatctattttttctttcaacaacaccatttt

SEQ ID NO: 5812 - DNA, 317 bp, Glycine max
agcttaaatattcaacttcgagtttctcgatatattacgagtctcaatgaaacatgcgagaaaaaaagttattgtcatttgaatttgctcaaaggttcaacattcaatttcgagcgtctcgttatattacaggactcaatcagacattcgagtaaaaagttattgtcgtttgaattagctcagagcttccacattcaatttcgagcgtctcgatatattacgggccttaatcagacatccgagtaaaacgttattgtcgtttggattggctcagagattcaacattcaatttcgagcgtctcgatatatgacgggac

SEQ ID NO: 5813 - DNA, 323 bp, Glycine max
agcttggtacatattgtctgattcttgggtcctcttaaggacttagtcaaaatatccgctggctgatcattagaaccaatgaactcagtgacaatctccttggacagaagcttctctcgaatgaaatgacaatcaatctctatatgcttggtcctctcatggaagactgggtttgaggcaatatggagagcaacctgattatcacaatacaacttcatttgcaactcttcacaaaacctcaattcttgaagaaattgtttgatccacatgagctcacatgtgaccatagccatagatcgatactcagcttttgcactagaccg

SEQ ID NO: 5814 - DNA, 331 bp, Glycine max
agcttcttcacatagtccgcctttgcttgaccttctttatgcttaaaaacagaaacattaggcataggcaaaagatcaagaggagttagtgggttaaaaccataaacaacttcaaaaggagaacaattagtggtgctatgaacaactctattgtaagcaaattcaacacggggtaaacaagcttcccaagtttttaagttcttcctcaaaactgtcctaaccaaagttcccaaagtcctattaacaacttccatttgcccatcggtttgtgggtgacaagtggttgaaaataacaatttagtgcccaacttgctccacaaagtcctccaaa

SEQ ID NO: 5815 - DNA, 331 bp, Glycine max
agctttaagaattatgggctcatcaaactacttgtttcccgagggaagttctataaatagacctcccatctttaatggagtgggttaccactactggaaaacctgcatgcaaatctttatagaggcaatagatttaaatatttgggaagccatagaacaaggaccttatgttccctctatagtggccggaagtgcaacaatagaaaaacctagagcagattggactgaggaagaaagaagattagtacaatataatttaaaggccaaaaatattattacatctgctctaggaatagatgaatactttagggtttcaaattgtaaaagtgct

SEQ ID NO: 5816 - DNA, 328 bp, Glycine max
agctttacaccgttaaagagaattttaagctcttagaaggaaaattacccggttcttccaggtgttgattttaaacagctttcatctgataggagcttttttcaaagatgagattaaatctgtatggagttgcgatgaagataaaagccccggtccggatggctttaatttccccttctttaaagcatgttgtggtgtcttgaaagatgagatatttggaattgtttaagagtttcactcatcaggtattttgctgaaggctgtaacatcctcctttattgctttgatcccgaaaaaggataatcctcaatctttgtcagattatgga

SEQ ID NO: 5817 - DNA, 319 bp, Glycine max
agctttgagccaattctaacgattataactttttactcggatgtccgagtgagtctcgtaatatatcgacacgctcgaaattgaatgttgaagctctaagcctattcaaacaacaataacgttttactcggatgtccgattcagtgacgtaatatatcgggacgctcgaaattgaaagttgaacctctgagccaactcaaacgacaataactttttacttggatgtctgattgagtaccgaaatatatcaagacgctcgaaattgaaagttgaacctatgagcctattcaaacgacaataactttttactcggatgtct

SEQ ID NO: 5818 - DNA, 322 bp, Glycine max
agcttcacaaatctggcaacagtataaatatattgtacctggtacaagggtaatagtgtgacagcaggaacatctcacacttgtagcaccacgtgtgtacattagcaatgtcgtacagcctccacaatagagttgtgacatgtccattcctgcatgggcatcatgaaattaaaggttcccccagatgtaaccattcagttaaagtacaatacgtgtgaatgaatatttaatcaagctaaatgcataatttcttttcagtttatctcgctctcaccacacacacagtatctttcaaataatatgcctatgttattaatagcta

SEQ ID NO: 5819 - DNA, 312 bp, Glycine max
  unsure at all n locations
agcttctataaaaggctcgnttctaatttctgtacaattgcatcacctctcaatgagctggtgaacaaaaatgtggcatttacctggggtgaaaaacaagagcaagcctttgctttgctcaaagaaaagcttactaaggcacctgttctagttcttcctgacttttctaaaacttttgagctagaatgtgatgcctctggagtgggagttggagctgtattgttacaaggtgggcaccttattgcttgttttagtgaaaaacttaatagggccaccctcaactaccccacttatgataaagagctttatgcc

SEQ ID NO: 5820 - DNA, 324 bp, Glycine max
agcttgcgcatgcttttcccttttgaggatgttccatatgctcttaagactggactgattcatttgcttccaaagtttcatggccttgcaagagaagacccgcacaaacatttgaaagaatttcacattgtgtgctccaccatgaaaccccgcagatgtccaagaggatcacatatttctgaaagcttttcctcattcattatagggagtggcaaaggactggctgaattaccttgctgcaaggtccatcacgagctgggatgacctttagagagtattcttagaaaaaatttttcctgcttgcaggaccacagtcatcaggaa

SEQ ID NO: 5821 - DNA, 320 bp, Glycine max
agctttgatgtttatagagaatttagagctctagagaatacacggagaagaagagagcgcgagcaaaataggttgcgtcaaatataatttaaaatgtaatttcaacatcggttttcaataaaaaaactgatgttaacaaattgatgttaaatgatcatacgttaacatcggttttctacaaaactgatgttaacggatacacattatttacaattatgccaccgcgtgtatgttaacatcgattttgtcaaaaaccaatgttaatctgtcgatgttaaaattgctttttgtagtagtcgacggtcgcacgaaaaacacaa

SEQ ID NO: 5822 - DNA, 329 bp, Glycine max
agcttctcgatatattatgtccttgaatcatacatctgtgggaagagttatgaccatttgaatttctcgagagctaccgtagttcaatttcgagtatctcgatatactattttcccaaatcggatatccttgtaataagttatgaccattcgaatttctcgagatcttctgttgttcaatttcaagcgtgtcgatatattatgtcctctaatcagacatccgagtgaaatagtatgagtagtcgattttctcgagagtttccgttgttcaatttcgagtgtctcgatatattatttccccgaatcggacatccatgtgaaatgttatga

SEQ ID NO: 5823 - DNA, 323 bp, Glycine max
agcttgtaattgattacactattactgtaatcgattaccagagcagattttcagaaaatattctcaacagtcacatctttttatgtggttcttgaatggctatcaaaggcctatatatatgtgacttgagacacgaatttgctaagagtttttcagaacaaaaaggtcttatcctcttataaagcaaaatcgttttatcctcttacaaattccttggccaaattacttgtgattcaataaggaattatttgagtgctcaaattgttcaatctatctctttcaagaaagatttcttcttttcttcttcttcattctgaaaaggg

SEQ ID NO: 5824 - DNA, 315 bp, Glycine max
  unsure at all n locations
agcttttatagaatgttcgntcctaattncggtacaattgcatcacgctgtcaatgagctggtgaagaagaatgtggcatttacctggggtgaaaaacaagagcaagcctttgctttgctcaaagaaaagcttactaaggcacctgttctagctcttcctgacttttctaaaacttttgagctagaatgtgatgcctctggagtgggagntggagctgtattgttacaaggtgggcaccctattgcttattttagtgaaaaacttcatagtgccaccctcaactaccccacctatgataaagagctttatgcctt

SEQ ID NO: 5825 - DNA, 329 bp, Glycine max
  unsure at all n locations
agcttatcccatgcttctttggtcgtcgtttcgtnggatatcttctcggatgtatcttcatccaccgattgataaatgagaaagagagctttcttgtctctctttcttgactccttcaacgtctcctttacaccttggcttagcgaggcttcatcttgctcctcgaagtcattctctacgatatcccacacatcttgagctcctagtagcgccttcatcttgatactccaattatcatagttgttctttgtgagcatcgacacttggaaaggaaaacctccattcgccatcttttgaggatcttgaagctctgataccactttgttgga

SEQ ID NO: 5826 - DNA, 310 bp, Glycine max
agcttttagcaaattctaacgacaataacttggtactcagatgtctgactgagtcctgtaatatatcgagacgctcagaattgattatatatatcgagaccctcagaattgattatcgaagctctgagcaaattcaaatgacaataactttttactctgatggctgattgagtcccgtaatatatcgagacgctcgaaatggagtaccgaagctctgagcaaattcaaacgacaataactttttacttggacgtcggattcagtcccggaagaaatcgagacgctccgaaatgaatagccaagatctgaa

SEQ ID NO: 5827 - DNA, 319 bp, Glycine max
agcttgcatgcagctatgaagatatccaaatacaaccatagggctcaacttttgggataaacccaaattcatgaaccattttatgaaatagtatcttcccttcttgccacaatcctgagtgactacaagcatgaagagctccaatgaatgtgatgtcattatggatgacccctagtgcttccatttcttcagagttccaatgctgcctcaccatgaccatgcattgcaaaaccagatatcatggcatttcacattgaaacatcacggtccatggccgcagcaagcagtgcatctatgtctccacacttggcatacgtgt

SEQ ID NO: 5828 - DNA, 285 bp, Glycine max
  unsure at all n locations
agctttaacgcatgtgctatcttctaagaaacaanccaagggttttggtaggtgttaaatatccctactgaaaggcattctaacgatgatagtcctcataccaatccaactctgaaacaggaatagacttttttagctacacctaagcgggccccataatctgcatcttaatgaatcacccgtagtttttttgtccatacaagatcaattactgcacagaaaaatgcattcttttttgggccaaaacaaccagccttgaatgtaaaattatttgcaacaaccaaa

SEQ ID NO: 5829 - DNA, 458 bp, Glycine max
cttcgagcgtctcgttatattataggactcaattagacatccgagtaaaaagttattgtcgtttgaatttgctcagagcttcaacattcaatttcgagcgtctccatatattacgggactcaatcagacatccgagtaaaacgttattgttgtttgaatttgctcaaagcttcaacattcaatttcgagcgtctagatatattacaggactcaatcaaacatccgagtaaaatgttactgtcgtttaaatttgcttagctctccagctttaaatttcgagcgtctcgatatatgacgggactatatcagacatccgagtaaaaagttattgtcatttgaatttgcttagagattcaacattcatcttcgagtgtctcgttatattacgggactcaattatacattcgagtaaaaagttattgtcgtttgaattgtctcagagcttcaacaatcaattt

SEQ ID NO: 5830 - DNA, 459 bp, Glycine max
  unsure at all n locations
nggaacaatggaatactgggtggtatttttcctcgtcagataacttgagcttataagcaacaggaccaattctttcaataacttggaatgggccatagaatcgtttggcaagtttggcggaagctgatgaagttcccttggtagaagactgtcgatagggtcgtaaccggagaagaacccaatcgcccacctgataattcacctcctgacgcttgtgatcagcttgcttcttcatctggtcttgtgcctttagtaatttcttgcgaatggtttgaaaagtagcgtctctatcagttaacaagtcctcaacagcttcaatgtttgacgtgccagagatgtattctagaaaattaaatggcttccgaccaaacgttacctcgtagggggttgaccctgtccctgcattccatgaagtattgtgggaccactcaatccatggaaggagcttaccccatttat

SEQ ID NO: 5831 - DNA, 439 bp, Glycine max
agcttcaacaacaggtgctcggtgacgttctaatagtctcaaataagagttttttctgattgcttttctaagaacacccacaatagactatcctttatctgaagttatccttttgattgatcatttttaccacaaaaacaaacatacaccccaatgcataagaacccccacgtaatagtacaaaaagtaaacgaacacaaccttacctccgcaagatgaataatgcatatgtatcttgattagtatcaatttataattgctttgtgtgtgtgttgatatatattaactattataaaatcaatatatttatcttaaaattattacattattaatgcataacctatttttttatattaaatatagaatagatactttctttataggaatagaatatatatacttataagttattagtatgagaatacccaacacaatctct

SEQ ID NO: 5832 - DNA, 430 bp, Glycine max
  unsure at all n locations
tcttggcattgaactcatgtgctacaaccaagccatgtntgggtttgcaccctatggtccttattggcgcgaactaagaaagattgtaaacttagaaatcctctccaatcgccgagtagagcaactagagaatgttcgtgtctccgaagttcaaagttcgatcaaagagctcttcaatgtttggtcaagcaacaagaataatgagtctggctatgcgttgctggagctgaagcaatggttttctcaattgacatacaacatggttcttcgaatggtcgtcggaaagcgacttttcggtgctagaactatggatgatgagaaagctcagagatgtgtgaaggctgtgaaggagttcatgcgtctgatgggggtgttcacggtggcagatgctattcctctcttgagatggtttgatcttggtggctatgag

SEQ ID NO: 5833 - DNA, 259 bp, Glycine max
agcttgtaattgataactgaagctctgagcatattcaaacgacaataacttttaactcggatgtccgattgagccctataatatatcgagacgctcgaaattgaaaacgcaagctctaagaaaagtcaaacgacaataactttaaactcggatgtccgattgagccctataatatatcgagacgcccaacaaatgaaaacggatgctctatgaaatgtcaaacgacaataactttcgactgggatgtccgaaagtgccc

SEQ ID NO: 5834 - DNA, 415 bp, Glycine max
ttcaaacgacaataactttttactcggatgtgtgattgagtcccgtcctaaatcgagacgctcaaaattgaatgttgaagctctgagccaattcaaacgacaataacgttttactcggatgattgattgagtcccgtaatataacgagacgctcgaaattgaatgttgaagctctgatccaattctaacgacaataactgtttactcggatgtctgattgagttccgtcatatatcgagacgctcgaaattgaatgttgaacctctgagccaattcaaacgacaataactttttactcggatgtctgagtgagtcccataatatatcgagacgctgcgaaatgaatgttgacctttgagccaattcaaacgacaataactttttactcggatgttctattcagtgacgtaatata

SEQ ID NO: 5835 - DNA, 464 bp, Glycine max
  unsure at all n locations
ntctattctataccttcccgagaaccacttatctggaaaagtacctccagaaattggcaactgcatgtctttgacagagttacatctgtattccaatcaacttgagggaaacattccaagtgaactgggaaaactaagaaaactagtggatcttgaattgttttcaaatcaattgacgggtgaaattccactcagcatctggaagattaaatctctgaagcatctccttgtgtataataacagtctttctggggaacttcctttggagatgacagagctcaagcaactgaaaaacatctcattgtttagcaaccagttctccggagtcataccgcaaagcttgggaattaacagcagtttagttcttttggattctacaaataataaattcactggcaacatcccaccaaatctgtgtgttggcaagaaattaaacatcctgaatntgggcatcaaccaacttc

SEQ ID NO: 5836 - DNA, 407 bp, Glycine max
agcttgagttaacgcataggatggatatgtacagtacagcatgcagagaagcatatatatcacatcacacagtagaatctgaatagtatatatagtccctttctatataaacgtgctattgcgatttcaattggtactactcttttgtttgctacagattatggagttgacccaccagagacttgaggaagataaaaatatagatgaggcacgagtggctcacgaagctgcaatggcaattgctgagatagagaaagcaagatgtatagcagccatggaaactgctgaagcatctaagacaattgcagaggtggaaacacatagacaagcgagtgttgaagttaaatctcttaacaagcataggaaatgacgaagctattggaaaatctaccccaaactgatgtgag

SEQ ID NO: 5837 - DNA, 465 bp, Glycine max
  unsure at all n locations
tattgcatgagctatatcaggttgagtacatgccatagcatacattattgaacctataatgttagcatatgtgatactctccatataagtatactcttcagctctctttggggattgacttacacttagtttgaattgatcatatataggtgtcacaataggccaacttcgaatttgacattccaaacctttcaataaatttattgaggtatgtctcttgagatagatacaaaatcttcttctttctatcccttttgatttccattcccaatattctccttgttgtcccaagtccttcatttcaaattccctttttaactcagctntgaccttggtaatttcggccttaccgttacttggtattaacatgtcatcaacatatagcagtaggattacaaaggtacctttattccttttgaatagccattttcaattgactacccttgaaccaatgggctttttgat

SEQ ID NO: 5838 - DNA, 449 bp, Glycine max
  unsure at all n locations
tgtaatcgattacacaaatactgtaatcgattaccagagcatattntcagaaaatattctcaacagtcacatctttttatgtggttcttgaatggctatcaaaggcctatatatatgtgacttgagacacgaatttgctaagagtttctgagaacaaaaaggtcttatcctcttaaaaagcaaaatcgctttatcctcttacaaattccttggccaaaacacttgtgattcaataaggaattatctgagtgctcaaatcgttcaatctatctctctcaagagaaattactccttctcttcttctttattctgaaaaaaggattaagagaccgagggtctctngttgtaaagaaatctgaacacaaaggaagggttgtccttgtgtggttcagatctcgttatacgctcttacaagatactggaactctcaagccggttgcttgaggact

SEQ ID NO: 5839 - DNA, 389 bp, Glycine max
agctttgaccaaaatcaaacgacaacaactttttactcggatgtcggaatgaatactgtattatatcgagacgctcgaaattgacaatatatcgagacgctcgtaattgaaaccaaatgctcgaagcaaattctaacgaccataactttttactcggatgttcgaatgaatcccataatatatcaagacgctcgtatttgaaaacataagctctaatcatattctaatgataataactgtctactcggatgtcagattgagtcccgtaatatatcgagactcccgtaattgataacggatgctcgtactaatttaaatgacaatattaatatgctctatattgagcaatggagctcttgagcaattcaaatggtcatcacttatatttt

SEQ ID NO: 5840 - DNA, 468 bp, Glycine max
  unsure at all n locations
ctttanatgtctntcgtagaatcttaacatcgaatcgtttctctctttccaatggaaggaactttaagttattttttatggattgtacgagaaatgagagtattggattgtcagacttgagcaccaaataacgctactaaaaaagatatgagaaaattctaagttactgattaaatataattgaattttctcttatcatattacttttaaaatgatcatatcaaacatacaataaattaaataatctttatttccattttgaaaatttacgaacatgtgacatcaaaaaggaaattttatgaacatagtattatggggatagaatacaaaanttcaattcaaaaataaattctactcaaaagtatctcatataaaaattaatcaacttatatagcaaaacaactaataaaatagttaactttcacaggttttcccctttctaaactagacaaattgtattacaataat

SEQ ID NO: 5841 - DNA, 469 bp, Glycine max
  unsure at all n locations
ntgatgagtgcaacataagttggccttcaaggtgtttaagatgatttgtctttgtttcaaggaagtgttgacagtggccactgtggaggatctagtaatgtaatcaggcaaagtgtggggagaatggccgtacagagctttaaacaaagacattctgatggcagagtgaaaggtggagttgaaccaatattctgcctagttgagataattgaaccaaaggcaaggatgcttactgacaaagcatctaaggtaagattccaaacttctattcaccacctatgtttgaccatcggtctctggatggtaggcaatgctgaactgtaattntgtgccttgcattttgaacaattccttccaaaaagcactgagaaagagaggatccctatcagaggtgatagttattggaagaccatgtatgtggcatctcttagtggagaagtgataagctaaatttgtagcagcatacttt

SEQ ID NO: 5842 - DNA, 468 bp, Glycine max
  unsure at all n locations
tcaacatcagaccacttccagggtgctggaactacttcacatggacttgatggggcctatgcaagttgaaagccttggaggaaagaggtatgcctatgttgttgtggatgatttctccagatttacctgngtcaactttatcagagagaaatcagacacctttgaagtattcaaggagttgagtctaagacttcaaagagaaaaagactgtgtcatcaagagaatcangagtgaccatggcagagagtttgaaaacagcaagtttactgaattctgcacatctgaaggcatcactcatgagttctctgcagccattacaccacaacaaaatggcatagttgaaaggaaaaataggactntgcaagaagctgctagggtcatgcttcatgccaaagaacttccctataatctctgggctgaagccatgaacacagcgtgctacatccacaacagagtcacacttagaag

SEQ ID NO: 5843 - DNA, 466 bp, Glycine max
  unsure at all n locations
ngaacattagcttcagccacgtaccgacaagtttcaccaacccttgggtctgtctctcccaaaatctgcttctggacttctaacccagtggtgtagcacattattgaattctcaagttggcccagcatagcataggtgtctcccagttgcatgtgaccagcaaatttagcaagggcatgttgttggctttccccaataacaggaatctcaattgagcgctcaagaatcggaattgcctcaccatattgacccaagctgcaatatattgctgctgtaacatgtaaacacataaccagctccaaacttggtttcccattaccaaacttctcaaacagttccattgcttgaagagctaagtcaagagccttctgcggattatccnctgatgaaatcagatctcttgcctgctntagcaatacaagtgcgcgctcaggtttttctaatgctgactcagccatactctcaa

SEQ ID NO: 5844 - DNA, 420 bp, Glycine max
  unsure at all n locations
actaagctngaggcaaactagatgcattggttaacttggtaacccagctggccttgaatcagaaatctgtaccagtcgcaagagtctgtggtttatgctcctctactgaccaccatacagacctctgcccttccatgcagcaacctggagcaattgagcagcctgaagcttatgctgcaaacatttacaatagacctccttaacctcaacaacaaaatcaaccacagcagaacaattatgacctctccagcaatagatacaaccttggatggaggaatcaccctaatctcagatggtctagccctcaacaacaacaacagcaacctgctccttccttccaaaatgttgctggcccaagcagaccatacattcctccaccaatccaacaacagcaacaaccccagaaacaacaaacagttg

SEQ ID NO: 5845 - DNA, 442 bp, Glycine max
  unsure at all n locations
gggtcatgctagagcatagtctcgtaagaggacttccaaagctgtcatatcaagatgactctctttgtgaagcttattagaaagggaaaaaagtaaaaagttattttaaagccaaaaatgttctttccactttgaggcctatagagccttttgcaccttgacttgcttggaccaaccaggactacatccctttttggatgcagatatggtctggtcatagtggactattacactaaatggacatgggttaggttcctagtccacaaggatgagtcttttgataccttctattaattctataaaaagattcaaaatgaaaaaggcatttgtatctcttcaatctgaagtgatcacggcagagagtctgaaaatgatctttttgaacaaaattgtgaagagaatggtattcaccataatntntccacttcaaggacaccacaac

SEQ ID NO: 5846 - DNA, 336 bp, Glycine max
agcttgaccttctacagggatatcaccaaattcgcatgcactctgaggacatcccgaaaatggcttttcgaactcaccatggccactacgagttcaaggtcatgcccttcaggttgtgcaacgccccatcctcttatcacgcgaccatgaacttaatattccgttcatacctttgccactttgtcgttgtcttcttcgacgacattctggtatacagcggttcattagaggctcatctgcttcatttggagatgactttccaggtattacttgacaaccactttgtcctgaagctctctatatgcttttttggccaaccgcatgtcgaatacttgg

SEQ ID NO: 5847 - DNA, 465 bp, Glycine max
  unsure at all n locations
tatccagaaaaccaattgaattgtgaactgtaattaaattatggcagtgttcaaatgaaaattcctccaaatttgggagaccagatacgtcaggaatctgtgttaaacatttgcacccgtcaaaattcaatgttcttagatttacgaacatctgccaaaaaaaacagaaacaagaaagaaataagaacagaatgattaatcttaaaagtgaatntattaaataacaagatgtggaaaatgtactctttaagcttaccttccataagccatcccactcaaatgacgaaatacaactatagggtaacttgcatatggaaagttttttcggatgaaaatcagatggtaaacaatgtgaaggatatctccaccattccagtactctcaaattgtttggaagatatttgggacctttggaaaanttaccatttctaataataagtgtcttgagggttttcatcttcttga

SEQ ID NO: 5848 - DNA, 250 bp, Glycine max
agcttcacagcggagacgacatatcacctgtactttccaaggcaattcatgagtccaggattgctattactgtgctttctcaaaactatgcttcttcctcgttttgtttagatgaacttgtaaccatccttcactgctagagggaagggttgttggttataccggtctttcataacgtaaatccttctgctgtcagacacctgaaaggtagttatggacaagcaatggctaagcatcagaagaggttcca

SEQ ID NO: 5849 - DNA, 434 bp, Glycine max
actagatgccttggttaacctggtaacccaactggccatgaataaaaaatctgcacctgtcgccagactctgtggtttatgctcctctaccgaccaccacacagacctttgcccttctgtgcaacaatctgaagcaattgaacagcttgaagcttatgctgcaaacatctacaacagaacaattatgacctctctagcaacaggtacaatcccgggtggaggaatcatcccaaccttagatggtcgaatccttcacaacaacagcaacaacaaccttattttcaaaatgctgttggcccaagcagaccatgcgttcctccactaatctagcagcaacaacagcaacagcacagccccaaaaataacaaatagttgaggcccctccgcaaccttcccttgaagaacttgtgaggaaaatggctatgcaaaacatg

SEQ ID NO: 5850 - DNA, 473 bp, Glycine max
  unsure at all n locations
tgcanaaagaaacaagttcaatttgcctccatcaccaccaattctacccataattggcaatcttcatcagctaggaacactaccacatcgctccttccatgcactctcacgcaaatatggccctctcatgttgctgcaattgggccaaattccaaccctagtggtctcatcagctgaagtggcaagagaaataatcaaaaaacatgatattgccttttccaaccgcccacaatctacagctgctaaaatattactttgtggatgatgcaatgatataaaaaacaaaaatattgaacatgttgaaaaccataagtaatacactcagatcaaacagggaagagaaaaaaaataattttcacaggtatctttctcttattatttccactagctcaaatctgattggtgtgttttatgtaaagggaggaatagacttagtaatcaagattgagagcactccatcttatntaaaaaac

SEQ ID NO: 5851 - DNA, 422 bp, Glycine max
  unsure at all n locations
tgttaacaagacgaatgttggcaaaagtccnccttgccatcacctcatcattgcctcgacgacttccataagaattgaagtccttgcgttccaccccatgctcaacaaggtatttggcagcaggactgtccttgtgaatgcttccagctggagaaatatgatcagtggttatactgtcaccaaaattcagtaggcaataagcatcttttacaccatgaggtccaggaggatccatggtcatgctcttgaagtaagggggttcatggatatatgttgagtcagggtcccatgagtatagagtgtcagcaggaacttgtagttgattccacattgggttccctttggtaatagcctcatatgtacttcgaaacatctcaggcaacacactggattggacaacctaagataaaagtcacccaaag

SEQ ID NO: 5852 - DNA, 376 bp, Glycine max
agcttgtcctattatgtgaggatactcgatgatagaaaatatgaactgatctgtgttaagtaatgtcatggtgtgggtagcttctaatcatatcttgcaaccttttccaagcttcaggtagactctcttactgccattgcacaaattttctaatgtccctaatgtactgatccatcttcatgggagagaaatactttcttaagaaggcacttgtgcactggttccatgtagtgatgccactctcaagtggtgaacacaactagtcccttgcctttccattgagagagaaaggaaaaacataaagtctaacatactttgtcagtacacagttctatctcaccgtgttggtcaactgatgaacttcctcaagtgctat

SEQ ID NO: 5853 - DNA, 454 bp, Glycine max
  unsure at all n locations
ctggagcnttttacaataatgacagcaggaggaggctttcttatggaagtaataacgcccaatgaagtgacttatattgctatttttgctgcttgtagtcactctgggatggaggatgaaggcctgcatttgttccatacaatgaaagctacccatggggttgaacctataggtgaccattatgcttgtcttgtggacttgcttggcacatccggtcgagtcaaagaggcctattaactgatcaatacaatgccatctcaatttgaacaaagtatatgcatggagtatcttgcttggtgcctgtacgattcaccagagtgtagaatttggtgaaattgcagcaaatcacctgtttgtcttggagccaaatgtagctaaccattatgttctaatgtccaacatatactcctcagctggactatgggaccaggcattgcgagtacctaatacaatg

SEQ ID NO: 5854 - DNA, 447 bp, Glycine max
  unsure at all n locations
atactaagcttgagcacatcaaacgaagataactntatattcggatgtgcgattgagtcccggtatatatcgagaggctccaaattgaaaacggaagctcatatcaaattcaaaggacaataactttttactcggatgtgcaatagagtcccgtaatatatcgaaacactccagattgaaaatggaagctcgtatcaaattcaaacgacaataactttttactcagatctccaatagagtcccgtaatatatcacaactctccaaattgaaattggaagctcgtatcaaattcaaacgacattcacttttaacttggatgtccgattgagtcccgtaatatatcgagaccgctcaaattgaaagcagaagctctaagcaaattcaaacgacaataacttcctattcggatgtccgatcaagtccgtaatatatcgagacgctctaaa

SEQ ID NO: 5855 - DNA, 397 bp, Glycine max
cgacaataacttttactcggatgtctgattcagtccccgaatatatcgagacgctcgaaattgaatgttgaacctctgagcaaatgcaaacgaaaataattttttcttggatgtctttttgagacccgtaatatatcgagacgctcgaaattgaatgttgaagctcttagcaaattcaaacgataataactttctactcggatgtctgattgagtgctgtaatatatcgagacgctcaaaattgaatgttgaacctctgagcaaatgcaaacgacaataatctttttctcggatgtgttgttgagccccgtaatataacgagacggctcaaattgaatggtgacctctgagcaaaatcaaaccggaatatcttttttcttgaatgtttgaatgagtc

SEQ ID NO: 5856 - DNA, 398 bp, Glycine max
  unsure at all n locations
agcttgaaggcaaactggatgcattggttaactnggtaacccagctggccttgaatcagaaatctgtacctgttgcaaaggtttgtggtttgtgctcctctgctgaccaccatacagacctttgcccttccatgcagcaacctggagcaattgagccgcctgaagcttatgctgcaaatatttacaatagacctcttcaacctcagcagcaaaatcaaccacagcagaacaattacgaacctttcagcaatagatacaaccctggatggaggaatcaccctaacctcagatggtccaaccctcagcaacaacaatagcagcctgctccttccttccaaaatgttgctggcccaagcagacctacattcctccaccaatccaacaacaagcacaacccc

SEQ ID NO: 5857 - DNA, 460 bp, Glycine max
ctaagcttaggctgctcaattgctccaggttgctgcatggaagggcataggtctgtatggtggtcagcagaggagcacaaaccacaaacccttgcgacaggtacagatttctgattcaaggccagctgggttaccaagttaaccaatgcatccagttttccttcaagcttcttagtttcagatgatgcagatgggtttgtagctacctcatgcactcctctaatgactatggcatcatttctggcgctaaactgctgggagttggaggccatcttctcaattaaatttctggcttcagcaggagtcatgtctccaagggctccaccactggcagcatctatcatacttctctccatattactgagtccttcataaaaatgttggagaagaagctgttctgaaatctgatggtgagggcaactggcacatagtttcttaaatcgcttccagtactcataca

SEQ ID NO: 5858 - DNA, 428 bp, Glycine max
agcttgtgtcacactttcaattgtcgaagctgaatacatagctgcaagaagttgttgtgctcaaagtctttggatgaagcaacaatgatgtaagctccattggagcttgtaggcctaggatcttcttcatcaatggattcctttgcttcttggaagatgaatggcagcggaatggagaaaggaagagagagaggagacgccacttcaaggagaagatgagtctagaagaagctcaccaccataggaggccatggataagagcttggaggaagaatgagatgaatgaacggagagggagagaagagcacgatattttgtgctctagatgagctttgagatctgaaagttaatatgcaaagatcaaagctgaaaaaaatgcacacacatgacctctatttatagcctaagtgcacacacaatggagggaa

SEQ ID NO: 5859 - DNA, 367 bp, Glycine max
  unsure at all n locations
agcttcagggcaatgccaaacactntgatgcttcgtccagctgatggtaatgaaactgctggatcatacaaagttgctgtggttaacaggaagagaccctcaattcttgcaccttctaggcaaaagttgacccaacttccaggaacttctattgagggagttgaaaagggtggctacattatttcagacaactcgtcaggtaacaagcctgatgttattttgattggaactggttctgagttggaaattgctgctgctgctgctgaggatctaaggaaggaaggaaaagctgttagagttgtttcttttgttagctgggaactntntgatgagcagtcagatgaatacaaagagaggttctccctgc

SEQ ID NO: 5860 - DNA, 345 bp, Glycine max
  unsure at all n locations
agctngaaggtatgtacatgaccaaatctttagttaatcgtctttacctaaagcagtctttgtattcgtttaaaatgcatgaagatagatcagtaggagaacaattggatttgtttaataaactgattctagatcttgaaaatatcgatgtcactattgatgatgaggatcaagctttgttattgttgtgctctntgcctaagagttactctcatttcaaagagactttattgtttggaagagattttgtttctcttgatgaagtgcaggctgctctgaattcacaggaattgaatgaaagaaaggaaaagaagtcctctacaagtggtgaaagggtgacagcaa

SEQ ID NO: 5861 - DNA, 364 bp, Glycine max
caagaatagcaacttcctcataaaagatgcgatggggatagggctgagcaccgggaaagatgaaacttcccctggtgtaattcacaaatctaacattgagggaaagcatttcagcaaatttcaatatgggtgggattgcaagcagtagctttgtagcaccacaggttttgatgatgatcttgtatgcataaacaaagagactggactcatacagaacataggagtcgacatgatcatttctgagagatgaaacaatggtgcaagcagccggtgtaagtatctcatccaactgggactttgcaagagcttctaaacccattccctcagggtcagcaaaaagtccggctggaaaaaggatatttcc

SEQ ID NO: 5862 - DNA, 446 bp, Glycine max
tcgtaaatctctataaggcctcaaacaatctccaagggcgtggtttgacaggctaacaatagttgtcaagcaagatggttttgctcaatgccaaacaaaccatactatgtttgttaagcattctctggatggaaagatagctttgtttattgtttatgtagatgatatcataattctaggagacgattatgatcaaataaatcatctgaagaatcttctagccgaggaatttgaagtcaaggatctacgccagctcaagtattttctagggatggaaattgctcggataaagaatggtatttttgtttctcaaagaaagtacactctagatttacttcaagaaacggggatgcttggatgcaaagcagccaatgctaccatagaaccagtcaaaaggagtgaagaggagagtgtagcagctgacaaagatagatatcacagtctag

SEQ ID NO: 5863 - DNA, 425 bp, Glycine max
tgtcataaaattgattgataaaaacaactagagaaaattaccagccattaacaacaacgggccagtaatgagctttagttggagcatctaatcgatgaacaataactggatcagccttcatactagaaattgagaaacctaacagactatgaaatgatgctcatcagaactgcataatgaatcacaaaagacaagggctgattgctaataactgtggcgacaaacctgccatataaagagaagtcataaatgaccctgtataaactctatcaacagccaatccatgttctagttgtaattctggaactgattcttcagctgtaatcattagtaccattgtacgagtgccacctaacctgcatatgaagaatcatttcactaaacattctataggaaaaatatcgtcacaaggaatcttgaacatc

SEQ ID NO: 5864 - DNA, 454 bp, Glycine max
  unsure at all n locations
tgtcttaagtgtttatatatcaacttgtgatatgtactatcaaaatagttagttaggagtaaaagtcttgtgtgcatgagcttggttctggtacccttgatggaatgtaatgtgccatgcaatctttttacgtattatttattcaaatttttttgagaattaattattttgaaattcaagagcttataaaaaaatccaatttttaatgtgacaaattttgatgaggcccgatcacaaaaatcatgagatttccttcttatttatttaatttttccttttatctttaaatacttttattaccgtatcaaactatcaattattttaattgccctttaattccttcttatttatttaattttcccttttgtctttaagcatattatcccctagttcctaatttcgtttaatgatcccattagctctcttggtacggtatcaacaaaactttnttctc

SEQ ID NO: 5865 - DNA, 427 bp, Glycine max
  unsure at all n locations
agcttgngactgccagattgggtaaaatttcagtgcagcttttaattggacaaatgcagcttgcgccacttctctccattgaaaactgtcctttttaagaagctggtgtaagggtttaacaatctttccataatcttttatgagccttctatagtaccctcttagcccttaaaatccccacaggctgttaatatctttaggtactctttagattctggtgagtggcgagaaccacggagcttctactttcttgggtcttctgacaccccttcagctgagataacatgtcccatatattccagatttggtcaacccacactgtgtgtccttttggtcatcactagcttatttcttataaatgcttgcaagttgcaacaccttcctcaaatgatgaccttgatctttactatgcgaacgtctggacagt

SEQ ID NO: 5866 - DNA, 470 bp, Glycine max
  unsure at all n locations
ctctccactaagttgcctgatgcctgaaatgtcttttctgatggtattggtcctagatgcagggaagaatttctccaagaacaccattttaaggtcatcccagctgacaatggacctgngagcaatagtatagccaatcttgtgccactccctccaaagaatgaggaaaagcctttagaaagatatgatcttcttggacatcagggggcttcatggtggaacaaacaatatggaactccttaagatgcttatgaggatcttcacctgcaagaccatgaaacttgggcaacaaatgtattanttcagtcttgagaacatatggaacaccctcatcaggatattgaatgcacaagctttcataagtaaaatcaggtgcatccatctccctaagagtcctcccacgaggtggaggttgagtcatgttctctntatgaaaattagtagtggaatgctcaaaatcagaatattca

SEQ ID NO: 5867 - DNA, 422 bp, Glycine max
  unsure at all n locations
agcttcttatccaaggctcatcttggtggtgaagctccttcttccatggcttattccctagtggatggtgcctcctctcacctcttctcctttgtcttccggtgcatctccatggtggaaaatcaccattaaaggacctcattgaagctcgaagatccagcctccatagaagccccacaagtaagcttccatcaacacatgagctcaaagggaagcttccaatctggtggttgcatgataggagaggtggttagccttttcctcaactcctcaaatgcctctttgcagggttggtcaagcacaaagcctatatgtcctttataagaagcttggacaatggcagggcaatactgctgacatctgnatgaatctcctatagaaacttgcatgtccaagaaaagaatgcacttcccaccaaaagc

SEQ ID NO: 5868 - DNA, 399 bp, Glycine max
agcttggttatctccttcttcactacatcaagaatcaccgggttgagtcttctctgtggctgtcttactggtttagctccatcctctaaatttattcgatgcatacatgtggatgggctaataccaggaatgtctgccagggtccagcctatagccttcttatgcttcttgagaacagataaaaacttctcctcttgctcaccagcaagggatgcagatataattactggaaaacttttgctatcatccaagtaagcgtattttaaatttgatggcagaggcttcagttctggtgtggccggctggataatggtacaaggagatggtttctcaccctgcacctcataaagaaagcacacgtatgtgtacttctcgaaacatggttagttctatctgact

SEQ ID NO: 5869 - DNA, 403 bp, Glycine max
agcttgtggtgcaaaagattacatctatacttaggaatctttgatggggcagcctccaagactccattaagattccttgggtgaggtgggacatagtctgcctacctaagagtaaaggtgggttatggatcaaagatttgattaaattcaacgaggctttgcttgctaaatgggggtgggagttggcaaataatcagaatcagttgtgggccacaattctattgtgtagatatggcggttggagggattcgatttctcatacgaactgcagtttatactctccttggtggagagacctcaatgttatcttcaagcagcagcaaagcaccacaattggtaaaaatagctttattttgccataggtaaggacggtccatggaatacaaaccaagtacttattggc

SEQ ID NO: 5870 - DNA, 486 bp, Glycine max
tgctattacggaactataaaactaagcttctctttgtgcaactgtctcatcctctttttcaggtgtagaatgaagcttgacaggttcaggtgcaggtgttgctactggtggaggcacttgaatttggttgctagacctcaaggtgatggcactcacatttttcggattttgcacagtttgtgaaggcaatttgtcagaattttgggactgagcttggttcatctgagtagccatctgccccatctgatttgtcagactttgaatggaggctcttatctcttgctgaaattgcatattatgcatggtcattttgcctcactaactcttctaagggaggttgaggaggagcctaagttgcttgttgtctttgtggtgactgctgctattgctgttgctgtattggaggaggaacatatggcttgcttggaccagcaacattttgaaaaggagggacagactgttgttgttgtggaggacttgtccatc

SEQ ID NO: 5871 - DNA, 451 bp, Glycine max
  unsure at all n locations
tgtntaccccatgttgagtntgcttacaataaagctgttcatatcactactaattgttctccttttgaagttgtttatgtttgtaacccactaacttctcttgatcttttgcctatgcctaatgtttctatttttaagcataaagaaggtcaagtaaaggcggtctatgtgaagaagcttcatgagagagtcaaagatcaaattgacaggaaaaataaaagctatgctaaacaagccaacaaagggagaaagaaggttgtcttcgaacctggagattgtgtttgggtgcacatgagaaaagaaaggtttatggaacaaaggaaatcaaagcttcaaccaaggggagatggaccattttaagtgcttgaaagaatcaatgacaatgcttacaaagttgagctacccagtgagtataatgttagttccaccttcaatgtctctgacttatctc

SEQ ID NO: 5872 - DNA, 464 bp, Glycine max
  unsure at all n locations
tcccaagttnttaagttcttcctgaacactggcctcatttatgttcccacagtcctattaacaacttccgtttgtccatcggtttgcgggtgacaagtggttgaccataacaatttattgcccaacttgctccacaaagtcctccaaaaatgacttaggaacttagagtccctatcactaacaatgctccttggcaaaccatggagtctcacaatctccttgaaaaacaaatcactcacatgggaagcatcatcaacttttttacatggaataaaatgagccattttagaaaacctatcaacaaccacaaaaatggaatctctaccattgcttgtttttgcgcagcccaaaacaaaatccatggataaatcaatccaaggatactccggaattggcaatggagtatacaatccatgaggctttaccttagactgtgcctttntacatacaatgcaatgttcaca

SEQ ID NO: 5873 - DNA, 229 bp, Glycine max
  unsure at all n locations
gctgagaatgggaatcgcactagcaatactacgcatgctccaatcttatgtggatgacacattaacgnatcacaattatggggctccgaaaaggggtgataatggagaattctctaagctatcactacgcatagctacaaactctaaggtggaggacacatgaactattactcatttcatggggctccgaatagattgagaatggataattgcactaaaaaatcactac

SEQ ID NO: 5874 - DNA, 480 bp, Glycine max
  unsure at all n locations
gcaagctaagctccttaactgacaaggctcttatatttgaatatatccttgtggaaccttcacccgacgaagacactgacaaaaacttatattcttcttcttggacaaagtatggcaggctgggggcaagtaaattttcttcccatcaaaccttggatgcaactgtgatcatatacccatatcagctagatcttgacagatattcaagccatccttcgtcttgccttgaatgttaaggagcgttccaatcacactgtcacaaacattnttctccacatgcataacatcaatacaatgtctaacctcaagatcacaccagtaaggaagatcaaagaanatgaacctcttcttccatatgcaactctgacttttatccttcttttgggtcttcccaaatacaatattcaggtgtngaacccgttgatataccttgctactagtcaacagtatcggcgcaatatcatgctcttgaacttcatt

SEQ ID NO: 5875 - DNA, 433 bp, Glycine max
  unsure at all n locations
tctcatcataccggtaatgccttctcctacaatattaaagagcaagggagctagagggtccncttgtctcaaaccccttgtaggtgtaaattccttagaggggctaccattaatcaaaactaatatagaagctgagtggaggcaagctgatatccatgatctccattttgggcagaaccccaatctaaacagcatgtagtccaaaaaagaccaagacatngaatcatatggcctttcaaaatccaccttaaatatcatcactggtttcttgtttctccttgcctcctcaaccacctcattgagtatcaagataccatggaggatatgtcttcctttaatgaaggcagactgcctttcatcaattaacccatccataacagacctcaatctattagacaacaacttggctataattntatacatacaacctatc

SEQ ID NO: 5876 - DNA, 302 bp, Glycine max
  unsure at all n locations
catgcaagcttaatggaggaaaagaangatagatagaattggtgggagcacganattgaaggagaaaagagagggagagaagttgaactttgaatgatgtagctccatgtggagcttgtaggccttggatgttcatcatcaatggagtcctttgcttcttaaagatcaatggtagtgaaatggagaaggaagaaagattattggagacgccacttcaaggagaagatgagtcaagaacaagctcaccaccataggaagccatggataagagcttgaaggtagaagaagatgagtggagggag

SEQ ID NO: 5877 - DNA, 389 bp, Glycine max
  unsure at all n locations
taagctggaggggcaactggatgcgtnggtcaacttggtaacccagctggccttgaatcatanatctgtacctgtcgcaagggtttgtggtttgtgctcctctgctgaccaccatacagacctttgcccttccatgcagcaacctgtagcaattgagcaacctgaagcttatgctgcaaatatntataatagacctcctcaacctcagcagaataatcaaccacagcagagcaattatgacctttccagcaacagatacaaccatggatggaggaatcaccctaaccttagatggtgcagcccttagcaacaacaacagcagcctgctccttccttccataatgctgctggcccaagcagaccatacattccttcaccaatccaacaac

SEQ ID NO: 5878 - DNA, 400 bp, Glycine max
agcttcaacattcaatttcaagcgttccgatattttacaggactcatatcggatagccgagcaaaaagttattgtcgtttgatattgctcagagcttcggtattcaatttcgagcgtctcgatatattaagggactgaatcagacattcgagtaaaaagttattatcgtttgaatttgcacagaacttcggtattccattttgagcaactcgatatattacgggactcaatcaaacattcgagtaacaagttattgtcgttggaatttggtcagagcttcgataatcaatttcgagcgtctcaatatattacgggacttagtcagacatccgagtaatacgttattgtcgtttgaatttactcagagcttcggtcttcaatttcgagcgtctcaacatat

SEQ ID NO: 5879 - DNA, 385 bp, Glycine max
ctcgacaagacagtcacactgtgcttcttaacaagattaacttgtgaaatctactctgaagatacatgggataatacccataattataacactccctctcaagctggagcatattaattatatgcaccatgcttggaacatataaactgaattctatgccccctcaaggatttagtcaaaatatctgctggctgatcattggaaataatgaattcagttacaatctcttttgacagtagcttctgccgaataaagtgacagtctatctctatgtgcttggttctctcatggaatactggattggaagctatatgcctagcagcctgattatcacaatacaacatcatattgcatcacttgctgaatataactctgcagaattagt

SEQ ID NO: 5880 - DNA, 444 bp, Glycine max
  unsure at all n locations
gctaatgtccttaactgccaagactctaatatntgaagagtatccttatggaaccttcacccgactaagacactgacaaaaacttatctntctccttttggacaaagtatggcaggctgggggcaagttaattttcttcccgtcagaccttggatgcaactgtgatcgtgtgcccatatcagctagatcttgacgggtattcaagccatccttcgtcttgccttgaatgttaagcagcgtcccaatcacactgacgcaaacatctttctccacatgcataacatcaatacaatgtctaacgtcaagatcagactattacggaagatctaagaacatagaccatctctttcatatgcaactcttacttatatccttcttttgggtctgtctaaatcaatattcatgtgtagtacacgctcatatacctgctcaccatacaacagt

SEQ ID NO: 5881 - DNA, 301 bp, Glycine max
  unsure at all n locations
agtcactgcagctgcagctcgcccataagctnggtaacagtgaacatatgccctcaagtagtgttctaccacgcgattcanaacttctgtctacccatcactntgtgggtgatatgaagagctcatgtgcagcaaggttccactcgcatgaaagagttcctgccaaaagcgactaatgaacagggggtctctatcggagaccaagctcctaggaatcccatggagtttgactacgatgttgacgaataaggaagcaggcatgtgtgccatatgtgcagttcgaaggattcctaagtgaatt

SEQ ID NO: 5882 - DNA, 326 bp, Glycine max
  unsure at all n locations
ttgagggtcctctcttaggcaatcatggttcacagctccaaactcataaatggaggacacatgaatgacaacgcaattcattcatggngctccgaaaaagggtaagaatggaggatttgcttgatggtcctctcttaggcaatcatggaacacaactccatactcgaaagtggaggacacacgaacaggcctaaccaataacattcatgttgctccaaataaggatgagaatggatgatctcgatgagggtcctatctagggcattattgaacacatctcctaacttgattttggatgtcacatgaatgacaacgcaatttattca

SEQ ID NO: 5883 - DNA, 434 bp, Glycine max
  unsure at all n locations
atccttaagtcacctgcggcatgcaagcttcttcagaaagatgtagaattgtgcttgaccaaccttacaaataggaaattgaggagctgaggaggaggcttaccacctctcccattatgcaaccactagattgggagcttccatttaagctcatgtgtgatgcctccaattatgcacttagggttgttttgtcacagagagttgataaattaacacatgtcattgcttacgcctcacacactctagatgcagcccaagtcaattacaccactactgaaaatgagcttttagatattgcttttgcattatantaaattagatcttatntgctntgctcccatattactgtctatgtgacaccctctacctcgacatacatataaataagaaaaacattantttattcatttagactttcagagaccaacataatc

SEQ ID NO: 5884 - DNA, 465 bp, Glycine max
  unsure at all n locations
taagcttgaataatctgtgaggctgtgatcaggatatctactcggctataaatgtgggtgctaatggtttggaatgagagcctagaaagaagaggtcactactctcgaaagagtagcattgtcaaaaaaactcatgcatgcttntacaaacatcctcctcaatagtctcccagaaagatntataaaaattaaagccatagtcatcagggcctgtgctttgtcctccttcacaacaccaaacaacattctttatctcttctgaggtgagagacatatatatccttgaatactcctcctctgaaagttgtttaaatcgaactccatctagaattggtctatgtatccctggctcacataacaaatattcaaagtgtgatctgattgtgggttaaacctcatcgacctcatgcacccaactctgatcagtattaatgcgctctagcttatntatactagttcttattc

SEQ ID NO: 5885 - DNA, 395 bp, Glycine max
taagctcgatcctcgctgttatgctgcaataaagcttcacgacatatacgttccttatggagctcaaggcctgaacctccgcgtcaaactcctttgacttcccagcagcgaacttattcccaagcatgggagtgctgctccacgacgactttctcctggcggtgacatcggtgttccatatatgcttcaccgctagttctttctcgttggaaagcgtgaccctgtacacgttccctgaacctgctattactatgagattctcctgcttgatggaatctagaatcttcccctccttgaaactcaacacgtggaacgatatcacgtcccacgtgattttcttcaaggaactgctcccgtatttctctgcctccttcatcctcctcttgagttgcatg

SEQ ID NO: 5886 - DNA, 244 bp, Glycine max
  unsure at all n locations
agaagatgagtggagggagagggagagaangagtactatatnctgtgcctcacatgaggtctgaactttgaagtgtaattctcaaatgatcaaagttgaaacaatgcacacacatggcctctatttatagcctaagtgccacacaaaattggagggaatattgaatttcaattcaaatctcacttgaatatgaaattgaatntgtggagccaaaatttcgctaactatgattagtgaattttag

SEQ ID NO: 5887 - DNA, 356 bp, Glycine max
  unsure at all n locations
tacatcttaatatgtattattacattntattaattcattttaaatgcatntaaatgtttcatttattattattatgtaaggtaataaatgtcttattatttattccctcctccttcaaagcaaagaacaatgttnttcattaacaacaagattcaaactcattaaactattcttatcaattaaactaactctgttgatgtcaaatgattcattctataattcttaatgtatcttctatcatacttttaagataatatctactcattagtttgttttgataatatatattctcattaattcacttggattgttcgttattttctatgccacctacatttactcgattgtgcatatat

SEQ ID NO: 5888 - DNA, 266 bp, Glycine max
  unsure at all n locations
agctntactagacttatttcggcttgagttgaatacccaagacttgagtttggcttattacctatantgtttttgtaaagtctcgacttgtcttacatgatagcctagcttagcctacaagcctatatagaagctcgcttaaaggtctttgatcaattaattattttaaaacctaatgaaatactaattaanaaaaaaagaaacttattaaatttcatataagtaatgtacaaattgaaaaataattgataaacaaaatcatattg

SEQ ID NO: 5889 - DNA, 165 bp, Glycine max
  unsure at all n locations
acttgaatctcgaatgaatcatagcgaagaaagaactccacaacgaaaagcctcgaaaccaatgtgacgaagtctntttcggcgcattgcttgttcccatgtgttggagactcagtctcaggcccattggaccacatcacgtgcttgaggagctactaccacttc

SEQ ID NO: 5890 - DNA, 451 bp, Glycine max
  unsure at all n locations
agcttctggnctctttagtcaatgttcaattcatacgctcagcaataccattatgttaagtgatgtaagtccatgtggagcttgtaggcctntgattttcttcatcaatggagttctttgcttcttgaagatcatggcaacaaaatggagatggaaatcatcgaagcagaatcgaaatggaagaaagatgattggagacgctacttcaaagggaagatgagtcaagtacaagttcactaccataggaagccatggataagagcttgaataagaagaagatgaggggagggagaaggaccacgaaattttgtgcatcaaatgaggtctgaactttgaagtaattctcanatgataaaagttgaaaaatgcacatacatgacctctatttatagcctaagtgtcacacanaattggagggaagattgaatntctattcanatctcacttgaat

SEQ ID NO: 5891 - DNA, 341 bp, Glycine max
tggagaacgcatgaacgaaaatgcaattcatggtgctccgaataagggttgaggatggagaatcgcactaagaaatcactacgcatggctccaaactcgtgggtggaggacgcatgaacgaaaacgcaattcatggggctccgaaaaagggttgaggatggagaatcacactaagcaatcactacgcatggctccaaactcgtgggtggaggacgcatgaacgaaaacgcaattcatggggctccgacaaagggttgagaatggagaattacactaagcaatcactacgcatggctccaaactcgtgggtggagggcgcatgaacgaaaacgcaattcatg

SEQ ID NO: 5892 - DNA, 417 bp, Glycine max
  unsure at all n locations
gcttcaagatcaagatctaagattcaagattcaagaatcaagagaagacttaatcaagataagtatgaaaaggttttttcaaaaactgagtagcacatggttttttctcaaaacatgtttaccaaagagtttttactctctggtaatcgattaccaaattgttgtaatcgattaccaatagcaaaaaggatttgaaaaagttttcaaatgaatttccaacgttccaattgattgcaaaaagttgtaatcgattataatgtttttggtaatcgattaccagtgcctttgaacgttgaaattcaaattcaaaagtgaagagtcacatcctttcacataaaagctttgtgtaatcgattacactgatntggtaatcgattaccagtgattgtttctgaataaatcacaagatgtaactct

SEQ ID NO: 5893 - DNA, 502 bp, Glycine max
  unsure at all n locations
ggatcctctaagtcacctgcggcactgcaagcttgatctgcctctatattntcaacaatcccatcctccctccagataatgagtttctggtggagagtagatggcacagccccaactccatggatccattcccttcctaatagcaagttaaaattagccttggactgtatcaccaggaataaagttggtcgaactatactgcctacagcaacatctacttgaatggctcccaaagaatagccagttttaccctcataattcgaaagcacaatgttgtgggcagatagatcagtgtcatgtttcccgatcttgtagagcatagatcgaggcattaagttaacagccgctcctccatctatgagcactntgttgattccaacattctcaacttttgccctgatgaanagaggtttgagatgacttntcatccgaanatctggcttttcgaaatagggctaatggtcttccacacagccattggtcataacatagtagcacactg

SEQ ID NO: 5894 - DNA, 400 bp, Glycine max
  unsure at all n locations
taaacattcaactntgtgcgtctcgatatattattggactcaatcagacatccgagataaaagttattgtcgtctgaattggcttaaagcttaaacattcaactttgagcgtctcgatatattacgggactcaatcagacatccgagtaaaaagttattgctcgttgaattggctcagaggttcaacattctatttcgagcgtctcgatatatcacgggactcgatcagacatcctagtaaaaagttatagtcgggtgaattgctcacacgtcaacattcaatatttagcgtctcgaatattataggactcaatcgcacattcgagtaaacagttattgactgttaaattggcgcatagggtcatcattcaatttcgagcgcctcgatatattacaggac

SEQ ID NO: 5895 - DNA, 451 bp, Glycine max
  unsure at all n locations
ctaagcttacanaattcttattcaatgcaattccagcctttgcatcataaatacttgatctagaacaataatttaaaaaaaaggttaacagaccaatcactaacaagaaaatgaataatgtcaagttgtcaacttaaaaaaggcaattgtgttcaataactttacagctgttaacataatttatacctgttatcaccaacaaagtcggtggagaccacatcatcttcagtgtaaccaagaattcccttcaacttgccctctgattcctccctgagaaagacaacattatataagacaatacaattgagaaggaccaatcccaaaatggaggcctttattaataacaagtaatgaaaatttgctttaagacccaataatacacaacatatatcattagaggagaatcanagaattctgtcattacttgatnagcattttaatttcatcatat

SEQ ID NO: 5896 - DNA, 469 bp, Glycine max
  unsure at all n locations
agcttgtgaaaatacaattcaacccttcaacccctttcttgtagtanttttgtcacttcacatgtaacatattctccatacttgtaaagatcttttttataaaagatttaaaatgatttaatcatttaacctttaaagattttgaataaaaacaagaatttgagagtttcaattagaaggaaagtaaggaaataactataataattaagaaattatactcacataacctattattaaaaacctaacatgacattgataataatagtgttataattaaaccataaattatctataaggaatggaataacttaatcatttcacatggttnttaatctctcatttaggttattaaaatttcttgatggattagtgtagaaaggtctaggttcgataggtgtgattaaggattgagtttaggggtaatttaagcccacctaacanaaaaaagatgggggatagataaatcaag

SEQ ID NO: 5897 - DNA, 403 bp, Glycine max
  unsure at all n locations
ggtgttgcttatgtcttggcatcatcaaaaccttttacacatacattcacacaaatcattggccaaacacttgtgaatcaattgagtattcttctaagatcttcaatgatgcaagcctaccccccaagggcattggatagaagactccaagaagattggaccagagatgcaagagaaggccctanggttctcatgagccttagggtagatttcaggcccatgggctaagtatgaactcacttatctttgtacgcattagattaaggtttcattatttttgggccttgtatatagggctccataatgtagataaggtaccctagaaatgtaggatttttcagcctttgtattttatggcacctagactagttcttgtattaggggtagttttgaatttcacatg

SEQ ID NO: 5898 - DNA, 472 bp, Glycine max
  unsure at all n locations
agcttcgatattcaacttcagtgctggaccatgccatgactntctgcttcctggaccaccaggatatcaagtttgagccaagaaagatagctgctcttgatgtggaacgtctgtcatcaatatctgatgcccaatcagcatcatagaaagcatagagtgccatatgttttgaaacagaagcaggttgaaggaataaaccatgaaatatagtacccttgagatatcttaatatccttttgaccacaacccaatgagaatccaatggattagccatatactgacaaaccttattaacaacataactaatctcaggtctagtaagggtagcatactgcagggcacccactactgacctatagagagttggatcatgaaataaatcagctccatgtttggacaatntacagtttgtaaccataggagtagagatagagtgtgcctcagccattttgagtttatgaagtagatctct

SEQ ID NO: 5899 - DNA, 403 bp, Glycine max
tcagcttctaatacaataatgtcagaatgcaatgctacagaaacatatggaacttcgttaagttcaactagacaaggcattttatatattaagaactaactagtcaaattgttccaaaaaatgaagtggatgtagaaaagaatgcatcaataactttaagttctaggagctataccttcccaagtaaattggagtgccaaggaaaatttgggacagaatgacagaaaacccaggttgaagtggatagtaaagggcaaccaaagttggccccaagatcttattgctccatataaggagtccatagtttagggcagatgtaatacttccctgaacaaataagggaatttgctttgtgaaaaatctaaatgtttataaatccatcaaaatcacccgttagaagatg

SEQ ID NO: 5900 - DNA, 387 bp, Glycine max
agcttgcaagagcgcggcccatagaatcccttgtacgatttcttattcgacgacgaggatgatggaggcggcttgcgtggctacaaagatggctcgcttggcggctaagtgagcgaacttggagtaagggcaggcgtcgttcaaggctttgcaagagagtgttaactcctcatcccaagtgctattatggcccttctcttctctgcgggagagggcctgccagaagtaaaagcccactcgctgagtggggtttccgagctgggaaacggattctcgcaaacggcttagggattccgcggcctgatccggctccgttgcagccagagaggcgcactccgccagagctttgaggaggggatgtacggaggagtccgagccggagtccac

SEQ ID NO: 5901 - DNA, 439 bp, Glycine max
  unsure at all n locations
agctngaacaccaggtgaggtaatatccacctgtgatgataaatagagaatgggaaacacgatttaggtggatgaaagacattacagtcttaattaaaaacaaggtggataaataaagagaaggagaatattcgaagccaggtcatgagtagtacatctggcagatctgaagcaatcaagtactcattaattgttgttgtgttttcatatatcttgtcagtaattccctctggtgcaggtccaccgttttccatattatatttaatcccaaaatcctgcaacaaggaaaccaaatgacagttacaatcattcatagttaatcttacaacccacaatgtctcagcataatatcataagggaacacccatcaactcctacatgtatgttatggaaatttcaccttactaacttaatattatgtcttgttgatatctgagag

SEQ ID NO: 5902 - DNA, 471 bp, Glycine max
agctgagcacatggacttgtgtgttgcccagtttcatcatatcttccgtaatacttatcacttctatcatatctaataattttcacatttatgtctaattgccattttacttcattgtagtaaatttctaaggcatccattgcctaagaaatctcgggcagtaagtagacataaccgtaatgtgaataatcatcaataatggtgataaaatatcattcttttccgaaagaactaacatcaaaaggtccacacatatcagtatgcacaatttcaagaagctgagtgcttcttggagctcctttctttgtatgttttgcttgttttccctcaatacaatccacacaaatatttagatccgtaaaatctagataatgaagaattcattctttattaatctttccatcctttctctaagaatgtgacctaaacgtttatgccacaagagaacagatcgttcattcactaaattat

SEQ ID NO: 5903 - DNA, 379 bp, Glycine max
  unsure at all n locations
tggtatctctaactagagggttnttgggagtatatctcatgttcatgttccagacgagagaagagcataaattgatgcaaaagtgacatactcatcttcattggttatgattcaagctcaaaagggtacaagttgtacaacccatactacaagaagatggtagtcagtagagatgtggtgttcggcgaagaatgacaatgggactttgagactcatgaaaattaggggtgggaataggccaggccaggccaggctttaaaaggcctgagcctatcctacaatgaattctttaggcctgagcctgtcctatagcctatcaaagacttttattttggctcggcctagccttattaaaagcctagtctggcctgatagtctt

SEQ ID NO: 5904 - DNA, 474 bp, Glycine max
  unsure at all n locations
agcttcccagctgatgctctctagaaaataattttcagaattgttctcattcttatgtgaccaaagcacagcttcaaatttggccactttagatgtatcacacaatcaaataaaggggcaactcccagattgttggaaatcagtaaagcaattactgttccttgatttaagcagcaataaattgtcagggaagattcctatgtccatgggcgcccttgttaatatggaagccttggttttacgaaacaatggtttaatgggtgagttgccttcttctntgaagaattgcatcagtttatttatgctggacctgagtgaaaatatgttgtcgggtccaataccatcatggattggagaaagatgcagcaattgataatcttgaacatgcgaggaaatcacctctcaggaaatgtacccattcatctcttgtatttgaaccgtattcaatagttggatctttcaaggaataacttg

SEQ ID NO: 5905 - DNA, 451 bp, Glycine max
  unsure at all n locations
cttgcatgggatctntaccttccacagcacattaaaagcactatcctgattttcatcaatatggtcccgcatgagcatcttgtacacattccccactgtgtatacaccagatgcatcttccttccaaatccacttgtcttctcggtccgggtgaatgcatcaaaaagttgccttctccattgaaaatcccactcccagcctgcagctgcaaaacttcccatctgctatatgtgttggggagattcgaggggtacacctgtggaccacgagccaccacataaagagacctgacaccacactctaacccaaaaccttaaggctcaggtttatgggtcttctcctcacttatatggtgctcaaccgtttcacttctacccgatgtaggacttcacctcacacttgtaacccaacacatctctccctcaagtgtgagtctcttcacatggtagtc

SEQ ID NO: 5906 - DNA, 501 bp, Glycine max
  unsure at all n locations
tgaaggtaggagaagatgagtggagggagagggagagaaggagtacgaaaatttgtgcctcanatgaggtctgaactttgaagtgtaattctcaaatgatcaaagttgaaaaaatgcacacacatggcctctatttatagcctaagtgccacacaaaattggagggaaatttgaatttcaattcaaatttcacttgaatttgaaattgaatttgtggagccaaaatttcactaactatgattagtgaattttagctatggctcagcccactaatccaagatcaagtccaagattctccactaagggtgcttaggtgtcatgagacatgtagagcatgaaggacatgcacaaagtgtgactatatgatgtggcaatggngtgtagcaagcaaatgctcacctccccttataanaattaattggattgggcttctcccaattcaattaaatntatttcccaacacacacatcanatattcacttaatgcgtgtgaaaatacaa

SEQ ID NO: 5907 - DNA, 424 bp, Glycine max
  unsure at all n locations
agcttgctntntgcaattccaagacacttgagatcttccaagtatattacatgtcctatttgtacttttctatctaatgtgaatcctacataatcagaatatgaaaaccctgttaagtttaaggaggtgcctttgggataccacaaacctacattggttgtgcccttaagatacttgataatccctttaacagcagttaagtgagattctttaggattggactggtatcttgcacataagtaaatgcttagcatgatatccggtctacttgcagttaggtagagaagtgatccaatcatacctctgtatcttgattcatccactgttatacctttctcatctaagtcaaagtaggttgatctagccaaaggagtagatgtttctttgcattttttcgtaccanacttctntatcagttctatgc

SEQ ID NO: 5908 - DNA, 392 bp, Glycine max
  unsure at all n locations
agcttctatggagaatgttagtgttatcaaggctattcttagaagctttgaaatagcttctggcctgagaatcaattttgctaagagccaactcggagcaattggtcagtctgaacagtggatcagatgtgctgctgatttcttgaactgtggaccactacaacttcctttntgctacctagggctgcttataggtgttaatccgagaaggaaggtggtgtgggaacctattatcaataaattcgaggctagattgaacaaatggaggcagagaagtatatcaatggctggtagaatcaccctaactaatgttgtcttaacagctctgcccttgttttacatgtctnttntcagggccccttcaggagtgattaacaagctcactaccattc

SEQ ID NO: 5909 - DNA, 480 bp, Glycine max
agcttgttgcagcggagaatatcacagtgatgcgcccaataaaaaaaaaataatgattcaaatagaatatttaagttgaaaagtttcaagcggtgaatatgtattaattaattattattttattgatagaaagagagagattaaattaaggtggatctaaaaaataaataggagagagaaaataatttctttcaagaaatcataataattagttagtgataattagttaacgaataaataattaataagacttatcctatttaaagttccacatgttaaaaaattcctaacaatatcaggaattaaagtgcaaatttactcacacaagagtgatgaactgatgattaagagaactttctcccgtatgttgtgcggacataattaatttgaatgaaattaattaatgtaagtttcctaaaatttctttaatttaaaatcaaatctagaatttataactaattttcaacataaaactaaata

SEQ ID NO: 5910 - DNA, 436 bp, Glycine max
  unsure at all n locations
cttctggtttcaattggagcgtttcgatatatttctggactcaatcggacatcttagtaaaacgttattgtcgttagattntgctcatagcttctgttttcaatttcgagcgtctcgatatatttcgggacttaatcggacgttcgagtaaaaagttattgtcgtttgaatttgctcagagcttcgaaaatcaattttgatcgtctcaatctattacgggactccatctgacatccgagtaaaaagttatttattgtcgtttgaatttgctcagagcttctgttttcaatttcgaccatctcgatatattacgggacttcatcgaacattcgagtaaaaagttattgttggttgaattttctcagagcttctggtttcaatttcgagggtctcgatatattacgggactccattggacattcgaggtaaaattatt

SEQ ID NO: 5911 - DNA, 364 bp, Glycine max
  unsure at all n locations
ntaacctcattgtctctcatagtctntagatgtgggagccaatccaatccttgtgttcggactctcagccacttatgatagccgccaatgatcccattactgcttcccctaagctctctgtcctttcttcatgccgcatcccatgccttgcgaactccttggagtaccctcgcgttgtggtcactaaaatctcgtgcgatgaaaggcgtgattgatgcaagctccattggagcttgtaggcctaggatcttcttcaccaatggattcctttgcttcttggaagataaatggcagcggaatggagaaggaagagagagaggagacgccacttcaaggagaagatgagtctagaagaagctcacca

SEQ ID NO: 5912 - DNA, 476 bp, Glycine max
  unsure at all n locations
agcttattcaacaatggcaaatcacataacaaatttttaagaaactcggcctcactagtagttgtgtctaaagcaataattgttgcttccatgctagaatgcgaaataatagtttgttcagtagatttccatgatactgcaccaccaactaaagtaaagacaaccacttgtcgattttgtttcattagaatcagaaatccaatttgcatcactaaacccctcaattacatcctaatctaccaactgcatatgcaatgtcagacccagagaagtttgtcaaatgcaacaaagaaccaataatttgaggatatttatgtgaaaaaattcctttactcaaacttttctttaacttaatggatgagtcataagaagtagaaacatgtttcacatcaaaataattaaacttcttcaatagcttttcaacataatgtgattgggttaaaaccatgttatcattnttctttataagcttaata

SEQ ID NO: 5913 - DNA, 458 bp, Glycine max
  unsure at all n locations
agcttggtgggtttgaaagtgtcatgaataanattattaaagttagtattattctttaatcaaattgatgtttctcctccataattcatgtaataaaaattggtattaaaaattctatatatgaatcgaattgttgtagttcagttgacaacaacacacaataaatttatggaagaggatgatttgagtttgattttcacataatacatgtgattaagttccagatcaaggattagtcccataatcgacccaaacaccctaagtacaattgttaaaaaaaaattagtatatattaggagagtaaaattttaatttggattgaaaattaacacacaaattacttatttttggtaaagaataaaatctgatagaattattataaatgatgaagttttcttttttaaacattcataactgattcattatgctgaaatcatatattaccattaaaaaagtag

SEQ ID NO: 5914 - DNA, 437 bp, Glycine max
  unsure at all n locations
agctngtaagacaagaaagtgcatctgagatattatatgccctaccactgattgagtaagcctgaagatggcacatttgtggagcaagatttcgttattaaaggacaattaggtcttgccatacaatagatttgacccatcaggcctgtttgaaattatttaacttactgcaatgaatcctagcttggtaaataattcttcaccgactcatcccatatggagaaaagtagcttatggtggtatgcaacctgtttatgatgacaatcatacagatgaatctttccttgaaggaatggtcatgaatgccagtgtttgtaaacgggacatgctaaaggtgatgctggactcggtttccatgtctgaatatttatgcattgttgctcttgttgacttggtctggacttgacacttgcatcaactattgatatatatctctc

SEQ ID NO: 5915 - DNA, 424 bp, Glycine max
  unsure at all n locations
tccactcattagtgcacatctccttcaagaatntagcatatcttggaattntctttatttcatccagcagaggtatgtttacctctacttttctaaatgtttccaagatctccctctccgcctcttccattnttttgttggaaattgctcttggagggaatggaagagggatatgatacttttgtaaatcagaattaccagtggaagattcacctgcatagaaattgttaggtaacttactctttaaatttttgtcatcatctttttctggagtagagtgaggttgggcaggttcatttgcggatgaggaagatgctactagttgaggtccttgacactgctttcccaacctcaatgtaatggcactcacanttttgggattctggacagatngaaaaaagtaatctatcagaattctgggact

SEQ ID NO: 5916 - DNA, 415 bp, Glycine max
  unsure at all n locations
gctcctgtnttagcttttacccgatttactcaactcatttgaagttgaatgtgatgctagtggagttggcattgnggctgttttgatacaaaacaaaaggcctatagcttatttctcggagaaattgggaggagccagattgaactattgcacctatgacaaagagttctatgccattgtgagagctcttgatcattggaatcattanttgcgttctaatcactttatattgcattcagatcatgagtcattgaagtatatcaatgggcagcagaagttgagtccaaggcatgctaaatgggttgaatttcttcaatcttttaatntctcttcaaaatacaaggatggtaagagtaatgtggtggctgatgcactttcaaaganggatgctttaatttcaattctttgaaactcg

SEQ ID NO: 5917 - DNA, 474 bp, Glycine max
  unsure at all n locations
agcttctggtgggacatcttgacttgctttccaatctgacattcaccacagattctgccttcttctattttcagattggggatgcctctaacagcacctttgtcaatgattttcttcatgcctcttaagtgcagatgtccaaatctttgatgccatattctgacttcatcttctttggaggatagacatgtggaggagtagctggtttcttgaggtgtccataggtagcagttgtcctttgatctgctgcccttcattagaacttcactcttctcatttgtcaccaagcattatgactntgtgaagtntacattgaatccttcatcacacagctgactgatgctgatcaagtttgcagtcagtcccttcaccagcagtactttgttcagactangaagtccatcatgaactagctntcccattccaatgatctttcctttagagccatctccaaatgtcacataactagtggag

SEQ ID NO: 5918 - DNA, 447 bp, Glycine max
  unsure at all n locations
ggtagcatagtctgatggggtggagttcacagtcagagagtgttagtgccttcaaacttcgttagcagatatttattgttttcttttgctgagtatctgaagtaaatgttttatccatggcaggtcattattgtcctgcattgtcaaaagctgttaaaaccatgaagaagggagagaaagtgcttctgacagttaagccacaatgtaagcgccgcataatgttttggcgattagctattactaacattcttcatgaaagtttctttctcgtttctctaatttggagttatgttcgtttctttgtcgggtcatagatggatntggtgagaaggggaagccacaacaaggtgatgaaggtgcagttccaccatatgcaacattgcagattactcttgaattatgttcatggacaactgtttctgaagttactgatgacaagaaggtcat

SEQ ID NO: 5919 - DNA, 470 bp, Glycine max
  unsure at all n locations
agctntgacgtgtcgggatcgtatcgagttgacttggaatatccaagtcgtacaaggacattcctgtgtgacaaaaacaattgaaccgcgatatttgtcgctntctcttctccttctctgatgacgagtcagaattcggtgacgagttgcaacttgatgagtttgactttagctttagcttcttcgagagatcaaaatccacaagcattatgtgacctgtttcttggatcatgatgttctctggctttaaatccctatacactactccaaagttgtgcaaatactccaatgctagaaccaattccactgcgtaaaaccttcaccatggaaaataaaaaattgtatcanatcatcataatcattcatacttcaccgntcttgagagtgaggaaaatggactaaattcgttctatttggcacatacaaatcatataaaanaaataatcacacataaatacctataataacac

SEQ ID NO: 5920 - DNA, 477 bp, Glycine max
  unsure at all n locations
agctntntcctcttaataatgaagagttaggtcccattnttgtgttgggcaacacacccatctttgctaaaggaaacatcaagtccactatcacataattgacttatgctaagcaaattatgtttaagccctttaacaaaaagtacattatcaatgggaggatagggatcaatacttatctttcctactcttgctatctttcccttctaatttccttcgaaagtgactattccaccatgcataggagtcaagcattgaacatatacttttctgatgtcctgtgacgtaagcaaccactatccaggtaccatgattgatgtgttctttttgtggttgaatatatctgcaacataaattattttctaattaggtacccaaattttcttaagtcctctgttgttagttcttaaagcattggacgatccagtctttggtagatgtctacacttagatgtcaggtgtccaacctttccacat

SEQ ID NO: 5921 - DNA, 414 bp, Glycine max
  unsure at all n locations
agctntgtgttttctcacagataggacatgcatgatgccctttcacactgtatccacttaaatttccatatgctggaaaatcattaatagtacaaaacaccattgtgcgtaacctgaacgtctgctgcacatttgcatcccacacatctaccccttcttcccacaattgtttcaagtcttcgattaatggtgtaagatacacatcaatatcattccctggctgccttggacccgcgatcatcatacacaggataatgtatttacgcaaaatgcacaaccatgggggaaggttgtaaatcatcagtaaaacaggccaggaactgtggttgctacttaagctaccataaggattcattccatcagaagcaagagcaagccttatgttccttggctcatccccaaactctggataca

SEQ ID NO: 5922 - DNA, 389 bp, Glycine max
  unsure at all n locations
tgtgcatccaataccctgatgaggatgtcccatatgttcttaanactggactgattcatttgcttccaaagtttcatggccttgcaggtgaagacccgcacaaacatttgaaggaatttcgtattgtctgctccaccatgaaacccccagatgtccaagaggaccacatatttctgaaggctttccctcatttnttagaaagagtggcaaaggactggctgtattaccttgctccaaggtccatcacgagctgggataacctgaagagagtattcttagaaaaattttccctgcttccaggaccacagccatcaggaaggatatctcangtattagacaactcagtggagagagcctgtgtgaatactgggagagaattaaatactatg

SEQ ID NO: 5923 - DNA, 464 bp, Glycine max
  unsure at all n locations
anngcttgatttcaaatcttttttcattntgaatcaaattggctagtttacgaaaaactttgaaagcatttttttcaagtataataacaaggtccatgtaaatcttgaatagtcatccataattactaaggcataatagtcccctcctatgctcatagttctagaaggaccaaacaagtctaaattcaagagttcaagtggtatagaggttgaaatcatgtttttagatttaagacctcttagaatttccactaaagaatcaagtacaaacactatgcacatacaattccctaattctactcttcccttgaaccctacaagaggaagaacaagagttgaaacccaatcaactcacacaaacccttggtaactctaaccaagatcaaaaacaagaaagaaatcagaattggattgaatgcacctttatgtgtagatcaacatcttcaagctctttgataaatgac

SEQ ID NO: 5924 - DNA, 481 bp, Glycine max
  unsure at all n locations
agctntattggcatgcgaccaacttccttatgaagtaagtaaaaagttgaaatctactttaaaatcattgcttaatcaggatatttatacttcattgcctcttatgaaattttaagtatgatatttcaaatacaagaaaattcagcatgtctttctcatatttaatgtagtatatatatcaaagtagaaaagttgcatgcatgcctcattgggcattgttttacatgcatagaaaacaacaacaacatttgttttattcatatttagttntaattgaatttgtcacatataaacaatgaaatataactttaattntaatattatatatttagttaaataaataactttattaaatatttgatgatccccattagaataatttattaataatttaagttnttatatnggatgtgttagggacaaaataacacaagaaattgttgtaattgcanaannaaaaaatatgatatgatatattatt

SEQ ID NO: 5925 - DNA, 380 bp, Glycine max
  unsure at all n locations
agtttaataattcattattgttgtcacttactccttctgttaaggattagtttttcctcatgttggacaagtggcctcaataacttaagaaggggtgaattaatttcccattaacaaagttttaacccccttctaaatgatagactcagaatgcagaagaagaagcagcaatcaattgaataatattctttaaacatgcaagacaaaattgattgcaataaaatataagagataagggaagagagaaatgcaaactcgatttatactggtttggccactccccatgcctacgtccagtcctcaagcaacccacttgagatttccactctctntgaaaactctnttacaaagtctgaaccacacgggacaacccttccctt

SEQ ID NO: 5926 - DNA, 412 bp, Glycine max
  unsure at all n locations
gtgacctataaatctcagcttcttagaaggttcgttcctaatttctctacaattgcatcttctctcaatgagctggtgaagaagaatgtggcatttacctgnggtgaaaaacaagagcaagtctttgctttgctcanagaaaagcttactaaggcacctgttctagctcttcctgactnttctaaaacttttgagctagaatgtgatgcctctggagtgggagttggagctgtattgttacaaggtgggcaccctattgcttattttagtgaaaaacttcatagtgccaccctcaactaccccacctatgataaagagctntatgccttaataagagccctccaaacttgggaacattaccttgtttccaaggaattngtcattcatagtgatcatcaatcacttaagtaca

SEQ ID NO: 5927 - DNA, 475 bp, Glycine max
  unsure at all n locations
ctgcagctggacttntatgtttgngaacctctccttcctcaggtgtacccaaacccaatcacctggttcaagcacgactttctttctgcttttgttggttntccttgcatagcttgcatttttgttttcaatttgagccttcacttgcttatgcaacttcttcacatacttagctttagcctctgcgtccttatgcttaaacatagcaatgttagtcataggcaacaaatcaagaggtgtcaaaggattaaatccatacactatctcaaatggtgaacaattagttgtgctatggacagcccgattataggcaaactaaacatgaggcaaacatgcttcccaagatttaagattnttctttaaaatagtcctaagtagtatgcctaaagtcctattgactacctcagtttgaccatcagtntgtgggtgacaagtagtagaaaacaacaatntagtaccaatcttacccctcaag

SEQ ID NO: 5928 - DNA, 446 bp, Glycine max
  unsure at all n locations
agctngtagaacaccccanaggataatctgttgttgatgcaaagtgggtgttaagaaacaagctggaagaaataggtaaggatgtgaggaacaagcctaggcttgtggccaaaggttactcacaacaggaaggtatagattatactaaaacttttgctcttgttgctcatctaagggcgatactcattttactatcctttgctactcatcatggtatgatgttgtatcaaatggatgtaaactgtgtgttcctcaatggacttatcaaggaagaagtctatgtgaaacaaccccctgcgtttgagagttctatctatcctcatcatgttttcaaacttaataaagctntgtgtggtttaaagcaagcttcttgagctcggtatgaaaagttaagttcgtttttaattgaaaatggctttataagaggaaaggtaaatactatgcta

SEQ ID NO: 5929 - DNA, 438 bp, Glycine max
tccttgagaaaattcctaaagaagctagagcttagctacacacacctctctaatagctaagctcacctccttgagatgagaagctagagcttagctacacaccccctataatagctaagctcacccccatgacaaaatacatgaaaatacaaaaaagtccctactacaaagactactcaaaatgcctcgaaatacaaggctaaaaccctatactactagaatggccgaaatacaaggcctaaacaaaggtaaaatctattctaatatttacaaagataagcaggctcatacttagcccatgggctcgaaatctaccttaaggctcatgagaaccctagggccttcccttggatctctggcccaatctacttggagtcttctatccaatgcccttgcgggatatgattgtatcattcctccctccttctcattctctct

SEQ ID NO: 5930 - DNA, 462 bp, Glycine max
  unsure at all n locations
ctcagcttaacatcagaccacttcagggtgctggaactacttcatatggacttgatggggcctatgcaagttgaaagccttggaggaaagaggtatgcctatgttgttgtggatgatttctccagatttacctgggtcaactttatcagagagaaatcagacacctttgaagtattcaaagagttgagtctaagacttcaaagagaaaaagactgtgtcatcaagagaattaggagtgaccatggcagagagnttgaaaacagcaagtttactgaattctgcacatctgaaggcatcactcatgagttctctgcagccattacaccacaacaaaatggcatagttgaaaggaanaacatgactnntgcagaagctgctanggtcatgcttcatgccaaagaacttccctataatctctgggctgaagccatgaacacagcatgctatatncacaacagagtc

SEQ ID NO: 5931 - DNA, 451 bp, Glycine max
tcactccatcactctccttgatatttaattcctgtagtaatgtgttcaaccagacagcttgacaaacactcattgcagctgcaccatacatgaatatgtaacctgttgtactctttctgtcatctctgtctcctccccaatctgcatcaatatatcccattaattcctctgagatgctattgtctttatttggaaataaaattccagcattgatggtcccttttatgaaccttagaatcctcttggcagctacgagatgaggaattctgggtcctatcgtatatctacttaccagtccaacagcaaattccatatcacgtctcgaatgacacaagtacctgagagaaccaacaatctgtgtgaactcagttgcatcgactttgtcttcctttccctcctgttcaagtacaagacctgcctccgctggtgttgctgcttgaatacattcaac

SEQ ID NO: 5932 - DNA, 442 bp, Glycine max
tagaaactgaattgcgctctcataattaccaaatcggacacttgattctgaaataatgtgtgatgcaagtgattatgcactacgagcagtttttggtcaaaggaaaaataaaattgttcatgtcatacactatgcaagtaaggttttaaatgaatctcaaattaacaatgccacaattgagaaagaatttcttgaagtagtgtatgcttaggaaaactttagattttatttgataggatctaaagttgtggtttttactgatcatgctgctataagatatatgttggttaaagctgattgtgaaccccgacttatctgttggattttattgttgcaggaatttgatttggacatttaggatgacaatggaagtgaatatactgtggctgatcatctttctaggctaactattgatgatgtgacttcacaatgaccttatatt

SEQ ID NO: 5933 - DNA, 295 bp, Glycine max
atgaggtcatttcttcattcatcttcgaagagaaagtcgaggatctctgtatattccataaggtctttgggagtaagattagtgtccttggattatacgttgatgatattctgctcgcaacttatgataatggtatgctatttgaggtgaaacaatttctctcgaataactctgctatgaaggatatgggagaggcatcttatgtcataggcatcaagatccatttatagagatctcgaggaatgctatgcttgtctcaagaaacctatttcaccaagttttagagagagttaca

SEQ ID NO: 5934 - DNA, 440 bp, Glycine max
  unsure at all n locations
tgtgccgaaacactctagggtggggtgctatgtatgccattttggctntagntcagtgatagaagcaatgttcaatgactgccaactggtgctgttgcctttcaagggtgaccagtttttcatggccaaggatttggaggcaagggtagaggtgaataagggtgatgaagatgggttctttcacaaagaggatatattggaggcattgaaaactatcattgtgaaggatagcaaagaaccagggaagcacacaagagaaaaccacatgaaatggtgcaagtttttgtcaaataaggaaattcagaacanattcatcacaggtcttgctgcccagttgaagtccatggcttagctaggattcggatttcttggactagaagctattatttaaaatctaaatcttcacattttcttagtgtgactcttaattccgatgggaa

SEQ ID NO: 5935 - DNA, 356 bp, Glycine max
  unsure at all n locations
agcttgcctgcagccaacataaaaccaaagattgctataagacaatttagaataacaaatttaactaaccaaccatattatataattccacaagtaataatcaactgctatctaaacacatactctntgggatgctgggccattgctcgaacagattttttatggtttgtaagagttgacattgttttacctgaatgaaaatgattgcatcatgtgtcagattgagcatataatcactacacagacaagcaagaagataggaaaaaataaaaccataaattaccatatctaaggtcccacatcttgatggtagtgtcatgagaaacctgtacaactaggggatcctgtaacaaaat

SEQ ID NO: 5936 - DNA, 438 bp, Glycine max
  unsure at all n locations
agcttgtaatcgattacacatatactgtaatttattaccagagcagattttcagaaaatattctcaacagtcacatctttttatgtggttcttgaatggctatcaaaggcctatatatatgtgacttgagacaggaatttgctaagagtttttcagaacaaaaaggtcttatcctcttataaagcaaaatcgttttatcctcttacaaattccttggccaaattacttgtgattcaataaggaattatttgagtgctcaaattgttcaatctatctctttcaagagagatttcttcttttcttcttcttcattttgaaaagggattaagagaccgagggtctcttgttgtgaaagaattctaaacacanaggagggttgtccttgtgtgtttagaacttgtaaaagggaattacaagatagtggaactctcaagcgtg

SEQ ID NO: 5937 - DNA, 407 bp, Glycine max
  unsure at all n locations
cgtanggttaaagtctcacaattgtcacgtgctcatgcaatatattgtttagccgggctatacgagacatcttgctaaacaaagtcaggttcacgataactcgcatgtgatttttcttccatgctatatgtagcaaagtgattgatccagtaatgtttgatgagttggaaaatgatgccacaattatactctgccaattggagatgtattttccccatgctttctttgacatcatgattcacttgattgcgcatctggtcagagaaatcaaatgtngtggtcctgtttatctacggtggatgtacccggttgagcgatacatgaagatcttaatagggtatacaaagaatctatatcgtctggaagcatctattggtgagaggtacattgcagaagaagccatagaa

SEQ ID NO: 5938 - DNA, 328 bp, Glycine max
  unsure at all n locations
agctntaacaatctccttcacatgcattgctttcaacctgtgatactcttgtgtctccctcgatcccatcatttgctcctgtagcaaaacgaagctcgtgttgagctctagttgcaacaacaaccctaaacacgttgtcgggagaaccaccataacttccacgctattgaacacccacacaaccctatttgcctccatattcgccatcgagtaccacttcccccttcccttacaatactccacgtcggtcgacgacacctcatctgtggcccgcctcgtccaccccgagttcagcaccatcacggagatcgaggaggtgagcaccacg

SEQ ID NO: 5939 - DNA, 249 bp, Glycine max
agcttttatttgtcatcctttcttccatgtttgcaagcattggcaatttcaagaatgttcatgtggaagtcatgaatgcattcttcctccttcatcttcagattttcgaattttgtagccaatagttgcaatctggacatcttcactttggaggttccttcatgagtggttttcataatctcccatgcatccttggcaactgtgcatgtgttgatcaatctgaagatattcttgtcaactccattgaat

SEQ ID NO: 5940 - DNA, 236 bp, Glycine max
  unsure at all n locations
nggttcaactgagtagccatctgccccatctaatnngnctttctcttaatgtatgctctcgtctcttgctgaaattgcatattctggatggtcatttgcctcactaactcctctaaggaaggttgagaaggggcctgacttgcttgttgtctttgtcgctattgctgcattggatgaggaacatatggcctgcttatactagcaacattctagaaatgagggacaaattgttgttg

SEQ ID NO: 5941 - DNA, 251 bp, Glycine max
cgtctcgatatatatgcgtctttatcttttatccggagtaaagggtatgacctcttgaatatctcgagagcttccgatgatcaatttcgagcggttcaatatattatgcgcctgcagcggacctatgtgtggaaagttatgaccattggaatgtccccacagctctctgtgttcagtttctaagtcctcaatatataatgcgcctgagtctgacattctacgtgtaaagtcatgatccattctaattgctc

SEQ ID NO: 5942 - DNA, 402 bp, Glycine max
  unsure at all n locations
ctaagctccattgtcaattcgagcgtctcngaanttatgtgcctgtttgtgacccccagnaaatgcatgaccattcgaatatctcgagagcattcgttgctcaattatcgagcgtctctatatgtgatgcgcccgaatcggacctatgagtgaaatataatgaccatttgattttcttaagagcattcgttgttcaatttccagcagctagatattttatgacgctgaatcggaccttcgagtgaaaattattgaccatttgaatttcgtaagagctttcgttgttcaattccggcgtctctttttatatgcgcctgaaccggaccttcgattaaaagtatgaccatttgattattcgcgagagcttctttgtgtaattcaagcgtctttatattgatgccc

SEQ ID NO: 5943 - DNA, 407 bp, Glycine max
ctcatagcatcacgagcctctccataaaagaactccattttacctatgtttgtgaaaacctctgcagctcctataaggaagtactgaggcacttgccataagattgacaagggaacggtttcaagatcatagttgtttgtttttctgataatatcaaggcgaacaacctctaatatgccagctacaatcatggagattatggagattacaaggccgatgcctatgcgttgaagctgtgtgaatccttgttcatggccaatgaactttcttgctaatgggacaatcatgctatcatacactggggccctaaagatgacactaagggtgtctaacagggagagggatgctgctggaatttaaattgttgaccaatgtgtggtccatttgttgctctgtgacacaacatg

SEQ ID NO: 5944 - DNA, 410 bp, Glycine max
  unsure at all n locations
agcttcaagaaccaaaaataaaattattatgttattaggaaattatttcaaaaataaaaatctattagaaaaaaaataaaatttaaatatttattaaagataaaaatatatttaaacctttaaaatattcttactaaaaagaacacttggctagtaatactcgagtaacaaagaaagttatgatatgggtatttagtaattataactatcttgtaaacattacttaaattttntaataatttatatacaggactntaattttttttgtcaaaataataacatttattttgaaaacatattcatatgtataacatattatatggctggtgaatataggatatacattttttaaaaaaatatgtataaacaatgataatatactccatttgaanatacttgtaataaatata

SEQ ID NO: 5945 - DNA, 401 bp, Glycine max
agcttgtaattgattacacacatactgtaatctattaccagaggattttttctgattacattctcaacagtcacatctttttatctgattcttaaatggccatcaaaggcttatatatatgtgacttgagacacgaattttacaagattttttaagaacaaaaaggtcttatcctcttaaaaagcaaaatcgttttatcctcttacaaattccttggccaatacacttgtgattcaataaggaattatttgagtgctcaaattgttcaatctatctctctcaagagagatatcttcttctcttcttctttattctgaaaagggattaatagaccgacggtctgttgttgtgaaagaattctatacacaaatgaatgattgtccttgtgtgtttataacttg

SEQ ID NO: 5946 - DNA, 426 bp, Glycine max
  unsure at all n locations
ggacacttaaaactaagctgtctctaattctatgaattagtcaccttcttcctttgtgttaatatccgcacgtngcatttcagtactacagtacttcaagtcaagttgttttttgctcaccttttcacgaagaaagtgaaatctcgtctctatgtgttttgatcatctgagcgctactggattcatggtccatctgatattgggtttgttggccacatacaatacaactagcctctgaatttctatctccaattcttcaagtacagagtctagccataaggcgtggtatgcaacatagcatgctgcaatgtactcagcctctcaggaagatatatgccactacacgttgttntctctgaacaccacctttgatatgaaacatgtcctcatcaagcatgttggtgcacctacgaacttgaagagata

SEQ ID NO: 5947 - DNA, 444 bp, Glycine max
  unsure at all n locations
tgctaacccatggaagctcctaatatctattacactctnctgtgtgggccattcttggatggccttgattatctcagggtccacttggaccccatttctaccaactacaaaacctaagaaaactatattatctacacaaaaggtacacttctctatatttgcatagagggtgtttttcctaaagactgaaagaacttgtctgagatgtcctaaatgatcatctagcctcctactatacactaaaatatcatcaaaataaacaactacaaatctacctatgaaatcccttaagacatgatgcataagcctcataaaggtgcttggtgcattagtgagcccaaaaggcatcactagccattcatacaaaccaaacttggtcttgaaagcagtttccactcatcaccctttgtatcctgattggtgataacactttaaatcaatttt

SEQ ID NO: 5948 - DNA, 399 bp, Glycine max
agcttcctatttatctccatcatgagtaactttggtcttcaatctcactaaaagtgaatcattaagtgtgattgagattggtagtcatacaaaagtgttggacaaatggcctcaaatatcttaagaagggggggttcaattaagatattacaaactatttccccaattaaaattctactttgatttcaatacaagttccaagttcccttatagatgaatttctaaataatgattcacattaaacaatctaaatataaatgtaaagcaataataaataatagagtttaaggaaagagaaagtgcatactcaaatttatactggttcggccacacccttgtgcctacgttcagtccccaagcaacccgcttgagagatttactatcttgtaaaattcttta

SEQ ID NO: 5949 - DNA, 323 bp, Glycine max
agcttccatcttaatatatataaattatcattctgtaaatcatcccgaatgggtaagtcctcatcagacacatgttcgatccgactcaaatgatcagcaactaaattttatgctctgctcctatcacggatctccaagtcaaattcttggagccaaagcatccatcagatcaacctatgctttgaatcagccttctgcaacaagtactttaaagctgcatgatcagtataaacaataatgcgagtaccaagcaaataagaatgaaatttttcaagagcaaaaactatggctagtagctctttcttagtagtagtataattcgc

SEQ ID NO: 5950 - DNA, 424 bp, Glycine max
  unsure at all n locations
tcaagtgactaaatatattacttctnttgttgggagacaatattaatatttaatatataactttntttacttaattactttttacctatataattagattagattatgtttttcggtaagatatttcaactaatttttaaattgtttttactagctgaacaacttaagtaatttttttaatgaattttagtattttttttaaatattagttgaattagtattttaaaaatattaatttctaaatttttttttcttttctttttgttcttgatatttttatcaaattttctaattattatttntaaataaattataattgtattgtttttatattattttacactctttaattattctaaccactaattgtatcaaatatttattaattatttagatttgtagcatcatgttactgactgttagt

SEQ ID NO: 5951 - DNA, 436 bp, Glycine max
  unsure at all n locations
tattgaacgtgatgatgtgctatcctgtgtgtagagtaattcttatcaaactcttgattattcatattttntttagcttgaaggctatagagaaagccatagttagctctgatcttggtatgactccaaataatgatggagaattgatacgactgagcatcccacagttgacatctgataggaggaaggtattctccagttccattgatgctgcagtgtctaagtttattttttctctgtcaattacattcttgttctcattgactgaaagtaatattcttaattggttttcatttcttatttaactattaacaaaatcgcatagaatcacctcttctacagtcatgacccatgagaaaactgatctctacagtgacttaatatgttgtttgccatgattccaatagtattagttatcaatttatcttgtctatga

SEQ ID NO: 5952 - DNA, 278 bp, Glycine max
  unsure at all n locations
agctnaacatcttataactgcttattcatttctgncttcgttggattcaaatagtaaaaagtctcaaaagccactagtgcactatcagtaataagtctaccaggaacgagtacactttgatttatactcactatagaaggaagaattaccttgagtctgtttgcaattgttttggcgatgagctcgaagataacattgcataggctgatcggtctaaataggcttgagtgagtaggcttctttaccttagggactagtgcaatgaatgtcttattcaa

SEQ ID NO: 5953 - DNA, 474 bp, Glycine max
  unsure at all n locations
ggatccttaagtcacctgcggcatgcaagcttggttatctccttctttactacatcaagaatcaccgggttgagtcttctctgtggttgtcttactggtttagctccatcctctaaatttattcgatgcatacatgtggatgggctaataccaggaatgtccgccagggtccagcctatagccttcttatgcttcttgagaactgacaacaacttctcctcttgctcatcagcaagggaggcagatataatcactggaaaactcttgatatcatccaagtaagcgtattttaaatttgatggcagaggcttcaattctggtgtggtcggctggatagcggtagaaggagatggtttctcagcctttacctcataaagaaagtcagaggtatgtgtacttcctgaaacatggntagtcctatctgactctataaaatcaatctcaagaggaaaacaccaccaccaggcatgcatg

SEQ ID NO: 5954 - DNA, 442 bp, Glycine max
agcttagcaaatggacctgtgtgttgcccagtttcatcatatcttccgtaatacttatcacctctatcatatctaataattttcacatttctttctaattgtctttttacttcattcttgtaaatttctaagacattcattgcttgagaaatctcaggcagtaagtagacataaccataatgtgaataattatcaataatggtgataaaatatcattcctttccgaaagaaataacatcaaaaggtccacaaatatagtatgcacaatttcaagaagctgagtgcttcttgtagctcttttctttgtatgttttgcttgtttttcccttaatacaacccacacaaatatttagatccataaaatctagataaggaagaatttcattctttattaatctttccatcctttctctagaaatgtgacctaaacgtttatgccaca

SEQ ID NO: 5955 - DNA, 426 bp, Glycine max
  unsure at all n locations
gcttgctnttatgtccttttattgctattattgttgaattatccttgaaaaattgtcttgttaaaactccattggtttagctttcatttcactttttttgtctttggttattgcttgtctctttgtttccttgtttgtgagttgccatatagggaattagaaaggaggattggtggcatcccttgaagaattagagtcaaaaagcaaggggccaaccaccttaagagctattcgactaagaagcactccaaattgagaacctttttgtaattntgcaattgacaatttacttactttcattgctttcaaattatgtaacaaaaaggtctttcattggatgtaagttaagagcctccaataggtcaccctacttccatttgtgtgtagtaattntaggtaattttcccttacgatatgagtgtttat

SEQ ID NO: 5956 - DNA, 350 bp, Glycine max
ggctgcagctatgtcgaaatgttcacaatagaccttctcaacctcagcagccatatcaaccacgacagaacaattatgacctttccagcaacagatacaaccctggatggaggaatcaccctaacctgagatgagacaaccctcaccaacaacagcagcctgctccttccttccaaatgctgctggcccaagcagaccatacattccttcaccaatcctacaacagcatcaaccccagatacaaccaacatgtgatgcccctccacaaccttccctcaaagaacttgtgaggcaaatgactatgctgaacatgcacgctcagcaagagaccagagcctccattcacagct

SEQ ID NO: 5957 - DNA, 453 bp, Glycine max
agcttaggaagatctgatgcagcattgcagttaacagctacacttaccaatggtgacacagaaaacttcatagctctaatggggtgtgcttcaatttctgtctcatttgttatagtagcattcttggtgatgaaatggtccaaaccagccaaggcaactgtgtttccacaaggaacatcctcaactgtttcatatttcttccccatccaaattgaagtcccctgaacactcttcacatacaggtctttcttctccccaggaacaaaatttggccccataattctagccttcatattagttgacaccttcccagagaagactcggccaaaagcataaaaccttcccttatcagatgtaggaatcatctttgacacataaagcattaggggcccttcagggtcacaatttctgatagcagaagcgtaagggtcatcaaggggaccctcatacaaa

SEQ ID NO: 5958 - DNA, 444 bp, Glycine max
  unsure at all n locations
agcttcaaggctaagtcttcatgttgctccttttatctctagcaaaattgaagccaacgggtgaagttgctaaatacaaggcatgattagtggccaaagggttactgcagaaatatgttttggattaccatgaagtctttgttctagttgcaagaattgaactaattagacttatggttgcaattgctagctaacggggttggtcattgtatcaattagatgtgaaattatcattcttaaatgggcccttagaaaaagtctatgtaagtcagccacttggatttgaagtgaaggttcaagaggacaaaatgtacaagctaaggaaggctttatatggcttgaaataaacacctcanatccggaacaagagaatagatagcttccttatgcaacaaaatttgtgagatgcacttctgaacatggtgtttgttacaaactcaacaa

SEQ ID NO: 5959 - DNA, 419 bp, Glycine max
  unsure at all n locations
agctttgatgcaacatttggagaggttaatgaaacaacgagatgatgcgctccatgagaggttggatcaaatggagaatagagatcataatgaagaagaaaggaggagaagagggaatgatggtgttcctagacaaaaccgaattgatggtattaaactcaacattcctccatttaaaggaaagaatgatccggaggcctacttggagtgggagatgaaaatagagcatgttttctcatgcaacaactatgaggaggaccagaaggtgaagcttgccgccacggagttttccgactatgctcttgtgtggtggaacaagctacaaaaggagagagcaagagatgaagagccaatgtgatgtgaatcttacggngcgcggatcgctngaacaggctgtatagtttttggatgacgccact

SEQ ID NO: 5960 - DNA, 447 bp, Glycine max
  unsure at all n locations
agcttcaagaatcaagtttcaaagaatcatgattcaagaataatcaagtttcaagattcaatcaagtttcaagaatccagattcaagaataatcaagatcaagattcaagactcaagattcaagaatcaagagaagactcaatcaagataagtactaaaaaagtttttcaaaacattgagtagcacaagaattttttataaaatcttttaccaaagagttttactctctggtaatcgattaccagaaggtagtaatcgattaccagtagccaacattgttttcaaaactgatttacaaagctgtaatcaattaccataatcttgtaattgattaagaatgttttaaaatgttagatttcaaatttcaagagtcacaactagtgataaaacatntttcaaataatttaaacttgtgtnatcgattacacaatacttgtaatcgattac

SEQ ID NO: 5961 - DNA, 443 bp, Glycine max
  unsure at all n locations
agcttccatcacatggagtcctcgacacagtgtgctaacgtacatgttggactatgcgagtcataggacttggtggtctgtggatgaccatatggagactatagtattcttggacgatcggcattgagtcttacacaaagagtgctgacaaccatgtcggtctgtatgatgtatctgcattgaagctcggaggccatggatcttcttcatcaatggagaccattgcttcttgaacattaatggcagaggaatggagaagaagaagaggttagaggagacgcctcttcatgaagaacatgagtctatatgaaccgtcccaccataagatgccatggataagagcttgaaggttggagatgatgagtggagggagatggagagacggggcactanatattgtgcctcacatgatgtctcatctttgaagtgtgattctcacatga

SEQ ID NO: 5962 - DNA, 442 bp, Glycine max
  unsure at all n locations
agctntcttgagaaaactttcttgagaagcttctttgagaaaacctccttgagaagctagagcttagctacacacacccctctaataactaagctcacctcattgagaagcttccttgaaaagattcctaaagaagctagagcttagctacacacacctctctaatagctaagctcacctccttgagatgagaagctataacttagctacacactccttataatagctaagctcaccccatgacaaaatacatgaaaatacaaaaaaagtccatactacaaagactactcaaaatgccttgaaatacaaggctaaaaccctataatactagaatggccaaaatacaaggcctaaacgaaggaaaaaacctattctaatatttacaaatataagcgggctcatacttagcccatgggctcaaaatctgccctaaggctcatga

SEQ ID NO: 5963 - DNA, 431 bp, Glycine max
agcttgagatgcaattttgatcatcttaatcgttttcattgcacgtttctcttgcatggctaaatatatctttgatatggtatcagagctcttctgatgaagagctctgctgcgcactcacctcctttttcatacttctctcaactttaatcattcatcatgaatgaaacaacactcagcaacatggaaagctacttgtacctacatccgagtgagaatccaaccattgctctcgtctctctagtcttggattcaaccaactaccattcatggagcaggtccatgatcactgcattgagcgccaagaacaaagtggaatttgtagatggaagcgtgcctgaaccattgaaaactgacagaacgtatggagcatgcgccgatgtaacaacatggtagtctcctggatcattcactcaatagctacctctatc

SEQ ID NO: 5964 - DNA, 449 bp, Glycine max
  unsure at all n locations
agcttagcttgagatgcctgacctttagcatacagtaagacatcatctgcgaacagtaaatgagaaacactagggccatttgaggtcaacttaactggcttccacctcacctcccatcagacactacctaagagatcatatcaccaagcctctccatacatgatacaaataaatatgggaacaatgggtctccctgacgaagccctctcacaggaataaaactattttttgttctacctccattccacatgatagaaatagaagtagatgacagagcatgtagaatcaaagacataatgttattaggaaaataaaaaaaataaaaaagagtttcccaccaaaaaaatcctagtccacacgatcatatgccttctccggatccaatttaaaaataaaatccctttcttccttttagatntatgcataaaatgaactaactcttgaagaat

SEQ ID NO: 5965 - DNA, 423 bp, Glycine max
agcttgaatcggacatccgtgtgaaaagttatgaccatttgaatttctcaagagcttccgttgttcaatttcgatcctctcgacatattatgcacccgaatcggacatctgtgtgaaaagtcatgatcatttgaatttctcgagagcttccgatgtttaatttcgagcgtatcgatatattataaccctgaatcggacctcagtgtgaaaagttatgaccatttgaatttgacgagagcttccgttgttcaatttcgaatatcactgtatgtgatgcgcctaaattggacattcgagttaaatgttatgaccatttgaatttctcaagagcttccgttgttcaattctgagcgtctcgatatgtgatttgcctgaatcggacatccgtgtgaaaagttatgaccatctgaatttctcaagagc

SEQ ID NO: 5966 - DNA, 452 bp, Glycine max
agcttccatcacatggagtcctcgacaaagggtgcaaacttctcatgtgggactttgtgtgtcattggacttgatggtctctggatgacgatatggagactaaagtagtcttggtcgataggcattgagtcttcgacaaagagtgcagacgaccatgttggtctctatgatgtagctccattggagcttgtaggccatggatcttcttcatcaatggagtccattgcttcttgaattttaatggcagtggaatggagaacaagaagagttgagaggagacgcctcttcatgaagaagatgagtctagaagaacctcaccaccatacgaagccatggattatagcttgaaggtacgagataattagtggatggagatggagagaatgggcacgaatatttgtgcctcatatgatgtctaaactttgaagtgtaattctcaaatgatcaaagtt

SEQ ID NO: 5967 - DNA, 439 bp, Glycine max
agcttggtgttaatcaccttgctgacctttctgttgaggaattcaaggcttcccgtaatggattcaagaggccccatgagtttagcacaacaacatttaagtatgaaaatgtgactgctattcctgcagccatagactggaggacaaaaggagctgttactccaatcaaagaccaaggtcaatgtggtaagataaagaacatcatataataagtactttattatgttccataaccatcattatttccttcatctcatttcaattatttccttcatctcattttatgtgacacatttaaaatattcctgcttcaattttttttatcactttaaaatataaaaaaaatactaattactttttttttttccaataacatcctgactactgcattgattagtccttctatttctactactgcaatacatttttggaaataata

SEQ ID NO: 5968 - DNA, 452 bp, Glycine max
agcttgtgtgtccctgaaattccttctctggaaggatgctccacaacccaattcatggatttcctgattgcacaaagtaatttcctcaaattcaatgatggcaacatctacaacacaatcagggaaatcgaaggtgcttacattgacttcatggatcgcatcagtggtgacgaaaacttgggcactggggtcattcaacacttcaaccattgagaagctatgaagcacggacacttcagccctttgtcgtgttcggtgtccgacacgcgtccgtgtcagtgtccgacacgcgtccgtgtcagcgtccgacaccgacacaacacccgtattacgttctatattttggacattacaggtgtccacgtgtccgtatccgtgtcgtgtccggtgtccgtgtcggtgtctgtgcttcatagttgagaagaaaaactccaaaggaaggcacatatgca

SEQ ID NO: 5969 - DNA, 437 bp, Glycine max
  unsure at all n locations
agcgtagtgganagaatcattgctccacttggcatgactaagaaactcttggcatctaaagttgccagtcatgaatagagtcttgtcatttaatgttttgtccatttcgctcttcagccataacccgttttgtaatttactgctgtagaatctatgctacagatggggagcaagattgacaccatcacaagcggctgaaaaagtaaaacacttcttcaaggattattctatcaatcgacacaaaatgactgtcttgacgccttcctaccatgctgaggtatgtatgtgaagacagagttgaatccttctggataactccttgattgggcttattatattctttgttggctaatgaaagttaatctttcgatcatcctgcaaagttattcaccacaggataatatgtttgatcttctccagcttctctataatgcaag

SEQ ID NO: 5970 - DNA, 431 bp, Glycine max
  unsure at all n locations
agcttctaaatacaataatatcataatgcattactatagaaaaggtgaaacttttataagttcaactagataagacattttattaagctttcaattcttctattttcacttcctatcaatgtactcaaccaatcagaaaccaactttggtgtaaagtcaacaaacattgaatgacggtgtaaaaaatctttataccgtcaatgtatatatattatttattcctttttttttaatgttctaccctttaaagttggtgagtagcgatcaagttagaaaataatgcatcaataacttgaagtggtaagagagctataccttccctagtaaattgtggtgccaaggaaaatttgcgacaggaaggcagacaatgcangttgaagtggattgtaaagggcaaccaaagctggccccaagatcttattgctccatgt

SEQ ID NO: 5971 - DNA, 351 bp, Glycine max
agctttgcccaaaaagttattgtctccatctttaagaaccatgtttcctgattctaacaactccgccgcaaccggcttgtttggagtgtgtgatgcacttgagaaccatatttttgctcctgtgccatccttgatactaagaatgccttgatcagtgtctacttctaagactccagagtggtctttaagtggtttttctttgttggctacccaaacaactgttcttggaaatatatttgcgtaccaaattccgatgtaacggctgtcgaagtttgctgggctgaagaatcctgcttcaaaggctccatttgttgaaaccagagtttcattctcattcttaccatctctgat

SEQ ID NO: 5972 - DNA, 416 bp, Glycine max
agctttgagcatattgaaatgacaataactttatacacggatgtccggttgagtcccgtaagatatcgagacgctcaaaatttagatccgaagctctgagaaaattgaattgacaataactttatacacggatgtccggttgagtcctgtaatatatcgagacgctgcaaattgaaaacggaagctcgtaggaaattcaaacgacaataactttttactcggatgtccgattgaatcgggtaatatatcgagacgatcaaaattgagactagaagctttgagcaaattgaaatgacaataactttatacacggatgtccggttgagtcccgtaatatatcgagacgctcaaaatttagatccgaagctctgagaaaattgaattgacaataactttatacacggatgtgcaactga

SEQ ID NO: 5973 - DNA, 467 bp, Glycine max
  unsure at all n locations
atcctcagagacacctgcggcatgccaagcttggtttcccccccattattgggtgtttttacttcttagttagcttataaagntatcacagcctgttaggcctggtgtttatctgtgaatgctgccattcattgatggttgtcaacttgattgtacagctgtatgactgtgatacagacattaatgatgggttctgctaattttatttcagtctgtgattaagaagaaatatggtcaagatgcactaaatgttggtgacgaaggtggctttgcccctaacatccaggtcaatattttaattcatttctttttatgcatggaactccggtacctgctcatctttttggcctgtaactgataatctctattgagtgttcatgaaaacaaagaaggtttggaattgctgaaaactgccattgccaaagctggttacacaagcaaagatagtattttccctcgtcaaaatt

SEQ ID NO: 5974 - DNA, 447 bp, Glycine max
agcttgagactggcgctaagcccaatttcactgatgcaatcctacctcccaagggcattggatagaagactgcaagaagattgggaaaaagatgcaagagaaggccctagggttctcatgagccttagggtagatttcgggcccatgggctaagtataagcccacttatctttgaacatattagattaaggtttcattaattttggtccttgtatttagggctccataatgtaggtagggtaccctagaaatataggatttttcagcccttgtattttagggcacctagactagtttttgtattaggggtagttttgtaatttcacatgcagtaagtgaatatttgatgtgtggtggtggaaataaatttaattgagtatttgcttaccacaccccattgccacatcatatactcacactttgtgcatgtccttcatgctttacatg

SEQ ID NO: 5975 - DNA, 447 bp, Glycine max
  unsure at all n locations
agcttcagctctttctactgcacaaggctcttaatatttgtagagtatccttgtggaaccttcacccgatgaagacactgacaaaaacttatcttctcctttttggacaaagtatgacaagttgggggcaagtaaattttcttcccatcagaccttggatgcaactgtgatcgtatccacatctctgctagattttgacgagtattcaagccatccttcgtcttgccctaaatgttaaggagcgtcccaatcacactgtcacatacatttttctcgacatgcataacatcaatacaatgtctaacatctagatcagaccactacggtagatcaaagaaagttgacctgttcttccatatgcagagctgactgttatccttctttngggtctttccaaatacagtattcaggtgttgaacccgctggtatacctgctcactagtcaac

SEQ ID NO: 5976 - DNA, 435 bp, Glycine max
agcttatgctgcaaacatctatcaatagacctcctcaaactcagcagcaaaatccaccaccagaacaattatgacctctccagcaatagatacaatcccgggtggaggaatatgatggaagcttgcttgtggggcttctatggaggctggatctttgagcttcaatgaggtcctttaatggtgattttccaccatggagatgcagtggaagacaaaggagaagaggtgagaggaggcgccatccactatggaataagccatggaagaaggagcttcaccaccgagatgagccttggataagaagcttggagaggatgcttcaatggaggaaaagaagaagggagggaaagagagaggggggagcacgatattgaaggaagaaaaaagggagagaagttgaactttgagttgtgtctcacaagactctcattcatc

SEQ ID NO: 5977 - DNA, 441 bp, Glycine max
agcttaaagaaggaatttgaaatgacagacttgggaatcctatcatattttttgggattaaagtttgcttatactgaaaagggaatctttatgcaccagaagaagtacatttcagaggtactaaagaagtttaatacaatggagtgtaatcctacagaaactccagctgaattaaatgtgaagcttgtaagaagtgagaatgaggcttcagttgatgggaccttgtttaggcagattgttggtagcctgaggtttatctgtcatagtagactagaaattgccttcaatgttggacttgtgaatgaccctagagaaccacatttgttagctgctaatagaatcttgagatatctaaagggaactctgggatatggaatcatttttccccatcaaatcaagaaggatgggagtctacaccttgaagcctattttgattctgat

SEQ ID NO: 5978 - DNA, 425 bp, Glycine max
  unsure at all n locations
agcttgcaaaagaaacatgttcaatttgtctccatcaccaccaaagctacccataattggcaatcttcatcagctaggaacactaccacatcgctccttccatgcactctcacgcaaatatggccctctcatgttgctgcaattgggccaaattccaaccctagtggtctcatcagctgaagtggcaagagaaataatcaaaaaacatgatattgccttttccaaccgcccacaatctacagctgctaaaatattactttgtggatgatgcaatgatataaaaaacaaaaatattgaacatgttgaaaaccataagtaatacactcagatcaaacagggaagagaaaaaaaataattttcacaggtatctttctcttattatttccactagctcanatttgattggtgtgttttatgtaaaggga

SEQ ID NO: 5979 - DNA, 334 bp, Glycine max
agcttcttctgtggaggttgttcatccttcaatggaagtttgatttcaaatcccttcggcaagaaaacattaaatccaaaaattagatctctatgccctttaagcagctccttcacttcttctatgccactaacaaggttgaatctgcagatgaacagtataattctttcacataccatctcgcaagaaatggcaactataaagtataactatatgactacatcatgatgaaacctatcagcagtgaaatttttcatgagttccaaaaatttatcaaatttttctctatcatctttaaatgcatccttgactgtggagagatatgctaaggcac

SEQ ID NO: 5980 - DNA, 341 bp, Glycine max
gcatgcaagcttggaacatataaaccgaattctagttctctcttaagacttagtcaaaatgtctgctggttgatcattagaattgatgaactcagtggtaatctccttggacaatgatttttctcaaatgaagtgacaatcaatctctatgtgcttggtcctctcatgaaagactggattggacgcaatgtggagggctacctgattgtcacaaaataactttattcgtgcaacttcacaaaacttcaattcttgaagaaggtgcttaatccatataagttcacatgtgaccaaagccatagatcggtacttagcctctgcgctggatcgagcaacaacat

SEQ ID NO: 5981 - DNA, 269 bp, Glycine max
tgcttctcccccaatattctatttattctgggagaagtgacgtacacaagggcatagccttcttgtcagtcaaacctctatccaaattcgaagcgacacataattccagcaagaaacttcaagcgtaaagcctgtcgtgccgattgcgtgaactaactcacaataattgcctaccgctcttgacagttatcgatcggtcaaacctgtcctgccacctgaacggatgaatccgtcaacgcgaagcttttacttcattctatgtactcgtg

SEQ ID NO: 5982 - DNA, 280 bp, Glycine max
agcttccattgttcaattacgtgtcgtttcgatatattaggccccggaatcggtccttcgagttaaaagttatgaccatttgaattagacgagagctttcgttgttcaatttccagcgaatcggtatattaatgcgcctgaatcggacctccaaaagtaaaattttgtccccctcttttgatgaagagctatcatcgtaccatgaataggcgttatttcacttttacacctataggggacattcgaggtaaaacccctccctatggtgaatttcttaaga

SEQ ID NO: 5983 - DNA, 326 bp, Glycine max
agcttgaagagagactcacaagtggtttcaactggaatatgaacctcgctatgtagttcatacatcctaagaagcctcagacctgcttttcggcgtgtggctcatgcatttcgaggatggccttcaccttgtctcaggccacctttaccgatttttggcttatgataaaactgaacaactttaccaacttgacgccaaaagtgcactttgcgggattcaaccttaatcgatacttacacagtctctccaacaacttctgtaagtagataaggagtaccttcttggttttggacttggcaatcatatcatccacgtagacctcaatt

SEQ ID NO: 5984 - DNA, 340 bp, Glycine max
ctgcacgcatgcaagcttgaatagagactcacacgtggttatcaactggaatatgaacctcgcaatgtagttcacacatgctgagaagcctcaaacctgcttttcggtgtgtggctccatgcatatcgaggatggacttcaccttgtctcagtcaacctctacccctttatggcttatgatgaaactgaacatcttttaccaacttgacgccgcaaagagcacttcgcgggatgcaaccttaatctgtacatacacaaactgtcgaacaactgacgtaagttgattacgtgtgcctccatgattctggacgtcgcaatcatgtcacccacctggacccca

SEQ ID NO: 5985 - DNA, 331 bp, Glycine max
agcttttgaaaaggagtttaattaaaatattaataatataaagatatgtaaatcatcatttaattataaattattatgcgtaataatatatttttattgttatttaaaagtcacatacaaaatatgcttcaattaattattagtataataattcttaaactacaacatattaaaattaaactctcttcaaaatatttgttattgatagtacatattttttatccattaaaatcaaagtagtataaaaaaaataataatataataattcatccatgttcaattaattaagttacacatttcttgataattaacgatacatataatacacact

SEQ ID NO: 5986 - DNA, 414 bp, Glycine max
  unsure at all n locations
gtgagacgcaatgtatctccatggggagcaccagtgttgttagtaaagaagaaagattggaccatgaggttgtgtgtagactatcgccagttgaataaggtgacgattaagaatacgtaccctttgcctaatagacgaccttatggaccagttggtagaagcttgtgtgtttatcaagatataccttaggtcaggttaccatcagattcgagtgaagtctgacgatattccgaagactacttttacgacccgttatggtcactacgagtatctagtcatgccctttggtgtgactaatgctccaggtgtgtttatggactacatgaataaagtctttcacccttactttgatnagtttgtggtagtattcatagatgatatnttggtatattcacagactagagaggaacatga

SEQ ID NO: 5987 - DNA, 413 bp, Glycine max
  unsure at all n locations
ataatggagacacatgaacagcgctaggcaatgacattcatggtgctccgaacaaaggtggagtatggaggattgccttgagggtccgcacttatgcaatcatgaaactcagctccaaactcgaaagtggaggacacatgaacagtcctaagcaataacattcatgtggctctggaaaaggatgagaatggaggattgccttgagagtcctctcttaggcaatcatgaaacacagctccaaactcaaaagtggaggacacatgaacagccctaagcaataacattcacgtggctccggaaaaggacgagaatggaggattgccttgagggtcctctcttatgcaatcatggaacacagctccagactcgaaaatggaggacacatgaacagccctanacaagaacattcatgt

SEQ ID NO: 5988 - DNA, 415 bp, Glycine max
  unsure at all n locations
cacatttgaaggatgttataagaagaaatccatttggtctatatgctcaggtacgtacaccgattatggtataatcctatcagtacctttatatgattggtttttcctacagagcttttttgaattatcaattgccaagatgaaatatgacaaggtaatctcttgcactgaataaacgtttcagagggaggagacaatttcagtgttggacagaggcaactgctaagtctagctagagcattgctacgaagatcaaaggttcttggcctggatgaagctactgctgctgtagaagttagaactgatgcccttatacagaaaactatcagacaagaattcagtcctgcacaatgctcatcattgcacacagactanatacaatcattgatctgcatcggattcagctgctcaatgc

SEQ ID NO: 5989 - DNA, 411 bp, Glycine max
atacgagaatgaagctctgataccatgtgttagacaagtggcctcagatatcttaagaaggggggtggaattaagatattgcaaactatttccccaattaaaaattctatttcaatttcaatgcaagttgcaagttaccttaaaaattaacttttaaataatgattcaaatagaacaatctgaatataaatataaatcaataataaataaacgagtttaagggaagagaaagtacaaactcagatttatactggttcggtcacacccttgtgcctacgtccagtccccaagcaactcgcttgagagttccactatcttgtaaaatccttttacaagttctgaacacacaaggacaatccttcctttgtgtttagatttctttacaacaagagatactcggtctctcaatcc

SEQ ID NO: 5990 - DNA, 436 bp, Glycine max
  unsure at all n locations
tcgatatatatgcgcctgaatcggacttccgtgtgacttgttatgaccatntgaatttgtcgagagcttccattgttcaatttcaagcttctcgatatattatgcgcctgaatcggatttacatttgaaaagttatgaccatttgaatttctcgagagcttccgttgttccatttcgagcatctccatatattatgcgcctgaatcggactttcgtgtgaaaagttatgaccaattgaatttctcgagagctttcgttgctcaatttcgagagtctcgatatattatgcgcctgaatcgctgttccgtgtganaagttatgaccatttgaatttctcgagagcttccgttggtcaatttcgagcgtctcggtatattatgcgcctgaatcggacctccgtgtgataagttatgaccatntgaatttctcgagagct

SEQ ID NO: 5991 - DNA, 309 bp, Glycine max
aaattaaacaatggaagcactcgagatattcaaatggtcataacttattacatggaagtccgattcaaattcataatatatcgagaagcttgaaattgaacaacggaagctctcgagaaattcaaatggtcataacttatcacacggatgtccgattccggaggatagtatatcagaagctcggaatatatcaacaatagctctcgagaaattcaaatggtcataacttatcacacggaagtccgatgtaggtgcataatatatcgagaagcatcaaattgaacaatcgaagcctctcagaaattcaaa

SEQ ID NO: 5992 - DNA, 436 bp, Glycine max
  unsure at all n locations
agcttcttcagaaagatgtagattcgtgcttgaccaaccttacaaataggaattcgacgagctgaggaggaggcttaccacctctcccattatgcaaccactagattgggagcttccatttaagctcatgtgtgatgcctccaattatgcacttagggttgttntgtcacagagagttgataaattaacacatgtcattgcttacgcctcacacactctagatgcagcccaagtcaattacaccactactgaaaatgagcttttacatattgcttttgcattatataaatttagatcttatttgctctgctcccatattactgtctatgtgacaccctctacctcgacatacatataaataagacaaacattaatgtattcatttagactttcagagaccaacataatcatttaatttttttacatcaccattaaa

SEQ ID NO: 5993 - DNA, 328 bp, Glycine max
ttcctaatttctctacaattgcatcatctctcaatgagctggttatgaagaatgtggcatttacctgcgatgaaaaacaagagcaagcctctgtttgatcttctcgaaggcctcttggcagccactgttccacacgaccgcctagttcttacgtaatagcttaaaaatgggttcacatgtacgggtgagttgcgagataaatctcgcgatataattcaacctgcccaaaaatccccgaacctgcttctccgtgcgtggttctggcatttcaaggatggccttcactttctcgggatctatctctatccctttctgacttacgataaat

SEQ ID NO: 5994 - DNA, 245 bp, Glycine max
gaaacacgaaacactgtttcactggcctccacagtgacaaaccctagttcaataaaaagtgaaattggaaaacattgaaaatcagaaactcacgttccgccgacgcctccggtggtttcggaggagatagtggagaaaggaagctcgcagatggcgacggaagcgccgtagttggcagcgaagcgagcggctcggacgccgccgctgccggcgccgatggtgaagaggtcgaagtcgtagtgtgc

SEQ ID NO: 5995 - DNA, 402 bp, Glycine max
  unsure at all n locations
tactgcctcatgaagttcatcaattagttcatcaacagtgggaataagaaagctatctttgattgtgatggcattcaaagccctgtaatttgtgccaaatctccaagngccatccttcttcttgacaagaatgattggaggtgaaanagggcttctgctangggcaataatcccttccttgagcatgtcaactatcattaattacttcaatctgatccttccggctgtgaggatacctatatggcttgactnttactggtccagcaccttcaaccaatgggattgaatgattgtgagttctgctagggggtagtcctgatggcacatcaaagactgttctatcagtgtaaagtatcatggccagttctggttccatatcaaccggtatatctaataactggt

SEQ ID NO: 5996 - DNA, 457 bp, Glycine max
ctgccgcatgcaagcttgaaggacatgcacaaagtgtgactatatgatgtggcaatggggtgtatctagcaaatgctcacctccccctctaaaatttatttggattgggcttctcccaattcaattaaatttatttcccaacacacacatcaaatattcacttaatgcatgtgaaattacaaaactacccctaatacaaaaacttgtctaggtgccctaaaatacaagggctgaaaaatcctacatttctagggtaccctacgtacattatggagccctaaatacaaggccaaaaaataatgaaaccttaatctaatatgtacaaagataagtgggctcatacttagcccatgggcctgaaatctaccctaaggtttgtgagaaccctatggccttctcttgcatctctggcccaatgttcttggagtcttctatccaatgcccttggggagtagga

SEQ ID NO: 5997 - DNA, 419 bp, Glycine max
  unsure at all n locations
gatgctgagttgtngttgtggcatagtactggtgagttctccattggacaatggagttcgaggatgccttcaaggagagatcatntgcttctcttttcctcccacaccatctcatttcgtgtatatatgttaataataataaattggtatgttaatccattatggtgaatatatgtattgtaatatttgtaggaagttatacaaaacaaattgtcacatgtggataaatctcaagtatgaatatgctaagactttgactatttaaatatgttactatattcatanttatttttgtttattggataatnaattatgataaatcattattatgttataataataataatattgataaaaaaatttatgatcattatntctcattaattacatgaagtatatattatgaagatagtaatgat

SEQ ID NO: 5998 - DNA, 353 bp, Glycine max
  unsure at all n locations
nggatttcttttagtagggatctatccttcctagatggatgccaacccagtcactgtcattaagaactagctcttttcttcctctattgcctttagttgaatacacctnttgttggntctctatttggttcttaaccctctcatgcaacttctttacaaactctgacctagattccccttctntatgtataaaagaagtgtccagtgggaagggaatgaggtctaacggtgttaggggattgaacccatagacaacctcaaaaggggattgcttggtggttctatgaacccccctgttgtaggcaaattctacatgaggaagatactcatcccaagactttatcactacctct

SEQ ID NO: 5999 - DNA, 429 bp, Glycine max
  unsure at all n locations
agcttatctctagaggggatggagcctttctttgtttggagaggataaataacattgcctataggttggacctcctagaagagtatagagtcaacaccacttttaacatttctgatttaattcctttcgcaggtggagttgatattgaggaggaggaactaacagatttgaggtcaaatcctcttcaaggggaaggggatgatgcaatcctccctaggaagggaccagtcactagagccatgagcaagagactccaagaggattgtgctagagctgctgaagaaggccctatggttctcatgaacctcagggtagatttctgagcccatagaccaaggttgggtccaattgtctttgtacatattagactaggatgtcattatatntgatccttgtatctagggctccataatgtatgtagggtaccct

SEQ ID NO: 6000 - DNA, 377 bp, Glycine max
  unsure at all n locations
gctttacttgcttggaattatccagtctatctttcttattttttcgcctacattcttcttcaagaatagcttaagcaacatcattaaagggtagacaagtgacattattatttattgttatgttgataatgaagttatcatataaatctggtagactctaaagtagaagctctacccgtttgttttcttctatgttaaaatttgatgacggaaattgggaaaataaagtattcaggttttcatgtggtatgtcacccaaatggactcactcgttcgaagagtgcagagtttcctcttcaaaaatattctagtctgaagtgactngatctcatacaatttgtggaaagtatcccaaatatccttcacgttttccattg

SEQ ID NO: 6001 - DNA, 442 bp, Glycine max
  unsure at all n locations
tgcaagctataggtttgatggccccaatgacgtctattcctcacatggaaaaaggcttaggggcggacataacattcagaggatgtggcagaacattgacattgtccgcgtacgcttgacatttatgacatttccttacatgggtgcagcaatcgcttttcatagtgagccagtaataaccggccctaaggatcttcctggccatagcatgcccattggcatatgtcccaaataaacactcgtggatttccttaatcatgtagttcgcctctttggcatctacgcatcgtaaaagggtcatgtcatggttttgtttgtactggatagtaccactcacaaagaaaccagtagccaatctccttaacgttcttttgtcattgtcggaaatccctggtggatattctttgttctcaacatattgttngatgtcgaagtaccatgg

SEQ ID NO: 6002 - DNA, 388 bp, Glycine max
  unsure at all n locations
acaaaaaagcatgtagatatatcagtgaactgagccagaccaaggaaaaatacatcaaagaaaataaataatctagtatagctaattttataatcagataaagcatctgagacctgctgccatgtggtatcaacaggaagctgccgccgagcatcgccagcatcaaaatccagtacaccataatccctcaaccgaatctacacagcaataactaaaatcagaagtctntttgaggattaaatgcatggcattatctataagacacatttntctaaatgagacaaacccgaaggaagcacggattctttgcaattccaacaccccaccaagagcagctaccattagataaaaagcagcagaaataagtgtgataacaatacaaatcatg

SEQ ID NO: 6003 - DNA, 397 bp, Glycine max
  unsure at all n locations
actcaagctgaagcaactggtgcgttggtcaactggaacccatctgccttgaatcagaaatctgtacctgtcgcaaggggttgtggtttgtgctcctctgctgaccaccatacagacctttgcccttccatgcagcaacctggagcaattgagcaacctgaagcttatgctgcaaatatttataatagacctcctcaacctcagcagaaaaatcaaccacagcagagcaattatgacctttccagcaacagatacaaccctggatggaggaatcaccctaacctcagatggtccagccctcagcaacaacaacagcagcctgctcttcctttcaaaatgctgctggcccaagcagaccatacattcctncaccaatccaacaacagcaacaacccca

SEQ ID NO: 6004 - DNA, 422 bp, Glycine max
  unsure at all n locations
agctttttctgctggaatcatttatcctatctccgacagccaatgggtgagtcccgtccaggtagttccgaagaaaatcggcctcatcgtgatcaaaaatgagaaggaggagttgattcctactcgggtgcagaacagttggagagtctgcatcgactataggaggctgaaccaggttaccaaaaaggaccattttcccttgccattcattgactagatgcttgaacgcctggcaggtaaatctcactactgtttccttgatggtttttctggttatatgcaaatcactattgctcctgaggatcaggaaaagaccacattcacctgccccttcggcacttttgcctataggaggaatgccttcggcctgtgcaatgcccctggtaccttccagcggtgcatgatcnagtattttagtgatt

SEQ ID NO: 6005 - DNA, 412 bp, Glycine max
  unsure at all n locations
tctatagaaggtgcgttcctaatttctctacaattgcatcatctctcaatgagctggtgaagaagaatgtggcatttacctgcggtgaaaaacaagacaagcctttgctttgctcacagaaaagcttactaaggcacctgttctagctcttcttgacttttctaaaacttttgagctagaatgtgatgcctctggagtgggagttggagctgtattgttacaaggtaggcaccctattgcttattttagtgaaaaacttcatagtgccaccctcaactaccccacctatgataaagagctntatgccttaatatgagccctccatacttgggaacatttaccttgttccaaggagattttcattcatagtaatcatcaatcacttaagtacattagaagggaaaagcaagta

SEQ ID NO: 6006 - DNA, 404 bp, Glycine max
gtgcagaactggaagctccaattcatggaaagttaattcattcctacgcgagcaagacccctgcctcgtctaatgtatttgtaaacagtgctttaatatatatgtattcaaaatgtggatatgttgctgatgcttttcaagtttttgacaacatgccggagaggaatgtggtttcttgggaatccatgatattggcttatgcaaggaatgggcatgctagagaggctctgaagctcatgcatagaatgcaagctgaaggttttgtggtggatgattatatccatacaacagttattagtgcatgtggaggcgttgagcatggagacattcatcaggatagtgagtattcttcacattacttgcattcctagtaatcttctacaagataggagcatcaatgaaca

SEQ ID NO: 6007 - DNA, 330 bp, Glycine max
  unsure at all n locations
cttgctctatggaactggctntgtgttcatatcagcaggattgtacagagtactattcttatgaactntgattcttctttctggtcgaatgaaatgatatctaacatttatatgcttagttctatcatgatgaacctgagccttggccaagcatatagcactaatgttgtcacagtagatgttagcatattcttgattaattgcgagatcatatattaaacctttcagccggattccttcctttgcatgttcaataagagccatgtattcagccttagtangcaagagggcaacagaacgttgaagtgttgccttccgaatcaccaagct

SEQ ID NO: 6008 - DNA, 429 bp, Glycine max
  unsure at all n locations
gagaaagatgtccanaanatggaaaaatatattataaaaaatcaactccctcttgttgtgtgtaacccttggccacaagcctagctttgtaactntggatggcgccattaacacaatgtttgatgtgataaacccacctataaccaattgaaacttatcttgnggaaaatcagttagatacgaagtatgatttgcttcaagagtatgtaattcatccttcatagctnttcttaatacagtttcatacttaacagcttatgcatatgttttgggttcagaaatntttgaaatggctaaggtatatanttgagatgactaggagacaaatgatgataggacagaacagtggataaggaatataaagcagtacctgaagtagaagaaaggaacctgctgagttgagaaattgcatgtagtgaaaaatgaaaa

SEQ ID NO: 6009 - DNA, 384 bp, Glycine max
tagctacattaattgtcctacatatcatgagttctgataggttgacagtataatttgttttaacagtgcatagaaattaaactctttcatcatactatgataaaacaaactttgaagttaaatttttctttcttattttgggtgatatctcacgtaggaaaattcatacaatatgtggcatgtatttttggaggtacagtcatagcattcatcaagggttggcttctaagccttgctcttatatcttctcttccacttcttggcctctctggtaccgaatgagctttgcttttgccaagatggcatcccgaggacaaacagcttattctgaagcaactactgtagtggagcggacaattggttcaattcgaactgtatgccaac

SEQ ID NO: 6010 - DNA, 436 bp, Glycine max
  unsure at all n locations
agcttatgttgcanacatttataatagactttctcagcagcaaaaccaacaaccgcataataattatgacctttcaagcaacagatacaatctaggttggaggaatcacccaaatcttagatggacaagtcctccacaacaacatcagcctgtccctcatttccagaatgttgttggtccaagcaagccatatgttcctcctccaatgcaacagcaacaacagcagtcacaacaaagacaacaagcaaccgaggctcctcctcaaccttccttataagagttagtgaggcaaatgaccatctagaatatgcaatttcaacanaagacaagagcctccattcagagtttgacaaatcagatggngcagatggctactcagttgaaccaagctcanacccaaaattctgacaaattgccttcacaaactatgcagaat

SEQ ID NO: 6011 - DNA, 266 bp, Glycine max
aaagctcgaaattgaatgttgaagctctgagcaaattcaaacgacaataactttttactcggatgtctgattgagtcccgtaatatatcgaaaagcttgaaattgaatgttgaagctctgatcaaattcaaacgacaataacattttactcaaatgtctgattgagtcctgtaatatatcgaaaagctccaaatggaatgtggatgttctgagcaaattcaacgacaataaccttctacttcgatgtctgattgagtcccgtaatg

SEQ ID NO: 6012 - DNA, 365 bp, Glycine max
  unsure at all n locations
agctttgtncncctttgtttattaattagtgatgatttgtgaactacagggactgcaagacaagatcgaattggttcctattgatcttaaaaacaggcctgcttggtataaggaaaaagtttatcccacgaataatgtaaagataccgtacgtggtcatatattaagtggtgaaagctatttgatttgcttgattgatcatatcacgttcttcttcttatgctataggtaccttcgttggagcacaatagcaatggtttaggagaaagtcttgatttgataagatatatagatgccaactttgaaggggcacctctattccccactgtaagaactatatattaatattaattattccatacatta

SEQ ID NO: 6013 - DNA, 434 bp, Glycine max
  unsure at all n locations
acctgcacgcatgcaagctntactatgcaaggaatatccaaggaaatattcttcatctgacttagcatcaaattttcctaagttttctttaccattgtttaatacaaagcatttgcaaccaaaaacatgaagatgtgaaatgttgggttttctaccattaaacagttcatatggagttttctttaaaataggtcttattaaagccctattcatgatataacatgcagtattaacggcttcagcccaaaaatatcttggaagaggagtatcattcaataaggttctagcaatctcttccattttgttgaggggttctaggtgcagaaaaattatgttcaatgtcatgcttttcacaaaataaatcanattctttattttcaaactcacccccatgatcactcctaatagatataaattcccaaaggaaactcaat

SEQ ID NO: 6014 - DNA, 422 bp, Glycine max
  unsure at all n locations
cactaagcaatcactacgcatagctctaaactcgaaggtggttgacacatgaacganaacacaattcatggngctccgaaaaaggggttgagaatggagaattacactaagcaatcactacgcatagctccaaactcgaaggtggaggacacatgaacgataacgcaattcatggggctccgaanagattgagaatggagaattgcactaagaaatcactacgcgtagctccaaactcaaaggtggaggacacatgaacgataacgcaattcatggggctacgaaaagattgagaatggagaattgcactaagcaatcactacgcatagctccaaactcgatggtggaggacacatgaacgataacgcaattcatggtgctccgaanagatagagaatggagaattgcactagcaatcacta

SEQ ID NO: 6015 - DNA, 433 bp, Glycine max
  unsure at all n locations
agcttcaataaaaagatggcctcagcaaattttttatttccagaagggaattctatcaatagacctccaatctttaatggagaaggttaccactactggaaaacccgaatgcaaatttttattgaggcaatagatctaaatgtctgggaagccatagaaatagggccttatatacccaccacagtagaaagaattacaatagatggtagttcatcaagtgaaagcataactatagaaaaacctagagatagatggtctgaagaggatagaaaacgagtacaatacaacttanaagccaaaaacataataacatctgccctgngaatggatgaatatttcagggtttcaaattgtaagagtgctaaggaaatgtgggacactcttcgattaacacatgaaggaactacagatgttaaaagatctaggataaatg

SEQ ID NO: 6016 - DNA, 436 bp, Glycine max
  unsure at all n locations
tcaacattcaacttcgagcatctttttatattatacgactcaattagacatccgagtaaaaagttattgttgtttgaatttgctcagagcttcaacattcaatttcgagcgtctcgatatatgacgggactcaatcagacatctgagtaaaaagatattgtcgtcttaattggctgagagcttctacattcaatttcgagcgtctcgatatatgacgggactcaatcaggcatccgagtaaaaagttattgtcgtttgaattggctgagagcttcaacattcaatttcgagcgtctcgatatgttacgggactcaattagacatccgagtaaaaagttattgtcgtttgagttggctcagagcttcaacattcaatntcaagcgtctcgatatatgacgagactcaatcagacatccgagtaaaaagttattgtcg

SEQ ID NO: 6017 - DNA, 406 bp, Glycine max
  unsure at all n locations
agcnttgtgcaaattcaaacgacaataactttttactcggatgtctgattgagtcccgtaatatatcgacacgctcgaaattgaatgtcgaagctctgaggaaattcaaacgacaataaatatttactcggatgtctgatatagtcccgtaacatatcgaggcgctcgaaattgaatgttgaagctctcacccaattcaaacgacaataactttttacacggatgcctgattgagtcccgtcatatatcgagacgctcgaaattgaatgttgaagctctgagacaattcaaacgacagtaacattttactcggatgtctgattgagtcccgtaatatatcgacacgctcgaaattgaatgttgaagctctgagctaattcaaacgacaataactttttactcggat

SEQ ID NO: 6018 - DNA, 380 bp, Glycine max
  unsure at all n locations
nntgatgcaacattggagaggttatcgatacaacgagatgatgcgcctcatgagagggtggatcanatggagaatagagatcataatgaagaagaaagaggagaagagggatgatgatgttcctagacaaaaccgaatngatggtattaaactcaacattctccatttaaggaaagaatgatccggaggcctacttggagtgggcgatgaaaatagagcatgtnttctcatgcaacaactatgaggaggaccagaaggtgaagcttgccgccacggangtttccgactatgctcttgtgtggtggaacaagctacaaaaggggagagcaagatatgaagagccaatggttgatacatggacggagatgaaaaagatcatg

SEQ ID NO: 6019 - DNA, 415 bp, Glycine max
  unsure at all n locations
gcaagctntactatacttagttcggcttgagttttatacccaagacttgagtntggcttattacctatatgttatttgtaaagtctcgactagtcttacatganagcctaacttagcctacaagcctatttagaagcttgcttaaaggtctttgatcaattaattattttaaaacctaatgaaatactaattaaaaaaaaaagaaacttataaaatttcatataagtaatgtacaaattgaaaaataattgataaacaaaatcatattgaattcaagtcgttaaaacacacagtatatataaaaatgaaaaaaaaacataatattaaaaaatacacggacatgcttaggggtgaaatgcgtataggttacaatataactttaaaagtacttgtattttctatttattattctata

SEQ ID NO: 6020 - DNA, 413 bp, Glycine max
  unsure at all n locations
agcttccatcacaaacactntatggttagattgttggtagaaataatatcccattgtttcttcaggataaccaatgaatctacacttatcagaccttgcctcaagtttatctgtttgcaatcttttaacataatcagggcaaccccataccttgatgtgtttaagacttggtttctttcctttccatatctcatatggagttgtagagactgcctttgtaggaactttatttagcaagttggttgttgcttctaaagcatatccccataagtttaatggaagatcggtgaaccccatcatggatcttaccatatctagtaaggttcgatttcttctttcagatacaccattgtgttgtggtgttcccgaatgtgtccactgagagagaatctcattctcctttagataatcaa

SEQ ID NO: 6021 - DNA, 403 bp, Glycine max
  unsure at all n locations
gccctatcatccttgtctccgtcgccttgaatgtcctcgccagattccttatcgtctntatgcacggaatcaaaagctccgaatccgctttctctattatcttcaccacttgatcaacaacggctttgcaagcaggagagttgggcttaaacgcggatttccttaattcagcatctttctctgccactgctgtaatctccatcaccgccatagccgaattgtactgcacagcctccgttcctttttcaagaagaacagcgaaacagagcagtgctcttgattcagtaatgctacgacaaattggcgagtttcctttcgctaattgccagagagccctcgctgccatttccttcatgttagccttagtcctaggatcctcatgatcccttcctttcatgttatc

SEQ ID NO: 6022 - DNA, 383 bp, Glycine max
tgctctattcaaccggagtgacaagaatatcttcttactgatcaacacttgctcatggccaaagatgcgtgggagatcctgaaaaccactcatgaaagaacctccaaggtaaagatgtccagactgcaactattggctacaaaattcgaaaatctgaagatgaaggaggaagagtgtattcatgacttccacatgaacattcttgaaattgccaatgcttgcactgccttgggagagaagatgacagatggaaagctggtgagaaagatcctcagatccttgcctaagagatttgacatgaaagtcactgcaatagaggaggcccaagacatttgcaacatgagagtggatgaactcattggttcccttcaaacctttgagct

SEQ ID NO: 6023 - DNA, 434 bp, Glycine max
  unsure at all n locations
agcttcataacagctntaatactctctcgtgagatngcaccctctggccagtccaacctaccccttcgaacatacttctctgcatgtcggctacatgggcagagtaaaagatacactcggttatgttcaagttcaatcatttgataaatttgataataatagaaaattcacaaggtaaatcacttactcaactctctttaacatctgctgtggtataggaccaagcaccctctccatcatagccagatgctctaaattttcatgagtctgaaacaaagcttcaccctgcaatagaagcccataagctgatttaaacaaacaaaactggataaaattggcctaaaagtatccagagagccaaacttacagtgcataattcaaccaatatacagcccacactccatatatcacatggatagctccacccaagtcct

SEQ ID NO: 6024 - DNA, 459 bp, Glycine max
  unsure at all n locations
tttacccatntatgtgagtgaganattatataaatgtaaaatttactcacactattgttatgattacttttagaaccattattatgattatatgctataaaactatactcatatttcttatgatttcaaagttaagttaattattttatattctactctttttacttatttaaatattaataaatatgaaatatacagattataagaaaatatatgataagctactataataaatcataatatgtgatatattctattttatgaggataaccgcatgaaaactcaatatgtttaatcttaaaagatattcataatacttactaattgtattgataatgaattatggataataaattatcaaataataacaaatntatttcataatgcacaagttgaatgaatttcaatttaaataattataaatttatatttactatactctttctaatctatacacat

SEQ ID NO: 6025 - DNA, 453 bp, Glycine max
agcttcataggccttgtatggtctgaaacatgctcccagagcttggaacaagagaatagacacctttctcttgcaaattggattcatgagatgcactattgaatatggtgtgtatgttaaaggagaaagtctttcatatatcctcatagtgtgtttatatgtggatgatttactaataacatgaaaggattgcagtgttatctcgacattcacgcaagagatgaagtctgagttcgaaatgtcagatcttggagaattatcatattttctgggcatagagttcaagatgacaaaggctggaatttctatgcaccaaagcaaatacacaattgatgtcctaaagaggtttcagatgcttgactgccactcagtttcaacttctgttgaaactagtgctgtgctggatcaatctgggcttgaacaattggtagataagactgtgttcacaccaat

SEQ ID NO: 6026 - DNA, 476 bp, Glycine max
  unsure at all n locations
ntgagcanattcaaacgacaataactntttactcggatgtgtgattgagtcccgtaataaatcgagacgctcaaaattgaatgttgaagctctgagccaattcaaacgacaataacgttttactcggatgattgattgagtcccgtaatataacgagacgctcgaaattgaatgttgaagctctgagccaattcaaacgacaataactttttactcggatgtctgattgagttccgtcatatatcgagacgctcgaaattgaatgttgaacctctgagccaattcaaacgacaataactttttactcggatgtctgagtgagtcccataatatatcgagacgctcgaaattgaatgttgaacctttgagccaattcaaacgacaataactntntactcggatgtcctattcagtgacgtaatatatcgggacgctgganattgaatgttgcacctctgagcaaattaaacgacaat

SEQ ID NO: 6027 - DNA, 323 bp, Glycine max
agcgttgatattccttgttccggatacctctctcttctcatgtgcacccaaacccaatctccgggttcgaagacaaccttctttctcccttcgatggcgttggtagcatagcttttactgtttctctcaatgtgagctttgactctataatgaagcttgttcacatagtccgcctctgcttgaccttctttatgcttaaaaacagacacattaggcataggcaaaagatcaagaggagttagtggattaaaaccatcaacaacttcaaggtttaagacagaagactcatacgatgacgccgatcgaacattacctaatagaca

SEQ ID NO: 6028 - DNA, 189 bp, Glycine max
ttgagctcctctgctgaccaccatacacaccttttgccttccatgccgcgaccctgagcaattaagcagcttgaaacttatgctgcaaacatttacaatagaccttctgcagctcagcagcgaaatcgaccacagcacaataattatgacctctccaaccacagatacaaccctgcatggaggaatcac

SEQ ID NO: 6029 - DNA, 437 bp, Glycine max
  unsure at all n locations
agcttaagctccttgaactacacaaggctcttaatatttgaagagtatccttgtggaaccttcacccgacaaagacacttgttagtgcttagctctacggagctttaaaagattggctaagattttgttaaaacatgagcacttagacaatgaaggaaagctggagttgctgcacatgatgtccaacgttatgtcaaggaataagatcgggctgcacattgtacaaggcaagataaaatgtcaaatgaagaattgaagttgcaggatccacgatgtcggatacaatgtcctgacatcctgcccgagaatactggagttgctgtacaatgcaagataaaagtcaagtaaagaagtgaagctgcaggattcacgatgtcngacacgatgtcctgacatcttngcccgatatactggacatataanatctgtatatcttt

SEQ ID NO: 6030 - DNA, 486 bp, Glycine max
ctgaatgctctattcaatggagttgacaagaatatcttcagactgatcaacacatgtacagtggccaaggatgcttgggagatcctgaaaaccactcatgaaggaacctccaaactgaagatgtccagattgcaactattggccacaaaattcgaaaatctgaagatgaaggaggaagaatgtattcatgacttccacatgaacattcttgaaattgccaatgcttgcactgccttgggagagaggatgacagatgaaaagctggtgagaaagatcctcagatccttgcctaagagatttgacatgaaagtcactgcaatagaggaggcccaagacatttgcaacatgagagtagatgaactcattggttcccttcaaacctttgagctaggactctcggatagggctgaaaagaagagcaagaatctggctttcgtgtccaatgatgaaggagaagaagatgagtatgacctggatactgatgaa

SEQ ID NO: 6031 - DNA, 442 bp, Glycine max
gtgccaattcgtcttcttctttagtccagtcttcttctggcttcaatccatcagtgggctttccttctgtgtccagcatcttgggatgttcccagcctttgatgacagctttccaggttctgctatccagtgatttgaggaaggccaccatccttgctttccagtattcatagttggttccatccagaattggtggtctgttcactggtcctccttctttctccatgttcatcagaatttatctccctaggtctcactcagtgatttcgagtgcctgctctgataccaattgaaattctgataccaatgccagatgtcgtacaggatgtcacgacatcacgcttcagaacatgcagattatctctgagtgtatgaacagattaaacaagtaaataacacaagagaattgtaacccagttcggtgcaacctcacctacatctg

SEQ ID NO: 6032 - DNA, 430 bp, Glycine max
  unsure at all n locations
agcttgagcanattcaaacgacaataactntttactctgatgtctgattgagtcccgtaacatatcgagacgctcgaaattgaatgctgaagctctgagcaaattcaaacgacaataacattttactcggatgtctgattgagtcccgtaatatatcgacacgctcgaaattgaatgttgaagctctgagcaaattcaaacgacaataactttttactcggatgtctgattgagtcccgtaacatatcgagacgctcgaaattgaatgctgaagctctgagcaaattcaaacgacaataactttttactcggatgtctgattgagtcccgtaatatatcgacacgcctcgaaatgaatgttgaagctctgagcanattcaaacgaacaataacttttactcgggatgtctgatgagtcccgtaacatatc

SEQ ID NO: 6033 - DNA, 470 bp, Glycine max
  unsure at all n locations
agcttctgcttaagtcctttgcaactggtttaccaggtggngcttgataatttcttagttcatatcgcaagcaagcatttatccaccgcagatataccaattcttcaagatctgaacatcgatcagactgaaattgctcaatttccttcatcaagcgcacattttcttgtttaagacactcactttcttgcttcacagcacctgcctgcaccccaaaagcataagataaaaatttactgttaacaagcagtgactaaactaaaggaaaagagtacgtgactataatcttcctacctctgggtcttccagaaatgcatttgcaaggatctgggtagaatccaatcttcgagctaagtcagaattntctatctgcaatcttaaaatagatttcctcaactcttctgcttcagactcaagatactttagctnttgcatctntatttgaatatcttgatcataagcagcatctt

SEQ ID NO: 6034 - DNA, 361 bp, Glycine max
  unsure at all n locations
agctntacagcaaatgccactctactctcaagttttaaaggatatgttaacaaggaagcacaagtatattcaccaggaaaacattgttgtggaaggaaattgtagtgctgtgattcaaaagatccttccacccaagcataaacaccctgngagtgtaaccattccttgttcaattggagaagtcactgtggaaaaggcacttatttatttgggagccagtattaatttaatgccactctccatgtgcagaaggttgggagagttggagaacatgcccactaagatgactttacaacttgctgaccactccatttccagaccatatagagtaattgaagatgtgctggtcagagtaaaacat

SEQ ID NO: 6035 - DNA, 440 bp, Glycine max
  unsure at all n locations
agcttgtgagatcaatggttattacatacctatcaaaagcaaggtcataatcaatgcatgggcaattggaagagatccaaatcattggagtgaagctgagagattttatcctgagaggttcattggaagttctgttgactaccaaggcaatagttttgagtacataccatttggtgctggaagaagaatatgccctggcctcacatttgggttgaccaatgttgagtttccacttgcattgctaatgtattattttgattggaaacttcccaatgaaatgaagaatgaagatttggacatgactgaggcttttggagtatcagctcgtagaaaagatgaattgtgcctcattcctatcactttccatctttagcctacacaagctctacaataattagtaaaagtaaaagagctgagaataaagaanactctatatctat

SEQ ID NO: 6036 - DNA, 473 bp, Glycine max
  unsure at all n locations
gctcaaacttgagatgatnggttaaagcagtacaaaacttgattttcctaaagtgattacataaattatcaaagcaatctagaaagttgtactgattacctagaaaatcatcacataatattgatactccatacaaatgaatcaagtgttgtgtattttggataaacaaaaagggttatgagccatctaaatccaacacatctcaacccatgccgtggtgaaaaataaaactaactaaacaaaaaatgctcctccggcattgagccatctaagttatcgactcagtgtgctctttgttagtaggggtgatgacggtttttcttgtgagttcttnctgccttcatagtcaatgtgcttgaaatccaagattgatttgattcagaggaatcatcatagagccaacaacatagccgaccatcttccccacccgtccaaccgagaatgccttggctaggactattagtacgtccact

SEQ ID NO: 6037 - DNA, 446 bp, Glycine max
  unsure at all n locations
agctntagtgaagcttatcaatacatcaattattggtgtttcccaggcaatgcagatggcagcgaatatggctgtcttggagcgtgcttgtgatttcttctttcgccatgctgcacagctttcaggtgttcccttgagaatggtggagagaagcagaaggaacttccctctaagaaaagctcgtgatgctgctgaagagatgctctctgggctactcaaagccaaagttgatggatttatgacattgatcgagaatgtaaattggatgggtgacgaggcacctcagagtggaaatgaatatgtaaacgaggtcataatttatttggaaatnttggtttcaactgctcaacagatattgccttctcaagtccttaagagagtattacaggaagtttttgctcacatatcggagaagatagttgggactttagttagtgattctgtta

SEQ ID NO: 6038 - DNA, 483 bp, Glycine max
  unsure at all n locations
tatcagaaggggaatggtaaaataccacctcaagctgatattaagaaggtggcaaagtgtttcttttgcaagaagaagggacacatgaaaaagaattgccccgggttccagaaatggcttgagaagaaaggtaaatcaatctcattagtatgttatgaatctaatatggttagtgttaatattaacacctggtggattgattctggatctactattcatattgcaaattctttacagggtatgcaaaacctaaggaaaccagtgggaagtgagcaaagcattttatcaggcaataagctaggctcacatgtggaggccattggaacttgcattttgactttaagtagtggctttatttcaaaattagaaaggactttntatgtaccaagtttttcccgaaacttgatttctatttcaaggcttgtaccgtttggatattcctttaatttcaaagacacatcatnntgagttatttataattct

SEQ ID NO: 6039 - DNA, 476 bp, Glycine max
  unsure at all n locations
agctntcatgactgtatgctcaagaagcagatctgtgacaactcattctcatgattaaatttccacagttaagaacaacctctgctttatgaatccttcaaagggggaaaaatcaccttcattggttgcatcaacttgaacaaccatgcatgctctgaagaaggaagaactgccggaatcttcattttcttccagtccatgctaactaaatcagttgatgctgaataatccctgataagcacatcaatattttgtactctattcttaacatttcttatcttctgagtttggtcaatcacttcctcctttgcattatttttcaatgtaatcctcttatcaagactcaatcgtttggccttcttattctggtttctaaccacaatatcacaattttcatcatcatgttcattaccaaccttcctcctcctccacaagactctctcgactntactatcaatatcttccatattacaggg

SEQ ID NO: 6040 - DNA, 495 bp, Glycine max
  unsure at all n locations
acactatgatactaagcttatataatagaagaaatataacaataaaagatataaaacaagatagatntagcttaaaagtgaacttaaataaatcataaatcaaatacaacaatacaatctcaattcatacttcaatctcatgcaattgaatcatgtaatgttatgctgactcaactccatggagatttctacaacttttgggtagtccctataggcctcatcccctatcatggtttcacttttttaccactcaaggtattccttgagctgaccctgtggacaaagtatgattntatcgaatatagacaaatatgagtattagtttacttctataaggttntaagaccttacatacaacaacaacaacaacaacaacgccttatcccactaggtggggtcggctacatggatcaacttccgccataatgttctatcaagtaccatacttctatccaaaccattaatttcgagatccttgtttataacctctcttat

SEQ ID NO: 6041 - DNA, 435 bp, Glycine max
  unsure at all n locations
agcttgtaagtaactctatggacttaaactagctagccgcaaatggtatgagaagttgaatttcttgcttctccaacttgggtttcaacattctatagttgatcactccttttttatccatcacacagttgattcccttactactcgtgtatgtagatgacatagtcattgttggaaattctatggatatgataacttcattcaagcagattttagataatcaatttgggcattcttaagttctttcttggtgctggtgttctcagtgccaaacctgcaagcaccccttctgaacctacctttgagacttcgccaagatgtcgctcctatacctgactntcacacgcncagatatatcccatgttgaccaacaacttagtcaattntcagccctcccaacagtgagtcattatcaataagcccaacgcgtacttt

SEQ ID NO: 6042 - DNA, 461 bp, Glycine max
  unsure at all n locations
agctcttcatactntgatgttatttcagctctttccaagttagcttccttcagctgctctttgagtttctccacctcagcctctaatgcttgttccctttcgggtttgttactaagtccagagttgagattagtagtatcaaattcagcaacaaaagtgttaaaagcctggttttgaaagttagttgtactctcacgtacgcgatctttatccttaaacaaatttatttcaaaatccttggagggtacagtatcaggcttgtgtaattttccatgtgtactgcttttcacggtatgagtntgtgtgttaaccactttgttaggaccaacatttntgggtaactgttcgttntcaggaagaatcctatcatgtntcggtgaaatatggtggctagatggttcttcatcaaaaattggtttactcttatcctcagcaacaagtgattcctttgcatgctgagt

SEQ ID NO: 6043 - DNA, 487 bp, Glycine max
  unsure at all n locations
tccttaagaagattcctaaagaagctaaagcttagctacacatacctctctaatagctaagctcacctccttgagatgagaagctagagcttagctacacaccccctataatagctaagctcacccccatgaggaaaaacatgaaaataacaaaaaaagtccttattacaaagacaactcaaaatgccccaaaatacaaggctaaaaccctatactactataatggccaaaatacaaggcctagacgaaggaaaaacctattctaatatttacaaagataagcgggctcatacttagcccatgggctcgaaatctaccctaaggctcatgagaaccctagggcctttccttggatctctagcccaatctacttggagtcttctagccaatgcccttgcggngtaggattgcatcattccctccaccttggaaaggatttgacctcaaatcccgaggttcttcatactctgngctccttccctcaaca

SEQ ID NO: 6044 - DNA, 398 bp, Glycine max
  unsure at all n locations
agcttctcattngatccagcagaggaggagcatacaacctatttcactcaagtcacacccacggaattcaagcacaagagacttggtcattgtcatcttgaaagaatgctaaacatgaaaaaaaggaaatatgcaaaagaaaatttgaagaagtttcaaatggaggaatgcaaatctgttagcacaccaatgaatcaaaaggtgaagttcaacaaggaagaaggtggtgataacattgatgaaggatattgtgggagcttgattggatgtctaatgtatctcacttcaacaaggtcaaacattctattttctaaaaagaacaaaactggaatttttgttgacaatcaagtagccattgctattgcaaacaatcccgtgtgtcatgggaagattaaaca

SEQ ID NO: 6045 - DNA, 427 bp, Glycine max
  unsure at all n locations
ngtagggttaaagtctcacgaatgtcacgtgctcatgcaacaattgttagccgtggctatacgagacatcttgccaaacaaagtcaggttagcgataactcgcttgtgctttttcttccatgctatatgtagcaaagtcattgatccagtcatgtttgatgagttggaaaatgaggcagcaattatactgtgccagtaggagatgtatcttccccctactttctttgacatcatgattcacttgattgtgcatctggtcagagaaatcaaatgttgtggtcctatttatctacggtggatgtacccggctgagcgatacatgaagatcttagaagggtatacaaagaatctatatcgtgcaatagcatctattgatgagaggtacattgctgaagaagtcattggaatttgttcagaatacttagag

SEQ ID NO: 6046 - DNA, 390 bp, Glycine max
agcttgtagggttaaagtctcacgattgtcacgtgctcatgcaacaattgttagccgtggctatacgagacagcttgccaaacaaagtcaggttaacgataactcgcctatgctttttcttccattctatatgtagcaaagtcattgatccagtcatgtttgatgagtttgaaaatgaggccgcaattatactatgccagttggagatgtattttccccctgctttctttgacatcatgattcacttgattgtgcatctggtaagagaaatcaaatgttgtggtcctgtttatctacggtggatgtacccgattgagcgatacatgaagatcttataagggtatacaaagaatctatatcgtccataagcatctattgttgagaggtaca

SEQ ID NO: 6047 - DNA, 423 bp, Glycine max
agcttagtgacataagccaaacacatggtattgtctaatgcccctatgaaagcccatccatgtcccaggttccaagcaaacacagccattccccaccaccacacctgctctccaaagtaatttggatgccgagaataataccacaaccctttgtcaagaatagggacctccttgttctttctactcacaaagttgtaaagctgagtatcagcaatgtatgccgtgacaatgccagatacacacacaactatggctaccaagtcccacatgctcagaggctggttcaccgagtggatgacatagaacggaagagacaatccaatcagaaacacctgcaaggttgtcttgatgtaaattaaaagtaaaagcaagggaaaatgatgactaagagtaaccttaattacctgctgagggacgtagatg

SEQ ID NO: 6048 - DNA, 482 bp, Glycine max
  unsure at all n locations
tcagtttaattntaaaaatggtctaactatcatggtgcatgcatgttgattgaggaatgttgggatccaacacctgttgtgaggccaacattttctcaggtcattgtacggttggacaaaattgttgcaaattgctcaaaacaaggatggtggaaagatacttttaaactcccttggtatggttccttgacggatatccttataaaattttagattctttggttgaattcaaaacggtgaagtgtaataccttgaaatgctaaaatcaaccatcccttgtggtttgtgtctgggatagggatgttttacctcgggccattttagtccgatttgagcaatgctagttgcaaaaagactgatattactgttctacttgttgatgaaacttctttgctgttttctaaacttggctttaccatgattcatttcaatgtgtgtaggaaataaataacaaggtacataccacgtggcaaggaagacat

SEQ ID NO: 6049 - DNA, 455 bp, Glycine max
  unsure at all n locations
gaatcggacatccgtgtcanaagttatgaccattcaaatatgtcgagagtttccgttgtgcaatttcgagggtctcgatatattatgtcccaaattcgaacatccgtgtgaaatgttatgaccatttgaaattctagagagcttccgttgttcaatttcgagcgtctcgatatattatgtaccaaattcggacatccgtgtgaaaagttatgaccattcgaatttctcgtgagcttccgttgttcaattntgagagtctagatgagttatatacgcgaatcgaacattcgtgtgaaaagttatgaccattcaaatatcttgagtgcttccgttgtgcaatttcgagcgtctcgatatattatgtcccccatttggacattcgcgtgagaagttatgaccacttcaatttgtcgagagcttccgttgttcaatttcgagcgtctagatgagttatg

SEQ ID NO: 6050 - DNA, 383 bp, Glycine max
  unsure at all n locations
agctnntgacggactataccaagctctaggaaccagggacggagaaagatctatatataggcttgctaagggtagagagaggaagactagagatttggatcaagtaaagtgtgttaaggatgaagaaggcaaagtcttagtgcatgaaaaagatatcaaggaaaggtggaaggcgtatttccacaacttatttaatgatggatatggatatgactctagcagtctagacacaagagaagaggaccggaactataagtactatcgtcggattcagaaacaggaagtaaaggaagcgttgaaaagaatgagtaatggtaaggcggtggggccagacaacatacctattgaagtgtggaaaactcttggagatagaggtcttgagt

SEQ ID NO: 6051 - DNA, 468 bp, Glycine max
gagaagcaagtcaaaaactcttttcaaagtaaaaatgttatttctacttcaaaaccccttgaactacttcacattgatttatttgatccctctagaattatgagtttgggtggtaattactatgtcttagttatagtggatgattactcaaggttcacatggacatttgtttttgaaaaccaaaaatgaagcttttgatgcttttcacaaacttgccaagatgattcaaaaatgaaaatggtctttatattgtttcacttagaagtgatcatcgaggtgaatttcaaaaatgagtcttttgaaagcttttgtgaagaaaatggaattcaccacaatttttcttccctaagaacacctcaacagaatggtgttgtgtggagaggaaaaatagatcccttgaagaaggtgcaagaacccttttaaatggaacaaagctacctaagtacttttgggctaacgttgtagaca

SEQ ID NO: 6052 - DNA, 475 bp, Glycine max
  unsure at all n locations
cgcatcaatataaccctntaattgtaactcagaatctctccataagtgaggaactcgtctttagttcttctcaagtacttaagaatggtctgaagtacttttcaatgttcctcaccgaggtttactggatattgactagctgcacttagtgaataagcaacattaggacgtgtacaaatcatgatatacatgatagctcccactgcgctggcatatggtactctagtcatgcattctttctcttcatgagtntaatataattntgtaagatgacccttgtgttgaatgtcttcttatgacctttgttgcttgtttgataattgggagtaatatagagatgatttatgatgaatacctatgaaaaataggcatgttaagcttcaaaaattgcggttactccttttttaattcatttcatagtttaaggaactaattaaaatagaaggacacatgtgtaggggactctgttattatt

SEQ ID NO: 6053 - DNA, 466 bp, Glycine max
  unsure at all n locations
gcttaagaaagagcctngagggtaatgttctcaacaatagttgaattctccaaactgtttattaatatatctccattctgatttataatttattgattcagttctcttgactttcatgtgaacaggtgattgcagagtatttgtccttagaagaagctgctggaataaaagagggattccagctgatggatacaagcaataaaggcaagattagcgtcgatgagctgcgtgtagggttgcataaactaggtcaccaaattcctgatggggatatccaaatacttatggatgctgtgagtatttttcactttatctggaaacttttcttttctgtttgttctacaattgatgtgtgaagaaataagtagtttggtctcttgtttttcaaaattntatgttcattgtaatatatcanactaattaattgcaaacttggtaggagttattagtttataaatgctaacac

SEQ ID NO: 6054 - DNA, 429 bp, Glycine max
  unsure at all n locations
agctnntgagcttgagcacccacgagtgtttcagcaccctagtaccaagagtgtatgtaaagtttcttcgagccacacttccaagagcagtgtagggggttctgtnggttcgagcgaggggtttccggcagtattgaaaacaatgtgggacaatgtgggtgtcgagggagcggtttctggcagatttcaggcgggaggagaaagagaacagcgactgcaaggttttcgagcgcacgggttgtgaaatgccaatgttttaacttataaacataacaacatcggttntttaaggataaccgatgttaactaaatatagttaacatcggttntggaaatcatataggttatatcggttnttaaaaaatcgatattaagatcaattccttaacatcggttttcaacatcgattttgagaaaaccgatgtttac

SEQ ID NO: 6055 - DNA, 477 bp, Glycine max
acatctaaacatccttcaatttacaccacaatatgaaatgttatcatcatatgcacagcaactaaattattaagaaaaatagaagtgcaggctaaagagatgtccaataaaagctaaataataaataaaatacattaagaatatcttaacacacgagttgttataaatcttgtagtgcatatctttgaattttaccgatgaaaaaatttattgacaaattcaaaattcttaaatttaatttagatatcatgaataattgaaggccagtcatgtctttgtatataataaatcttatttcttttatttttcttttcaaataaaaaatatatatataactttctttatccccaaataaataaaatataattattcttttacctcagaaataattttttaacttaaattccgttttcatctctataaatgtgttagtttttggtctagtgtctattagttaattatagctcggacccatat

SEQ ID NO: 6056 - DNA, 473 bp, Glycine max
  unsure at all n locations
ttcaaacgacaataactgtntactcggatgtctgattgagtcccgtcatatatcgagacgctcaaaattgaatattgaagctctaagccaattcaaacgacaataactttttactcggatgtctgattgagtcacgtaatatatcgagacgctcgaaattgaatgttgaagctctgagctaattcaaacgacaataacttttttctaggatgtctgattgagtcccgtaacatatcgagaccctcgaaattgaatgttgaatctctgagccaattcaaacggcaataacttttttcttagatgtttgattgagtctcgtaacatatcgagacgctcgaaattgaatgttgaagctctaagccaattcaaacgacaataactttttactcggatgtctaattgagtcctgtaacatatcgagacgctcgaaattgaatgttgaagctctgacccaattcaaacgacaataactt

SEQ ID NO: 6057 - DNA, 464 bp, Glycine max
  unsure at all n locations
agcttgtatcaaattcaaacgacaataacgttntactcggatgtttgattgcgtctcgtaatatatcgagacgctcgaaattgaaaacggatgctcgtagcaaatgcaaaccgcaataacttttaactcggatgtatgattgagtaccataatagatcgagacgctcgaaattgaaaaaagaagttctgagcaaattcaaacgactataactttttactcggatgtctgattgagtcccgtaatatattgaggagcacgaaattgagaacagaagctctgaccataatcaaaccaaaataactttatattcggatttgcgattgagtcccgtaatatatgaagacgctccaaattgaaaacagaagctctgaacaaattcaaacgacaataactttntactcggatgtccgattgagtcccgtaatatatcgagacgctcggaattgagaacagaagctctgag

SEQ ID NO: 6058 - DNA, 460 bp, Glycine max
ggtggaaggggtctcccatatctcattgtgtttgcaaatgattttctcttgtttggggaagcatctgtaaagcagatggatattattaatagatgcttggattcttttttgatatgtctagttagaaagtttcaatatctaaaactagaatgttggtctccaagaatgtcaattcttcttgggttgtggagttgagtgagctatctgggttatctcctatgttagacttggggaagtacctcggtgttatgtttttgcattgtaggaagagtaaggaccattattttttatctcctagaccataccaaaaagaggctttcctcttggaaagctaattctttgtcattctctggtaggcttaccttgacccaggcagtgattgagacattaccaacatacacaatgcatgtgactcttcttcctatgagtgtgtgtactaagttggaacgaatggccaaag

SEQ ID NO: 6059 - DNA, 406 bp, Glycine max
agctatcgtgacattgatatggtcataacccttcacacggatgtccgattcaggcgcataatatatcgagaagctcgaaattgaacaacggaagctctcgagaaattaaaattgtcataactttccactcggatgtccgattcaagcacatcacatatggagacgctcgaaattgaagcacggaagctcttgagaaattgaaattgtcataacttttcactcggatgtccgattcaggcacatcatatattgagatgctcgaaattgaacaacggaagctctcgagaaattgaaatggtcataacttttcactcggatgtccgattcaggcacatcacatatcgagactgctcgaaatgaacaacagaagctctccagaaattcaaatggttataacttttcacat

SEQ ID NO: 6060 - DNA, 459 bp, Glycine max
ttcgagcgtctcgatatattacgggactcaaccggacttccgaacgaaatgttattgtcgttataatttgcagagagcttcggttttaaatttcgagcgtctcgatatattacgggactcaatcggacttccgagtgaaatgttattgtcgttcaaatttgctacgagcttcgattttaaatttcgagcgtcacgatatattacgggactcaatcggacttccgagtgaaatgttattgtcgttcgaatttgctacgagctttggttttaaatttcgagcgtctcgatatattacgggactcaatcggacttccgagtgaaatgttattgtcgttagcatttgctgcgagcttcggttttaaattttgagcgtctggatatattacgggactcaatcagacttccgagtgaaatgttattgtcgttcgaatttgctacgagcttcgggtttaaatttga

SEQ ID NO: 6061 - DNA, 431 bp, Glycine max
  unsure at all n locations
agcttgtagcanattcgaacaacaataactnttcactcggaagtctgattgagtcgtgtaatatatcgtgacgctcgaattttaaaaccgaagctcgtagcaaattcgaacgacaataacatttcactcggaagtcctattgagtcccgtaatatatcgagacgctcgaattttaaaaccgaagctcgtagcaaattcgaacgacaataacatttcactcggaagtctgattgagtcccgtaatatatcgtgacgctcgaattttaaaaccgaagctcgtagcaaagtcgaacgacaataacatttcactcggaagtccgattgagtcccgtaatatatcgagaacgctcgaatttaaaaccgaagctcgtagcaaattcgaacgacaataacatttcactcggaagtctgattgagtccccgtatatatc

SEQ ID NO: 6062 - DNA, 462 bp, Glycine max
ctcgctctgtggaactggcattgtgaacatatcagcatgatcgggcagagtgctgatcttatgaactctgattcttctttctgaccgaatgaagtgatatctaacatctatatgcttggttctatcatgatgaacctgatccttggacaagcatataacactaaggctatcacagtagatgttagcatattcttgattaatttcgagatcatttatcagacctcttagccaaattctttcctttgcagcttcagtaagagccatatattcagtctcaatagttgagagggcaacagaaggttgaagtgttgccttccaactcaccaagcagccaccaagggtgtaagcataccctgttagggaccttcttttgacaagatcagcagcagaatctgcatcataatagccagtgaggcaacaatctgagtgagatccatatatcagacctacatctacagtccc

SEQ ID NO: 6063 - DNA, 462 bp, Glycine max
  unsure at all n locations
cattcttctganactaatcaactcttcttgcattgctttaacctagtactcatcagatataacatcatctatgtgttttggctcaatctctgagagtaatgtgttatgcttgagagaattccttgtctggactttgcccttaggatcaccaatgatttgagactctggatgatgttttctcaagaatcgtcctgttggttctctaacttctttaggtttatcgtccactggtgagttggacacatgtttgtcttgactggatgcaacaatagatttcacgatattttctattttcatctctccaaaagactcatctaggtctaacattgtagtgtcagacttgttgttaaattttacatgaatagccttttccatatcaaggttctagacttgtacactctatatgccttggacgattcagagtatccaagtacgattccaaaatcacatttggagtcaaac

SEQ ID NO: 6064 - DNA, 475 bp, Glycine max
  unsure at all n locations
agcttgagcttagctacacatacctctctaatagctaagctcacctccttgagatgagaagctagagcttagctacacaccccctataatagctaagctcacccccatgacaaaaaaacatgaaaatacaaaaaaaaaaagtccttactacaaagactacttaaaatgccccgaaatacaaggctaaaaccctatactactagaatggccaaaatacaaggcccagacgaaggaaatacctattctaatatttacaaagataatcgggctcatacttagcccatgggctcgaaatctaccctaaggctcatgagaaccctagggccttcccttggatctctagcccaatctacttggagtcttctacccaatgcccttgcggggtaggattgcatcagtaagtatcccagcattacaattatattcttgtgctnnttgcaatcaaaacattatgctctattcctagcaacgtaat

SEQ ID NO: 6065 - DNA, 477 bp, Glycine max
  unsure at all n locations
ctgctgttaatactgccttacgactattagtactcaccaacttgatactcttctccccaaccatatcagagagtatggtttcctgaagctctactaagccatgctttgattnttctctgatatcaccaaggaaacactgaccttcaaattgatcagcaatcaaattgtacactgcacaagcaatagcggacttccctattaccacaattccataaatccccaccatgcttactccttgattggatccaacatccaaaagtgagttcacctcttgcactctagactccaatccaattggataattagccacatgtaaagggctacgatttatctatctggacacctcttcaaaaattttctgaataacttcatgttcatacctacccaaatacaaaatacatataaagttaaatcaaatgcatcaaatccatgccccagttcattcacaaattcaaatctcattatatctttgtcatg

SEQ ID NO: 6066 - DNA, 462 bp, Glycine max
aatacagagaaaaatagaacataagcaaccataaactaaacagtatcccttgcagttacctgcagctacgtcattcttggcatttttagtgactcttacagtttcttgtagctcctccaacttatggacccttgatttgtcagccccaaagctccatctacataggtaaagacaaatgcaaacaataatatttaacattaatcataaagattaagaataagagaaacattccttgtttcactcatatccatgctattcatggtccttggctccagatccatgagcactgcccttggcacaaaatatctactggtttggatagctcaactactttagaaagtgttaattcactcaagcaatgtgttcacattcttaaaggaaccgcaaccatctcattcctacagccagcactagacacttacaatcttttttatgacattattctactctctgatagtcaca

SEQ ID NO: 6067 - DNA, 348 bp, Glycine max
  unsure at all n locations
caagcttttctctgtacacctacattcctatacatgaaaaacnttttttgtatacacacgtattattaaaaaccctttctctttatatcaacacggtctatataaaacatctattccttttcaaagatttctttttcctttttcaacatacactcgttgttttataaaaaaattttctttatatacactcattgctcacacaccagaatttcttttcacacattatttatacacacaaaatcttttcatacactctttatatacaaaaactcttttcttttctttatataagatatgacatttgttcacaacgcctctttctttttctattcttggtggtatcatgat

SEQ ID NO: 6068 - DNA, 343 bp, Glycine max
agcttcgacattcaatttcaagcgtctcgatatatgacgggactcaatcagacatccgagtaaaaagatattgtcgtttgaattggctcagagcttctacattcaatttcgagcgtctcgatatgttacgggactcaatcagacatccgagtaaaaagttattgttgtttgagttggctcagagcttcgacattcaatttcaagcgtctcgatatatgacgggactcaatcagacatccgagtaaaaagatattgtcgtcttaattggctcagagcttcgacattcaatttcaagcgtctcgatatatgacgggactcaatcagacatccgagtaaaaagata

SEQ ID NO: 6069 - DNA, 478 bp, Glycine max
  unsure at all n locations
tcagagatctgctagaatatagcttcagcctctctcttgttgttgaggttcttatcnaggtgccacttcatggctagccttcgatatgctttcttgagatcctcatctttggcgcttctatctacctgaagaatcttgtagaagtccacgcccatgctttctctgtttttttcttcactgctatgaaacaagataaaggaggaattgtgaattatctcatatctctctctctttacagcatcatgatatcacgttccttctgatacaatacaggtaccgggaggaatagatgtcgatgctgctgctagtccaatcccaaatgtggtataaatatatcatttatttataatcttatgttaatttaacctagctaatagttgaataataataatcataataataactataataataatagggtaggtatatattccttgacattcttttaacttgtagactcttatgtgatataattctt

SEQ ID NO: 6070 - DNA, 464 bp, Glycine max
  unsure at all n locations
ccatctatgcaatcaaggggttcacaatcacaatggaaatttaattttcatcttttattacttacttgaccaaattcactcacattctataacatactacatatatgctacatctgatctgatcatatcttactgatatttttatactagaaaattatatatatgtatatatatatatatatatggcatctttttaaatcaatacacacgagatgctggagtttttgtttccgtagtcagaactcatgcacgtagagagacagtatagtcaattaatatgttaattaggtaccctacacccacctgtttccaagaattccatgtagctntaagatggtatgtacttcttctatgctgaatttccctcgtttaatatcaggcctcaagtaatttatccaacgaagcctacaactcttgccacaccttaacaaacctaaacaatcatatcatatcatatagataag

SEQ ID NO: 6071 - DNA, 465 bp, Glycine max
agcttgtaatgttcaggaatgtgtgaaagttgcctcttctcttttgctaccatcaacaaatccaatgctgaaacttacaggttattggtgggtaaattaggggagggatctgtgaccagattcgatcaggatccattacttggtgaaaattcaaagtgctgttcttgttgtaatgagcaatgggttttaaaaggttatgatcgaaggttggtaattaccaagtcaattgggtctggcaatgctgattttgatgaatcaaacgttgttggaaacaaatttcacaagacaagaagagctaaaccatttgtatcatccagagctacacaccttagaaataaacaggcagatcctttgtctcatgtcggttacactgagctaaagattacttcggatactgagtctgaaccggatgtttccttatctgatgatgatggtacgagcataccagttcacggtacatatgac

SEQ ID NO: 6072 - DNA, 476 bp, Glycine max
  unsure at all n locations
tctacttgtgctgtcttcatgcgattctntntactccctccaagaatattatgtcgtaaatcacaacggttaaagtgtgcgcaattgaatttcgaacaacatatccaaatttcatgaaaatccaacggttaacgaaaccgggatcgtagttttactgagaccattttgggtttctgcgggaaaagagaaagctacggtacaaagggtattagctctgacatgtttttacaattcccaacggtgaaaatgttangaattgggttgcgaacatggtgctcaaatttcatgacgatccaacggtgaataaatccgagatcattgtttttctgagataggtttggttggctgcgggaaaaagaaaaggttttgggaggagaaggagaaaaacgaatatgagagaaataagaggtaccgtcagtgtaaaaactgacctagcgctatntatagctagggctaatctatntatgtatttatta

SEQ ID NO: 6073 - DNA, 448 bp, Glycine max
  unsure at all n locations
agcttgcagatggtttattcttggaatcttgtcgagaggttgctacaaagtaccctggaataaagtataacgaaattattgtggataactgctgtatgcagcttgtttcaaagcctgaacagtttgatgtcatggtatgtgtatttacattctattctggtttgctgctgtttatgcacttatgtaattttgtctaatgtatttatgcagtaagcacacacacccttgagttaataacttgtacaagagaaattagctgagaaatgagtagttgcacgaaagagagtgaaaagttataacaaaagctaagttgctctacgataaatcatgttggtccaatcaaagaatatcttaaggttaattagaacatataaaacgtaggaattgagacctttccaaatctggctgttatgttctntaagattgttagcagtgggaaaatggatag

SEQ ID NO: 6074 - DNA, 490 bp, Glycine max
actcagcttcaagaaaagatggcctcagcaaattccttgtgtccagaagggaattctataaatagacctccaatctttaatggagagggttaccactactggaaaacccgaatgcaaatttttatcgaggcgatagatctaaatatctgggaagccattgaaatagggccttatatacccaccacagtagaaagagtttcaatagatggtagttcatcaagtgaaagcataaccatagaaaaacctatagatagatggtctgaagaggatagaaaacgtgtacaatacaacctaaaagccaaaaacataataacatctgccctaggaatggatgaatatttcagagtttcaaattgcaagagtgctaaggaaatgtgggacactcttcgattaacacatgaaggaactacagatgttaaaagatcaaggataaatgcactaactcatgagtatgaattatttacaatgaatacaaatgagaatattcaga

SEQ ID NO: 6075 - DNA, 413 bp, Glycine max
tggagaagtcctctatgattcgctgatagaagcctgcatgtccaaagaaactcctgatgcctttcacattgactagtggagggagcttttcaatgacatcaatttatgctttgtccacctctatcccccgagcggagatcttgtggcctaacactattgcttccttgaccataaagtggcatttctcccagttcagcaccagatttactttaagcaatcagtagcatttattaaggccttctccaatggggagtgaatggctaggtaatgcataacgagatcgacttcttgctctattgcctgcaccttgaagcgtgtgatactatcactgggatgttattttgcttcaataagttgaagagactttctattctcccactcatttctaagttccattcctatgtcctaacaca

SEQ ID NO: 6076 - DNA, 466 bp, Glycine max
  unsure at all n locations
agcttgtgtcacaattcattgtgacagtcaaagtgccattcacttagcaaatcaccaaatgtaccatgagaggacaaagcacatagatgtgaaactacacttcatcagagatgtgattgaatctgagaaggtgaaggtagagaaggtttcaacagaagaaaacccgactaatatgttcacaaagtccctctctagtgtcaagttcaagcactgcttggacttgataaattttgaagatgcctaaagcagattggtagaagtgcagccttgaatcacaaggtagacacttgctgatttagagtcaaggtggagatttgtggtgtgtgactcanaatcacaaatgacacaagtgagaagactttaaagtaatgatgtcataactgttttcagttattataactgaattggttttggcaccaaagcatagctagagtgtacatatatattctngatcatgtaatgcaat

SEQ ID NO: 6077 - DNA, 464 bp, Glycine max
  unsure at all n locations
ctgatggtgtcgagaagaaatcacatgtttgtcatcatcaaaaagggggagaatgttaatgtatgtatacatgattntgatgatgtcaaagaagaatctaacaaggctgcttcaaatgataagtatttgcttcaagaataattcaagattgcttcaacaaacaaagccttgtttcaagattcactaaagaccaagccttgccttaaaacaaagtgctttcaagacatgcaaggctctggtaatcgattaccaggaagtgtaatcgattaccagaagacagggttgagaaatagctgttgaaaaatgttttgaatttgaattttcaacatgtaatcgattaccatatgtctgtaatcgattaccagcaatggaactttggaaattcaaattcaaaagtcataacctttcanattataactgtgaaattgattacacaaacattgtaatcgattatcagtggaaag

SEQ ID NO: 6078 - DNA, 459 bp, Glycine max
tccttattcaattcaattatctatttctaattttatatactctataaaaaggggagtggtcatgtaaaaaaatgttctcaaaatttatgtaaaaacaaaatttgtaataatatattctaattaaataaaatgacaactctaaaacaagataataaatctaaattcaaagctaagacagaacgtgtgtaatcatttaaataaattcataaatatataatctcgaagtgttgtaataaaatactaaaattacagcaataatggcatttatgtagataatgaaatttagtaaatataaaataatttttgaataacttcaaatgtaaccataatcattaggtgtgttaaataaaaaaaaaacctaatttatgtaattactctaaagaacctaatttatcatggcagtataaacactatagaaacatccaacacgttccataatctatattatgataagtattt

SEQ ID NO: 6079 - DNA, 448 bp, Glycine max
  unsure at all n locations
agttattacaaaaagttttaacttctggtaatcgatatagcattntatcttagatataacactttatataagaagcatggtctattatctcgaacatctacaacactgttggatcaagtgacctcataataattaagaagagagggttgaattaattatgaacgggtcttgactaattaaaaaatttatccttcttaatgttgctagattcaatttggctttactactaagttatgagaaagtaaagaacagaaacaataacttagacaaaagtaaagcagaaataaaaagtacacaacggaaagataaaaagcgtaggaaagaagaagacaaacacaagatttatactggttcggcaacaacccgtgcctacatccagtccccaagcaaccaccggttcttgagatttccaataaccttgtaaaatcctttacaagcaaagatccac

SEQ ID NO: 6080 - DNA, 457 bp, Glycine max
  unsure at all n locations
gatgttctcaaatgtaatattggaacatttgcttggagcttagatatcgtgctaggtatagatactaatttcctctatcacaaattggctttagacccctcggtaaagccaatcatctagaaaaggagaaagttaagggaggaaaaaatgaaaacaaatgctgacaaaacaaaaaagttgatattacatttcagagaaattcagtatccgacctagctggcgaatgtggtgatggtgaagaaatcaagagggagtggagaatgtaggtcgacttaacaaatttaaacaaagcttgccctaaggatttgtatcccctaccaaacatcaattgtctagccaatagggcctcgggttaccaattacttaatttcatggatgcctacttggggtataatcgaatcaagatgcatcccatggatgaggacaaaacaactnttcatcgtggacaatccaatta

SEQ ID NO: 6081 - DNA, 477 bp, Glycine max
  unsure at all n locations
gcttatatagcatagganaaatgagtgttactttaaatttaattacaatgtattttataaagattgtacattaaaaaaaatcagttatgtatattgcagtttatataaagatagagtataaaaatgatgggaatatattagacactaacttaaaagcaactcataacattaagccattataaattcaacataccgtacattgataattcaacatagtagcctctcatattttatattatcttcataatgtgctcaacattttcaaatgccgtacaatgtataggagataaattgaataaaaatagaagaatcagataggttgcagtgaaaaggtcttttcttgaagttattgttggagtattatacctagcaaattgctatacgtacaatgaatcatgaagtcaaatgtgcaatagaggataaccaccatctgtatgtagaatcatgttaaatattatatatggatttctgagagat

SEQ ID NO: 6082 - DNA, 439 bp, Glycine max
  unsure at all n locations
agctngagtttatgaaaatggacacaaatagtgggatgttgagttagtttttgggggatttcaatttcaaatatgaaatgtgttcattttattttgtgaaggtttttggtccttctacacagcaaatggatctttatgaacaagttgttactccaatagttaatgaagttctagagggatttaattacactatattcgcgtatggtcaaactggtacgggaaaaatctacacaatggaagggaaatgtaaaaaggccaaggtatgctttagtgttttgatgttatccacacgcagattaatgagttaggttagtgacttcatttgagtattgtactacagagtggtcctaatggaaagttgcctctaggagctggagttattcctagggttgtcaagtagattcttgacacacttgagagccagaatgttgtgtacaat

SEQ ID NO: 6083 - DNA, 411 bp, Glycine max
  unsure at all n locations
agctngaaggtaaactagatgccttggttaacctggtaacccaactggccatgaatcaaaaatatgcacgtgtcgctagactctgtggtttaggctcctctgccgaccaccacacagacctttgcccttctgtgcaacaatctgaagcaattgaacagcctgaagcttatgttgcaaacatctacaacagacctcctcaacctcaacagcaaaatcagccacaacaaaataattatgacctctccagcaacaggtacaatcccggatggaggaatcatcccattcttagatggtcgaatccttcacaacaacaacaacaacaacaacagacttattttcaaaattctactggcccaagcagaccatacgttccttcaccaatccagcaacaacaacaatagcaacagcccc

SEQ ID NO: 6084 - DNA, 301 bp, Glycine max
ttcacccgacggagacactagcaaaaactgatcttctgcttcttggacaaacgcttgcaggctgggggcaactaaattctctctcccatcagaccttggatgcaactgcgatcgtatacccatatcagatcgatcttgacgggcattgaaaccatgcttcgtgttgccttgagatgctaaaaagcataccaatacagtgtcacaaacatttctctccacatgcatgacatcattacaatgtgtaacgtcaagatcacaccagtgctaacgatcaaagaaaatggacctcttcttccatatg

SEQ ID NO: 6085 - DNA, 392 bp, Glycine max
  unsure at all n locations
agcttaataaatctatatatggtttgaaacaagccttcagatagtggtaccctaagtttcatgggataatttcttcatttggttttgacgaaaaccccatggatcaatgcatataccacaaggtcaatgagaataaaatatgtttttttgttttatatgtagatgatattttacttgcagccaatgatcagggtttgctacatgaggtgaaacaacttatctctaagaattttgacatgaaggatatgggtgatccatcttatgtcatcggcattaagattcatagagatagagttcaaggtattntaggtctatcacagganacctatattaacaaaattttatagagatttcagataanagattngtcatcaagtgttgctcccattatg

SEQ ID NO: 6086 - DNA, 179 bp, Glycine max
agcttttaaggagacagtttcgaataatgctcttctttgtaatgacaattaataagtctcaagggcaatcactatccactgttggactttacttacataaaccattgtttagccatggccaattatatgttgcaatatccagagtcatattaaatattgatgtaaacgctaatatatga

SEQ ID NO: 6087 - DNA, 385 bp, Glycine max
tcttctttcttctgctctctggagaattttcttttattctcctcattcaacagcgccccagagtactggtaatcctctggcttcataaacggcaacccaccgggtgcttccttgggaacatcaaactgctgcccgcgaatctcctcaagaatttgataaagaggagtccccaaaggcgcatgagtggcaagaagcttcctcgctggagtcctaatgggcacatatgatgcggggggatccaaaaccttatacccctcttgaggaaacatagcatcaagctcctcatcagtcaaggggcgattcctctcttcaaatccctctcccacctcaacaaattgtattgttcccgagtaatggagccttgtaaagccccaagggttggagt

SEQ ID NO: 6088 - DNA, 485 bp, Glycine max
atgaagacaatcctatttagatgtggttcttaaacaccaagtacttcctgctggacaattggcagagaacctaagcattgctactgtggattggcgtgatgttaggtctatttgcctacaaatttgcgcagtataggagaaaagctgcatatgaggtgatgggccattgtgtatgcatggccaaaggtgctgcccaaacacttaaattaaaggtgactaaaaaggaacatatgtatctactttgttctaatgtttgttgagacttagtagctttcataggtcaataaggtaatgaaagttgaagtcgtaagaacataatgagagtattttttttcagtgtatagctgtggcagtaacaattgaagttggtatacatggcatctaccatcttgcttgtgactttcctcgccttcttgatgcaagtagtgaacaatacaagctcatggaaccttttttggagaacaaccctcatgttattggttttt

SEQ ID NO: 6089 - DNA, 534 bp, Glycine max
tcatgctgaagtatgtatggcaaaacttcattactgttgttgaacacatacaagtgagcttgtaaaaaatcttctacacttggagtgataacatgcagtcctcttgtacccttaccggctactctgtcgtcatggcgatactcaggaaggccaacaggtttagccttttcaatgtagtctgaacaaaattcaatggcttcttctacaatgtatctttcaacaatagatgcttccgggcgatgtagattcttcgtatacccttttaagatcttcatgtatcgctcaaccgagtacatccacctcaaataaacaggaccacaacatttgatttctctgactagatgaacaattaagtgaattatgatgtcaaagaaagtagggggaaaatacatctccaactggcacagtattattgcggcctcatttccaggtgatcaaacttgacaggatcaaggactttgctacatatgtcatggaagaaaatgcacaagcgagttatgggtaaccttactttgtaggcaaaatgtctcgtat

SEQ ID NO: 6090 - DNA, 511 bp, Glycine max
agcttatgctgcaaacatctacaacagacctcctcaacctcagcagcaaaaacaaccacaacagaacaattatgacctctccagcaacaggtacaatcccgggtggaggaatcatcccaaccttagatggtcgaatccttcacgacagtagcaacaacaaccttattttcaaaatgttgctggcccaagcagaccatacgtccctccaccaatccagctgcaacaacagcaacagccccagaaacagcaaacagttgaggcccctccgcaaccttcccttgaagaacttgtgaggcaaatgactatgcaaaacatgcagtttcaacaagagaccagagcctccattcagagcttaaccaatcagatgggacaattggctacacagttaaatcaacaacagtcctagaattctgacagattaccttctcaatctgtccagaatcccaaaaatgtgagtgtcattacattgaggtcgggaaagcagtgtcaaggacctcaaccagtagcacct

SEQ ID NO: 6091 - DNA, 592 bp, Glycine max
gcttgattgtgtaagagtaaaaagtgattcttaacaatacttgtaacttgtgtgaagttagtgaaatttgatgattttccaagaattggacgtactctcaatggtagagatgaaccagtataaaactttttgcatttgatctttcttgctttcctttaagttttatctaaccaaagggtgtgaatttgtttttagatttaaatagatatctcgtgttttctaaaaacatttttacatcatctaatagtttttttgaaaaatctataatatgctctttacaaagttttatcagatgaaaactttgttttaagtgaaaaaagattttaaaatgtataaaatcagaattcaatccccatttgtgatagttgcctttacattaaataaaaagtatgaaaattttagatagataataaaagctgtagtttaacattttgttttcaaaattcatttaccttttaatggttataaatatgaataatagtacaattaaccatggaaccgattggtgttttttttagtaagcgtttttccatttccaattaccctcttacctttgagaactttaacccttggagaaaaaaagcccaaactt

SEQ ID NO: 6092 - DNA, 475 bp, Glycine max
tcaagaattatggcctcatcaaactacttgtttcccgagggaaattctataaatagacctcccatctttaatggagtgggttaccactactggaaaacccgcatgcaaatctttatagaggcaatagatttaaatatttgggaagccatagaacaaggaccttatgttccctctataatagccggaagtgcaacaatagaaaaacctatagcagattggactgaggaagaaagaagattagtacaatataatttaaaggccaaaaatattattacatctgccttaggaatagatgaatactttagggtttcaaattgtaaaagtgctaaggatatgtgggatacactacaggtaacacatgaaggcacaacagatgttaaaagatctaggatacacactttaactcgtgaatatgaactttttaagatgaatgtaaatgaaggtataccatacatgcaaaagaggttcacacaca

SEQ ID NO: 6093 - DNA, 496 bp, Glycine max
agcttaagctccttcaactgcacaaggctcttaatatttgaagagtatccttgtggaaccttcacccgacgaagacactgacaaaaacttatcttctccttcttggacaaagtatggcaggctgggggcaagtaaattttcttcccatcagaccttggatgcaactgtgatcgtatacccatatcagctagatcttgacgggtattcaagccatccttcatcttgccttgaatgttaaggagcgtcccaatgacactatcacagacatttttctccacatgcataacatcaatacaatgtctaacgtcaagatcacaccagtacggaagatcaaagaaaatggacctcttcttccatatgcaactttgacttttatccttcttttgggtcttcccaaatacagtattcaggtgttcaacccgctgatatacctgctcaccagtcaacggtatcggcgcaatataatgctcttgacttccattaaaagcttttctca

SEQ ID NO: 6094 - DNA, 413 bp, Glycine max
  unsure at all n locations
agctngtagggttaaagtctcacgattgtcatgtgctcattcaacaattgttagccgtggctatacgagacatcttgccaaacaaagtctagttcaccataactcacctgtgctttttcttccatgctatatgtagcagagtgattgatccagtaattgttgatgagttggaaaatgaggcctgaattatactgtgccagttggagatgtattttccccctgctttctttgacatcatgattcacttgattgtgcatctggtcacacaaatcaaatgttgtggtcctgtttatctacggtggatgtacccgattgagcgatacatgaagatcttaaaagggtttactacaaatttatatcgtgcggaaacatctattgtgaagaggtacatttgcaaaagaaatcattgaatt

SEQ ID NO: 6095 - DNA, 434 bp, Glycine max
agcttgtggtgcaaaagattacatctatacaaatgtttttttgatggggcagcctccaagactccattaagattccttgggtgaggtgggacatagtctgcctacctaagagtaaaggtgggttagggatcaaagatttgattaaattcaacgaggctttgcttgctaaatgggggtgggagttggcaaataatcagaatcagttgtgggccacaattctattgtgtagatatggtggttggagggatttgatttctcataggaactgcagtttatactcttcttggtggaaagacctcaacgctattttcaagcagcaacatagcaaccacaatgtgtaaaaatagctttattttgcccataggtaaagacggtccatggaatacaaaccaagttcttattggcttgacaaccaaaaaaacactcattggaaa

SEQ ID NO: 6096 - DNA, 516 bp, Glycine max
tgtgcatccaataccttgctgaggatgtcccatatgttcttaaaactggactgattcatttgcttccaaagtttcatggccttgcaggtgaagacccgcacaaacatttgaaggaatttcatattgtctgctccaccatgaaacccccagatgtccaagaggatcacatatttctgaaggcttttcctcattcattagagggagtggcaaaggactggttgtattaccttgctccaaggtccatcacgagctgggatgaccttaagagagtattcttagaaaaaaatttccctgcttccaggaccacagccatcaggaaagatatctcaggtattagacaactcagtggagagagcctgtatgagtactgggagcgatttaagaaactatgtgccagttgccctcaccatcagatttcagaacagcttcttctccaatatttttatgaaggactcagtaatatggagagaagtatgatagatgctgccagtggtgggacccttggagacatgactc

SEQ ID NO: 6097 - DNA, 527 bp, Glycine max
agcttatgagaccaaaacatgacaaagaacgtttccaacaatctaattctcacactaatctaggatatcttgtcctattctttatatagctttatgattacccaattgattcaagaactaagggcaaccctgcatattcgcgtggtaccatggactattatataaaaatatttctgatcatcatcaataagaaaaatacagatattgttgataattaattgaacaatagtatattaaaatcaaataaatatcttgtgtcacaaatatactgaaagcgcactcaattcataataataaagcaatcaaacgtacaatttattggtacaagagataagagaaagacacacattataatcatagataaatttttacagcatgaaacaagggaatagaacacatcaatttcacaatttcacatcggaatatcaattggtctggcaaaaacagggctttccaaaattaaaagccagagaacataattgaattttataaaacatccaaaaataaatccaaattgatccctatag

SEQ ID NO: 6098 - DNA, 588 bp, Glycine max
agctttagatgaggatgaattgaaaaaatattgtatttatcttgaaaagtttttaaggtttaatgaatactctgatattgatggtcttgatttattttcagaattgaaagtactaagagaagtgttaagagaagaaattagcacaccaatagaagtattgagttatattaaaactttagattcttttccaaatgtttaaattgcatatagaattttattgacaatccctgtaacaggtgctattgctgaaagaagtttttcaaaattaaaattgcttaaatcatatctaaaatcaacaatgttacaagatagattgaatgagttagctattttatctattgaaagtgaagtggtagaattgcttgattataaaactctgataaatgattttgagcttaaaaaactaaatattaatataaaaattgatattttatattatatactaagtctcttttaaaatcttataagaaaaagacccctttaacatttcttcctaggccctaaaaatttggacatggcctgtgggttcgatcgacttgaaaaattttcaattttttttttaaagaattcggttttatttatttgggt

SEQ ID NO: 6099 - DNA, 403 bp, Glycine max
agcttgagcttagctacacatacctctctaatagctaagctcacctccttgagatgagaagctagagcttagctacacaccccctataatagctaagctcacccccatgacaaaaaacatgaaaatacaaaaaaagtccttactacaaagactactcaaaatgccccaaaatacaaggctaaaaccctatactactagaatggccaaaatacaaggcccagacgaaggaaatacctattctaatatttacaaagataagcgggctcatacttagcccatgggcttgaaatctaccctaaggctcatgagaaccctagggccttcccttggatcgctagccaatctacttggagtcttctacccaatgcccttgcggggtaggattgcatcatacaccttatgc

SEQ ID NO: 6100 - DNA, 203 bp, Glycine max
agcttgtgaaacatagttgacacagaattgatatcttctctagatagaagcataatatcatctgcaaaagccaaatgagatagctgaatacttgcacagttgggatgaaatttaaaattggcatcatccttgaggctgcttatatctctggaaaagtactccaaacagagcacaaacagataatgggagagaggatccccttg

SEQ ID NO: 6101 - DNA, 384 bp, Glycine max
cctctccagcaacagatacaaatcctggatggatgaatcaccctcacctcagatggtccatcccttatcaacaacaacagcagctgctccttcttcaaaatgctgctggccccaagctgaccatactttcctccaccaatccagcaacagcaacaacctcaaaaacagacaacagttgaggcccctccacaacctttcctcgaagaacttgtgaggcaaatgactatgcagaacatgcagttttagcatgagaccagaaccttcattcagagcttaaccaatcagatgggacaattggctacccaattgaatcatcaacagtcccaaaattctgacaagcttgccttttcaagctgtccaaaattccaaaaatgtcagtggcat

SEQ ID NO: 6102 - DNA, 392 bp, Glycine max
agcttgaatctaattcacgtaatgataatcttcatttctttatacatgtctcacaagcatcacatccccaagagtcataagggtaactactctgattcttgtggagtaaaattcttgtcaatacgcataacagaaatagaccttggtccgatgatttatacataaaggacatgaaaaatagacaataccatctttaacttatatattttgattgattaatatcttacatagggaatagaaagaaaaaatagacgactttttcctggaaatccgcataggaaaaatacacacttccctttttttctatcaaaacaatcacaattccttcccttcccacattccaacacattgaacatggatcccaattcattgcatttacacagtttttaatc

SEQ ID NO: 6103 - DNA, 466 bp, Glycine max
agcttcaacatcagaccacttccagggtgctggaactacttcacatggatttgatggggcctatgcaggttgaaagccttggaggaaagaggtatgcctatgttgttgtggatgatttctccagatttacctgggtcaactttatcaaagagaaatcagaaacctttgaagtattcaaagaattgagtctaagacttcaaagagaaaaggactgtgtcatcaagagaatcaggagtgaccatggcagagaatttgaaaacagcaggttcactgaattctgcacatctgaaggcatcactcatgagttctctgcagccattacaccacaacagaatggcatagttgaaaggaaaaacaggactttgcaagaggctgctaaggtcatgcttcatgccaaagaacttccctataatctctgggctgaagccatgaacacagcatgctacatccacaacagagtcacact

SEQ ID NO: 6104 - DNA, 374 bp, Glycine max
aacttggcataatacattcagataccacttttcttgacatcataataggaagtgacctttgcccatacaagatttgattgcgctactctcacagccaaccgagccattgctttggggtctaacaccgcctttgatgggttgctcaccaatggcacaagcacctcccgtcacatcaacaaaagtgtgagctgtaacagcaacatcagcaatgtgaatctgcaaaaggccaacaaatatgccgtcgtgccactataccactaacacacctatcaacttttgatgttaataaacgcttttaacaaacagacggataactcaataccctttttatggaatctatcacaaaaatcccaaggggcaatattaagtgggtc

SEQ ID NO: 6105 - DNA, 510 bp, Glycine max
agcttgtccaattgaaataagctgaaaagagcttattctaataagcttttccatcgagtttattgaaacaagttgttcaatagactgcaaaacctttttttttttgtctttattaggattgaataatgcaccaagtttattgttattgctgatgtgcatagatgttgacagggctgatatttggtcttttgggattacggcacttgagttggctcatggccatgcaccattttcaaaatatcctccaatgaaggtatttacatcccgtggttgttcagagacaatgtctagacacatgttaacattggaccgattgaagttcatgtgatataatttgtaataaaagaaaaagagagttcactttttatttcatgtataggttcttctaatgacaatgcagaatgcccctcctggacttgatgatcgagataaaaagttctctaaggtattgctgttctttctttatgcactgttacacaagagtcatcattatgatacttatagttttat

SEQ ID NO: 6106 - DNA, 411 bp, Glycine max
agctttccttcaccaggtcgtggcagtattcttccctcatagctgcatagaaccttcatcttcattggtgtgctttcagaaacactagaagaggcagtaccatgaagtactcgggaactgtcttgattagatgaagctctaggagtggatcgagctgaaccataattacttctgtcctggtgttgagaagagctccttgtgtcaaactcttttggacccttttcaacctttgtgagcacagaaatatctgatccactctcaaatcctggatggcccaaaatgcctttcaattccatatagcctgttgaataattgggatcacccacaacatttggaaaggcatgctttgctgagattcaccctatctctcattaactcatgagcgtattcctcaccactctgtgtggagta

SEQ ID NO: 6107 - DNA, 378 bp, Glycine max
agctttcagcagggaagctaagtgtgaattattctattctgcacaggattggagctgctaactgggttcccaccaatcatacttacaatgttgccacatgctcgggtgaactatataaagactaatggaccgctttcaaagattaagcggggagatcgccgtaaacaggctatagcgcaacttgcaaccttgtgtcggaggcctgaagctacacatcaacgtaccaaattacgaacgttagaacgagtcacgaccacaattaagactatggctcgaaacgaggagaggcggtggaacacaggtaaacattgcaccatggcaaaatcacaaggtatcttctatgtcctataaaaagccctactcacaagcccacgaccc

SEQ ID NO: 6108 - DNA, 538 bp, Glycine max
agcttcaacaatttcaagggagaaattcctaatgagctagcacatcttccagaccttcgctatctatatctccatgaaaaccgtttagctggaagaataccaccggaattgggcacactgcaaaatcttcggcacttgtaattaatcaaatcattttgttaatctcctattgcagagtacactatttatcttactcaattgttcctcattataattataatactgttatgcttatagggatgctggtaacaatcatttagtgggtaccataagggaactcattcgtattgaaggttgctttcctgcactacgcaatctgtaagttattgctggtgaattattttcctccatatagttcatttgatcttaaataaaatgcattggtctctaaatattaatgagttttgttctgtaaccaggtatctaaacaataattatttactggaggaatacctgcacaacttgctaaccaaccagtcttgagatcttgggagtgtttttttttttctttccttgggaccacttatcattctcctcc

SEQ ID NO: 6109 - DNA, 497 bp, Glycine max
tctcagcttgatgttagacctcgatcggtcatctttcctggccgacgccgactgtcatttttttcgatcaatatcggtgaataatatttttttgccgaggtgggctaatgttttcctggccgaataaatgggaacatgccagtttcggccgaaacgaaacatcggttgagctcgcacgaaaaaacctagccgacctacattgtaagttttttatgcaacaccgaaaaaaacaaaatttcccctgccgtaagaaaaaacattatcggccagcgagcgcgggacttgaaattcaagctccaaaaactaacccaaggcaacaagggggttgaggagtatttcaaggaaatggatgtgctcatgattcaagcaaatattgaagaagatgaggaggttactatggctcgatttcttaatgggttgactcatgatatccatgatattgttgagctgcaggaagttgttgaaaggatgaattgcttcacaaagcaatccaagtt

SEQ ID NO: 6110 - DNA, 444 bp, Glycine max
agcttcaacatcagaccacttccagggtgctggaactacttcacatggacttgatggggcctatgcaagttgaaagccttggaggaaagaggtatgcctatgttgttgtggatgatttctccagatttacctgggtcaactttatcagagagaaatcagacacctttgaagtattcaaagagttgagtctaagacttcaaagagaaaaagactgtgtcatcaagagaattaagagtgaccatggcagagagtttgaaaacagcaagtttactgaattctgcacatctgaaggcatcactcatgagttctctgcagccattacaccacaacaaaatggcatagttgaaaggaaaaacaggactttgcaagaagctgctatggtcatgcttcatgccaaagaacttccctataatctctggggttgagccatgaacacagcatgct

SEQ ID NO: 6111 - DNA, 448 bp, Glycine max
agcttgtagaacaccaaagatgtaagacaaaattttgaaagaagtgtaaattttgaaacaataagagctaatatacaatcagatacctgaaagtgataatttatgttgctatgatccctaacaatgtataattagtccctgttagattacatttatctttacatgatcttgtatatattattacacaaaaacttatgattctgattgatatgtaattacctaataatcagtaattgattgatatgtaatcaatattgattctgatttctccattataaataaagatgagatgtggtcatctaagacacaaaattacagtaaaactaaaacactgctatatggtatcaaagcttaggttattcttgacagaggaataacaaaattcgtcctccacaacctactgttccagatggacctctctgcttgtcatcctatccagcaacctatt

SEQ ID NO: 6112 - DNA, 449 bp, Glycine max
agcttccccaagatctttcatttcaaaatttttcgttagaaatctcttggtctcctgtaagaagcctatatctatgctaggaggcagtatatcatcgatatataataccaaaaatatgtatttactcatactgaacttatgatatacacaatcttcaactacatttgccttgaaaccatatgaggtaatgacttgatggaacttgtaataccattgacgggaagcctatttgagaccatagatgaatttcttcagtttgcataccatggactttgagtcacctaacacaaatttttttggttgcaccatataaatcgtttcttcaatgtcaccatttagaaacatagtcttgacatccatctgatgtagctctaagtcaaaatgagctaccagtgccattatatttctaaaagaattctttgaagatactggagaaaaaggttttttta

SEQ ID NO: 6113 - DNA, 454 bp, Glycine max
tgtttacttgaatctggaatcctgcagcatgctcaagagtcttacaagcaaaattcacttaaaatctcttcaaaaactcagtctgagagattgttcaagtcttgaggagttttctgtgacttctgagaacatgggatgcttgaatttgagagggacatcaataaaagaattgccaacatcactttggcgcaataacaagctttttactttggttcttcattcctgtaaaaaacttgtgaattttcctgacagaccaaaacttgaggatctgcctctcattttcaatggggtatcctcctctgaaagtccaaatacggatgaaccatggactttgtcatccttagcagatttatctctaaaaggaagcagtattgagaatttacctgtaagcatcaaagatcttcctagtcttaaaaagcttaccttgactgagtgcaagaaacttcggtcttta

SEQ ID NO: 6114 - DNA, 338 bp, Glycine max
tataatatatcgatacgctcgaaattaaacatcggaaactctcgggatattcaaatagtcataactattcacacggttgtccgattcgggcgcataatatgtcgagaggctcggaattgaacaacggaagctcttgagaaattcaattggtataacttttcactcggatgtccgattcaggcaaatcacatatcgagacgctcaaaattgaacaacggaagctcctgaaaaattcaaatggtcataacttttcacacggatgtccgattcaggcctataatatatcgatacgcttgaaattaaacatcggaaactctcgggaaatgcaaatagtcata

SEQ ID NO: 6115 - DNA, 367 bp, Glycine max
tgcaaaatggaagcaaatatatctctctatgggtggcataataaccctcattaattatgttttaacagccttacgcatttacttgctgtcttttttcagaatccttaaaaaagtggttcacaagatagtctccattcagagaaactttctttggggaggtggcaatgaggcaacaaagatcccttgggtcaagtgggatacagtctgtctatttatgaataaaggggggttaaggattaaagacttgaacaagtttaatgaagccttggttggcaaatggggctgggagttcgtgaataaccagaaccagctatgggctagaatcttgatgtctaactatggtggatggaatgctttattctatggc

SEQ ID NO: 6116 - DNA, 567 bp, Glycine max
agcttgaaggtaggagaagatgagtggagagagaattgggcacgaaatttatgcctcaaatgaggtctgaactgtgaagtgtaatttctcaaataatcaaagttaaaaacatacacacacaaggcctctatttatagcttaagagtcacacaaaattggaaggaaatttgaattacaatttaaatttcacttgaatttgaatttgtggagccaaatttggagccaaaatttcactaattatgattagtgaatttcagctatggttcagcccactaatccaagatcaagtccaagattcttcactaagtgtgcttagatgtcatgagatatgtaaagcatgaaggatatgcacaaagtgtgactatatgatgtgacaatagaatgtaacaagcaaatgctcacctcccccttaagatggtccataatttaattggattgagcttctcctaattcaattaaaattctctctcaacacacacattcaatagtgcacttaatgcatgtgaaattacaaaattactcctaataccaaaactaattttagtgccctaaatacaagggctgaaa

SEQ ID NO: 6117 - DNA, 445 bp, Glycine max
agcttgaatagcactatagatatccagggcctcattgccatcacgaatgctacggactccatatgcttgccctttcgcgacaacaccatcacctatacataaacaggtaacccagtacacaataagcctttagatattgcaagacaatggtaaagattttagactaaatggaagaaatggacaaaatgaaaggaaaattacttggaatctgatatgaaatgggtgtgctgatagctcatccattgtttcggcatataaaaataactggggcctccaaaactgttgcaaaatttaaggcagcatggaaatgtccctatcattacacaatgcattagaatataacaagcaaattttttttcttaagttatcaaagatctttgaaaatgattgctgatgaaaggaaaaaacattgtattgcatccatttaaaaggatgtggccactgg

SEQ ID NO: 6118 - DNA, 461 bp, Glycine max
tactcaagcttgaaggttggaaaagatgagtggagggagagggtgataatgttctctaaattttgggcctcccatgagagtctgaacttttaaagtggaattctcaaatgatcaaagttgaaaaaatgtacacacatgacctctatttataaaccaagtgtcacacaaaattggaggaaaatttgaatttctattcaaatttcacttgaatttgaaactgaaatttgtggagccaaataagattggcgtatttctccagagcaggttggtgtatttctctgcaaattcaattagcaataaattcaattagtgtgttggataaatgacaattgaaactccaaagcagttagtgtatttctctgcagatttgcttataagagtgatcatatgaactcttggaccgttacacaatcttctcaagtatggggagtaatttattttacatgtacagtttaaaaaaa

SEQ ID NO: 6119 - DNA, 453 bp, Glycine max
tcatgctgaagtatgtatggcaaaacttcattactgttgttgaacacatactagtgagcttgtaaaaaatcttctacacttggagtgataacatgcagtcctcttgtacccttaccgcctactctgtcgtcatggcgatactcaggaaggccaacaggtttagccttttcaatgtagtctgaacaaaattcaatggcttcttctacaatgtatctttcaacaatagatgcttccgggcgatgtagattcttcgtatacccttttaagatcttcatgtatcgctcaaccgagtacatccacctcaaataaacaggaccacaacatttgatttctctgactagatgaacaattaagtgaattatgatgtcaaagaaagtagggggaaaatacatctccaactggcacagtattattgcggcctcattttccaggtgatcaaacttgacaggatca

SEQ ID NO: 6120 - DNA, 371 bp, Glycine max
gcttatgctgcatacatctacaacagaccttctcattctcagcagcaaaaacaaccacaacagaacaattatgacctctccagcaacaggtacaatcccgggtggaggaatcatcccaaccttagatggtcgaatccttcacgacagtagcaacaacaaccttattttcaaaatgttgctggcccaagcagaccatacgtccctccaccaatccagctgcaacaacagcaacagccccagaaacagcaaacagttgaggcccctccgcaaccttcccttgaagaacttgtgaggcaaatgactatgcaaaacatgcagtttcaacaagagaccagagcctccattcagagcttaaccaatcagatgggaca

SEQ ID NO: 6121 - DNA, 445 bp, Glycine max
  unsure at all n locations
tgtcaaagaatccaacctctcatggtagaagcacacacatattatcacgatttcactatcttacggatcaagtgaacaaagagaaactgaaagtggagtactgctacacatttgatcaacttgctgatattttaaccaaacccctcaaaggggagaggtttaaaatgttaaggggcataattggcttgatgaacttaggagatcagaattaagggagggtgtgagagtttaattttgttttgtgtggggtagatttgtttgtgctctgaatataagagagagtaacagaattttaaaattctgttataagtactagcctaagtgtgaagggttattactctgtttttgcttgtataaaagggcatacatacatcttaataaagaggatttattcattctatcantttcagtctctagtgctattcctagtangtgtgcaattctg

SEQ ID NO: 6122 - DNA, 383 bp, Glycine max
cgagcgtctcaatatattatcggcctgaatcagacatccgaatcaaaagttgtggctggtcaaatatgccatgtgcttccatgttcaaggttgaacatctcgatatattatgcacctgaatcgggcatctgagtgaaaagttatgccatatgagttagccgagagcttcgttggtcgattgcgagcgtctcgacatattattggcctgaatcggacatccgagtcaaaagttatggcagcttaaactctccatgtgcttccatgtttaattttgagcatctcgatatattatgcacctgaataggacatgtgagagaaacgatatggcgtatgagagatctgagagccttcgttgcttattttcgagcgactccatatattat

SEQ ID NO: 6123 - DNA, 436 bp, Glycine max
  unsure at all n locations
tccattgttcaatttcgagcgtcacgatatattatgcccctgaatcggacctccgagtgaaaagttatgaccatttgaattgctcaagagcttccattgttcaatttcgagcgtctcgatatattatgcgccataatccgacctgcgagttagaatttatgaccatttgaatttctcgagagcttccgttgttcaatttcgagcgtctcgatatattatgtgcctgaatcggacctccgagttggaaggtatgaccatttgaatttctcgagagcttccattactcaatttcgagcatctcgatatattatgtgctctaatcggacatccgagtgaaacgttttgaccatttgaatgtctcgggagcttccattngtcaatttcgagcgtctcgatatattatgcgcctgattcggacatccgagtgaaaagttat

SEQ ID NO: 6124 - DNA, 297 bp, Glycine max
agcttgtacacctctgtttctctacctttcatcacaaaccctggtggttgagtgacaaaaacttcttcttctagtgagccattaagaaatgcagattttacatccatttggtgtatttcccagcaatcgtagctagccattgctattacaagtctcactgtttccaacctagcaacaggggcaaatagttcatcataatccagaccttgcttctgcagaaatccctttgcaaccagtctggctttgaactttgttacttctcctctagaattcaacttagttttgtagacccattta

SEQ ID NO: 6125 - DNA, 331 bp, Glycine max
agcttgtgccttttcacgtctggaatgtgaatgttgcctatacatccaaagacccttaggtgctttgttgatggcttcttaccgttccaagcatcaattggagtcttgtcttttacagacttatttagacatctgttgagtatgtaaacagcactgtagactgcttcagcccaaaatgcgttaggtagtcccttatgcttgagcatcgatctagccatttctataactgggcgattctttctcttggacactccattttcgtgaggagaatacgcgactgtaagttgtcgctcaataccatcatcctcacaaaatctttcaaactagcgag

SEQ ID NO: 6126 - DNA, 401 bp, Glycine max
acaatggcagtgcaatcttactaatatcctgtatgaatctcctataaaaacctacatgtccaagaaaagaacgcatttcctgcataaaagcgaggtaaggtagagaagtaataacatcaatcttggccttatcgacctcaatacctctaatagataccaaatgccctaagattatatgtaaccacatggtacaaaaactattgttaagagtaaagacccttcccgtggcctttggacgtctagtttggtcattcagacccccaccattctgcttcttcttgggatataggcaatctctttgaatatgccttttctgtctgcaattgaaataggtcatgtcttcatcgacataatttgaggagatgtgccttggcttaccacacttgtaacaagtgatctga

SEQ ID NO: 6127 - DNA, 406 bp, Glycine max
gcagcttaacattaatttcagcgtctcgttaaatactggactcaatcagacatcggagtaaaaagttattgtcgtttgaattgcctcagaggttcaacattcaatttcgagcgtctcgatatatttcgggactcaatcagacatccgagtaaaaagttattgtcgtttcaattggctcagaggttcaacattcaattttgaccgtcccgatatattacgtcactgaatcggacatccaagtaaaaagttattgtcgtttgaatttgctcaaagcttaaacattcaatttcgagcgtctggatatattacgggactcaatcaaacatacgagaaaaatgttattgtcgtttgaatttgctctcagcttcaacattcaatttcgagcgtcccgattattacgagagtc

SEQ ID NO: 6128 - DNA, 457 bp, Glycine max
  unsure at all n locations
ttgccggcgctccataaacgttattgcttacgcctgttcgtgggtcctccactttcgagtttggagctgtgatccatgattgcctaagagaagaccctcaagcaaatcctccattcttaccctttttcggagccccatgaatgaattgcgttgtcattcatgtgtcttccatttttgagtttggagctgtgttccatgattgcctaagagaggaccctcaaggcaatcctccattctcatccttttccggagccacatgaatgaattgcattgtcattcatgtgtcctccactttngagtttggagttgtgttccctganttcctaagagaggaccctcaaggcaatcctccattctcatccttttccggagccacatgaatgaattgcgttgtcattcatgtgtcctccactnttgagtttggaagtgtgttccatgatttcctaagagaggaccc

SEQ ID NO: 6129 - DNA, 444 bp, Glycine max
cgtgaacttgccaaatctcctttctttatactaactctcttggtttcatccaaaggcaggtccaaccaatacgtaacatcatcatcatcattggaaccaccttgtggaaggttagagccatttggttctattgaactctcccttatgacaccctttcttttctcaattagtactgctccattagtgaaaaaccaatccacagaggaagggaggtactcctccataggatgcaagtacatatatggggaatatgccttgatcattgccttaatttgggataaattgggcatgtaagaaaagctacccttggtatttttcaaacaagaaataggtaaagctttggaattagtccctcctccactctgagctacgaaagttcctacactaaccccttgagcttcaatgcctctcttgattggcctaacatcatacacattgaacctc

SEQ ID NO: 6130 - DNA, 445 bp, Glycine max
  unsure at all n locations
tctggtgggacatcttgacttgctttccaatctgacattctccacagattctgccttcttctattttcagattggggatgcctctaacagcacctttgtcaatgattttcttcatgcctcttaagtgcagatgtccaaatctttgatgccatattctgacttcatcttctttggaggatagacatgtggaggagtagctggtttcttgaggtgtccataggtagcagttgtcctttgatctgctgcccttcattagaacttcactcttctcatttgtcaccaagcattatgactntgtgaagtttacattgaatccttcatcacacagctgactgatgctgatcaagtttgcagtcagtcccttcaccagcagtactttgttcagactangaagtccatcatgaactagctttcccattccaatgatctttcctttagagccatc

SEQ ID NO: 6131 - DNA, 323 bp, Glycine max
  unsure at all n locations
agccgtggctatacgagacatcttgccaaacaaagtcaggttagcgataactcacctgtgctttttcttccatgctatatgtagcaaagtcattgatctagtcaagtttgatgaagtggaaaatgaggccgcaattatactatgccagttggagatgcattttccccctgctttctttgacatcatgattcacttgatggtgcatcttgtcagagaaatcaaatgttgtggtcctgtntatctacgatggatgtacccggttgagcgatacatgaagatcttaaagggttacaaagaatctatgtcgttcagaacatctatta

SEQ ID NO: 6132 - DNA, 436 bp, Glycine max
  unsure at all n locations
tgtaagtctgattgctggaatcttgctatgaaatctgagttagatgctcttgcatcctcaaacacttggtctattgttgatctgcctgaaggtaagcaaccaattggttgcaaatgggtttacaagatcaagcatcatgctgatggatccattgaacgatacaaggcccgtttggtggcaaagggatacactcaactagagggtgtggattattttgacactttntcaccagttgctaagcttaccacaattcgcacccttctatctgtggctgctattaaggactggcacttagaacaacttgacgtcaacaatgctttccttcatggtgatctgcatgaggaagtatatatggatctgcctcctgngttcttactgcctggttcttcttctaataaagtctgcanattacataagtccttatatggactgaaac

SEQ ID NO: 6133 - DNA, 374 bp, Glycine max
ttgaatgcactattcaatggagttgacaagaacatcttcagactgatcaacacttgcacagtggccaaagatgcatgggagatcctgaaaatcactcatgaaggaacctccaaagtgaagatttccagattgcaactcttggctacaaaattcgaaaatctgaagatgaaggaggaagagtgtattcatgacttccacatgaacattcttgaaattgccaatgcctgcactgccttgggagagaggataacagatgataagctggtgagaaagatcctcagatccttgcctaagagatttgacatgaaagtcactgcaatagaggaggcccaagacatttgcaacatgagagtagatgaactcattggttctct

SEQ ID NO: 6134 - DNA, 341 bp, Glycine max
agcttcaacattcaatttgagcgtctcgattatgacgagactcaatcagacatccgagtaaaaagttattttcgttttaattggctcagaggttcaacattcaatttcgagcgtctcgctatattacgggactcaatctaacatccgagtaaaaagttattgtcgtttgaattggctcagagcttcaacattcaattttgagcgtctcgatatatgacgagactcaatcagacatccgagtaaaaagttattgtcgtttgaattgtctcagaggttaaacattcaatttcgagcgtctcgatatgttacgggactcaatcagacatccgaagaaaaagcta

SEQ ID NO: 6135 - DNA, 455 bp, Glycine max
  unsure at all n locations
ctaagcttgaatccctccatgtttcacaaagcagttcatcagacccttgtgaaaaagtagcaatggaagagtttacactgatgaatctagatgggggaaagaaccttgcaatgaatttttcctccacctcttcccaagtgttgaggcttttgtttggatgtgattaaagccatgtttttaccttacctgccaaggagaatgggaaatctctaaggtagacaactttagcatcttcgttagaagctcccatggtactgcaaaattccatgaaggtagacagaggtgtgtatggatcttcatgatccattttagcaaaacggtgtgagccaatcagactgagaagtgttggcttcaattccacaaccttgttgctgaaaggaggaatgactctggtgttgtaatgctttggtccttgttgataagcatagtcaccaagagtcctncatggtgatcta

SEQ ID NO: 6136 - DNA, 329 bp, Glycine max
  unsure at all n locations
tgagctcggcttgagttgaatacgtaaagcttgagttgacatatgctttgtttaaggctctgctcgacttacataaaagtctgacttacgagcctatttaaaagcttgcttaaagacgtcttttattaattaattattttaaaacctagtgaaatactaactaaaaaaagaaacttataaaatttcgtataaataatgtacaaatctaaaaataattgataaacaaaattatattgaattcaagtcgttaaagcacaaagtatataaaaaaaataaaaatagcataatattaaaaaatgtatggattagagatgatntacactaatata

SEQ ID NO: 6137 - DNA, 408 bp, Glycine max
tatgctgcatacatttatcatagacctcctcagcagcaaaaccaacaatagcagaataattatgacctttcaagcaacagatacaatccaggttggaggaatcatccaaatctaagatggacaagtcctccacaacaacaacagcctgtccctccttaccagaatgttgctggtccaagcaagccacatgttcctcctccaatacagcaacagcagcaacaatcacaacaaagacaaccaacaattgaggctcctcctcaaccttccttagaagagttagtgagggaaatgaccatccagaatatgcaatttcagaaagagacaagagcctctattcagaagttgacaaatcagatggagcagatggctactcagttgaaccaagctcagtcccaaaattctgacaaa

SEQ ID NO: 6138 - DNA, 391 bp, Glycine max
agcttaaatatgagcagatgttatcagaccttacaaagaatcacctgctaagaaaagttgtcgcatgtaagttgatgctaattcctttttctgctactaacagataagttacttattggaaattatgttttctttaatacctttctattaatgatatttggttacaactacagacatgtacacagtggaattccaaaaacgaggacttcctcatgtccatttatttttatttttacatgccaacaacaaatatccatctccaaacgatattgatcatattatatcagcagaaataccttcacagaaagatgatccagaactctataaattagtgcaaaatcacatggttcatggtccatgtggaaatttgaggcccgcatctctatgcatg

SEQ ID NO: 6139 - DNA, 448 bp, Glycine max
  unsure at all n locations
ntgaatgctctattcaatggagttgacaagaatatcttcaaactaatcaacacatgcacagtggccaaagatgcatgggagatcctgaaaaccactcatgaaggaacctccaaagtgaagatgtccaggttgcaactattggctacaaaattcgaaaatctgaagatgaaggaggaagagtgtattcatgacttccacatgaacattcttgaaattgccaatgcttgcactgccttgggagagaggataacagatgaaaagctggtgagaaagatcctcagatccttgcctaagagatttgacatgaaagtcactgcaatagaggaggcccaagacatttgcaacatgagagtggatgaactcattggttcccttcaaacctttgagctatgactctcggatggagctgannagaagagcaagaacgtggcgttcgtgtccaatgatg

SEQ ID NO: 6140 - DNA, 352 bp, Glycine max
  unsure at all n locations
ntgagcaaattcaaacaacaataactntntactcggatgtctgattgagtcccgtaatatgtcgagacgctagaaattgaataccgaagctctgaacaaattcaaacgacaataactttttactcggatgtgtgactgagtcgcgtaatatattgagacactcgaaattgattatcgaagctctgagcaaattcaaacgacagtaactttttactcggatgtctgattgactcccgtaatatatcgagaccctcgaaatggaataccgaagctctgagataattcaaacgacattaactttttactctgatgtctgattcagtcccgtaatatatcgaaacgctcgatattg

SEQ ID NO: 6141 - DNA, 303 bp, Glycine max
ttcttacccatggaaactcctaatatctcccacactctttgtggtgggccattcttggatggccttgattttctcagggtccacttggaccccatttctaccaactacaatacctaagaaaactatattatctacacaaaaggtacacttctctatatttgcatagagggtgtttttcctaaagactgaaagaacttgcctgagatgtcctaagtgatcatctaggctcctactgtacactaaaatatcatcataataaacaactacaaatctacctatgagatcccttaagacatgatgcat

SEQ ID NO: 6142 - DNA, 444 bp, Glycine max
  unsure at all n locations
tgtgcatccaataccctgatgaggatgtcccatatgttctttcttgtgaagacccacacaaacatctgaaagaattctcatattgtctgctccaccatgaaacccccagatgtccaggaggatcacatatttatgaaggcctttcctcatcttttatagggagtggcaaaggactggctttattaccttgctccacggtccatcacgagctaagatgacctcaagagagtattcttagaaaaaatattccctgctttcaggaccacgaccatcaaaaaagatatttcatgcattagacaactcagtggagagagcttatatgaatactgggagagatttaagaaactatgtgctagttgccatcaccaccagatttatgagcagcttttcctccaatatntttatgatggacttagcaacatggagagaagtatgatagatgct

SEQ ID NO: 6143 - DNA, 454 bp, Glycine max
  unsure at all n locations
ctccttcaactgcacaaggctcttaatatttgaagagtatccttgtggaaccttcacccgacgaagacactgacaaaaacttatcttctcctttttggacaaagtatggcaggctggtggcaagtaaattttcatcccatcagaccttggatgcaactgtgatcgtatgcccatatcagctagatcttaacgggtattcaagccatccttcgtcttgccttgaatgttaaggagcgtcccaatcacactgtcacaaacatttttctccacatgcataacatcaatacaatgtctaacgtcaagatcagaccagtacggaagatcaaagaatatggacctcttcttccatatgcaactcttacttttatccttcttttgggtctttccaaatatagtatttaagtgtngaacctgctgatataccagctcaccaatcaacggtatcggtgcaata

SEQ ID NO: 6144 - DNA, 396 bp, Glycine max
agcttcaagaaaaagatggcctcagcaaactccttatttccagaagggaattctatcaatagacctccaatctttaatggagagggttaccattactggaaaacccgaatgcaaatttttattgaggcaatagatctaaatatttgggaagccataaaaatagggccttatatacccaccacagtggaaagagtttcaatagatggtagttcatcaagtgaaagaataactatagaaaaacctagagatagatggtctgaagaggatagaaaacgagtactatacaacttagaagccaaaaatataataacatctgccctgagaatggatgaatatttcacggtttcaaattgtaagagtgctaaagaaatgtggaacactcttcgataacacatg

SEQ ID NO: 6145 - DNA, 308 bp, Glycine max
agcttgacttggatatacaagcgtctagtcgcaaatgctgcagccattgctggtacaccacgctcaagagcaaactgaatctgattttcatgaacatccttgggagcaacagacatggtgacgacattccgtgacagtaagtacgcaccaaaactagcaacaccacagccaacatcaagaaccacccttatatgcttaccaaaagtaatatcaggaatcatctacaatcacaaatgtccaacatcagattcctataagatgcacctacattctcctaacaaaaaggtgaaaccaaaaccaaagcatac

SEQ ID NO: 6146 - DNA, 402 bp, Glycine max
ctcgacccgggatccttaagtcacctgcagctgcagcttgtacaagcccaaagttgctcacgatcatagcctccaggtcttttgtttcttcgatgatggtgacaatatattcacaatttagatctaacgatctaagaattttctccataatgtttacatcatcaagcttttcaccacttctcttaagatgattggtgattgctaagactctagagaaatagtcggagatgacttcaccttctctcatatgcaaggtttgaaacttaactcttacactatgaagacgtaccttcttgatcggatctgctcccttatacgagggttgaagcttctcccaggcttctttcaccgactttgcttctgaaaccttcttgaaagcatcatcatctaatccttgataga

SEQ ID NO: 6147 - DNA, 374 bp, Glycine max
  unsure at all n locations
tctagaggttgtgcttatctaccccatctctgacagtgcgtgggtaagcccagtacaggtagttccaaagaaaagaggaatgacagttgtccaaaacaagaagaatgacttgatacccactcggactgtcactggctggtgaatatgcatcaactaccgcaagctgaatgaagccacaaggaaagaccactttcctctgcccttcatggatcagatgctggaaaggcttgtgggacaggcatactattgtttcttggatggatactcatgttaactaaattgtggtggaccccagggatcaagagaagatgacctctacatgcccttttggtgtctntgcctacagaaagatgccatttgngttatgtaatgca

SEQ ID NO: 6148 - DNA, 422 bp, Glycine max
agcttgtcaagcagtgtggcttgattcttttttacaggaactgaagatcaaagaagaaggtccagttgagctatatgtagataacaaatatgcaatcaagttagccaaacattcaattgcacatggaagatcaaagcacattgaaaccaaatttcatttcataagagaccaagttgcgaaggggaaattcaagttgaagttctgcagatcaaaagatcagcttgccgatatatttaccaagtccttgaaatctgaaaccttcaaaaacagagaagcatgctgaatattggtgatagcacgacactagcttaagggggtgtgttaaacattaagaataaataagctaggtattgaatgatatagatattgccacgtgtaataagtactctcctatatgctgaaccatattgagtattaactat

SEQ ID NO: 6149 - DNA, 300 bp, Glycine max
  unsure at all n locations
ttcagcanattcaaacgacaataactgtgtactcggatgtctgattaagtcccgtaatacatcgagacgctcgaaattgaatgttgaagctctcagcagattcaaacgacaataactttttactcggatgtctgattgagtcccgtaatatatcgagacgctcgaaattgaatgccgaagctctgaggattttcaaacgacgataactttttactcggatgtctgattgagtcccgtaatatatcgagaagctcaaaattgaatgacgaagctctgaggatattcaaacgacaataactt

SEQ ID NO: 6150 - DNA, 400 bp, Glycine max
taagcctatagatgaagacaatcctattattaggtggtacataaacaccaagtacttcctgcaggacaattggcagagaacctaggtattgctactgtggattggcgtgatgttaggtctatttgcctacaaatttgtgcagtataggagaaaagctgcatatgaagtgatgggccattgtgtatgcatggccaaaggtgcagccaaaacacttatattaaaggtgactaaaaaggaacatatgtatctactttgttctaatgattgttgagacttagtagctttcataagtcaataaggtaatgaaagttgaagtagtaagaacataatgagaagtatttttttacagtgtataactgtggcagtaacaattgaagttggtatacatggcatctaccat

SEQ ID NO: 6151 - DNA, 299 bp, Glycine max
  unsure at all n locations
tttatccatgtcttcctatggtggcgagcttcttcgttactcatcttctccttgaagtggcatctctaatcatatttcttccttctccattctacttccattcatcttcaggaagccaaggattcctttgatgaaccaaaggactccagtggagctccatcacctgtgaaacatataggaaaggatgttgagtcctaagacaacataaagcanaagacgttgagtcctatgaaacaaataggcgaggacgttgagccctatgaaaacataaagcaaatgacgttgagtcctatgaaaca

SEQ ID NO: 6152 - DNA, 467 bp, Glycine max
acactataaatctaagcttgtatctccttacagatggcgcatgcatgatgacccctgtcactgtaaccgtttagatttccatacgctagaaagtcattagtggtacagaaaagcattgcacgcatttcaaaagtctccttgcaaaatccatcaaacactaaaaccccctcgtcccacaactttctcaggtcttcaatcaacggacttagataaacatcaatgtcatttgctggctgtcttgggcccaatatcatcatagaaaacatcatgtatttttgtttcatgcacaaccaaggaggcaaattgtaaattactagtagaattggccatgaactatgttgagtgcttaaatttccatatgggttcattccaccactaggtagtccaagcctaagattacttgcctctgtgccaaaatctagatacaaaccatcaatcttctatcagtgggagcaatcagccggatg

SEQ ID NO: 6153 - DNA, 439 bp, Glycine max
  unsure at all n locations
ngctaacccatggaaactcctaatatctcccacactntntgttgtgggccattcttggatggccttgattttctcagggtccacttggaccccatttctaccaactacaatacctaagaaaactatattatctacacaaaaggtacacttctctatatttgcatagagggtgtttttcctaaggactgaaagaacttgcctgagatgtcctaagtgatcatctaggctcctactgtacactaaaatatcatcaaaataaacaactacaaatctacctatgaaatcccttaagacatgatgcataagcctcataaaggtgctnggtgcattagtgagcccaaaaggcatcactagccattcatacaaaccaaacttggtcttgaaagcgattntccactcatcancccttttagtcctgaattggtgataaccactttta

SEQ ID NO: 6154 - DNA, 421 bp, Glycine max
ctgggttcgatggccccaatgacatctattccccacatggtataaggccaaggggcggacataacattcataggatgtggtggaacattgacattgtccgcgtatgcctgacatttatgacatttccttacatgggcacaactatcgctttccatagtaagccagtaataaccgactctaaggatcttcctggccatagcatgcccattggcatgtgtcccatatgaacccacgtggatttcctcaatcatgaagttcgcctctttggcatctacgcatcgtaggagggtcatgtcgtggtttcgtttgtacaggatggtaccactcacaaagaaaccagtagccaatctccttaacgttcttttgtcattgtcagaaatccccggtggatattcttttgtctcaacatattgcttgatgt

SEQ ID NO: 6155 - DNA, 142 bp, Glycine max
aagctctcgacatattcatatggccggagctttccacacggatgtccgagtctggcgcattatatgtcgcgaggctcggacttgaacagcagaagctcttgccatattcaattggtcatgactctccacactgatgtccgat

SEQ ID NO: 6156 - DNA, 383 bp, Glycine max
agcttcagtgtgtccaagaaaatgtacaatgcacatatatccaggacaaaagaggaatactacctctgttcgtccaggcattataggcttcccaacaaacaactctgccagaatacatccagcactccacaaatccacagtaactccataatctgtagctccaagcaaaagttcaggtggtcggtaccacaaggttacgacacgactagttaaaggctgcccatgagatggctgaaacaaagctgcaagcccaaaatcaccaatcttcagattgccattactgtcaagcagaagaattgagcccttgatgtcacggtgcataacaccacgactgtgacaatgctcaagaccacgaagaaagctgtgcatgtaacacttgatct

SEQ ID NO: 6157 - DNA, 299 bp, Glycine max
agcttgaccaagaaattactcacagtccatcatcgcatgaaggagactatggataagcagaggagggaagtgcagttcactcaaggacactgggtcctcattaaacttcgttcatgtcgccagtcaacagcttcaggtggtcaatactccaagttatcaaaaaggttctacgacccatttcaaattgttcaaaggatcggacctgtagcatataaacttgacttaccttcaacctcaagaatccaccctgtcttccattggttcttactcaagccttatcactcttcactgaccacaac

SEQ ID NO: 6158 - DNA, 407 bp, Glycine max
  unsure at all n locations
agcttctaagcaccctctcagaaatgcttatattctntaaccactttagtttcccacacaagggatgtctgacaaggtcaatgcaccccccatggacatacacaacatacaatgtatgaacgtgggcaccatcaagtacaatgaccatggatgaattaaggctcctaagcatcccctcggaaatgcttagattctttaaccactctattttcccacaaaagggacatccgacaaggccaatgcaccccccccccccccacgaacatacacaacatgcacttgtcaatgcattttcaacatcatcaacattccattttaatggcatcaccaataaccacaacaacctcattccatattgacataaccatcaataataacatcgattcatgttgacatgatcaccatta

SEQ ID NO: 6159 - DNA, 295 bp, Glycine max
  unsure at all n locations
acccattgaagctactaatatcttccacactttttggggtggggcattcttggatggacttgattatctcacggtccacttgggccccatttctgccaactacaaaccctcagaaaactgtattgtctacacaaaaagtacacttctctatattngcatagaaggcgtttttcctaaggactgaaagaacttgcctgagatgtcctcagtgatcatctaggctcctactgtacactaaaatatcatcaaaatagacaactaccaatctatctatgaaatcccttaagacatgatg

SEQ ID NO: 6160 - DNA, 279 bp, Glycine max
  unsure at all n locations
ctggaactacttcacatggatttgatggggcctatgcangttgaaagccttggaggaaagaggtatgcctatgttgttgtggatgatatctccagatttacctgggtcaactttatcagagagaaatcagagacctttgaagtattcgaggagttgagtctaagacttcaaagagaaaaggactgtgtcatcaagagaatcaggagtgaccatggcagagagtttgaaaatagcaggttcactgaattctgcacatctgaaggcatcactcatgagttc

SEQ ID NO: 6161 - DNA, 420 bp, Glycine max
agcttctatagaaggttcattcctaatttctctacaattgcatcacttctcaatgagctggtgaagaataatgtggcatttacctagggtgaaaaacaagagcaagcctttgctttgctcaaagaaaagcttactaaggcacctgttctagctcttcctgacttttctaaaacttttgagctagaatgtgatgcctctagagtgggagttggagctgtattgttacaaggttggcaccctattgcttattttagtgaaaaacttcattgtgcgaccctcaactaccctacctatgataaagagctttatgccttaataagagccctccaaacttgggaacattaccttgtttctaaagaatgtgtcattcatagtgatcatcaatcacttaagtacattagagggaaaatcaagttaaac

SEQ ID NO: 6162 - DNA, 390 bp, Glycine max
  unsure at all n locations
gcttcacaaagagaatcatctcgatatgatagctttggaagtcctcttacatggctctgattntgaaactttaagattaacctcaagttagcatgaccaatcttcttatgccatatctagtgatgctctttaactgaaagtgagcatgacatgttttgactggacagatcaccaagtttaatcttataaagatttccttgtctcttagcagagaagaataaagaggttttcttgttctggatgatacacatatccttgttaaaggtgacattatatccactgtcacataattgatttatgcttagcaaattatgcttcaaccttttaacaagtaaaacattatctatagaaggatagggaggaatgcanactttacctacaccagttatc

SEQ ID NO: 6163 - DNA, 433 bp, Glycine max
  unsure at all n locations
agctnggtaccactgagttcaaatagctccctccagaacttactcacgaacaatgggtctctatctgatatgatgctacggggcaaaccgtgaagacaagtcaccatagctgtgaacagctccgccaccttccttgtagagtgcttagtgggtaacatcccagatgaagccccttcggagagcaatccactactacgaaaattcatgtatagcctttatacgaaggtaagcccataatgaagtccatgcttaaatcttcccacggccgatatggtaccggaagagggcacaatagccctgctggtttgcggttgtcgtacttagtaagttgacacgtgacgcaggctgcgacgaaagtgcgtacatcactccgcatggaggccacgtgaagttctcctgcaacctctgaaacgtcttctgagtcccatagtga

SEQ ID NO: 6164 - DNA, 421 bp, Glycine max
gtaattgtgaaatgtaggcttgcaacacatcattgatcttatcactaggctcttccagactttccttgatggggatgggaacacgatccagaagctttgctagctccatcttctcatcttgccttactgttacatacttgaattcttcactcaaagagaacaatcgacaaagctctatgtcccccattgtaggcttcaaatgctcgttatatgtggatatggatccgtgtgttatgtagtagtagctggcaatacgacccaagtcagtgacctgaaaatatccactcttcctatcatacttcaccaaattatttctatccaagatggttgcagccgtatgaatctgcaaaatttcagcaagatataaagatcaaaatcagcctatacataaaaaaagacaggatgaaccggctagaaaaaa

SEQ ID NO: 6165 - DNA, 429 bp, Glycine max
  unsure at all n locations
gtgaccaaattcaaacgatgataactntntactcggatgtctgattgagtcccgtaatatatcgagacgctcgaaattgaatgttgaagctctgaccaaattcaaacgatgataactttttactcggatgtctgattgagtcccgtaatatatcgagacgctcgaaattgaatgttgaagctctcagcaaattcaaacgataataaatttttactcggatgtctgattaagtcccgtaatacatcgagacgctcgaaattgaatgttgaagctctcagcaaattcaaacgacaataatttttttagtcagatgtctgattgagacccgtaatatatcgagacgatcgaaattgaattctgaagctctgagctaattcaaacgacaataacgttttgctcggatgtctgattgagtcctgtaatctattg

SEQ ID NO: 6166 - DNA, 448 bp, Glycine max
agcttgccttgccccttgatatatttgagggactcatggtcactatgaatgacaaattccttgggataaaggtagtgttgccatgttttcaaagcccgtactaaggcatacaactccttatcataagttgaatagttaagggtaggaccacttaacttttcactaaaataagcaattggatggccttcttgcatcaacacagccccaatcccaacatttgaagcatcacactgaatttcaaaatatttttgaaagtttggcaacgcaagtatggggcattagttagcttttgcttaagaacattgaaagcttcttcttgtttctctccccatttgaaaccagcatttttcttgagcacttcattgagaggtgctgccaatgtgctaaaatccttcacaaatcgtctataaaaacttgctaagccatgaaaactcctcacctcggtcac

SEQ ID NO: 6167 - DNA, 416 bp, Glycine max
agcttcttgtattatgcactccctggctatctcttcatggtcttaacattcttctcatggatatgttgggcatggccacatagcatcactgcacagcaaattggctcaggttatcacggacttgggattggtgccttcacacttgattgggcaaggatttcagcttatcatggcagtccccttgtttcaccatggtcttccattgttaatgtgggaattggatttatcatgttcatctacatcattctacctctctgttactggaagttcaacacttttgatgcacacaagtttcctatattttctaaccagttgttcacggccagtggacataaatatgacaccaccaagatcttaacccctgagtatgtccttaatgttgatgcatacaacaagtacagcaagttataccttac

SEQ ID NO: 6168 - DNA, 374 bp, Glycine max
  unsure at all n locations
tatcccatgcctccttagcttgaaagatgaggaaganagctttcttgtttctctttcttgaatcctttaaagtcttcttttgtgcttaggaaagtgaagtctcatcttgtcactccgtatagcctttttcaaccatttcctaaacatcatgtgtgatgcaatccgaccccccaagggcattggatagaagactccaagaagattaggctagagatgtaagagaaggtcctagggttctcatgagccttagggtagatttcaggcccacgggttaagtatgagtccacttatctttgtacatattagattaaggtttcattatttttgggccttgtatttagggctccataatgtaggtagggtaccctagaaat

SEQ ID NO: 6169 - DNA, 391 bp, Glycine max
  unsure at all n locations
agcttgtcagcattggatttgggtttaattttttcggtgggagtcttccctcgtctcttcttaaactcccatatctgcgagaaattaagctaccttttaatcaattcaatggttccttggatgagtttgtgattgcctcccctgtactggagatgcttgatttaggtagcaataatttgcatgggcctattcctntgtccatttttaatctcagaacccttggtgtcattcaacttaagtcaaacaaatttaatggcacaatacaattggacatgattcgcaggctgagtaatttaactaccgtttgcctctcacataacaatttgtcagttgatatatacactagagatggtcaggacctgtcaccctttccagctctaagaaatctaat

SEQ ID NO: 6170 - DNA, 458 bp, Glycine max
  unsure at all n locations
tgaagcctgcgagctntcgcgccatagttgccatggttcgcaatgattgtagcatcaacattacactntcttaagccagcattagctcttgtccatctcgagatgatagttatatatgaacaggaccgtgtctacgcgtttttttaaggcctttgccgagtatatttaaagactaatttaatataagttgtcaaatctcattttattttatcgattacaaaattgctcaccggagttatataattaagtatttctaaactcttaccatcaataatatataaaaaaaaacattcaatttatcttttaacatagtttatataaaaaaaaaattgagtagtttgaattttacaaaattactttcaacaataataaaaattacaagtattatcaataacactttgaaatataatgtatatanttngaattttaaataattaatattnttagtaaaatatgaa

SEQ ID NO: 6171 - DNA, 443 bp, Glycine max
tcaagaaaaatggcctcagcaaacttcttatttccagaaggaaattctatcaatagacctccaatctttaatggagagggttaccactactggaaaacccgaatgcaaatttttattgaggcaatagacttaagtatttgggaagccatagaaatagggccttatatacccaccacagtagaaagaattacaatagatggaagcacatcaagtgaaagcataacaatagaaaaacctagagatagatggtctgaagaggatagaagacgagtacaatacaatttaaaagccaaaaacataataacatctgccctgggaatggatgaatatttcagggtttcaaattgtaagagtgctaaggaaatgtgggacactctacaattaacacatgaaggaactacagatgttaaaagatctaggataaacacactaactcatgagta

SEQ ID NO: 6172 - DNA, 425 bp, Glycine max
  unsure at all n locations
agctnttcattatatatcaggacttctccgcctataattgtttcctcattgggtgcaaaaattcttgataaagtacagtttaaaatatcttgtagttntcagaatcagattcatagatatttatctatacaggtacaatttctaaggcaagttcatggtctgagcaacattttgataggtttggtctctagattcttctgagttacttcaccagtggataaatattcctacaagtatttctgcaataatgtatataaaatttttattaatttttggttatttatttatataaatgccatatgtttcttatcctttctgaatatgaataatatctagcttctgcttcaatcactttatttntcaagataaagagaatttatcaacaaacaattaaatcacataaatatccatacatgtgcaaatgt

SEQ ID NO: 6173 - DNA, 236 bp, Glycine max
agcttgttgtattatgttatcgctggctatgtgattatggtcttaacattcttctcatggatacgacgggcagggtcacataacattactgcacacaaaattggctcacggtattacggacttgcgatgggagcctatacactagaacgggccgggacttgaactcatcatgggggacccgatgttacaccatggtattccattgttaatgtgggaatcggatgtatgatgtacat

SEQ ID NO: 6174 - DNA, 363 bp, Glycine max
gtacgctcaatgactccgatcaaatatatgtgccatagagagaatggccaaggtgctaccaagacattcaatggtatgggtggagcgttaacattatcagtgaaggcttggcatttacagcatttcttcacatggatgcaacaatcgctctccacagtgagccagtaataccctactcttagaatcttctgagccatggcatgtctattggcatgtgttccaaaggatccttcatgcacctctaccagcatatgctcagtctctctggcatccacacatcaaagcaataccatgtcgtggttgcatttatataagatattcccgcttaggaagaagccggctgccaaccttcgtaacattctc

SEQ ID NO: 6175 - DNA, 473 bp, Glycine max
taagcacgttagcttacgctaagtttagcctacaatcctcagtctgatggccagatggtacggaccattcagtcgttggaggatcttttgagggcgtgtgtcatcgaacaaaagaggagttgggagagttttctgtcattgatagaattcacctataacaatagttttcattctaccattggcatggctccctacaaggctctgtatggtaaaaggtgtaggacacccctgtgctggctagaacccagagaaaacctcaccttaggacctaaagtggtacaacaaaccactaagaaggtcaagttaatccaagagaggatgatgactgctcaaagcatttataaaagttatcaggacaagaggaggaaagactaggaattcaaggttgatgattatgtattcttaagattcactccgtcgactagggttggtcaagcattgaaatctcagaaactcaccttcgtttatcgatc

SEQ ID NO: 6176 - DNA, 462 bp, Glycine max
gcttgtgtctcattagtgttatatatagagacaccttgtaagcttttatgtgcaagtaataaaaagttctcctagtatagccgtggacgtagacacatgcattgtgtgttgaaccacgttaaactttgtgtctttttctttcttccctttatttctttctcttcttttattgctctatactaacaagattagacttggtactgcagcattatatattattcacttgtcaagcatcaaagcaaagcgatattatgttaatttctaactaacccattgtttaagtaaccacaattacctgtaatttatgtgagcgccagcaccattccaatcaccctgttttgtaagaacataaccaaaatgacactaatcaatttcatcacaccaaattcaatattcatatatatatatatatatatatatatatatatatatatatatggtgtccaatattaatttatttac

SEQ ID NO: 6177 - DNA, 442 bp, Glycine max
  unsure at all n locations
tgcacgtgtaactcaacatctcanaggagtctgacaaacaataacttatttaataaaatagatcttaagcataaaaagaacattaacattttaacatgaaaaatcctccaataccaagagaaacaagacaaattctgaaaaatatttcactatattaatactctttcacataagaaatacaaaataggaaaatgttaaccagctcttaggatattgtttaagaaattaaaaagagaaaggtttttattaaaatgcgtaaaattgtgctttctatgactttnttttatattctcctataatttctacaataaatattttcttcttttaattctttaaccaatgccttaaggacattggttagcaagaccctacaaaatatagtgtttcttaaggagacccacttccatccaaatactagaagtcatagaaatgatactcaagc

SEQ ID NO: 6178 - DNA, 349 bp, Glycine max
  unsure at all n locations
agcntttgacaactattacatcattatataattttcaattgaataatattttcttaaaactcatcgtcgaattgaaaatttatttcgcatagatcatatatgcaaatttcatattaatctaaaatcatttgtcacctcattcatatagattaaaattgacgtagtataaacatcttaaaacatggataatttgattatcttcttgttgttggtcaatnttgacaaatttaacacacatgatcttagaaagatatagatataattcaacgattgggattaataaaatcatattatatattaagttattaaaatgatgtaatgattaaagaaaaattaacaaatgaaatga

SEQ ID NO: 6179 - DNA, 426 bp, Glycine max
  unsure at all n locations
taaacttgatacgaatttttatacattatggtttataagatgatntntaaatatcttttgtggaataccatcttacttaaaatgtataaaactattatagaagataaaattttctctttataaattaatacggtattgggattcattactaactagtatcagtattatttggaaccaatttcactctttatggagtgaaaaaaattatgtaaaatgagaagtaattatggatgggtctattattaatttgaaaaataggtacttctcgcttttatctttattcttataaattaaaaagaaaaaagaataagtaattaaagaaactagcgatggtaatttttttagagagtagtggcaacagttacatcttgaaggtgtaggaagacaataaaaacattatatatatatatatatatattaaaagat

SEQ ID NO: 6180 - DNA, 466 bp, Glycine max
gctcatgacaggctccccctttgaagatgaaacagcctattgagacttgttggcagacttttatatttaactacaaccaggcctaacattgctttcattgttcagcaacttagtcaattcatctctcagacattacaagttcatcactcagcagcaattagagtcctcaaatatctcaaaagtgctcctgccaagggattgttctattcttcctcctccacactcaaactctctggttttgcagactcagattgggcaagttgtcctgctactcgcagatcagtgactggttactgtgtctttcttggcacatctatgcagtcttggaaatccaaaaagcagtccacagtagccaggtcaagttcagaagcagaatatagagctttggctagcttaacttgtgaattacaatggctgcagtatttgtcaaggatcttcacatctctcttgatcaacctatctcagt

SEQ ID NO: 6181 - DNA, 370 bp, Glycine max
  unsure at all n locations
ngtcaaanagggaagcaagttaaaaattgttttcaaagtaaaaacgttgtttctacttcaaaaccccttgaactacttcacattgacttatttggtccctcgaaaactatgggttttggtggtaattactatgtcctagttataatagatgattactcaaggttcacatggactttatttttgaaaaccaaaagtgaagcttttgatgcttttcgcaaacttgccaaggtgattcaaaatgaaaaaggtctcaacattgtttcacttataagtgatcatggaggtgaatttcaaaatgagtatttgaaaacttttgtgaagaaaatgaaattcaccataatggttctacctcaagaacacctcaacaaaa

SEQ ID NO: 6182 - DNA, 435 bp, Glycine max
  unsure at all n locations
atgaagactctcctctaatctaaatgtaaatctgtgatctctatcagagactatgctagaaggaacaccgtgtagtctaactatctcactgatgtacaagctagtcaatctttctaaggaatatctgatgttaattgggatgaagtgagcagatttcatcaacttgtctacaataacccaaatggaatctaaacctttgggggtcctaggtaacccaaccacgaaatccatggagatgatatcccactttcactcaggtatgtctaaaggttgcaacttccctgaaggcttctggtgttctatcttagctatctgacacactangcacgcaaggacaaactcattaacttctttcttcatactcgaccaccaaaacatctgcctaaggtcctggtacatcttagtcactcccgggtggatacttatactacttct

SEQ ID NO: 6183 - DNA, 397 bp, Glycine max
  unsure at all n locations
tagctnntactgaaaagatcactcccagatgtaccaaggatgctatgcaagatcctcaatggttagctgcaatgaaggatgaatacatggctctcatgcaaaataaaacatgggatctcgtccctttgcctcctcataggaaggctattggttctaaatggatatatcggctgaaatacaatgttgatggctctgtagccagacataaagctagactagtggcttaggggtattctcaacgaccaggccttgattataatgagacattcagtcctgttattaaaccaacaaccattcaaacggtcttgagcattgttgtcaccagaaaatggtatatacgacacgtagacattaacaatgctttcctaaatggttccattcaagaagagtatatatg

SEQ ID NO: 6184 - DNA, 411 bp, Glycine max
  unsure at all n locations
atctatggnggcagaatcactctcattaattcagtcctattagccttacctatctacttactatccttctttaggatccctaaaaaagtggtgcacaaaattgtttccatccagagaaatttcctttggggaggtcaccaagaggccagcaagattccttgggtgaagtgggacacagtttgtcctcctaagaacaaagggggcctagggattaaagacttatctaaatttaatgaggctctacttggcaaatgggggctgggagctggctaataaccacaatcaaccttggtctangaatttactttctaagtatggtgggtggaaggagctgatttctggtggaaggaggaatttcacttcccaatggtgcaggatctgaagatcatctttcancagcagcacaacaac

SEQ ID NO: 6185 - DNA, 470 bp, Glycine max
  unsure at all n locations
cgtgattagttagatgattattattattatttgtttttttgactgaagattntaattnttattcaaatcgatattgtatagtactcctgtataaaagtaaaaaaaaaaaaaaggaaaaatggccaactccaacctccatatctagagatgatcaattgatcatatgttcgattgcttcatattaatcaaattcgaatcaatcatatttaattacatgactttgatttttttttcttgttaatttgaatcacaccaatttaataaagattgagttagttttttgagtaatcaagttatcataaagaaactaagttactatattctatttaagtttttatccccactaattgcctattttttaactaaattnttaaacattttaaaaaaattaaactgaatattaaactagctatttatattatttaatatataattttgtctatgattatcacttaacgtatttcattaat

SEQ ID NO: 6186 - DNA, 393 bp, Glycine max
  unsure at all n locations
agcttttagaagaatgttanaatcaaatgtcggtcctaataaatacacttttgcggccgtaatttctgcctgtgcaaatcttgctattgctaaatggggggaacagattcatggccatgtattgcgtttaggtttggtaaatgctatgtcagtggcaaattccattgttactctttattcaaaatctgggttgctaacctcaacttctctagtgtttcatggtataactagaaaagatattatctcttggagcactataattgctgtaaatctataagttggctagcccaattgatttattaattcccaatattctcgtggatagataacatctttcttcaagtttcatcaagaacttacgataaagtctaagatctattggcaccaagtgta

SEQ ID NO: 6187 - DNA, 403 bp, Glycine max
  unsure at all n locations
agcttgcttaagaagattcctaaagaagctagatcttagctacacacacctctctaatagctaagctcacctccttgagatgagaagctagagcttanctacacaccccctataataactaagctcacccctatgccaaaaaaaaacatgaaaatactaaaaaagtccttactacaaagactactcaaaatgccccgaaatacaaggctaaaaccctatactactagaatggcacaaatacaaggtctaaacgaaggaaaaacctattctaatatttacaaagataagcgggctcatacttagcccatgggctcgaaatctaccctaaggctcatgagaaccctagggccttcccttggatcacttgcctaatctacttggagtcttcaataaatgcccttgc

SEQ ID NO: 6188 - DNA, 410 bp, Glycine max
  unsure at all n locations
tatgctgcanacatctacaatagacccactcatctctcatctttgtaatcagccacattagagcagctatgacctctctagaaaaaggtccatcccgggtggaggaatcatcccaaccttagatggccaaatcattctcaacagcagctgcctcaacaactacagcttcgaccccagagacaacgtatagttgatgcttctgcacatcctacccttgaagaacttgtgaggcataagactatgcataacatgtcatttcaacaagagaccagagactccattcagagcttaactcatctaatgggacaatgggctacacagttcaataaacatcagtcccagaattctgacacattaccttctcaatctgcctagaatcccataaatgggagttccattacattgacatc

SEQ ID NO: 6189 - DNA, 453 bp, Glycine max
  unsure at all n locations
agcttaccaactaagctatcaaacatagataattactaaaatattcatcagagtcaaatttcattctgtaaataatgtggtcagaaaaaaagaagactatagatgcaggtttttctgttctttctaaatctcaatttgattggctcaccactgaagatttccctctgaagagtcttagcattgtaggagcaggtgaactcttgggaattgccacagttacatcataaatggcaggaacaaaagagcgcatatggtttactgctgaaacaaaaccctgaaagcaacatagcggagtaaatatttcagagcaaccaacagaaaagaacaataaaacctaatataatggttagcactgcctattaggtaatatatgtaagattgaatgtgttatgtaaatttaaaagaacaaagaagccaaagcatgaaagtaaaatacanagataaagtctatct

SEQ ID NO: 6190 - DNA, 393 bp, Glycine max
tctatagaaggttcattcctaatttctctacaattgcatcacttctcaatgagctggtgaagaagaatgtggcatttacctagggtgaaaaacaagagcaagcctttgctttgctcaaagaaaagcttactaaggcacctgttctagctcttcctgacttttctaaaacttttgagctagaatgtgatgcctctagagtgggagttggagctgtattgttacaaggttggcaccctattgcttattttagtgaaaaacttcattgtgcgaccctcaactaccctacctatgataaagagctttatgccttaataagagccctccaaacttgggaacattaccttgtttctaaggagattgtcattcatagtgatcatcaatcacttaagtaca

SEQ ID NO: 6191 - DNA, 423 bp, Glycine max
tgacgcttaggatatgacttaatgactagtagagagattaccataataccaatcccattttcttactacttttgtctttgtactattaagcattttttataaactaaactaatatgggtcctttgttttagtttatttattacaaaaagcacatttttaaaacaaaataagtaattcttttttgtttttataaataaaaattctggtttttaatatttttcttataatgtgtttacttaaataatagttttatgtgtttttaagaagaaaattctatttatttcttataaaaacgcttttattcataatattttataaatattatatacatttttaaaagactagctttaatatatattaatacttcaaatatgacattaacttcttttgttaattagtattattttcgacatctttaattta

SEQ ID NO: 6192 - DNA, 431 bp, Glycine max
  unsure at all n locations
agctngacaggttcaggcgcaggtgctgctactggtggaggcactntaaattggttgccaaacctcaaggtgatggcactcacatttttcagattctgcacagtttgtgaaggcaatttgttagaatttttggattgagcttggtttaactgagtagccatttgccccatctgatttgttagactttgaatggaggctcttgtctcttgctgaaattgcatattctggatggtcatttgcctcactaactcttctaaggaaggttaaggagaggcctcagttgcttgttgtctttgttggtggtgctgttgtattggaggaggaacatatggcttgcttggaccagtagcattctataaaggagggacaggttgttgttgttgtggaggacttgcccatctcagatttggatgatttcttcaacctggatt

SEQ ID NO: 6193 - DNA, 465 bp, Glycine max
  unsure at all n locations
tctttacgttattccattccaccatagcaatagcaacaagaactgcatagacaatctntgtaataattttataaagtcacattctttnntctttttatgntaataaatattttgtatnttttatgtaataatttctttcttttcaaacatntttattntatttttgagtcttgctaaccaaagcccttaggacattggttaaggaactaaaaggggaaagtatttagtgtgtaaatcatatggaagtgtaaaanaaatcatggacaatgcaattttctgtctcccaataaaaacatttctactttaagttccttaacanattatacacccgtccttgggatagaanaagagtaattctacatccctttacagngtatnttcactaattctcctacttagntaataaagaaagtatcaattntttttatgtctaaggattaatgcatttacattattaatacttct

SEQ ID NO: 6194 - DNA, 483 bp, Glycine max
  unsure at all n locations
agctngccccacttgaaaagcctcttttgaatggtgactctaatgtaagcaacaattatgttcccattaaggctagaggaaatgaaaatttaacctggtattcaaatgttggatttttcagcattcttactttctcatggatgattcctttaataactctagggaatgagaagactttagagcatgaggatctcccacatcttgctactgatgacagtgtggatgggattttgccaacttttacaaacaaacttgagtcagagtgtggtaatgtgataacaaccctactctagtttcataacaaccctacgaaaatatgaggttactgcacacatgaacaacactacactagtgtgataacaaccctgcttacactatgcaaacaaccctgcttccagtgtatgtttgtgataacactacgttacccattattcaatctcctcatgccctatccccaatgaacaacactacactacctcaatc

SEQ ID NO: 6195 - DNA, 345 bp, Glycine max
  unsure at all n locations
tgttgacactgttacctaatgcattcacattcagcggaagccttgcagggtctntaccagccactgtctgcacagggttgcttanggaatcgaagttngagctcgacacanactctggcaatatgtggaactgcactaattcgattttctggccttcgtttanggagttgaggaagcctgctntgaggttggaaaaggcagaatcatctggtgcaaggatggttatgccgccactctnggctgttatgagctgtgagttgatgttgttcatgatttctgtggttntgaggaggcggattangaactgagaacattttgcctttntcangattctggtgatgtcgt

SEQ ID NO: 6196 - DNA, 289 bp, Glycine max
  unsure at all n locations
ctgtacttggatcatggaatgtgtntcttccacttnctttagtgtggcagtcaatggatccatttatggtcacttcanagggcagcggggtcttagacaaggggatcctctctccccttatctgtttgtgctttgtttggagtacttttccagagatatgagcagccttaaggatgatgccaattntaaatttcatcccaactgtgcaagtattcagctatctcatttggcttttgcagatgatattatgcttctatctagaggagatatcccttctgtgtcaactatg

SEQ ID NO: 6197 - DNA, 348 bp, Glycine max
atgcgacaattgctgcacctctaaccaagcttctaacactggaaccttttcaatgggcccaagatgctcgtgcagcttttgctgctcttaagcagatgctgacctcaacccctgttctccggttgtcggacttcactcttccctatacggtggagacggatgcgtcaagaacgggcatgggcgcaatgttatcacaatatggccacccagttgcttactttagcaaaaattttccaccaaagctacttggtgcttccacgtacgttcgtgaattattcgccattacggccgccgtcaagaaatagtgtcaatacctccttggccggtgctatcacatcctcactgatc

SEQ ID NO: 6198 - DNA, 415 bp, Glycine max
  unsure at all n locations
agcttcaacatcagaccacttccagggtgctggaactacttcacatggacttgatggggcctatgcaagttgaaagccttggaggaaagaggtatgcctatgttgttgtggatgatttctccagatttacctgngtcaactntatcagagagaaatcagacacctttgaagtattcaaagagttgagtctaagacttcaaagagaaaaagactgtgtcatcaagagaattaggagtgaccatggcagagagtttgaaaacagcaagtttactgaattctgcacatctgaaggcatcactcatgagttctctgcagccattacaccacaacaaaatggcatagttgagaggaanaacaggactttgcaagaagctgctanggtcatgcttcatgccaaaagaacttcctataatct

SEQ ID NO: 6199 - DNA, 394 bp, Glycine max
  unsure at all n locations
ataaccggcctccataccananagtcaaagttatagatgctgttgttacaaaatatgaggctgacaatatggaacctgaaatccatgattgcttgatgctttctttcttgnggccttccatcgccattctgaacaaatntaaaatccttttctcagatgagaatgcagcaatagtcctatgattggtagtagcttccattgctaattgactaccctctctntgagcctttcttgctnntgcctgccatactttcatgagaatgttnnttgagtagaagcatacaatgatcaacggctgcattgcggtcataacaagagccaccctccatgtgacaattaaacttagtacaaaagccaagaaagccataacagaaacgttaactaacaatgacat

SEQ ID NO: 6200 - DNA, 300 bp, Glycine max
gatgtcttggttaacctgttaacccagctggccttgaatcaaaaataagtacctgtcgcacgactatgtggtttatgctcctctgccgaccaccatacagacctttgtccttctgtgtgcaagctggagcaactgaacaacctaaagcttatgctgcaaacatctacaatagacctcctcaacttcagcagctaaatacaccacaacgaaacaattatgacctctccagccacagatacaatcccagatggaggaatcaccctaatctcagatggtctagccctcaacaacaacaacagc

SEQ ID NO: 6201 - DNA, 347 bp, Glycine max
  unsure at all n locations
tgaccatgacatgtgttttaataataatcaacaatcaatgatcaatcatctntgaatcatctatctntcaatctattttcagcatcatctctcaacatctgtcaatcaatctttcaatatctttctacagaattgtgtgattcatctctcttcatttttctaaaagttntttatcaacactatctcttccaagaaaagttctntgttcacaaacttatgttattcatctttatcattctcttcttcctttgccaaaagaacgaaggactaaccgcctgaattcttttgtgctctcttatccctacaaaagatcataggactaaccgcctgagaattcttttgattct

SEQ ID NO: 6202 - DNA, 377 bp, Glycine max
  unsure at all n locations
agcttgacttacttggactgatcatattctcttatgaaatgatgatcaatgtcaatgtgctgggatcattcatgatgagcagggattgaagcaagacttatagcagatttattatcacaaaataacattacagagggcacatcaacttcaaagtgaagaagtaacttgggtaaccaaacaatttcactagtaacagaagacaagacacgatattcagcttcagtggatgaatttgaaacagtgggttgtttcttagaacgccaagaaagaaggatatttcccaaaaagacacaaaagccagaagtggatcttctggtatcaacacagctggcccaatcagcatccgcanaggcagtgaggctgagagagttctgagc

SEQ ID NO: 6203 - DNA, 441 bp, Glycine max
  unsure at all n locations
agcttgtactttaattgatattcatgatatatatattaanattcctaaatttcataattagggcttatacattagtaagagaaattatatcattcttggagaatcataaatttcataacacatgctctgataccacatgtgagaatccttaagggtttcctagactattaatgattggaaacaacaggatcttgacacctatggttctcacatacaatcaataaacaaccatagataatgatgtgtacctttctccataggaagacatgtacatttctctttggaacttctcttcggtgcactttgattctccttgaaagagaagagatataagatttacttcctatgtctttcttgctgtctctctcattcggatggcatgggtggagagaacctttctgtcagaagggaccctatttaacttatggtttcaacccttta

SEQ ID NO: 6204 - DNA, 504 bp, Glycine max
  unsure at all n locations
ctctatatatgtgtgtctgatntcgaanagaaaaaaagagatagatattctaagagaacttaattgccaaatgctctctcaacaactcttgagagaatacttgcaaatctattgagaattcatccagaaacttcaaattgtattatcatctctaaaagagagaaattcctctaggatcttcaatttgtatcatccactctaaagtatagaaatctttctatttatctcagaaagttagttgtaatcaagagactggttgtctcttggattgagagaatngtagtcaagagattggttgtctcttggagaatctntgaacacaagggtgagggatctcaaggtgtgttcaaagtctgtaaaggatttatagagatagtggaaaatctcaagtgcttgaggactggacgtatgcaccggaagtggccgaccaatataattgagttgcattcttcttccttatctattatttatacattgatgtgcttgctgttaagacatataaat

SEQ ID NO: 6205 - DNA, 280 bp, Glycine max
  unsure at all n locations
gatgtttntcaagatactagactcatctggcacttcaatattcaaacttcttgcatgatcgagaagagaggggaaagcaacttcaaacccgataggcatatgttctgcattttcatcctgaagcttgtacaaattctccttataaaatgacattcctgttacatatgaatgcatatatacacaatagaaacattaaattaacataaacgtgctgataaagaaataacatttatatcataatactctactatttcccggtcctcttcttttactatggaat

SEQ ID NO: 6206 - DNA, 458 bp, Glycine max
  unsure at all n locations
agcttgtgcatccaatactctgatgaggatgtcctatatgttcttaatactagactgatnccattgcttccaaagtttcatggccttgcgggtgaagacccacacaagcatctgaaagaattccatattgtctgctccaccatgaaaccaccagatgtccaggaggatcacatatttctgaaggcctttcctcattctttagagggagtgacaaaggaatgtctatattaccttgctccaaggtccatcacgagctgggatgacctaaagagagtattcttagataaatgtttccctgcttccaggaccatgaccatcagaaaagatatttcaggcattagacaactcagtggagaaagcctatataaatactgngagatatttaaaaaattatgtgctagttgccctcaccaccagatttcagagcagcttctcctccaatatttttatgatagatg

SEQ ID NO: 6207 - DNA, 468 bp, Glycine max
  unsure at all n locations
gaacttgcacatttatgatgttcttcatgtgctttgactgattcaacaagtctttacaagccttcattgcattgttatgtggtgagcaaggactatctccaatgtgattaagaaatgcacnaattttccagcattaacctttctacatgatctaaatccttgtctattaagacatgtgatccaaaaatgatcactttgcttngtactgaatagatagcataacaaacaataaactctatcattagatggggaatactctagcccagaaagaaaacatttaaaccaagtacattggaaatgccttggatgtntctctntacanaaaggataatattgtagttctatttgatatggaccccatttgatataagctcttcgaacttcatctcttttgatcatcagatattcatatatgtgaagggcatttctcaggtcacattccaaagaaataacatcaaattcatcaac

SEQ ID NO: 6208 - DNA, 463 bp, Glycine max
  unsure at all n locations
agcttttattgtaatcttgaaattcaggacagtactctaatttctgaaattnntgggataaaaatggtcattgaccagtcccttttccatgacttaaccaaattacccagtgacggtgtaccatttgaaggtacactgaatgacgactggaaatttgatttctctgcccatgatgcccgccagttggtttgcaccaacaatgcggatatgaccggacgtcttcttgacgggtcattggcttttgaaagccgcatccttcactatttaattgtgcgtattttgcttccacggccttccaaccttgcccaggtttctgagaaagatctaattatcatgtgggcctttcatacagggcgtcaacttgactgggcacacttagtcagatatcgcatgcataaggcattgcgattaaatgctccactaccatatccacagcttgtcactctcttttntcaccattttc

SEQ ID NO: 6209 - DNA, 414 bp, Glycine max
  unsure at all n locations
gtaagaatctgttntagaatttctaacatgtacacaattctttagttggatattccatgaaggtttagaatcatcaacagcatcacagaggtttatgtgctttctttctacattgtgcaaaaggcatgactggttattttcttttatccatattgctgtctgaacttgtcgtgcaatgagtctccagcacattgctgtagtcaaattcatcaacttatcccaaattacaggataatctttgtcttttctataagcagggggagctgaataaacaaagtacccattgaagcgaagaaggcgattcaactccttcagtaaaatcccatctgcaaaaaacagaataaattgacaataaacaagtctgtcagaataacgtgccagttcatgaatcactagaacaaaataaacaagtct

SEQ ID NO: 6210 - DNA, 389 bp, Glycine max
  unsure at all n locations
tggtcatacgttntcacacagatgtccaattcggggtcataatatatcgagacgctcgaaattgaacaacggaagctctcgagaaaatcgaatggtcataacttttcaaacgaatgttcgattcggggacataactcatctagacgctcgaaattgaacaatggatgctctcgagaaattcgaatggtcataagttttcacacggatgtccgattcgtggacatattatatcgagacgctcgaaattgaacaacggaagctcccgagaaatttgaatggtcataacatttcactcggatgcccgatctggaacataatatatcgagacgctctgaaatgaacaacggaagctctcgagataatcgaatggtcataacttttcacacgga

SEQ ID NO: 6211 - DNA, 349 bp, Glycine max
  unsure at all n locations
ctggagatgaagatgattggataagtaccagtggatntgtgttnttcatangatacacaaccttcacttggatgtcaaaaaagtagccgatattcactcttttgactcgtgaggcagaatacgtagcagctacttcatgtgtntgtcatgcaatctagcataagaatntattaaaagagttgggcatgtcacaagaagagttgaccaagatctttgtgtgataataagtagtcattgctctagcaaggaatccagtgttctatgatcgaagcaagcatattgataccccttaccactacataagggagtgcatagcaagaaaggatgtacatgcagaatatgtgaagtc

SEQ ID NO: 6212 - DNA, 483 bp, Glycine max
  unsure at all n locations
tcttaagccacctgcggcatgcaagctntctgctagatatcatcttgtttgtgcgacgaccatttccatctacagaaaactgatcatagtcgctcaaggaaacacagaaaatgaccaatccaacatcctcaaacatttctagccacttgcaattttctgctagccctctcgcatgtattgtaattagttgatacctgtaatcaaggagaacaaagcatggtacaggttagcaacattttagcagttgttgcaattggatcaatcagggctacccagaaaacttctcacatataacattaggcacaaatattttcacccacctaactaaagaattatgtagatcagcagtgtcaacagtttcctcgggagctggttgaggaaatgaaaactctacagaagccatcccattggatgaagtaactccttcagcatagaggatatctaaatccganggttcatactcagtcctcagtatctcaacag

SEQ ID NO: 6213 - DNA, 372 bp, Glycine max
  unsure at all n locations
agcttcatatggagccatgccgacggtagaatgtaaactatngttataagtgaactctatcaatggaagaaaactctcccagctttccttctgctctaagatacatgctcttaaaaggtcctccaatgactgaatggttcgttcagtttggccatcagtctgaagatagtaggctgaactcagtctaagcttggttcccaacactctgttcaagctctcccaaaatctagaggtaaatctaggatctctatcagatactatgctagatggcacaccatgcagcctacaacctcacttatatacaaggtggtcaacttctccaggaaaatctaatattaatgggaatgaagtgagcaaacttagtgaatctgt

SEQ ID NO: 6214 - DNA, 262 bp, Glycine max
  unsure at all n locations
tggcagaggaatggagaatgaggaaaggtgattggagatgccacttcaacgagaagatgagtcaagaacttaaaggtagaagaagatgagtggagggaaagggagagaatgggcacacaatttatgcctcacatgaggtttgaactctgaagtgtaatttctaatatgatcaaagttgataaaatgcacacacaaggcctctatttaagcctaagtgtcacacanaattggagggaaatctgaatntcaattcaaatttcgc

SEQ ID NO: 6215 - DNA, 420 bp, Glycine max
  unsure at all n locations
cacacacacacacacacacatatatatatatatatatgtgtgtgtatgtatatgacttgntaaaataaattangaattaatagttcaaataataaaattaaattgaacgaaattaatatattaagaatcaacaataaatactntcaatgaatttgtagattaattatctatgaactctctttaatctgaaataatatagttcgaattaatatatacatgttctgtgccatgtaaacattaataatgtgtgatgtttatatgattgatgacgtgtgatcacatgttgtgttgcgattataacattgtaatcgagattgagtgttcgtgataaattgagtatgtgttgaatcgtaagatacatgtgtatcgagatttcttacacattgagttgtgagctattaactgtacaatcacacaact

SEQ ID NO: 6216 - DNA, 456 bp, Glycine max
  unsure at all n locations
ccggatcttaagtcacctgcggcatgcaagcttcttggggcatgcagggttctacaggagattcatcaaggatntttcaaagattgctagacccctaagcaacctgttgaataaagatgtggccttcaagtttgatgacgaatgttcaacagcatttcagacactgaaagacaagcttactactgcacctgtgatgattgcacctgactggagtaaagactntgagctgatgtgcgatgccagtgattatgccataggagcagtccttggacagagacacgataaggtatttcatgctatttattatgctagcagggtcctgaatgaagcacagttgaattatgccaccacagagaaggaaatgctagctgttgtctttgccttggagaagttcagatcatacttgataggatcgaanggtcaccatttcacagatcatgctgccatcaagcacct

SEQ ID NO: 6217 - DNA, 410 bp, Glycine max
  unsure at all n locations
agctnggttcaactgagtagccatctgccccatctatattgtcanactcttaatggaggctcttgtctcttgctgaaattgcatattctggatggtcatttgcctcactaactcctctaaagaaggttgagaaggggcctgacttgcttgttgtctctgtcgctattgctgcattggaggaggaacatatggcctgcttaaactatcaacattctataaatgagggacaaattgttgttgctgctgttgtcgttgtggacgatttgcccatctcagatttggatgattcctccaacctggattgtatttgttgcttgaaagattactaatattctgctgcttgttggttttttgttgacggggtctattataaatgtttgcagcataagcttcaggttgctcattgactc

SEQ ID NO: 6218 - DNA, 367 bp, Glycine max
  unsure at all n locations
gctcgtctnngctgatattatcatgcacactnttctgatgatgacctatgaaccaatagggatctacttgaaacttatgtgcttcaagtgagaagaaatgcttctttntccacttgtgaagatgttcaaagtttggctatgaagatggttcagactgagaaacatttggtatttccattggtttataaacttattgagctagctttgatattgccggtgtcgacagcatccgttgaaagaagcttttcatcaatgaagaatatcaagtctaaattgcgcaataagatcaacgatgtgtggttcaatgacttgatggtatgtacaccgagcgggagatattcaagtcgcttgatgatattgatattat

SEQ ID NO: 6219 - DNA, 423 bp, Glycine max
  unsure at all n locations
agctngaatcttccttggtcgggtacatgagcatatgcaatgctcccaaatactctcaagtgatcaactcttggcttcactccactccatgcttcttgtggtgtttgatctttgacattctntgttggggagcgattggacaaataaacggcacacgcaacagcttctgcccaaaattcctttggcatatttttagccttcaacatacatctagttatattaagaatagttctattttttctctctgctaccccattttgttgtggagatctatgaaccgttagagggcgacgaatcccatattnttcacaaaattcattaaattcttttgatgtgaattcgccacctctcttggatcttagagcttngattacataaccactcttcttttcacaagagctntataattntaaaaactacaat

SEQ ID NO: 6220 - DNA, 291 bp, Glycine max
  unsure at all n locations
tgcaagcttnncagggacaccacattccttttgaaagtttgtgggcaatcacattctaaatggccttagcccactgtgagtttagacatatgaattagtagtatatgatattatatacacacatacatatacttttctgggcatgatcgagtctctatatatatatacccatacatttactntggntaatttaaacatgtgaacatntgttggtntacgaggaagacaaagctatattggtgcatgacacagggtcgcaattaaagcagataaataattgtgtcataaatc

SEQ ID NO: 6221 - DNA, 377 bp, Glycine max
tgccacattcttcttcaccagcttattgacaagtgaggcaattgtacaaaaattaagaacaaaccttctatagaagcttgctaagccatggaagctcctaatatgtcccacactttttggggtgggtcattcttggatggccttgattttctcaaggtccacttggaccccatttctaccaactacaaaccctaagtaaactatattatctaaacaaaatgtacacttctctatatttgcatagagggtgtttttcctaaagaaagaacttgcctgagatgtcctaaaagatcatctaggcttctactgtacactaaaatatcatcataataaaccactaccaatctacctatgaaatcccttaagacatgatgcat

SEQ ID NO: 6222 - DNA, 344 bp, Glycine max
  unsure at all n locations
atgcttggcaggaacctacacagggatgctagcttaccgttcagcttctgaacttcttggatgttggtggggctacgcatctctagtatggcagtgtatttgtcggggttggcttcaatccctcagtgagtgatcatgaagccgaggaacttgcttccacctaccctgaaagtacatattttaggagtgaggcacatgtcatatttgcagagttcctcaaagacttgttccatgtccgccacatgctggactatgctntgagacttgacgaccatgtcgcccatatatacctcgatgtttcatctgatctgctgataaagactcggtccatcagtcattggtat

SEQ ID NO: 6223 - DNA, 425 bp, Glycine max
  unsure at all n locations
tgaatattctatgcaacatgacatggttatctgacaagctatgaatatgcttcattcaacaatgctngatgcagaactatgatgcagttgttggtgatgtatcgatagtgtccacacgttatgaatatgcttcattcactcagccctatactgaaaccggactgatgatgattgttcctattaaatcaaagacaggtgatagaacgtggctattcatgaaacctttcacaaagcgcatgtggattctaatattggtcatcattgtctacaatggttttggtgtatggattattgaaagaaaccaccgccctgaaccggaggggcctattctgcagcaaaccacaactatgttatgggtggctntctgttctttgttctctctgaatgggaatttctttctgctgtggtcatctgttgatccatct

SEQ ID NO: 6224 - DNA, 447 bp, Glycine max
  unsure at all n locations
tcaagattcattgtttccaataacattaagcgaaagtcaagtagattggcagccattctgggatgctagcatacttagaagatggataaatatttggggttccccatgctttctggtagagtcaagaatgaagacttcccttatantttggaatgattgaacttgagattagcagggtggaaaacanaaactctgagtaggtctggacgtgttactttggttaagtcagtgtgaaactcaatccccatatattccatgcaaaatntctggattcctcangggatatgtgatgtgattgatagaatctcaagaagtttattttgggtaacaaccatcatcattgggtggggtgggacataataacttagccctttgaggaaggaaaacttggagtctgtaaagttagagaaacaaatacaactctcttagggaaacatatgtggtctc

SEQ ID NO: 6225 - DNA, 464 bp, Glycine max
  unsure at all n locations
tgtaagtggctntcaaagcctactctntattctatgaatattgttaatctgctaatggattcaatctctcctcaggatatcactattggagttgctattggatcgtctacacagatatctatgtttgtggtatggcctcgaactgttattaaatgttattaagttgtttggggtatacatttaccatatctttttgtgattaaactatcctgaatttcttcttgtcataggaggacatttcttgagtttattaactttttaaaattagttaatcagatgatgatcattggagaaagttgatggttcttgatctcttgaaaattgtagatccctttctgtgtagttgttggatggtgcatgggaaaagaaatggacttgaattttcaactattcgagactgccacgctttttatcactgtgttagtagttgcatttatgatgcangtatgttatttcttacttgc

SEQ ID NO: 6226 - DNA, 371 bp, Glycine max
agcttgtagggttaaagtctcactattgtcacgtgctcatgcaacaattgttaaccgcggctatacaagacatattgcccaacaaagtcagggtattcataactcgactgtgttttttcttccatgccatatgtagcaaagtcgttgatcctgtatagtttgatgagctggaaaatgaggccgcaattatactgtgctagatggagatgtatttgtcccctgctttctttgacatcatgattcacttgattgtgcatctggtcaaagaaatcaaatgttatggacctatttatctgcggtggatgtactcagttgagcgatacatgaagatcttaacagggtatacaaagaatctatatcatccagaaaca

SEQ ID NO: 6227 - DNA, 388 bp, Glycine max
  unsure at all n locations
agctttgtccgcaaaaatcactaaaaaccgttttaaggtccaacgccttaaacgatcctctttgtttttatcggttaacatggacctttcaaaagcataaaatcaacacgtaactttaccgtttttgcaagaactacgtaggtccgagttcctcaccacaaatcgaggatacgtaggagcagaagccccgcttttgtcgaccaccccttttcaaacaaaccaagagatcgttaatggtccaacgccttaacatttctctactttcaaaaaccaagagatcgttaatggtccaacgccttaacgtttctctcctttcanaaacaagagaccattaatggtccaatggccttaacgttctctcctttcaaaatcaaaagatcgtttaatg

SEQ ID NO: 6228 - DNA, 423 bp, Glycine max
  unsure at all n locations
agcttgtgaatntgttgtgttatttgtagctgtcatatcataatactgtaattatataatattattatgttaaatcttattgcaagtctacactttccttgagaccactcttgtgactatatcattactgccacatttcaaaacatacttttctgacggagaaattcctggaacacctggcactcttgccacaacttttcttacttttggttaggtcctgaaacatgttttctatttgagttgttggtttcatatttgactttttataacactgttggattgactgcagttttgaatctggccttttccttgagtgtcttgggatttcttgtcttgcacgtgtcattggtagcttctaatacaaccactattgaggtaagagtttgcactcttttccctttcccttntctactttagaaatct

SEQ ID NO: 6229 - DNA, 387 bp, Glycine max
  unsure at all n locations
cttgcttctacagaacacttgggttttcaaagagaacaagggatgggacatcccttgtggatctttggcttgtaaaggattntacaaggttgaaagaaatctcaagaaccgtaggttgcttgaggactggatgtaggcacgggttgttgccgaaccaatataaaatttttgtgtttgtcttcttcttccctacactctntaatttctgttgtatacttttcttttacgctttacttttgtttgaattacataacttagtagtaaagcctaattgaatctggtaacattaagaaggataagattntaattagtcaaagcacattaataattaattcaaccccccctttctaattattctgangtcacttgatccaacacaggtctatt

SEQ ID NO: 6230 - DNA, 428 bp, Glycine max
  unsure at all n locations
agctntgcagtagatgccactctactctaaattttngaatgatatgtngacaaggaagcacatgtacattcatcangaaaacatcatagtggaaggaaattgtagtgctgtaatccaaaagatccttccacctacgtgcaaagatcctgggagtgtaaccattccttgttcaataggagaagtcaatgtgggaaaggctctgnatgatctgggagccagcattaatttgatgccactctctatgtgcagaagactgggagagttggagattatgcccactcgaatgactttgcaattagctgaccgctccattaccaggccctacggagtgattgaagatgtgttggtcagggtaaagcattttatcttcccagcagactntgtggtcatggatatctctgaagatattgacatccctgtaatcttgg

SEQ ID NO: 6231 - DNA, 463 bp, Glycine max
  unsure at all n locations
tctttgaganaacttccttgggaagctagagcttagctacacacacccctttcataactaagctcacctccttgagaagcttgcttgagaagattcctaaagaagctagagcttagctacacacacctttctaatagctaagctcacctccttgagatgagaagctagagcttagctacacaccccctataatagctaagctcacccccatgacaaaatatatgaaaatacaaaaatgtccctactacaaagactattcaaaatgcctcgaaatacgaggctaaaaccctatactactagaatggccaaaatacaaggcccaaatgaaggaaaaacctattctaatatttacaaagataagcgggctcatacttatcccatgggctcaaaatctatcctaaggctcatgagaaccctanggccttcccttgggattttgtcccaatctacttggagtctttta

SEQ ID NO: 6232 - DNA, 388 bp, Glycine max
ctggagtttccaagtgccaattcgtcttcttctgtagaccactctttctctggcttcaattcatcagcgggctctccttctgtgtacaacatcttgcgatgttcccagcctttgatgacagctttccaggtactgctatccagtgagacgatgaaggccaccatccttgctttccagtattcatagttggttccatctaggattggtgggctgttcactggacctccttcgttgtgcatgctcatcacaacttatctgcctagatctcactctgtgatttcgagggttggctctgataccaattgaaattctgatgccaggggacagatgtcgtacatgatgtcacgacatcacgcttcataacatgcagtatatgtgggtctgtatg

SEQ ID NO: 6233 - DNA, 324 bp, Glycine max
agcttgtagcaaattcaaaccacaataactattatctcttatgtctgattgagtccggtaatttatctagacgctcgtaaatgaatacggaagcacgtatcaaatgcaaaccgcattaacatttaactcagatgtgcgaatgaatcccgtaatatatcgagacgctcggaattgaaaacagaagctctaagcaaattctatacgacaattactttttactcggatgtctgattgagtctcgtaatatatcgagacgcttgaaattgaaaacagatgctctgagcacattcaaaccacaataacatttaactcggatgtctgatt

SEQ ID NO: 6234 - DNA, 482 bp, Glycine max
tagctacacacacccctctcataactaagctcaccttcttgagaagcttccttaagaagattcctaaagaagctagagcttagctacacatacctctctaatagctaagctcacctccttgagatgagaagctagaacttagctacacaccccctataatagctaagctcacccccatgacaaaaaacatgaaaatacaaaaaaaggtccttactacaaagactactcaaaatgccccgaaatacaaggctaaaaccctatactactagaatggccaaaatacaaggcccaaacgaaggaaaaacctattctaatatttacaaagataagcgggctcatacttagcccatgggctcgaaatctaccctaaggctcatgagaaccctagggcctacccttggatctctagcccaatctacttggagtcttctacccaatgcccttgcgggataggatggcatcagtacctggatctttacatt

SEQ ID NO: 6235 - DNA, 417 bp, Glycine max
agcttcaagaaaaagatggcctcatttaatttcttatttccagaagggaattctatcaatagacctccaatctttaatggagagggttaccactactggaaaacccgaatgcaaatttttatcgaggcaatagatctaaatatctgggaagccattgaaatagggccttatatacccaccacagtagaaagagtttcaatagatggtagttcatcaagtgaaagcataaccatagaaaaacctagagatagatggtctgaagaggatagaaaacgagtacaatacaacctaaaagccaaaaacataataacatctgccctaggaatggatgaatatttcagagtttcaaattgcaagagtgctaaggaaatgtgggacactcttcgattaacacatgaaggaactacagatgttaaa

SEQ ID NO: 6236 - DNA, 294 bp, Glycine max
  unsure at all n locations
agnnctgtgataatgtntaggcgtacattatgtatattatccttcataagggaaaggaaaataggatataaattatggatgttatcatgttgatgctatttgtgttttcatttcaaaacttatcatggacttgtgtaaatgtcttattgaatttggacttgtgttatcaactttaatacttcaattattattttggattttggagtatgaaataaactttcttaatcaaataatgttaggtatatggtaatatataatanatacatatattattttgaattttttatatatact

SEQ ID NO: 6237 - DNA, 465 bp, Glycine max
ggtatgccactggttccaacctctccatgatctgaaatggttcatataagcgtttggcgagcttcaaatgagtggaacccttcatcgttgtttgtctataaggtcgtagtttaactaagacccaatctccgatattgaagttgtgatctcggcgatgctcatctgctatgttcttcatgcgtgcttgggccttcatcaatttttgcttaagtaacgcgattacttcctccctttgactgagccactcatccactgcttctatctgcgtagaaccttcgacttagcgagggtaattgggaggttttcatccaaaggtgacttcgaacggagttaacccagtggttgagtgaacggaggtgttgcatgaccactccgcccacagcagataacgtccccatgtcaagggtttgcgatgaacacaggcgcgtaggtattgctccaccacacgattagccacctccgtct

SEQ ID NO: 6238 - DNA, 375 bp, Glycine max
  unsure at all n locations
tgagcttggctcattacatgtcataggctatntttaaaggctctgcttggcttacataaaagcctaacttggcctacgagcctatttaaaagcctgcttaaagacgtctttaactaattaattgttttaaaacctagtaaaataataactaagaaagaaaacttataaaatctgcgataagtaatgtacaaatccaaagataattgataaacaaaatcatatgtgaattcaacttatttaaacacagagtatatcataagataatgaaaaaaaaaacgcgtaatattaaaaaatatatggattagagatgatttatactaatatagacaaataaaaatatttaaattgtctgaaaatgtttttacaaaacattct

SEQ ID NO: 6239 - DNA, 482 bp, Glycine max
tttgcagataatgtcaaggctccaccaattctgttgtatgtgttgtccgcaccatggccattatgaatgtgggggcatagatatgattggggaaattaagtccaaagcttcgaatgggcatcatttcatcctagtcgctattgattacttcactaagtgggtggaatccacttcatatgctaatgtgactagaaatatgggggttaggttcacaaaaaaggagataatttgcatatatgtgttgtggagcaaaatcatcaatgacaatgccaccaacctgaataataagatgatgcatgagttgtgtggggatttcaagatccaacaccataattcgactccttatcgacccaagatgaatgatgcagttgaggccgccaacaagaatatcaagaagatcattcaatagatgacagtgacatacatagattagcacgagatgttgccattcgcattgcatggatatcgaacttctgtgcata

SEQ ID NO: 6240 - DNA, 422 bp, Glycine max
ctgccacatagaatacccctgcaaggacatacccctcatgtgtgaaaatctctttgccaaccaagtaatcaacaaagtaacttatcatatatggaccaacatacgagacaagagtagtgacaccagcaaacacagcgttacaagccgcctccttccagaaggatttgagaagtgcccaagccaacgaaggctgcccggataggttttcagccttcaacctctcccaattagaattcaaaaccttataatttgtcttggatcggtctttcggcgcaacaaggggaatgtccttaagctcaagcggcctttttgccccaatggaaagaagtggattcaaccaagacaaaatggccaagctaaaaagtccagcatcactataaggagtaaccttgagacacccgggatcctcatcaacaagcaat

SEQ ID NO: 6241 - DNA, 316 bp, Glycine max
tcaatatctttctaacagtaatgagtaaagaacttggcctttttagcataaactctttcataaacacatcttcgagaaaaatataagaagctaaaatgaaatgggtttctcccataagctaaaataaactaatgtacttcaagttttggagaagttaaatgagagaggctttataaaagctatgcccttaagtggattttacctatgagagaggtcttttaattcatttaccttcttatttatcatcattaaaggctcatcatggaaagtttatcaaacatcaactcactatgactatgttgcttcaaatgtagtg

SEQ ID NO: 6242 - DNA, 275 bp, Glycine max
tgagaatggagaattgcactaagcaatcactacgcatagcttcaatctcgaaagtggaggacacatgaacgaatacgcaattcatgggtctccgaaaagattgagaatggagaattgcactaagcaatcactacgcatagctccaaactcgatggtggaggacacatgaatgataacgcaattcatggtgctccgaaaagatggagaatggagaattgcactaagctatcactacgcatagctccaaactcgaatgtggaggacacatgaacgat

SEQ ID NO: 6243 - DNA, 436 bp, Glycine max
  unsure at all n locations
agctntgagcanaatcaaacgagcaataactttgactcggatgtccgaatgaatcccgtaatacatcaagacgcatctaattgataacggaagctntgaccaaattcaaacgacaataactntctactcggatgtctgaatgtgccccgtagatatcaagacgctattatatgaaaaccgatgctcgtagcaaattcaaagaacaataaatntttacttggatgtccgattgtgtcccgtagtatatcaagacgcttgaaatttagaacagaagctctgagcaaaatcaaacgacaataacttttaactcggatgtccgatggaatctcgtaatatatcgagactcacgaaattgaaaatagaagctttgagaaaattcaaacgacaataattttgtactcatgtctaactgtgtcccgtaatatatcgagacact

SEQ ID NO: 6244 - DNA, 483 bp, Glycine max
  unsure at all n locations
tcaagaataatggtctcatcanattatttattntctgttaggatttctataaataggccttctatttttaatggtgtgggttaccattattggaaaacttgcatgcaaatttttatagaggcaatagatctgaatatttgggaagccatataaatagggccctgcattccaactatggtggcaagaaatacaaccatagaaaaacctatggaagaatggagtaaggaggaaaaaagattagttcaatacaatttaaaagccaaaaatataattacatctgctttaggaatggatgagtactttagggtatcaaattgtaaaagtgcaaaagatatgtgggataccctacaagtaacacatgaaggtacaacagatgtaaaaagatctatgataaatacattgactcatgaatatgaattatntagaatgaatccatatgagagcatacatgacatgcaaaaaagttcacacatataattaatc

SEQ ID NO: 6245 - DNA, 426 bp, Glycine max
  unsure at all n locations
agctntacaacagatgtcactctattctctagttttcaaagggatatgtaacaaggaaacataagtatattcaccaggaaaacattgttgtggaaggagaatgtagtgctatgattcataagatccttccacccaagcataaagaccctaggagtgtaaccattccttgttcaattggagaagtcactgtgggaaaggctcttattgacctgngagtcagtattaacttaatgccactctccatgtgcaaaaggttgggagagttggagatcatgcccactaggatgactttacaacttgttgaccactccattaccaaaccatatggagtaattgaagatgtgttggtcagagtaaaacatattatcttcccgacagactttgtgggtatggatatctatgaagatatgacattcatgaatattg

SEQ ID NO: 6246 - DNA, 479 bp, Glycine max
  unsure at all n locations
cgcagggatattagcttaaaatgcttacaattagtttaccatggaattatgatttaggctttnttggggtatctgagcttgatggttcagctttcctcttaattcccaaaaaatgctctacctgaatcaattaaaaaaaaaattttaacagaaaaatgcaaagctattccacaaaagcactttttctaaagcttaaacacgtcctaaattacctttcgatcaccaagttaaacattattaacattaaacattaaacatagttacttacttcttagcatgccaaaatcactttttgccataatcaatttaaatttttttaaaataggttcttaatgcagccataagtcaactctcttacatcatctttggtcaatttccttctctcaaattcaaactcaagttttgaaatgggttgagtggatggttcacagtcatgttcgccaagccagtgaagtaaggatcagataatgcctgatatc

SEQ ID NO: 6247 - DNA, 406 bp, Glycine max
cacctgccgcatgcaagcttgtagggttaaagtctcactatttgtatgtgctcatgcaacaattgttagccgtggctatacgagacatcttgccaaacaaagtcatgttaacgataactcggctgtgctttttcttccatgctatatgtagcaaagtcattgatcctgtcaagtttgatgagttggaaaatgaggccgcaattatactgtgccaattgtagatgtatttttcccctactttctttgacatcatgattcacttaattgtgcatctggtcagagaaatcaaatggtgtgatcctgtttatctacggtggatgtacccggttgagcgatacatgatgatcttataagggtatatcaagaatctatatcatccataagcatatatcgttgagaagtacat

SEQ ID NO: 6248 - DNA, 419 bp, Glycine max
  unsure at all n locations
agcttattcgagcctgtgatgagcagcagcattgtttggaacttacatacttatacatccaatatgatgagtttgataatgctgcaaccactgtaatgaatcactcttctgaagcatgggaccacatgcaattcaaagatattataattaaggttgcaagtgtggagctctactataaagctgttcacttctacttgcaagaacattctgatantttaaatgatcttcttaatgtacttgccctacgtgtggaccacacccgtgttgtggatataatgcggaaggtctgtatgtctcagtctgttttctaatgtgttaagtcttaatcttatnttggtgaggttaatataccgttcgaaaataatttatgcaatattcttatttgttgcttgatttttatggtttttaagctggccaca

SEQ ID NO: 6249 - DNA, 405 bp, Glycine max
ctttatagaaggttcgttcctaatttctctacaattgcatcacctctcaatgagccggtgaagaagaatgtggcatttatttggggtgaaaaacaagagcaagcctttgctttgctcaaagaaaagcttactaaggcacctgttctagctcttcctaatttttctaaaacttttgagctagaatgtgatgcctctggagtgggagttggagctgtattgttacaaggtgggcaccttattgcttattttagtgaaaaacttcatagcgccaccctcaatcacttaagtacatttgagggcaaagcaagtttaacaagaggcatgcaaaatgggtagagtacctagagcaatttccataggttatcaaatacaaaaagggaacaacaaatgtggtagctgatgccc

SEQ ID NO: 6250 - DNA, 409 bp, Glycine max
acctgcgagctgcaagcttgctcctctcttacacctgcagatgtattctagtttctcacacgagattttatgttgagtaaagctcgatccagcgatctcttttgggaagctgtttggcctcttctgttagcaaaaggctggcgttctgaacagcctatagatcaagttgtttgtggatcaaaacaatctttggtttttcttgtacctggcgttaacaaatgttcaagaaggaaactgataaaaggtgaccactactttgattctataagtgatgttttgaataaagtaacatctgaccctgtgcttcttgagactgaaagtcaagcaactgacggcagtgtatatagggaaaaaacataatacaacgagacctatagggtgtgccaaatatggaacaagttcattacct

SEQ ID NO: 6251 - DNA, 474 bp, Glycine max
  unsure at all n locations
tcagataaaccatagaatctggcgataggtgcagattntttattcatggccagttgggttaccaggttaaccaaggcatctagtttaccttcaagcttcttagtctcacctgatgaattcgtggctatttcatgcactcctctaatgaaaatagcatcacttctggcactaaattgctaggagtttgaagccatcttctcaattaaatttctggcttcagcaggggtcatgtctctaagggctccaccactagaagcatctatcatacttctctccatcttgctaagtccttcataaaaatattggagaagaagctgctctaaaatctggtggtgagggcaaatggcacataatttcttaaatctctcccaatattcatataggctctctccactgagttgtctaatacctgaaatatcctttctgatggtcgtggtcctggaagcatgngaaaagttttctaagaatactctc

SEQ ID NO: 6252 - DNA, 480 bp, Glycine max
  unsure at all n locations
cgcttgcatatcctntgataaaccttcgatagtatctcagtgaggcctaagaaacctcttagctgcttgatattgagtggtgtaggccactctagaactgcctgcaccttagtagcatccatagcaactccttcacctgaaactatatgtcccaagtactctatctccaatacaccaaaagagcatttagacaacttagcaaacaaaacattttctttcaatactttgaatacaacctctagatggcataagtgttcatgccatgtggaactatataccaatatatcatcaaaaaacactaacacatatttccttatagcatgttggaaaatatggttcatgaaacactgaaaagaagtcggagcattggttaaaccagatggcattattgtgcaaaattttgactatgatatggcaaaattgccttattggccagaatttgtttattgttgcagcgaaaatttctttatctgctggtta

SEQ ID NO: 6253 - DNA, 366 bp, Glycine max
  unsure at all n locations
agcttataacaatatatttgtctactcaccttttttttcattttcctactgcaacctctcttcttcactctaatgacagtaaaaaaattgtgacaaactccgtaaaaaaaagtgaaaaatgaagatttgtcatagatgaaaagggataaaaacttgggtggttatgggataaagaaaaagcacggcaagaacgggctttggaaccatttccaaaagctcttcatctaagccataaacgtcacagcattctgcctcatcctctcgaagcccaagcccccaaaggaattgcaaatcacccaaatcattatacaacttcaattctttcgacgatacctttgcactngtcattgccctccttttatactc

SEQ ID NO: 6254 - DNA, 436 bp, Glycine max
  unsure at all n locations
ctaagctgcttctacatggatgacctcctttaaagttcccaacaaaacactcactatcctaagagaaaattgcctaaaattattacacaaaaatggaagtagggtgacctattggaggctcccaacttacttccaatgaaaggcctttttgttacaaaatttgaaagcaaagcaaattgccaattacaaaaagaaagtcctcaattgtggtggctattctctctttagtgtttcactcaattgtggtggctaaaccaatagagttttaacaagaaaaattntcaaggattattcaacaattaaagcaatgaaaagcacacaaaagcaggctaggacccaaagagaaacctagaatggctctagagtagagtagaanaaccaaaaaaaagactgaagaaacctctagttttgacacttttgtttcacaataatttca

SEQ ID NO: 6255 - DNA, 426 bp, Glycine max
  unsure at all n locations
agctntgatgttgttagttgtcatttcaatgtctcatagtgtcatcttgttggaatttgagaagaagatcaataaaatcttggtcctctacttcggctccatcttcttttgcaattntcttcttttcttgatgctctcttatgatgttttctaagaccttgtccacctgcttgtgtaacttcttcaatttggccatctttccagttatgaaatataaaaatggaattgaaggaaacacgtcagcaaggtcaaatcctcccccggattctacgatttttcggatcaaagacacaacaaactcatcttgctccttgtatatgccaccaaatgctaccctggaaatagaggcacatatcaatgagaaaanttgactggtgagattgattggggaacctgctgcttcgcgaatggagttgataaactttg

SEQ ID NO: 6256 - DNA, 486 bp, Glycine max
ctaacactgatgactgtcccaacatagccacagagtatggaatcataagcatagcaactgttctgctcttcaaaaatggagaaaagaaagcgtaattggtgcagttcccaagtccaccttgtccgcagcagtggataaatatgttgatgtctaaaactggaaaggaaaaaaaatgttataataaggaaacgcttgatcataaattatagaccatctttcattttatggttttcaacacttcaaaaaagtactttgttgtatccacatcttttataacattttgtaaagattacattgtataaattcccgatggagggaaatcttcagtccttcttctcttctctgttgttccttctgccatccattgcaattcacttcccattttcgattactgaaccaataatctatcttgcaatgttaatttgaaaccataactccaggtttgtgagtaaattgaaattccaatgtcttcatgggcctttctag

SEQ ID NO: 6257 - DNA, 476 bp, Glycine max
ctaagctatgctgcaacatttatatagacctcctcagcagcaaaaccaactttagcagaataattatgacctttcaagcaatagatacaatccaggttggaggaatcatccaaatttgagatggacaagtcctccacaacaacaacagtctgttcctcctttccaggatgctgctggtccaagcaagccatatgttcctcctccaatacagcagcagtcacaataaagacaacaagagactgaggctcctcctcaaccttacttagaagagttagtgaggcaaatgaccatccacaatatgcaatttcagcaagagacaagagcctccatttagagtctgacatatcatatggggcagatggctactcagatgaaccaagctcagtcccaaaattctgacaaattgtcttcacaaaatgtgcaaaattcgaaaaatgtgagtgccatcaccttgaggtctggcaaccaaattcaag

SEQ ID NO: 6258 - DNA, 427 bp, Glycine max
  unsure at all n locations
agcttactctcttcaggcactactatgtcgtttttatctgttacatttacttcaccagggttgtcgtttatgccttggagactattacctcctatcgttattcttggaccagtgtggttgctgctgagttggccacccttgctttctatttgtttactggctacaagttcaagccagaggctcacaattcgtattttgtcatcgatgacgaagaggaataggctgccgcagaggccttgaagcttgaagatgaatttgaattgtaatttctttcanaatacaaacatagttgttgaacaagttggtaccatgctcagcaatgctctcacgtttcatctcaacagccagtagaaatttgcatgttacattgtatgggtatagtcattattcatgaatcattgtgctatattttgtgttctggactcat

SEQ ID NO: 6259 - DNA, 341 bp, Glycine max
  unsure at all n locations
agctntacaacagatgtcactctattttatattttcaaaggatatgctaacaaggaaacatatgtatattcaccaggaaaacattgttgtggaaggaaattgtcgcgctatgattcaaaagatccttccacccaagcataaagaccctaggagtgtaaccattccttgttcaattggagaagtcactgcgggaaaggctcttattgacctgggagtcaatattaacttaatgccactctccatgtgcaaaaagttgggagagttggggatcatgcccactaagatgactttacaacttgttgacccctccattaccagaccatatggagtaattgaagatg

SEQ ID NO: 6260 - DNA, 465 bp, Glycine max
tggagtggtgaaccacctgattactcaggattgaatgtgtttgtatcactggcctttgctcatgttaaacaaggaaagcttgatgcaagggctgtaaagtgtgtgttcattggctatcctgaaggagttaaagggtacaaactgtggaacctggtgagtcaaaatgtattatcagtagggatgtaacctttgatgagagcagaatggcaatgctgagtaaggatcagaaggataacagctcaagtaatgagagtactaaatttgaggtgaagcatttagagttttttgatcatgtcagtggagatactattgatcacactattcaagcagtaattggtgataatgaagaattggctactaagcatgacttgtccaattatcaattggctagagatagagcaaaaagggtgataaagcctacaaagaggtatggtcatgctgacattatctgctatgccttgaatg

SEQ ID NO: 6261 - DNA, 425 bp, Glycine max
agcttgtcccacttcaatgacatctttcttattgagattatccttaggtggaagcctcattttaacgatccttcaaacaaaaagtataaccttggaggggacattcaactcccaaataaaggagtacttgttgggaataaatatgtatatccaaaatccaatccatcatattatcaattttagtaaaaaattattctttattgtattatcatatatattgcttcattaaattgttaatttgacaagtctttgattaaaattagaggtttgttatcatgataaagaatatgatgataagaaataagtcctttataattttaatctaaattgttcttgatcgtaagattattgtgaataggaaatcaataatccgaatagattaatatatatgtaatgatctctattggataaagaataataaattt

SEQ ID NO: 6262 - DNA, 446 bp, Glycine max
ataagatccctggctttgatgataatataggggtccctagtcttcctgttgtttgaaacagtcatggaaccctcaacctgtgcattgtcaaaatcgaaggcgaagttagggtttttgattgaaactagaggaggaaaaagagaatgagtaacagagtaaggtagttacgaggttgagttcgcaagcaacaccgaactccttgagtgaggatttgaccatgggccaagcttcttggaggtacttttcgcggtactgagggaagagagtggagaaggagctaacttcaagcatgccgccgtcgttccacgaagggtcgaacttgttgatcttccagtggtcgatgtttgggtcgtcgtcccatggctttggcttgtcgtgctttccctttcgcttctccttctgctcaagtgatcgaggttcttcttctacgccattctcctcgtctg

SEQ ID NO: 6263 - DNA, 454 bp, Glycine max
  unsure at all n locations
gtcacctgcggcatgcaagcttagccctagaggggatggaccttttcatgttttggagaggatcaataacaatgcctataggttggacctcccagaagagtatggagtcagcaccacttttaacatttctgatttaactcctnttgtaggtggagctgatattgaggaggaggaactaacagatttgaggtcaaatcctcttcaaggggaaggggatgatgcaatcctccctaggaagggaccaatcactataaccatgagcaagaggctccaagaagattgggctatagctgctgaagaaggccctagggttctcatgaaccttagggtagatntttgagcccatgggccaaggttgggtccaattatctttgtacatattagactaggatgtcattatatgtggtccttgtatttaaggctccatattgtaggtagggtaccctagaaatat

SEQ ID NO: 6264 - DNA, 493 bp, Glycine max
  unsure at all n locations
actaagcttgcaaggaagctagagaganaaagagatataggaagcaatgaatagcatagaatgaattagcttacaaagtgggttattacaattggttatatagttagttataagaacaactaactcacaactaactaaactaactctagctacatagtgattaaccaactaagctaactctagttacaagtggatctacgataagagatcttttcaagctaggaatggacatcagacattccttgcttgaaatacagaatctggaaagtgctaggcattaaagccttagtgtagatatatgctaattggtttgtagaagggataggaaacaacttcacaatgtgctagtcaatctcaacatgctttgtcctttaatgaaacacgggacttgcaactatatgaagagcagatttgttatcacagtacaaggtaggagggtgcagganatcaattgtaaacccagcaaatagttgagccattgtagcttagaagt

SEQ ID NO: 6265 - DNA, 437 bp, Glycine max
  unsure at all n locations
agcttggtccaagtttctcaaacacctgttgtaaccatttgaattcacccttaacccccattatgtatattggggaaatcaatccatcacaaatcaatcaaatacttacaatacagatatgattacgatagtcaaaccagttccgtatttgcacacaactgcaaggaataaacccatttaaccaatgcaatggaatcaaatatggtatgtcatactggcatatataacatgtaagaaaagtttcaggtcaaaatacttaccgattgctacctttatcgtgtttcccaagctgttgcaatacctcaatttctatcatggctgcctctcgatacttctttatcccacggacaatntttatggcaaccatttccttcctttctctgtcccagcactccaagacctgcccaaaagttccttcgcccattntactatggatc

SEQ ID NO: 6266 - DNA, 476 bp, Glycine max
  unsure at all n locations
tcaaaggactctatagggcttgaaacaagctattatgcaatggtttgcaagattatcatcttttcttaagtttgcaagcaatgtgcttttgaccattctttgttcattaagcatggttgcaacacaatttttgttttattggtttatgttgatgatattgtcttgttaggaaatgatttgcctgnaatttagagaattacaaatctactcgacaatgctttcaaaatcaaggacttaggagacctaaggtactttctggggtttaaggtagctagaagctctactggtataaatctttgtcaaagaaagtatgcactatatattttcaatgatgttggcatgcttagttctaagtcagcttccacaccttgtgattataccaccaagttgcatcaacactcatggtcacctcttatcacagaatatgcttnctcctatangagattaatanggagattgatctatcttgaccacac

SEQ ID NO: 6267 - DNA, 428 bp, Glycine max
  unsure at all n locations
agcttgaaattgaacaacggaagccttctatatattcaaatggtcataacttgtcacacggaagtccgattaacgcgcagactatatcgagacgctcgaaattgaacaacgaatgctcttgagaaattcatatggccataacttgtcacacagatgtctgattcaggcgcataatatatcgagacgctcgaaatctaacaacggatgctctcgacaaattcaaatggtcataacttgtcacacggaagtccgattcaggcgcataatatatcgagacgctcgaaattgaacaacgaatgctatcgagaaattcanatggtcataacttgtcacacggaatacagtggagaaattcatatggtcataaacttttgaacggaagtctgattcacgcgcataatatatcgagaagcttgacattgaacaac

SEQ ID NO: 6268 - DNA, 471 bp, Glycine max
tatgtacccaccatggtggctggaaatacaacaatatatattctcttagaagagtggtctgaagaagaaagaagattattgcagcacaatgtataggctaaaaaaatcattacttctgccttacgaatggatgaatattttatggtttcaaattgtaagagtgctaaggatatgtgggacactctacaagttacacatgagggaacaactaatgtcaaaagatctaggataaatactgtaactcatgagtatgaattatttacgatgaagacaaatgaaagtatactacatatgcagaacagattcacacatatagttaatcatcttgcatcattatgaagaacttttctaaatgaggatctcataaataaagtgttaagatgtttaagttgagagtggcaaccagaggttatagccatcacagaatctagagaattgtctattaatgctctcgctactctatttggaaaa

SEQ ID NO: 6269 - DNA, 460 bp, Glycine max
  unsure at all n locations
tagagccaattcaaacgacaataactntttactcggatgtctgattgagactcgtaatataacgagacgctcgaagttaaatgtttaagctttgagccaattcaaacgacaataactttttactcggatgtttgattgagtcctgtcatatatcgagacactcgaaattgaatgttgaagctctgagccaattcaaacgacaataactttttactcggatgtgtgattgagtcccgtcatatatcgagacgctcaaaattgaatgttgaagctctgagccaattcaaacgacaataactttttactcggatgtctgattgagtctcgtaatatatcgagacgctcgaaattgaatgttgaacctctgagcaaattcaaacgacaataactntttactcggatgtctgattgagacccgtaatatatcgagacgctcgaaattgaatgttgaagctctgag

SEQ ID NO: 6270 - DNA, 427 bp, Glycine max
  unsure at all n locations
agctngngcaagatgactaaggcaccatggactgtggccctaagccagaggatatgtgcatgccaccaaagtgtgcctctttggcctgtaagagtaaagttatagacttatgcctggcccggttgaattgggcactgngttatgtatgctggcccatcagcccaacctgttctcaagtgtctgacaccattcatgttcaatttcaattcactttataatttttgcatacgtaatactaataactaatgaagaaagcactcactgcctatcagtttcgtatatacagttggtagttaatggtttaatttactggatattaaatcatgtaatttacaattcaattgatcaatgaagaccattagatcaatgaaactaaaacatatgggatgttcatttggtcttacgaaagatcatttcatttttcgtc

SEQ ID NO: 6271 - DNA, 322 bp, Glycine max
  unsure at all n locations
cactagagagcttctaagtatatgacatgtccaacttgtacgttttatatctaatgtacattctacanaatcagaatctaaaaagcctgttaagtataaggaggtacctctgggataccacaaacctacattggttgtgcccttaagatacttaatgatccttttaacaacagataagtgaaattccttaggatttgattggtatcttgcacataagaaaacactaatcatgatatctaatctacntgtagttaggtagagaagtaatccaatcatacttctgaatcttgattcatgcactattttacctttctcatctaag

SEQ ID NO: 6272 - DNA, 346 bp, Glycine max
cagcttaagctggcaagctgctctaaccaaatattcctccagtgatcaagcattccataccaaaaaacaattcaagtatgagcaccaagccttatcaaaagcagcaagctgagatctgaaggtacaaagcttcatgcatggatgctgagacagactcttcatcagacacttgtattggaccatctagtataatctttatcaacaactcaaacatttggacaaactcttgtgcacatattgctagagaattctcacattctcccattccactgaaaacggcatctggatgacccaatatcatataaccacaaagaacaactctcacaggataccttgataacctaac

SEQ ID NO: 6273 - DNA, 372 bp, Glycine max
  unsure at all n locations
tcgtgtatttcaataatgagatcttgtgctcaagaaagctttatctttccaacccgattctaggagcaagtggacgcctaattacgaatgcccatatgtcgtcaagagaaccttctctggtggtgcactgactcttacgactatggatggagatgagctccctcgttctgtgaatgcggatgcagtcaagaaatactttgtctaaaaataaaacaacagctcggtaagtcataacccgaaagggcggcttatgcanaaatgagcgtctcggtgggtcgaaaacccgaaagggcggcccaggcgaaaattatagacatcatacagaagaataatcagcctgatatgtcgaatacccgaaagggcgatctatgc

SEQ ID NO: 6274 - DNA, 209 bp, Glycine max
atgtgtcgggatgatttctccaaatgtacctgagtaaactttatcagagagaaatcagaaacctctgaagtattcatagagttgagtctaagacttcaaacagagaaagactgagtcatctagagaattacgagtgacctttgctgagaattagagtacagcaggatcactgaattctgcacatctgaatgcatcacacatgaattctc

SEQ ID NO: 6275 - DNA, 312 bp, Glycine max
  unsure at all n locations
cttcttataccaatgtgacgaggagtgtggtggtcagattcataaagaacgaactgattngtcgatgcggactccctatgaagatcattactgacaatggcaccaatctgaacaacaaaatgatgcatgagatgttgccttntgccttgcatggacagggctgtggaggctgataataaatatattaagaagattataaagaagatgacggtgtcatacatagattggcatgagatgttgcctgttgccttgcattgatatcgaacctcggtacatacttctactggggcaacgccatacttctctgtttat

SEQ ID NO: 6276 - DNA, 372 bp, Glycine max
  unsure at all n locations
agttatgaccatttgaatntcttgagagcttctgttgttcaatttcgagcttcttcatatatcatgggccttaatcatacacccgagtcanaagttatggccgtttgaacttggccagagtttttgtgttccatttcaagcgtctcgatacattattggcctgaatcagacatccgagtcattagttatgacagttcgaatntgccaagagcttccatgttcaatttcgagcttctcgatatattatgtgccggaaacgcacattcgagtganaagttatgaccatttgaatntctcgtgagcttccattggtcaatattgtgcgtctcgatatatcataggcctcaatgaaatacccgagtcacaagttat

SEQ ID NO: 6277 - DNA, 291 bp, Glycine max
  unsure at all n locations
gagttttactctctagtaatcgattaccagtttactgtaatcgattaccagtgacaagttntattntcaaanagctntcaactgaatttataatgtttcaatcaatttcaaaatggtgtaatcgattacaatatattggtaatcgattacaagtgtgtctgaacgttgaaattcaaattcaattgtgaagagtcacatcctttcacaaaaatgctgtgtcgtaatcgatacaatgatttggtaatcgactaccagtgataagttttgaatagaagtcaaaagatgtaactc

SEQ ID NO: 6278 - DNA, 199 bp, Glycine max
  unsure at all n locations
tcttcatggatggatntgctcctttgacatctcgtggctctcagcaatacaaggccttgagtgtgccagagctgacacagcatatgtgggattcaaagaacatgatgtgagctgctgaccctcgacatggacgctacctcactgactcagccatgtttagaggcaagatgagcaccaaggaagtctacgaacatatgat

SEQ ID NO: 6279 - DNA, 380 bp, Glycine max
  unsure at all n locations
aactacgtacganagctatctagacatcgcccgtttctaatagctcatcacccttacggaagaatgaaaaaagaatttaatggaagtcaagagcacgaaactgcgcggataccgttaactggtgagcaggtcttccagcggattgaacaccttaatactatattgggacagacccaaaagaaggataaaagtaagagttgcatatggaagaagatgntccatttctttgatcttccgtactggtctgaactagatgttagacattgtattgatggtatgcatgtagagaaaaatgtatgtgacagcgtcattgggacactccttaacattcatggcaagacgaagaatggtctaaatacctgtcaagatctagctgacat

SEQ ID NO: 6280 - DNA, 325 bp, Glycine max
  unsure at all n locations
gttgtatggcttgaaacaagcaccgaggcagtggtacatagaagttaatgagtntatgagcaactcaggattcataagatgtgacatggaccattgctgctatgttaaaaaatatactaatagttatgttatccttgttgtgtatgtngatgacatgttgatngcaggatctagtatggcagaaattaacaggtngaagcagcagttggcagaaaactttgaaatgaatgatcttggtccagcttaacaaatccttggtatgagaattcttagaaacagatcagaanggaatttgaagctgtctcaggagaaatatatacacaag

SEQ ID NO: 6281 - DNA, 310 bp, Glycine max
tctggttgtttctggtgcggagatgatggtacagcgggtgaaccagaagcggaagtttcttttggtgaggtagccatggaaaagcagagcagttggaatgatttcgtaaatttcagaaggctattgtgaaatgctggtgaaaacacgaatgccaagcagatataaatttgaatgaagaatgtagagggtcgtgtgaagcaacggtcgacatttccttggttcagtagtgaacgcgctattaatgttaagtgattcgttcgggcacgttcagattgctgtagttgctataattcctctagcacacaaatgc

SEQ ID NO: 6282 - DNA, 378 bp, Glycine max
  unsure at all n locations
gcttaagctccttcaactgcacaatgctcttaatatttgaagagtatccttgtgtaaccttcacccgacgaagacactgacaaatacttatcttctccttcttggacaaagtatggcaggctggggtgcaagtaaatttcttcccatcagacgttggatgcaactgtgatcgtatacccatatcagttagatctcgacgggtattcaagccatccttcgtcttgccttgaatggtaaggagcgtcccaatcacactatcacaaacatctttctccacatgaataacatcaatacaatgtctaacgtcaagatcacaccagtacggaagatcaaagaaaatggacctcttcttccatatgcaactctgactnttattct

SEQ ID NO: 6283 - DNA, 446 bp, Glycine max
  unsure at all n locations
ttaagtcacctgagctgcagctaagattcttactctttccgagattggatcaaacgattaatcttcttccactggaaggaatcagccagatggtggagtattccatcccaatctatcccatgtgcatgccatgtaagttatgttgcataatctgcattagcaaacaaacgcctaaaccttggaatgatcagaagatactattacacctttgctagggggcctttctttgtgctttcatcactgctgaactcatcatcatccttcactttgtaccatgataccccacacctggggcatntatggagttcttcaaactcatgtctgtgcaatatgcaatcattatagtattcatgtattttttatactccatacccattagacacaatatcttcttcgcctgataataactntntggcaacatgttttcctctggaacacatgctaca

SEQ ID NO: 6284 - DNA, 305 bp, Glycine max
  unsure at all n locations
gcaaataaccaactgataattgccttctttttgtttccttatcaacggaagctgcccagtgtcttcaagcatcaaatcaatacaatgagctgcacaaggagtccaataaatatgttttcttntatccatcaacaacttacccgctaaaacatagttgctcccaatatcagttacaacttgaacaacattctcttctccaacttcctccacaataacatcaagcaactcaaaaaacttttcagctgtctntacaaaatcagaaccatcaacagacttcanaaacatggtaccagcttgagagtaat

SEQ ID NO: 6285 - DNA, 405 bp, Glycine max
  unsure at all n locations
atcttaagtcaccgccgctgcagcttgagtcttcttatctcttcccaaacttattctttcctatgccacccatgtaactngttgcaccaggaactnggagcatccactacaagaagcgaaagtaaagggtaaattgatttgatcaaagctactatagattcagagtattactaagtactaacaaggtagatacatacttgagcaaccttgattgaattatgagtggcaccttccagcacacaaacaaaaaagaaatagtagaagctgtcattatgacatatgcacttccactggtcattntataaagttggcttatgatatntaaatattaaagcaattatatagaatccaatactccggatctaatgcaatacctccaacaatggtgctcacattatatatttt

SEQ ID NO: 6286 - DNA, 299 bp, Glycine max
  unsure at all n locations
gatgtagttggacaagtggcctcaataacttaagaggaggggtcaattaagtcttacaaaatttcccaccaacaaatcttatcccccttttaaattatatatgataggctcagaatgcagaagaataagaagaaacaatccatttaacaatgttctcttacatgcgcaagataaagtaaactgcagtataataactgagataacggaagagagacatgcanactcaatntatactgtgttagccatttcccatacctatgtccagtcctcaagcaacccacttaagattttcactatct

SEQ ID NO: 6287 - DNA, 278 bp, Glycine max
ggatcccatttctaccaactacaaaccctaagaaaactatattatctacacaaaaaagacacttctctatatctgcatagagggtgtttttcctaaagactgaaagaacttgcctgagatgtcctaagtgatcatctatgctcctactgtacactaaaatatcatcataataaacaactacaaatctacctatgaaatcccttaagacatgatgcataagcctcatagaggtgaatggtgcattagtgagcccataaggcatcactagccactcatca

SEQ ID NO: 6288 - DNA, 270 bp, Glycine max
  unsure at all n locations
acctgaactcaggatgtgtctcatgcattttactcaacacctggttcacaccagtttgagaggaacttccaatgagctcttaanaaccgtggatactgcccaacaacatacctgccaacaaaaagatatattattaaaagaaacagaactaaacaagcaaaacacagcaagatggaatgtgtgaataatccttacatgatattactcgcaataaccagcttgttatcttnttcctttgtgatttcacatanggttaataaatcgcgaatg

SEQ ID NO: 6289 - DNA, 160 bp, Glycine max
tttcttcctacccgagactcattggtcgactcatatacctcaataacactcgtcccgacatcgcgtacgcaatacaacagcttatccaatacatgtctagtcccacggatgcccatctgcaagcagcctaccgcatattacaatacctcaagggcacacc

SEQ ID NO: 6290 - DNA, 338 bp, Glycine max
  unsure at all n locations
agcttctagtgggacatcttgacttgctntccaatctgacattcaccacagattctgccttcttctattntcagatagagaatgcctctaacagcacctttgtcaatgattttcttcatgcctcttaagtgcagatgtccaaatctttgatgccatattctgacttcatcttctttggaggatagacatgtggaggagtagctggcttcttggggtgtccataggtaacaattgtgctttgatctgctgcccttcattagaacttcactcttctcatttgtcaccaagcattctgactgtgtgaagtttacattgaatccttcatcacacagctgact

SEQ ID NO: 6291 - DNA, 448 bp, Glycine max
gacactataaatctcagcttggtttaaatttcgagcgtctcgatatattacgggactcaatctgacttccgagtgaaaagttattgtcgttagaattagctgcgagcttcggttttaaatttcgagcgtctcgatatattacgggactcaatcggacttccgagtgaaatgttattgtcgttcgaatttgctacgagcttcggttctaaatttcgagcgtctcgatatgttacgggactcaatcggacttacgagtgaaatgttattgtcgttagcatttgctgtgagcttcggttgtaaaatgcgagcgtctcgatatattacgggactcagtcagacttccgagtgaaatgttattgtcgatagcatttgctgcgagctacggttttaaattttgagcgtcttgatatattacaggactcaatcggactttcgagtgagatgttat

SEQ ID NO: 6292 - DNA, 432 bp, Glycine max
agcttggtagcaaattcgaacaacaataacttttcactcggaagtctgattgagtcgtgtaatatatcgtgacgctcgaattttaaaaccgaagctcgtagcaaattcgaacgacaataacatttcactcggaagtcctattgagtcccgtaatatatcgagacgctcgaattttaaaaccgaagctcgtagcaaattcgaacgacaataacatttcactcggaagtctgattgagtcccgtaatatatcgtgacgctcgaattttaaaaccgaagctcgtagcaaagtcgaacgacaataacatttcactcggaagtccgattgagtcccgtaatatatcgagacgctcgaatttttaaaccgaagctcgtagcaaattcgaacgacaataacaattcactcggaagtctgattgagtcccgtaatatatc

SEQ ID NO: 6293 - DNA, 449 bp, Glycine max
  unsure at all n locations
agcttctaaactntgtacaagaatgaagctctgataccacttgttagacaagtggcctcagatatcttaagaaggggggggttgaattaagatattccaaactgtttcccctaattgaaaatctatttttctttttacttaagttatgaattcccttaatgacaatcttcttaaatattaattcaaatgaagcaacttgaatatgaatataaagcaataataaataaaggagattaagggaagagaaaatgcaaactcagttttatactggttcggccacacccttgtgcctacgtccagtccccaagcaacccgcttgagagttccactaacttgtaaattccttttacaagttctaaacacacaaggacaacccttcctttgtgtttagatatctnttacaacaagagactcacagtctcttaatcccttagagaatgagaagaaga

SEQ ID NO: 6294 - DNA, 439 bp, Glycine max
ccttgctctaaagataagttacagcctgtttattggtcacattatgatggatacgtgaatagggtttaatcatatcccatgttttggtgaacactagacactagataacatcattgagttatcatgtcctatatttgacgcggaccaaatatttataggataggatataaattatgttcaaatgaaaaaaataagatttcaataaaattacatataatttttaaaaatgcaacttttaatttaatttttacaaattataaaaagattacaatttaactaaattatacaaaattatttttaattatgtatgacgtaatttttaaagttatagaaaaaatttatataagatttttaaatttataattattgttcaaataagaaaaatatttgaataagaaatagttagtttttaatggaggttcattctctgtccaatggg

SEQ ID NO: 6295 - DNA, 377 bp, Glycine max
  unsure at all n locations
agctngtaaggtagccataaaggagcttgaatcccaccattcttgatgtggagaagaagtaggtgatgaagatactagttgcaggatcatttatcccatttcagatagcacttgggtttcacctgtccaagtggtccctaagaagtcgagcaccaccgttgtgaagaaccaggataatgagttgatcccgaatagagtggccaatagttgataagtttgaattgattataggagacttaactaggaaaattgtaaggaccacttccctctcccattcattgatcaggttctagagaggtttgtaataccctgagatattataagttataaatcaatgtttaattggatntattgtgttgcttgactatatgatagac

SEQ ID NO: 6296 - DNA, 384 bp, Glycine max
  unsure at all n locations
agcttgtagaagcaaaaggccagctatggtcttcaaggtgtgatttgaaaaggcctatgactcagtctcatgggcttttttggattatatgctgtaaagaatgggtttttgtctcaaatggagacactggatttctgcctctctcaattcagcaaccatttcaattcttgtgaatggcagtcctacaaaggaatttgctcctactagctcctactagaggcttgaggcaaggggaccctttatatcccttactcttcaatatagttggagaaggcatcactggattgatgagggaagcaattcacaagaatttatatcgaagttacatggttggaaagaaaaaggaacccattaatattntgcagtatgcggatgacacagtat

SEQ ID NO: 6297 - DNA, 430 bp, Glycine max
  unsure at all n locations
ctcatcttggtggtgaagctccttcttctttgctcatcttttcctccattaagcatcctctagcttgctttttttgtgcttttcattgctttaattgttgaataatccttggaaatttgtcttgttaaaactctattggtttagttttcatttcatttttttttgtctttggttattgcttgtctctttgtttccttgcttgtgagttgccatatagggaattggaaaggagtattggtgccatatcttgaagaatttgagtaaagaagcaaggggccaaccaccttaagagctattggactaagaagcactccaaattgagtgaaacactaaagagagaatagtcaccacaattgaggacttttttttttgtaattntgtaattgacaatatgttttgctctcaaattttgtaacaaaaaggcctttca

SEQ ID NO: 6298 - DNA, 443 bp, Glycine max
  unsure at all n locations
gnaagctccttccacagcacacagctcttaagatttgtttgtatcctcgcggaaccttcacctgacgaagacactgacaaaaacttatcttctccttcttggacaaagtatggcaggctgggggcaagtaaattttcttcccatcacaccttggatgcaactgtgatcttatacccatatcagctagatcttgacgggtattcaagccatccttcgtcttgccttgaatgttaaggagcatcccaatcacactgtcacaaacatttttctccacatgcataacatcaatacaatgtctaacgtcaagatcacaccagtacggaagatcaaagaaaatggacctcttcttccatatgcaactctgactattatccttcttttgggtcttcccaaatacagtgttcaggtgttgaacccgctgatatacctgctcaccagtcaat

SEQ ID NO: 6299 - DNA, 406 bp, Glycine max
  unsure at all n locations
agcttgctgtcgtcacgggcccgagtcttcttgtctattgggttgacatcatgacccatttaaactttttttttccggtgaagacccatatcaaggttttttaaaaatatattttatgaattaatttaaaattaatggccccgtgacttttaagttattaacacaacactttaaccaactgaactaataagataattgtgttataaaataattaatgtcgttatatataacactaaaatttataatgtatatttaatacacatgcaaatntacataataaaatttaatgcaccaaaattaaatgtcacanaaattattatgtaaatntacatgtgcattatatatacattagaaataaaaaaaaataatttgtaaacatttttaannttttttttaaaatgaatcc

SEQ ID NO: 6300 - DNA, 320 bp, Glycine max
  unsure at all n locations
gtcagcagattcaaacgancaataaattttactcggatgtcttatatatgtcccgaatacatcgagacgctcgaaattgaatgttgaagctctcagcaaattcaaacgacaataactttttactctgatgtctgattgagtcccgtaatatatcgagacgctcgaaattgaatgttgaagctctcagctaattcaaacgacaataactttttactcggatgtctgattaagtcccgtaatacatcgagacgctcgaaattgaatgttgaagctctcagcaaattcaaacgacaataactttttactccgatgtctgaatg

SEQ ID NO: 6301 - DNA, 433 bp, Glycine max
taaacattcaacttcgagcgtctcgatatattacgagtctcatatcatacatccgagaaaaaagttattgtcatttgaatttgctcagaggttcaacattcaatttcgagcgtctcgttatattacaggactcaatcagacattcgagtaaaaagttattgtcgtttgaattagctcagagcttccacattcaatttcgagcgtctcgatatattacgggcctcaatcagacatccgagtaaaacgttattgtcgtttggattggctcagagattcaacattcaatttcgagcgtctcgatatatgacgggactcaatcaaacatccgtgtaaaaagttattgtcgtttgaattggctcagagcttcaacattcaatttcgagcgtctcgatatattacaggactctatcagacatccgagtaaaaagttatt

SEQ ID NO: 6302 - DNA, 431 bp, Glycine max
  unsure at all n locations
agctttgagccaattcaaacgacaataactntttactcggatgtctgattgaggcccgtaatatatcgagacgctcgaaattgaatgttgaagctctgagacaattcaaacgacaataactatttactcggatgtctgattgagtcccgtcatatatcgagacgctcgaaattgaatgttgaagctctgaggaaattcaaacgacaataactttgtaccgagatgtctgattgagtctcgtcacatatcgagacgctcgagaatgaatgttgaagctctgagctaattcaaacgacaataactttctactcggatgtgtgattgagtcctgtcatatatcgagacgctcgaaattgaatgttgaagctctgagccaattcaaacgacaataactctttactcggatgtctgattgaggcccgtaatatatc

SEQ ID NO: 6303 - DNA, 368 bp, Glycine max
attttcaatttcgagcgtctcaatatgttatgtccccgaatcaaacatcagggtgagaagttatgaccatttcaatttttctagagctatcgctgttcaaattcgagcgtctagatatggtatgcacttaaatcggacatccgagtgaaaagttatgaccatttgaatttctcaagagcttctgttgttgaatttcgagcatctcgatatattatgtccccgaatcggacatgcgagagacaagttgtgacaatttgaatttctatagagctttcgttgtgcaatttcaagtgtctcgatatattatgcgcctgaatctgacatccgagtgaagagttatgaccattggaatgtctcgagagctttcg

SEQ ID NO: 6304 - DNA, 141 bp, Glycine max
tctcattccagcctgcatggagatattcaacaacaacatgggcaatgcttccaaccacatagacacagcgaaacgcgaagatgctgcttacttaactgaacatgacctgttgcagataccatatagagcccgctccatgga

SEQ ID NO: 6305 - DNA, 325 bp, Glycine max
  unsure at all n locations
agcttaaacattcaacttcgagcgtctcgatatattacgagtctcaatcagacatccgagtaaanagttatggtcgtttgaattggctcacagcttcaacattcaatttcgagcgtctcgatatatttcgggactcaatcagacatccgagtaaaaagttgttgtcgtttgaattcactcagaggttcaacattcaatnttgagcgtctcgatatatgacgggactcaatcagacatccgagtaaaaagttattgccgtttgaatttgctcagaggttctacattcaatttcgagcgtctcgttatattaaaggactcaatcata

SEQ ID NO: 6306 - DNA, 361 bp, Glycine max
  unsure at all n locations
agcttgtgggtggaggacgcatgaacganactactatttggngctcctaaaaagggttgaggatggatgaatgcactaagcaatcactacgcacggctccaagctccagggtggaggacgcatgaacgaaaaagcaattcatggggctccgaaaaagggttgaggatggagaattgcactaagcaatcactacaaacggctccaaactcgtgggtgaaggacgcatgaacgaaaacgccattcatggggctccgaaaaagggttgaggatggagaatngcactaagcaatcactacgcatggctccaagctcctgtgtggaggacgcatgaacgaaaatgcaattcatggggctcccaaaa

SEQ ID NO: 6307 - DNA, 374 bp, Glycine max
  unsure at all n locations
agcttcttatgtcaaacccaataatgctctttgactgagagtaggcatgaaacttttggactagacagatcaccaagtttaatcttatacagatttccttgtctcttagcctagaagagtgaagagttttccttgttctcaatgatacacatatacttgttaaaagtgacattgtatccactatcacatatattacttatgctaagcaaactatgcttcaaccctttaacaagcaaaacattatctatagaaggataaggaggaatacatactttacctacaccaattatcagacctttctgattccgttcgaaagtgaccaccctactagacatagggcttagggatggaaacatacactnttcacttatcat

SEQ ID NO: 6308 - DNA, 451 bp, Glycine max
  unsure at all n locations
tccttganaagattcctaaagaagctagagcttagctacacacactcactctaatagctaagctcacctccttgagatgagaagctagaacttagctacacccccctataatagctaagctcacccccataacaaaatacatgaaaatacaaaaaaagtccctactacaaagactactcaaaatgtctcgaaatacaaggctaaaaccctatactactagaatggccaaaatacaaggcctaaatgaaggaaaaaaacctattctaatatttacaaagatatgcgggctcatacttagcccatgggctcaaaatctaccctaaggctcatgagaaccctagggccttcccttggatctctggcccgatctacttggagtcttctatccaatgcccttgtggggtaggattgcatcaggagtagaaaatatagagcatacaagaaaaactta

SEQ ID NO: 6309 - DNA, 429 bp, Glycine max
  unsure at all n locations
agctntcaagaatcaagatcaagattcaagactcatgattcaagaatcaagagaagacttaatcaagataagtatgaaaaggttttttcaaaaactgagtagcacatggatttttctcaaaacatgtttaccaaaaagttttgactcattggtaattgattactagattgttgtaatcgattaccagtagcaaaatgaatttgaaaaagttttcaaatgaatttacaatgtttcaattgatttcaaaaagttgtaatcgattgcaatgttntggtaatcgattatcagtgtctttgaacgttgaaattcaaattcaaatgtgaagagtcacatcctttcacataaaagcgttgtgtaatcgattacactgatttggtaatcgaataccagtgattggttctgaataaatcaaaagatgtaactcttcaa

SEQ ID NO: 6310 - DNA, 323 bp, Glycine max
taccacaattcgcacccttctatctgtggctgctattaacgactgtcacttagaacaactagacgtccacgatgctttgcttcatggtgatctgcacgatgaagaatatctggatctgcctcctgcgttcatactgcctgcttcatcttctaatcaagcctgcacattacctaagtacttatacggactagctcatgctaccagacagcggttctcccagctatccaactgctattatctccctaggatacataccttcatctgatgaccgatctatgctcacacaactacataaatctcatttcactgctcttataatctat

SEQ ID NO: 6311 - DNA, 403 bp, Glycine max
ctgcaagcttgaaatcttcatttagcatagtcacagtaagtataaacagcaaatacccccccccccccaaattaaaaggaaaaaaacaacaggaatatttgggtgatagttgatcaaaatgtcaaagccaatacctttagatactgcttgatcttgtctacctcaaggaaagaaaaatctatcttaactacaacagcaagaacattcttgtaggcattgacaaatagtgtggtgcagcagcaagtgttaggtatgagaaagccaatgaaagtgaactaacaatcgagacaccaacaatacaatcagttaaatagtaagaatataaataaattgaaaagtatgcaaatatcactttaccttgtacttagcaacctcctcactaacctccttcagttcacctttg

SEQ ID NO: 6312 - DNA, 454 bp, Glycine max
ctttcagataacctaacctggatattgaatcagagcctgtatactcaccattcttgtcaaacattgcaatcttttggacaggtccaaaggcagagaaaacctgccacagaaaacagagtaaagaaggtatatattatcagctaaagtgtaccattagtcagtaatgtcagaaataagcaactgccactgtgacttaaagtaccatgtgtaagacatccaaggttacagtatactgcatgttctcaatagatgcaagaagaacattactctcggcctccagtctcttcccatccaaacccaccatgggctgcaaaaattaaaaataataagttaagaacacattcctcattgaggaagtcagcatgaatggcaaccccttggtagtaggcacacctcactgatgtgtatgaggtgaatatcaagttacaataagcaattcggagggttccatttg

SEQ ID NO: 6313 - DNA, 482 bp, Glycine max
atcctcttagtcacctgcggcatgcaagcttctttgagaaaacttccttgagaagctagagcttagctacacacacccctctcataactaagctcacctccttgagaagcttccttaagaagattcctaaagaagctagagcttagctacacatacctctctaatagctaagctcacctccttgagatgagaagctagaacttagctacacacccctaataatagctaagctcacccccatgacaaaaaacatgaaaatacaaaaaaaaagtccttacaacaaagactactcaaaatgccccgaaatacaaggctaaaaccctatactactagaatggccaaaatacaaggcccaaccgaaggaaaaacctattctaatatttacaaagataagcgggctcatacttagcccatgggctcaaaatctaccctaaggctcatgagaaccctagggccttcccttgatctctagcccaatctac

SEQ ID NO: 6314 - DNA, 446 bp, Glycine max
  unsure at all n locations
agcttcgatatcttgacttgagcttcaatagattccttggagaaggtatggcaattccttctttccttgggacaatgacttccttgactcacctcgacctctcttttactggattccaggggaagattcctcctcagattgggaatctctcaaatttggtgtatcttgacctgagatatgttgccaacggaacagtaccctctcagatcgggaatctctctaagcttcgatatcttgacttgagctacaatgattttgaaggtatggcaattccttctttcctttgagcaatgacctccttgactcatctcgacctctctcttactgaattctatgggaagactcctcctcagattgggaatctctccaattnggtctaccttgacctcggaggtattctggtttcaaccttctctgttgctgaaatgaaaatgggtataagtatg

SEQ ID NO: 6315 - DNA, 368 bp, Glycine max
  unsure at all n locations
agcttgccttgccccttgatatattttatggtttcatggccactatgaatgacaaattccttgggataaatgtagtgttgccatgttttcaaagcccgtactaaggcatacaactccttatcataagttgaatagctaaaggtaggaccacttaacttttcactaaaataagcaattggatggccttcttgcatcaacacagccccaatcccaacattagaagcatcacactcaanttcaaaagatttttgaaagtttggcaacgcaagtatgggggcattagttagctcttgcttaagaacattgaaagcttcttcttgtttctctccccatatgaaaccaacattnttcttgagcacttcattgag

SEQ ID NO: 6316 - DNA, 457 bp, Glycine max
  unsure at all n locations
actcaagcttagggagttgttctaatagttntctgtgcatgtcttgctgatatagagagagagattaggaaactgagagccagtcagccagagaactaaatgtgtgtaaattgtcatatgatattatctgcagataatgctaatcaatgatattcatctgaccttccatggaactcaaactgttctgtggaaattgaagatttctgcaactctttcccagtcagtttctcccaaatttagactacctctctcttggataatatgttttctggcggccttatgtaaactgtcttgtttggagttctgggcattgcttaccctaaagaaaaactaagcattgcttattgatgtcatgtgctccttgctcatgatttgatcaatgtcccaaaatttctagatcatttgattaaatnttattttcaagtcgctagaagacaatgcaattcttatcatcatt

SEQ ID NO: 6317 - DNA, 403 bp, Glycine max
  unsure at all n locations
actggatgcatatgttaacttggtaacccatctagccttgaaccaaaaatcttgtcctgttgcaagggtctgtggtttgtgctcctctgctgaccaccatatataccttttgccttccatgcagcaacctggaacaattgagcagcccgaagcttatgctgcaaatatttacaataaacctcctcaaccttcgcagcaaaatcaaccacagcagaacaattatgacctcttcagctatagatacaaccctggatggaggaatcaccctaatctccgatggtctagccctcagcaacaacaacagcagcctgctcctttcttncaaaatgtngttgtcccaagcagaccatacattcctncaccaatccaacaacagcaacagccccaaaacaaaccaacagtg

SEQ ID NO: 6318 - DNA, 387 bp, Glycine max
tgcacttatgcatttccttgtgttttctatagacatccagggttggtccatatgctgctgaagatatgattgagatgggtaaggatgctggcaaggagcttctgtctcgggctggacctaacttcttcagtagttagcagcagatgattaaagtgtgatcaggtacacacaggtttcatggtcagctttcggctattgcttcctaagttaattcattctttgacctgttgtaactttagagtagataaaatgttcaattgagtttgggaaagaggacctctcattatggtcaaattgttgtattatgaggatattataatgccaattttttacgtagcttgtataattaccacgatagtggacttttgagaatcacgctaaatacac

SEQ ID NO: 6319 - DNA, 331 bp, Glycine max
agcttgagcaaattctaacgactataactttttacttggatgttcgataaagtcacgtaatatatcgagtcgctcgaaatagaatccagaaggtgtgagaaaattctaacgtcaataactttttactctgatgtccgattgagtcacgtaatatatcgagacgcccgaaattcaattcataaactctgagcaaattctaacgacaataattgtttacttggatgtccaattgagtcccgtgatatttcgagacgctcgaagttgaatacataagctctgagcagattctaacgacaataacattttacttggatgttcgatatagtcacgt

SEQ ID NO: 6320 - DNA, 283 bp, Glycine max
tgaattgctggatataatatatggaaagaaatccatccgatattactactcattactattatgattgaaattaatatttaatttagtatgtgagacttgaataaacataaaatcttaaaaattttagaataaaacatttttacaaattgtttttacatttttcaaataataataatactaatatagacatattataatttagtatttaatttctattctaaaatattaatgtaaaatattataataaataaagcgttactatctaatatcattattattaaaa

SEQ ID NO: 6321 - DNA, 421 bp, Glycine max
  unsure at all n locations
agcttgttagctagatgacttgncatatacattttcttgactagcatcaaatcagagaattaaacctggacatcttttagaaatgcttgctgaattaagacaggcagaaatccagtgtctccatttgggacaaaaacccattctttgcagcatataatccaaaatagcccatgagactgagtcataggccttttcaaaatccaccttgaaaaccatagctggccttttgcttctacaagcttcctcaatcacctcattaagaactagtacgccatgcaggatgtgtctgttttttatgaaagttgtctgcctctcatcaataagaccagatatcacttgtctcaatctatttgctaataacttagctatcaccttgtacatacatccaatcaaggagaatggtctgtagtcatcaaatgac

SEQ ID NO: 6322 - DNA, 291 bp, Glycine max
agccttatgtgtatctcttttgcgagaagaatatcccttcatttctctgacttacctctatgccgaggaaagaactcatcaaaccaaggtcaggcatctcagaggtcttcatcatgtcttctctaaactctatcatcatcttactattgattcccgtgtagataagatcatctacatatagagagagtaagagagtgtactgcccttgagacttgatgtaaagtgtaggctctctcttgctcctcctgaatcctcgatccatgaaatactgatcgattcttctataccatg

SEQ ID NO: 6323 - DNA, 365 bp, Glycine max
  unsure at all n locations
agctntgaaatccntatatctaatccaaggtagatgtttcataaatgggattcctttgcttgtgttgtttgattctggtgccacccattcctttatatcctgtttgtgtgtaggaaaacttaagctttctgtgtcttctttaaataaagatatagtagtagagacccctactagtggttctgtgttaacttctgatgtgtgtttgaattgttctgtggagatttctggtaggatattcttgattgatttgattngtttgcctttgagccagatngatgttattcttggtatggactggttatcttccaaccatgtcttgttgaactgttttgagaaaagtgtggtgtttgatgattctggagtga

SEQ ID NO: 6324 - DNA, 466 bp, Glycine max
  unsure at all n locations
taagctccttcaactgcacaaggctcttaatattngaagagtattcttgtggaaccttcacccgacgaagacactgacaaaaacttatcttctccttcttggacaaagtatggcaggctgggggcaagtaaattttcttcccatcagaccttggatgcaactgtgatcttatacccatatcagctagatcttgacgggtattcaagccatccttcgtcttgccttgaatgttaaggagcgtcccaatcacactgtcacaaacatttttctccacatgcataacatcaatacaatgtctaacgtcaagatcacactagtacggaagatcaaagaaaatggacctcttcttccatatgcaactctgnactttatccttctttggggtcttnccaaatacagtgttcaggtgttgaacctgctgatatacctgctcaccagtgaatggtatcggcacaatatcatgctc

SEQ ID NO: 6325 - DNA, 380 bp, Glycine max
  unsure at all n locations
agctnttacagccattaatcaacaatttaacttatatatgagatcatatttccttttcggaactgtactgatgcaatcctacctcgcaagggcattggctagaagactccaagtagattgggctagagatccaaggaaaggccctagggttctcatgagccttaggatagatttcgagcccatgggctaagtatgagcccgcttatctttgtaaatattagaataggtttttccttcgtctaggccttgtattttggccattctagtagtatagggttttagccttgtatttcggngaattttgagttgtctttgtaataaggacttttttttgtattttcatggtttttgcatggnggtgagcttagctattatagggg

SEQ ID NO: 6326 - DNA, 406 bp, Glycine max
agctcgcacattgctgtttaataaagaaagatttatactggaagccttggtacttcgacatcaaacgatgcatcataaacaaggaatacccgtaggaggcctctgacaacgacaacgaaggttggtggccagcttcttcctgagtgggaatatcctatacaagaggaaccatgacatggcactgcttcgatgtgtggatgccagagaggctaatcaaatgctggtagaggtgtatgaaggatcctttagcacgcatgccaatggacatgccttggcccgaaaaattctgagagtggggtattactggctcactatggagagcgattgttgcatccatgtgaggaaatgccataagttccaggcctttgcttgatatgttaatgctccacccataccctttacggct

SEQ ID NO: 6327 - DNA, 352 bp, Glycine max
  unsure at all n locations
agcttaccaccncagagtgccttggatattaatctgagagcagaagcttccatagaggaagagaatgatggagagggagaaagagagagagtggcgtggaaattgaaggagaatatgaagtgatgcaatcctatcccccaagaagattggaccaaagatgcaagagaaggccctatgattctcataagccttagggtagattttgggcccatgggctaagcataagctcacttatctttgtacatattaaattaagaattcattattttcgggccttgtatttagggctccataatgtatggtcggtaccctactaatgtaggatgtttcagcctttgattttatggcacct

SEQ ID NO: 6328 - DNA, 400 bp, Glycine max
  unsure at all n locations
agcttgtaatcgattacacacatactgtaatttattaccagaagagtttntcagaaaacattctcaacagtcacatctttttgtgtggctcttgaatggctatcataggcctatatatatgtgacttgagacacgaatttgacaagagtttttcagaacaaaaaaggtcttatcctcttataaagagaaatcgttttatcctcttacaaattccttgggcaaattacttgtgattcaataaggtattatttgagtgctcaaattgttcaatctatctcttgcaagagagatttcttcttctcttgttcttcattctgaaaagggattaagagaccgagggtctcttgttgtgaaagaattctaaacacaaaggaaggattgtccttgtgtgtttagaact

SEQ ID NO: 6329 - DNA, 262 bp, Glycine max
ctcagcttatatatatcgatacgctcgaaattaatcatcggaaactctctggaaattcaaatagtcataactattcacacggatgtccgattctgacgcttaatatgtcgagaggctcaaaattgaacaacggaagctcttgagaaattcaactggtattacttttcacaccgatgtcccaatcaagccaattacattttcgagacgcctcaaattgaaccaccgaagctcttgagaaattcaaatggtcataacattttac

SEQ ID NO: 6330 - DNA, 433 bp, Glycine max
  unsure at all n locations
ctgcattcatgcaagctccttactatnggactaattaactttgtttacgggtgcatgatttatttcacaaccaaattaaattgaattccattggtcacgagtcagtaacaacagtacgattaaatcactttatctttggttggtgcggaaggaaaagataagttatacctattgaatgacttgtgtcaataaacccaacttattttctttatgttattttgtttttacataaaatcccaaacgtttttactttcatggagacttataaaaaaatatagaattaaattcaataaatttttacagtcaattttttaatacattctaatatgtgtaccaaaagaaacatgatttcaattaacaaagttttacctttatactaatacattatttaatgaatntaaatttgtaacataattaaagtcattaatgtagt

SEQ ID NO: 6331 - DNA, 459 bp, Glycine max
ctcgtgtatcatacattatatcgatcaatgaggtgcttgagagtatttgtactgcctcgggtttaaaggtaagtattgaaaaatcaagattttatgcattcaagaatgtgtccaataccaagaggggtcaaatagctagcatcattaatttcccctacacctttaatttgggcaagtacctagggttccttatcttcactagccatgtcactaagagggaattcaacttcattctggatcacattcaagtcaaattggcaagctggaagtccaagctcctgagtagggttggcaaggtgactttagctcaattaatattggcctttatcccctcatatgtcatgcaaaactatcttcttttaaagggtactctgcaaagctatcgatactctaataagaaagttcatttggggtagcaactcttctcactttctcgattgagagactatttctaagcct

SEQ ID NO: 6332 - DNA, 413 bp, Glycine max
  unsure at all n locations
ntaagccaattcatacgacaatttctttntactcggatgtctgattgagtcccgtaatataacgaaacgctcgaaattgaatgttgaagctctaaccctattcaaacaacaataacgttttactcggatgtctgattgagtctcgtaatatatcgacacgctcgaaattgaatgttgaagctctaagcctattcaaacaacaataacgttttactcggatgtccgattcagtgacgtaatatatcgagacggtcgaaattgaatgttgaacctatgagccaatttaaacgacaataactttntactcggatgtctgattgagtcccatcatatatcgagacgctcaaaaatgaatggtgaccctctgagccaattcaaacgacaataactttttactcggatgtctgattgag

SEQ ID NO: 6333 - DNA, 316 bp, Glycine max
agcttaagcttcttttctgcacaaggctcttattatttgaagagtatccttgtggaacctttacccgacgaagacactgacaaaaacttatcttcttctttttggacaaagtatggcaagctgggggcaagtcaattttcttcccatcagaccttggatgcaactgtgatcgaatactcatatcagctagatcttgacagatattcaagccatccttcgtattgccttgaatgttaaagagcgtcccaatgacactgtcacaaacatgtttcttcatatgcataacatcaatacaatggctaacgttcagtatgga

SEQ ID NO: 6334 - DNA, 362 bp, Glycine max
tatcttgatgtactaagtcttccaactccatattatcctttatatcactatgtagcccatgtaggaaacaagccatagtagcctctcgatcctccataacattagctctaataatggaaacctccatctccttgtaatactcatcaacacttctactaccttgtgtgagtctttgtagctttttatgaaggtctctttgataatgagaaggaacaaatcttcttttcatcaaccttttcatttcttcccaactatccactaagggttcttcatatcttgccttctctctttgtaattggctccactagatgagagcatagtcagtaagttccatgactgccaccttcatctttttatcctcg

SEQ ID NO: 6335 - DNA, 398 bp, Glycine max
  unsure at all n locations
atcacatgatttattataatcattaatcttattcctacatttcaattgaatattatacttattccatggataacttctataattataaaacaatggtccttgttatacattaattatatacttgatgctagtaaaaaatataacaaaattccactaaaatatttatgtgattaaattaaattctctaatttaattatcaaataaattattgtcttttgtaaatattgaaacactctgtgtgaccatgtaagatcaatataaagtaatcataattaatttatcaatcaaggtaagcatctagcaacactctntagcgtccggatagcatgaattaacatcgtttttctctacgaaccaatagaagaataatctaatatgtcctgccatcatttataact

SEQ ID NO: 6336 - DNA, 451 bp, Glycine max
  unsure at all n locations
tgtataaaagaagcatggttactgctagactacattcaattttaatcctcaatttatgactttatagaacaatactataagacttcatctattttagtatttcctatcaaagtaacacaactagaacattggttgctgcatttntgttggacgtgctcttagtaatgcctattgattgaatatggtcctttgcttcaaattttagtgttttgctcctgcatttctgtttttaacatctttctttgaaatatttatttctgatggttaggcctttgatataatgtctcaatcaagagctgcatcttcttcaaatgttagcaacaatgaaagtaagagtcaaatatttaaagaaaaactattattaccttaagaaaggtccattcacagagttaattcttaattngttattgagtatttaacaaanatattatgacaatntggtctgctcaca

SEQ ID NO: 6337 - DNA, 426 bp, Glycine max
  unsure at all n locations
gacagttataatactaagcttatgcttaactatgtatggcaatacattattactgntgtttattacatacaagtgagcttgtaacaaatcttctagacttggagtgatcacatgcagacctcttgaacccttaccacccactctgtcatcatgccgagactcgggaaggccaacaggtttagccttctcaatgtattctgaataaaattcaatgacttcttctacaatgtacctctcaacaatagatgcttcaggatgatatagattctttgtataccctattaagatcttcatgtatcgctcaactggatacatctatcgcaaataaacaagaccacaacatttgatttctctgtccaaatgcagaatcaagtgaatcatgatgtcaacgaaagcaagggggaaaatacatcntccaactggaac

SEQ ID NO: 6338 - DNA, 462 bp, Glycine max
  unsure at all n locations
catatagatngaatcctagttcctctaaggacttatcataatatctgctggctgatcattagaattaatgaactcagtgataatctccttggacaataatttctctcaaatgaaatgacaatcaatctctatgtgcttagtcctctcatgaaaaatcggatttgaggcaatgtgaagagctgtttgattatcacagtataacttcatttgcaccactttacaaaatctcaattcttggacaaatagtttaatccacataagtncgcatgtaaccatagccataaatcgatattcggctcttgcactggatcgagtaacaacaagttgcttcttgcttttccaagagataatatttcttccaatgaaaacactatccagaggtagatctcctgtccatgggacaaccagcccaatccgcatcacaatatccagaggtagatctcctgtcttcatacaacaatc

SEQ ID NO: 6339 - DNA, 457 bp, Glycine max
tgaccaggaattacttgtatggtttggatgttgaattctggttgttcctggcgcggagatgatggtacagcgggtgaaccagaagcggaagtttcttttggtgaggtagccatggaaaagcagagcgtttggaatgatttcgtaaatttcacaaggctattgggaaatgctggtaaaaacacgaatgccaagcagatataaatttgaatgaggaatgtatagggtcgtgtgaagcaacggtcgaattttccttggttcagtagtgaacgtgctattaatgttaagtgattcgtttgggcacgttcagattgctgtagttgctataattcctctagcacacaaatgcccagcttgcccctcacgttttcaaactgatttgcatccaaagcctttgtgaaaatatctgctatttgttcctcatcgtcaacatgcttcagtgtgatcactctatcatcaa

SEQ ID NO: 6340 - DNA, 392 bp, Glycine max
  unsure at all n locations
tcctcaatttctctcattaagaatcaaagttccatgaagaatatgtctgtctttaatgaaagctgtntgtctttcatcaattaaggcaggtataacctgtctcaacctgcttgctagaagcttagctatcactttgtacatgcagcctatcaaggatattggtctataatcatttanggactgaggatggttaactttggggataagagccaagaaagaggcattgctgcctctatggaaacaactcgtgacatggaactcatccacaaatcttctgaactctggtgttagcacactccagaattcctttataaaattgaaattaaaaccgtccggcccagggcacttatctccaccacaactccacactgctttcttaagctcctggtctg

SEQ ID NO: 6341 - DNA, 282 bp, Glycine max
agatggaccatttcaagtgcttgaaagaatctatgacaatgtttacatttttgagctgcccggtgagtataatgttagttccaccttcaatgtctctgatttatctctttttgatgcagatggagaatccgatttgaggacaaatccttttcaagagggagagaatgatgaggacatgaccaagagcaagggccatgatccacttgaaagacttggacgacctatgacaagggctagagcaaggaaagccaatgaagctcttcaacaagagttagccatact

SEQ ID NO: 6342 - DNA, 462 bp, Glycine max
  unsure at all n locations
cgtggcatctgtgtgcaatacacaatgctcggtacaccacaacaaaatggtgtatcagaaaggtgtaatagaacattaatggatatgattaggagtatgttaatcaatttgactttaatcatatctttgtggatgtatgccttgaaaactgtcatgtatttgttgaataggattcctagtaaggcagttccaaagacacctttgaactgtggacaaataggacacctaatatgaggtacctgcatgtttggggttgccaagcagaaataaggatttataatctgcaagaaagaaaattggatgcaagaacaatcagtggctatttcattagttatccagagaaatcaaaggggtatatgttttattgtcctaatcataatatgagaatngtcgaaactggaaatgcaagaattcattgaaatggtgaaatcagtgggagtacagttccacgagaagtggaaa

SEQ ID NO: 6343 - DNA, 397 bp, Glycine max
  unsure at all n locations
gtcttgtgtggnggtttctgctacaaaaggagagttcaaganatgattagccaatggttgatacatggacggagatgaaaaagatcatgaggaagcggtatgtgccggctagttactcaattgacttgaaattcaagctccaaaaactaacccaaggcaacaagggggttgaggagtatttcaaggaaatggatgtgctcatgattcaagcacatattgaagaagatgaggaggtaactatggctcgatttcttaatggtttgactaatgatatccgcgatattgttgagctgcatgagtttgttgaaatggatgatttgcttcacaaagcaattcaagtggagcaaccatttaaaaagaatggagtggcttagaagagtcttaccaactctggttc

SEQ ID NO: 6344 - DNA, 332 bp, Glycine max
ctcttacgaacaaagaggataggcttacaggctttagtgtccctcacctgagaagtgcttcacaggcagatgctcttccagtcattggagtcaatcttgtagaaagcataatactcctcctttgtgatctcctaaggctctgacatccaaatggccttatgcttgttcaccaacgagcattcatgtgacacttccttgctgaggaaaaaaaaatgtgacacttccttaatcttctttaaattactttcttccttctcgttcgtcttcgcaacatgctccacctaagtacattaaaaaattagatattgaagtcaaagtggtattcaaaaata

SEQ ID NO: 6345 - DNA, 378 bp, Glycine max
  unsure at all n locations
agcttggatatatnttgtgtagtaatgctgtattaaactctgcatctcgcgagcatcactcttaaatatttatgtcttgagctcttcttctccagggtcaataatctcttggtggtccttgttcctggatagtagtagttgaaacttgggtctattgagagggctctatggtacaaaggatcgagctgccaatagggtgcactgcaagtgccagtggcatgtgattaagtggtcattggtgaggccagatgcttgcatgaatgaatgaaccactgttggaccaacgtacctaaagcccctcctcaccatgtctttgcttatgctctctgattttgatgtcttcactgaaatcttcgggccaaacttgtattgagtgga

SEQ ID NO: 6346 - DNA, 446 bp, Glycine max
tcttagtttcagatgatgcagatgggcttgtagctacctcatgcactcctctaatgactatggcatcatttctggcgctaaactgttgggagttggaagccatcttctcaattaaatttttggcttcagcaggagtcatgtctccaagggctccaccactggcagcatctatcatacttctctccatattgttgagtccttcataaaaatattggagaagaagctgctccgaaatctgatggtgagggcaactggcacatagtttcttaaatcgctcccagtactcatacaggctctctccactgagttgtctaatacatgagatatctttcctgatggctatggtcctggaagcagggaaaaaattttctaagaatactctcttaaggtcatcccagctcgtgatggaccttggagcaaggtaatacagccagtcctttgccact

SEQ ID NO: 6347 - DNA, 445 bp, Glycine max
  unsure at all n locations
agaggatgctgaagatgaatcagtggagaggttcttgtgccatggaatgttgtatttgccatcaggattgggaatttgggtgtagtaaggggatgatgagccagggctnggattgtaggaagcacatggacttggatggtaagatgagcaagggcttgctgctgctgatgatccaccaactatctccatgccctctgaaggcttgcatccctaattgtacacaaaatatattttcattaactgatcataatatgtggcatgtaatacgatttccatcaccaaaatcttttcaaatataacaaataaatcatttgtaagacactctaataaactccttcatgttggttccagtaaatatgtggatgtttggtagatttattccaaatcagggaaactcagattaactcaaccaataaaaaaaatgtgttgaaaagaagtaatgcac

SEQ ID NO: 6348 - DNA, 348 bp, Glycine max
  unsure at all n locations
gtacccggccggactgggaagtcatgcangcttcggtggtgcaaccagctgtcgccccaagtcgagcaccgggccttcacaccggaagaggacgagaccattattcgggcccatgcccggtttggtaacaagtgggccaccattgcgcgcctcctctcgggccgcaccgataacgccatcaagaatcactggaactcaaccctaaaacgcaagtgcgcgtccttcatgatggcgggtgatgaagccgtcgccgtgagtccgaggccgctcaagcgatccttcagcgccggcgcggcggtgcctcctcccggaagcccctccggatccgatttcagcgagtccagcgct

SEQ ID NO: 6349 - DNA, 368 bp, Glycine max
  unsure at all n locations
agcttgtaatctatttcacacatactatatattgattaccagaggagtttttcagaanacattctcaacagtcacatcttttcatctgtttcttaaatagccatcaaaggcatatatatatgtgacttgagatacgaatttgacaagagttttgaagaacacaaaggtcttatcctcttaacaagcacaattgttttatcctcttacacattccatggccaaaacacttgtgattcaatagagaattatttgagtgctcaaattgttcaatctatctctttcaagagagataacatcttctcttcttctttattttgaaaagggattacgagaccgatggtctcttgttgtgaaaggattctaaacac

SEQ ID NO: 6350 - DNA, 461 bp, Glycine max
  unsure at all n locations
ntaaggttagatgaaataaaatgtatcccaagcanccatttttttttgttttaataatttgaggtcattaaagtttagatgaccatacctcaagtgctacagtatggactcatccatattctcacatttcaatgcattgttttgcccaaatggcataaatagaggaaatactttattaggagccattttgatagaaataatttggccctttcttttatgaatgatattacatttatcatcatcaaagatgactttataatttttatgaataagttgaccaacacttagaagattttgagtaagacctgncacataaaaaacatcatggatatatnntttgctaccatnttgagttttaacagcaatggtgccttttnctttcaacttttgaacattttcatcaccaagtgtaaactttgaatttattgtctcatctaattgcacaaagcaactttttgttt

SEQ ID NO: 6351 - DNA, 302 bp, Glycine max
tgtgcctcttcacgtctggaatatgaatgtagcatatagatcttaagacccttatgtgctttgctgatggcttcctcccgttccaagcttcaattggagtcttgtcttttacagacttagttggacatctgttgagtatgtaaacagcagtgtagactgctttagcccagaatgtgttaggtacttgagcatcgatctagccatctccataactgtgcgattctttctctcggacactccactttgttgaggaggatatgcgactgtaagttgtcgctcaattccttcatcctcacaaaatc

SEQ ID NO: 6352 - DNA, 424 bp, Glycine max
  unsure at all n locations
ctataaatctcagcttgatacacttcttcatttacgaatctattcagaaaggaactctcggcatcgatttgatacaacttgatgtctttatgtgctgcatatgataagagtattattatggcttcaagcttgctactagtgtaaaggtttcttcatagtcaatcccttcttgttgattgcaccttcagcaactagtctagcctgtntgactacttctccttcttcattgagcttatttttgaacacccatttggtttcaatgactgactgattctttggaggggaacaagattccaaaccttgttcttagtgaattgactacatttctcttccataacaaacacctaagaatctngactcaatgcttcatcaatattcttaggctcaatggttgagaaaagagtcattattcctttttctctta

SEQ ID NO: 6353 - DNA, 434 bp, Glycine max
  unsure at all n locations
ctctaganaaagaagctagtaaccacactagttatttcggctcctaatngnggttaataatntgaattaatgtgtgatgctagtgactatacgataggagcagtattaggacaaaaatggaatggaagatttcatgttatccactatgccagtaaggtgctaaatggagcccagatcaactatgcaacaatggagaaggagatactagcagtgctttatgcccttaaatcaatcatatcatgtaggttcaaagattattgtgcacactgaccatttagctatataatatctactcaccaaagtggattccaagccaagttaattagatgggcccttctactacaagagtttgatctagatatccgagacagaaggggtgtgactgtgacaccctctaccccgacatatacataaataaataaaatatgtaatat

SEQ ID NO: 6354 - DNA, 463 bp, Glycine max
  unsure at all n locations
atctatatatggttanaacaagcttcccgtcagtgttaccttaagtttcatgttataatttcttcatttggttntgatgaaaaccccatggatcaatgcatataccacaaggttagtgggagtaaaatatgctttcttgttttatatgtagatgatattttacttgcagccaatgatcggngtttgctacatgaggtgaaacaatttctctctaagaattttgacatgaaggatatgggtgatgcatcttatgtcatcggcattaagattcatagagatagatctcgaggtattttgggtctatcacaagaaacctatattaacaaaattctagagagatttcggatgaaagattgttcaccaagtgttgctcccattgtgaagggtgatagggttaatttgaaccaatgtccanagaatgactttgagaaggaacanatganaaacattccttatgcttcag

SEQ ID NO: 6355 - DNA, 468 bp, Glycine max
  unsure at all n locations
gagtccacctcgcatgtcatgcaagcttgagtacctgngtagaaacatctggagttgatgagaaggtgcttcaacagctattgcattgtggctattattgttgggatgagctcatacaaagtagtcgttccttagttgtataccttgcccgaaaatacaggggtatgggaatagcattggatgatttacttcaggtttgttccaaatgtcattgctcatgattttatttgtaatttgtgattgtttcttgtgaggacaagtttctgtttgtcttttacctatttgtgcactcatcatatacagttgtaagttatatcgcaaagaacccgagtttcctgattaatagtcgatattttttagagcttacaattaacaacttgtgagagttagaatcacagctaatacttcaaagatatcagtccaatgaaagaaaggtcatgtacagaggcatagcataagttacaacta

SEQ ID NO: 6356 - DNA, 447 bp, Glycine max
  unsure at all n locations
tgtgcattcaatatcctgatgatggtattccatatgttcttttgactggactaatacatttgttgcccaagtttcatggtcttgtaggtgaagatcctcataaacatcttaaggagttccatattgtttgttccaccatgaaaccccctgacgtccaagaagatcatatctttctaaaggtttttcctcattctctagagggagtggcaaaagattggctatactaccttgctcccaggtctattttcagctgggatgaccttaatagggtgttcttggagaaattcttccctgcatctaggaccactgccatcagaaaagatatntcaggcatcangaaacttagtggagaaagctcgtatgagtactgggaaagaatcaagaaatngtgtgcaagctgccctcaccaccagaattctgagcaactccttcttcaatatttctatg

SEQ ID NO: 6357 - DNA, 397 bp, Glycine max
  unsure at all n locations
tgtaagttatatattcaatatattttatatgtgttatttatgtagatgtttatatnttgataaatgaatagttttaggtagtataagataacaattntgtatagtttagtttgaattgttaatgttatatatgccagattattttttgataaatgaatagttttaggtagtataagataataattttgtataatttattttgaattgttaatgttatatatgccagattatattttgataaatgaatagttttaggtagtataagataataattttgtatagtttagtttgaattattaatgttatatggtagattagatttaggtttatatgataaattagtgttgcaacctacccttcngcgggagggcgacacgtgactcgcgggatgcgtgtt

SEQ ID NO: 6358 - DNA, 441 bp, Glycine max
  unsure at all n locations
ntcataatgtccgtggaaaanactgtgctcttatcaacaatgtgtcatttctttgataccgaccgcttaaactactataatgtgactaattcaactaagcttgtaatggagaatgttgaactgtacatgaatgcacgtgtgtctccaacctctttgacctattatggattttgcttgggaaatggaaactacacagtnaaactccattttgcagaaataatgtttactgatgataaaacatatagcagtcatggaaggcgtgtatatgacatctacattcaggttcatatttttatcattttcctaaattggtcaaccacatgtaaattttgatcaaaattggtaaattctctttgggaacttcatgataccaaattcaaatacaacaaccacaacgactacaacgccttatccactatgtggggataccaaattcaatac

SEQ ID NO: 6359 - DNA, 369 bp, Glycine max
  unsure at all n locations
cgcaattaacatgaatggccttcctaatattacaggaatgtttgtatcttcacaaatatccattaccacaaagtctatcgggaagataaaatgtttcactctaaccagcacatcttcaattactccatatggtctggtaatggagcggtcagcaagttggtaagtcatcttagtgggcatgatctccaactctcccaaccttttgcacatggagagtggcattaaattaatactggctcccaggtcaataagagcctttcacacagtgacttctccaattgaacaaggaatagttacactcccanggtcttgatgctggggttgaaggatcttttaatcacaacactacaatatcctttcactatgata

SEQ ID NO: 6360 - DNA, 458 bp, Glycine max
atgaaagggtgagcaagaatggtacgatcattaatatctatagtggagaaaggagagcagttctcataaaaaataacatgtcaagacacttcaatggttcgtgtatggagattgtacacaaggtaacctttcttgtgggatttaaaacccagaaacacacaaggtaaggctctaggatcttgctttgttctgttagcactgagagtgctagtgtaacatagacagcaaacaactcaaagtaaattatatatcatataatgcaaaatagagtttttggtatggtgattcatttttctaaaaaggagtacgaataatgtgtatcaaggtagcagtatgaagtaaagcataggaccaaaatatgtttggaagggtagactgaaacaaaagggctcgagttacattgagtaaatgttgcgattttcgttcaacaatcacattttgttggcgaagttccacac

(The sequence listing continues in the following parts.)
